United States Patent Application Publication US 2019/0348154 A1 - sequence listing, part 11

SEQ ID NO: 41038 - DNA, 1299 bp, Escherichia coli
atgcaagtttcagttgaaaccactcaaggccttggccgccgtgtaacgattactatcgctgctgacagcatcgagaccgctgttaaaagcgagctggtcaacgttgcgaaaaaagtacgtattgacggcttccgcaaaggcaaagtgccaatgaatatcgttgctcagcgttatggcgcgtctgtacgccaggacgttctgggtgacctgatgagccgtaacttcattgacgccatcattaaagaaaaaatcaatccggctggcgcaccgacttatgttccgggcgaatacaagctgggtgaagacttcacctactctgtagagtttgaagtttatccggaagttgaactgcagggtctggaagcgatcgaagttgaaaaaccgatcgttgaagtgaccgacgctgacgttgacggcatgctggatactctgcgtaaacagcaggcgacctggaaagaaaaagacggcgctgttgaagcagaagaccgcgtaaccatcgacttcaccggttctgtagacggcgaagagttcgaaggcggtaaagcgtctgatttcgtactggcgatgggccagggtcgtatgatcccgggctttgaagacggtatcaaaggccacaaagctggcgaagagttcaccatcgacgtgaccttcccggaagaataccacgcagaaaacctgaaaggtaaagcagcgaaattcgctatcaacctgaagaaagttgaagagcgtgaactgccggaactgactgcagaattcatcaaacgtttcggcgttgaagatggttccgtagaaggtctgcgcgctgaagtgcgtaaaaacatggagcgcgagctgaagagcgccatccgtaaccgcgttaagtctcaggcgatcgaaggtctggtaaaagctaacgacatcgatgtaccggctgcgcttattgacagcgaaatcgacgttctgcgtcgccaggctgcacagcgtttcggtggcaacgaaaaacaagctctggaactgccgcgcgaactgttcgaagaacaggctaaacgccgcgtagttgttggcctgctgctgggcgaagttatccgcaccaacgagctgaaagctgacgaagagcgcgtgaaaggcctgatcgaagagatggcttcagcgtacgaagatccgaaagaagttatcgagttctacagcaaaaacaaagaactgatggacaacatgcgcaatgttgctctggaagaacaggctgttgaagctgtactggcgaaagcgaaagtgactgaaaaagaaaccactttcaacgagctgatgaaccagcaggcgtaa

SEQ ID NO: 41039 - DNA, 624 bp, Escherichia coli
atgtcatacagcggcgaacgagataactttgcaccccatatggcgctggtgccgatggtcattgaacagacctcacgtggtgagcgctcttttgatatctattctcgtctacttaaggaacgcgtcatttttctgactggccaggttgaagaccatatggctaacctgattgtggctcagatgctgttcctggaagcagaaaacccagaaaaagatatctatctgtacattaactccccaggcggggtgatcactgccgggatgtctatctatgacaccatgcagtttatcaagcctgatgtcagcaccatctgtatgggccaggcggcctcgatgggcgctttcttgctgaccgcaggggcaaaaggtaaacgtttttgcctgccgaattcgcgcgtgatgattcaccaaccgttgggcggctaccagggccaggcgaccgatatcgaaattcatgcccgtgaaattctgaaagttaaagggcgtatgaatgaacttatggcgcttcatacgggtcaatcattagaacagattgaacgtgataccgagcgcgatcgcttcctttccgcccctgaagcggtggaatacggtctggtcgattcgattctgacccatcgtaattga

SEQ ID NO: 41040 - DNA, 1275 bp, Escherichia coli
atgacagataaacgcaaagatggctcaggcaaattgctgtattgctctttttgcggcaaaagccagcatgaagtgcgcaagctgattgccggtccatccgtgtatatctgcgacgaatgtgttgatttatgtaacgacatcattcgcgaagagattaaagaagttgcaccgcatcgtgaacgcagtgcgctaccgacgccgcatgaaattcgtaaccacctggacgattacgttatcggccaggaacaggcgaaaaaagtgctggcggtcgcggtatacaaccactacaaacgtctgcgcaacggcgataccagcaatggcgtcgagttgggcaaaagtaacattctgctgatcggtccgaccggttccggtaaaacgctgctggctgaaacgctggcgcgcctgctggacgtcccgttcaccatggccgacgcaaccacgctgaccgaagccggttatgtgggcgaagacgttgaaaacatcattcagaagctgttgcaaaagtgcgattacgacgtacagaaagcgcagcgcgggattgtctacatcgatgaaatcgacaagatttctcgtaagtcagacaacccgtctattacccgtgacgtttccggtgaaggcgtacagcaggcactgttgaaactgatcgaaggtacggtagctgctgttccaccgcaaggtggacgtaaacatccgcagcaggaattcttgcaggttgatacctctaagatcctgtttatttgtggcggtgcgtttgccggtctggataaagtgatttcccatcgtgtagaaaccggctccggcattggttttggcgcgacggtaaaagcgaagtccgacaaagcaagcgaaggcgagctgctggcgcaggttgaaccggaagatctgatcaagtttggtcttatccctgagtttattggtcgtctgccggttgtcgcaacgttgaatgaactgagcgaagaagctctgattcagatcctcaaagagccgaaaaacgccctgaccaagcagtatcaggcgctgtttaatctggaaggcgtggatctggaattccgtgacgaggcgctggatgctatcgctaagaaagcgatggcgcgtaaaaccggtgcccgtggcctgcgttccatcgtagaagccgcactgctcgataccatgtacgatctgccgtccatggaagatgtcgaaaaagtggttatcgacgagtcggtaattgatggtcaaagcaaaccgttgctgatttatggcaagccggaagcgcaacaggcatctggtgaataa

SEQ ID NO: 41041 - DNA, 2355 bp, Escherichia coli
atgaatcctgagcgttctgaacgcattgaaatccccgtattgccgctgcgcgatgtggtggtttatccgcacatggtcatccccttatttgtcgggcgggaaaaatctatccgttgtctggaagcggcgatggaccatgataaaaaaattatgctggtcgcgcagaaagaagcttcaacggatgagccgggtgtaaacgatcttttcaccgtcgggaccgtggcctctatattgcagatgctgaaactgcctgacggcaccgtcaaagtgctggtcgaggggttacagcgcgcgcgtatttctgcgctctctgacaatggcgaacacttttctgcgaaggcggagtatctggagtcgccgaccattgatgagcgagaacaggaagtgctggtgcgtactgcaatcagccagttcgaaggctacatcaagctgaacaaaaaaatcccaccagaagtgctgacgtcgttgaatagcatcgacgatccggcgcgtctggcggataccattgctgcacatatgccgctgaaactggctgacaaacagtccgttctggagatgtccgacgttaacgaacgtctggaatatctgatggcaatgatggaatcggaaatcgatctgctgcaggttgagaaacgcattcgcaaccgcgttaaaaagcagatggagaaatcccagcgtgagtactatctgaacgagcaaatgaaagctattcagaaagaactcggtgagatggacgacgcgccggacgaaaacgaagccctgaagcgcaaaatcgacgcggcgaagatgccgaaagaggcaaaagagaaagcggaagcagagttgcagaagctgaaaatgatgtctccgatgtcggcagaagcgaccgtagtgcgtggttatatcgactggatggtacaggtaccgtggaatgcgcgcagcaaggtcaaaaaagacctgcgtcaggcgcaggaaatccttaataccgaccattatggtctggagcgcgtgaaagatcgcatccttgagtatcttgcggttcaaagccgtgtcaacaaaatcaagggaccgatcctttgcctggtagggccgccgggggtaggtaaaacctccctgggtcagtccattgccaaagccaccgggcgtaaatatgtccgtatggcgctgggcggcgtgcgtgatgaagcggaaatccgtggtcaccgccgtacttacatcggttctatgccgggtaaattgatccagaaaatggcgaaagtgggcgttaaaaacccgctgttcctgctcgatgagatcgacaaaatgtcttctgacatgcgtggcgatccggcttccgcactgcttgaagtgctggatccagagcagaacgtggccttcagcgatcactacctggaagtggattacgatctcagcgacgtgatgtttgtcgcgacgtcgaactccatgaacattccggcaccactgctggatcgtatggaagtgattcgcctctccggttataccgaagatgaaaaactgaacatcgccaaacgtcacctgctgccgaagcagattgaacgtaatgcactgaaaaaaggtgagctgaccgtcgacgatagcgccattatcggcattattcgttactacacccgtgaggcgggcgtgcgtggtctggagcgtgaaatctccaagctgtgccgtaaagcggttaagcagttactgctcgataagtcattaaaacatatcgaaattaacggcgacaacctgcatgactaccttggtgttcagcgtttcgactatggtcgcgctgataacgaaaaccgtgtcggtcaggtaaccggtctggcgtggacggaagtgggcggtgacttgctgaccattgaaaccgcatgtgttccgggtaaaggcaaactgacctataccggttcgctcggcgaagtgatgcaggagtctattcaggctgcgttaacggtggttcgcgcgcgtgcggaaaaactggggatcaaccctgatttttacgaaaaacgtgacatccacgtccacgtaccggaaggtgcgacgccgaaagatggtccgagtgccggtattgctatgtgcaccgcgctggtttcttgcctgaccggtaacccggttcgtgccgatgtggcaatgaccggtgagatcactctgcgtggtcaggtactgccgatcggtggtttgaaagaaaaactactggcagcgcatcgcggcgggattaaaacagtgttaattccgttcgaaaataaacgcgatctggaagagattcctgacaacgtaattgccgatctggacattcatcctgtgaagcgcattgaggaagttctgactctggcgctgcaaaatgaaccgtctggcatgcaggttgtgactgcaaaatag

SEQ ID NO: 41042 - DNA, 273 bp, Escherichia coli
gtgaataaatctcaattgatcgacaagattgctgcaggggctgatatctctaaagctgcggctggccgtgcgttagatgctattattgcttccgtaactgaatctctgaaagaaggggatgatgtagcactggtaggttttggtacttttgccgttaaagagcgtgctgcccgtactggccgcaacccgcagaccggtaaagagatcaccatcgctgccgctaaagtaccgagcttccgtgcaggtaaagcactgaaagacgcggtaaactaa

SEQ ID NO: 41043 - DNA, 1872 bp, Escherichia coli
atgatggacagcttacgcacggctgcaaacagtctcgtgctcaagattattttcggtatcattatcgtgtcgttcatattgaccggcgtgagtggttacctgattggcggaggcaataactacgccgcaaaagtgaatgaccaggaaatcagccgtgggcaattcgagaatgccttcaacagcgagcgtaatcgcatgcagcaacagctgggcgatcaatactccgagctggcagcgaacgaaggctatatgaaaaccctgcgtcaacaggtgctgaatcgtctgatcgacgaggcgctgctggatcagtacgcacgtgagctgaaactgggtatcagcgatgagcaggttaaacaggcgattttcgcgaccccagccttccaggttgatggcaaatttgataacagccgctataacggtatcctcaaccagatggggatgaccgccgatcagtacgcccaggcgctgcgtaaccagctcactacccaacagctgattaacggcgttgctggtaccgattttatgctgaaaggtgaaaccgacgagctggcggcactggtcgctcaacaacgcgtggtgcgtgaagcgactatcgatgttaacgcgctggcggcgaagcagcctgtgaccgaacaggaaattgccagctactacgaacaaaacaaaaacaatttcatgacgccggaacaattccgcgtgagttacatcaagctggatgccgcaacgatgcagcaaccggttagcgatgcggatctccagagctactacgatcagcatcaggatcaattcacccagccgcagcgtacccgttacagcatcatccagaccaaaactgaagatgaagcgaaagcggtacttgatgagctgaataaaggcggtgattttgctgcattagccaaagaaaaatctgccgatattatctctgctcgtaacggcggcgatatgggttggttagaagatgccactatcccggatgaactgaaaaatgctggtctgaaagaaaaaggccaactgtctggtgtcatcaaatcttcggtcggtttcctgattgtacgtctggacgacattcagccagcgaaagtgaaatcgttagacgaagtacgtgacgatgtcgcggcgaaagtgaaacacgaaaaagccctcgatgcgtactacgcgctgcagcagaaagtgagcgatgcggcaagcaacgacaccgagtctctggccggtgcagagcaagctgccggcgttaaagccactcagacgggttggttcagcaaagagaacctgccggaagagttgaacttcaagccggttgctgacgctatctttaacggcggtctggtaggtgaaaacggcgcgccgggcatcaactctgacatcatcaccgtagacggcgaccgcgcattcgtgctgcgcatcagcgagcacaaaccggaagcggtgaaaccgttggcagatgttcaggaacaagttaaggcactggttcagcacaacaaagctgaacaacaggcgaaagtggatgctgagaaactgctggttgatttgaaagccggcaaaggtgcggaagctatgcaggctgccggtctgaaatttggcgagccgaaaaccttaagccgttccggtcgtgacccgattagccaggcggcgtttgcactgccactgccagcgaaagacaaaccgagctacggtatggcgaccgatatgcaaggtaatgtggttctgctggcgctggatgaagtgaaacaaggttcaatgccggaagatcagaaaaaagcgatggtgcagggtatcacccagaacaacgcacaaatcgtctttgaagctctgatgagtaacctgcgtaaagaggcgaaaatcaaaattggcgatgcgttggaacagcaataa

SEQ ID NO: 41044 - DNA, 372 bp, Escherichia coli
atgaaacacggaattaaagcactgctcattaccctgtccctggcctgtgccggaatgtctcatagcgcgctggcggcagcttctgtggcgaaaccgacggcggtagaaaccaaagcggaagctcctgcagcacaaaataaagcagcagtaccggcgaaagccagtgacgaagaaggctcccgggtcagcattaataatgccagcgcggaagagctagcccgcgcgatgaatggcgttggcctgaagaaagcgcaagcgattgtcagttatcgcgaagagtacggtccgtttaaaacggtggaggatctaaagcaggtgccggggatgggcaattcgctggtggaacgtaatctggcggtattaaccctgtaa

SEQ ID NO: 41045 - DNA, 399 bp, Escherichia coli
atgcaaacacaaatcaaagttcgtggatatcatctcgacgtttaccagcacgtaaacaacgcccgctaccttgaatttctcgaagaagcccgctgggatgggttggaaaatagcgacagttttcactggatgacggcccataacatcgctttcgtggtggtgaatatcaatattaactatcgtcgtccggcggtattaagcgacttgttaaccattacgagccagttacagcaattaaacggtaaaagcggcatcttaagccaggtcattacactggagccggaagggcaggtggtagcggatgcgcttattacgtttgtttgtattgatcttaaaacgcagaaagcattagctctggaaggggaattgcgcgaaaagctggagcagatggttaagtaa

SEQ ID NO: 41046 - DNA, 696 bp, Escherichia coli
atgaaacgtgctgtcgttgtgttcagtggaggccaggattccaccacctgtctggtgcaggcattacaacaatatgatgaagtccattgcgtgacgttcgattacggtcagcgccatcgcgcagaaatcgacgtggcacgcgaactggcgctgaaactgggggcacgcgcgcataaggttcttgatgtaacgctgctcaacgagctggcggtcagcagcctgacgcgtgacagcattccggtgcctgattatgaacctgaagccgatggcatcccgaatacgtttgtcccagggcgtaatattttgttcctgacgctggcggcaatatatgcgtatcaggtaaaagcagaagccgtaattaccggcgtctgcgaaacggatttctccggctacccggattgccgcgatgagtttgtgaaagtactaaaccatgccgtcagtttgggcatggcgaaagatattcgttttgaaacgccgctgatgtggattgataaagcggaaacctgggcgctggcagattattacggcaaactggatttagtccgtaacgaaacgttgacctgctataacggcattaaaggcgacggttgcggtcattgtgcggcatgtaatttacgcgccaacggtttgaatcattatctggccgataaaccgacggtgatggcagcgatgaagcagaaaaccgggttgaagtaa

SEQ ID NO: 41047 - DNA, 1701 bp, Escherichia coli
atgcgactgctcaaccgccttaaccagtatcaacgtctgtggcaaccttccgccggaaagccgcaaaccgtcaccgtcagcgaactggccgaacgctgtttttgcagcgaacgccatgttcgtacgctgttgcgtcaggcacaggaagcgggatggctggagtggcaggcgcagtcaggacgcggaaagcgcggacaattacgctttctggtcacgccagaatcgctacgcaatgcgatgatggaaaaggcactggaaaccggaaagcagcaagatgtgctggagctggcgcaactggccccaggtgagctgcgcactctgttacagccgtttatgggcggacaatggcaaaacgatacacccacgttgcgtattccctactatcgcccgctcgaaccgctacaaccgggctttttgcccggccgtgccgagcagcatctcgccggacagatattttccggcctgacccgcttcgataataatacccagcgcccgattggcgatttagcgcatcactgggaaacctctgctgacgggttacgctgggacttttatcttcgttcaaccctacactggcataacggcgatgcagtaaaagcctcacacttacaccagcgattattgatgctgttacaactgccagcactggatcaattatttattagcgtgaagcgtattgaggtcacccatccgcagtgtctgaccttctttttacatcgccccgattactggcttgcgcaccggctggcgagctattgcagccatctggcgcatccgcaattcccactgattggcacgggtccttttcgcttaacacaattcacagctgaactggtgcgcctggaaagccatgattattaccatttacgtcatccgctgcttaaagcggttgagtactggataactccgccgcttttcgaaaaagatttgggaaccagttgtcggcatcccgtgcaaatcaccatcggcaaaccggaggagctgcaacgggtcagccaggtcagtagtggcatcagtttaggtttttgctatttaacgttgcgcaaaagtccccgactctccctctggcaggcgcgaaaagtgatctccattattcatcaatccggtttattacaaacgttagaagtcggagaaaacctgatcaccgccagtcatgcattactgccaggctggactattccgcattggcaagtaccggatgaagtcaaactaccgaaaaccttgacgctggtttatcacctcccgatagaacttcataccatggcagaacgcctacaggcgacactggcagcggaaggctgtgaactcacaattatttttcataacgcaaaaaactgggacgacacgaccctactggcacacgcagacctcatgatgggcgacagattaattggcgaagcaccggaatatactctggagcaatggctgcgctgcgatccgctgtggccacatgttttcgacgctccagcatacgcacatctacaatcgacactggacgcggtgcaagtaatgcctgatgaggaaaaccgatttaatgccctgaaagcggtttttagccagttaatgacagatgcgacgctgacgccgctgttcaactatcactatcgcattagtgcccctcccggcgtgaacggtgtgcgactgacaccgcgcggctggtttgaatttaccgaagcctggcttcccgcgccgtcgcaatga

SEQ ID NO: 41048 - DNA, 819 bp, Escherichia coli
atggctcgtctggcagcatttgatatggatggcactttattgatgcctgaccatcatttaggtgagaaaaccctctctactttggcgcgactgcgtgaacgcgacattaccctcacttttgccacggggcgtcatgcgctggagatgcagcatattctcggggcgatatcgctggatgcgtatttgattaccggcaacggaacgcgcgtgcattctctggaaggtgaacttttacatcgtgatgatttacctgcggatgtcgcggagctggtgctgtatcagcaatgggatacccgagccagcatgcatattttcaatgacgacggttggtttaccgggaaagagatccctgcgttgttgcaggcatttgtctatagcggttttcgttatcaaataatcgatgtcaaaaaaatgccactcggcagcgtcaccaagatctgcttctgtggcgatcacgacgatcttacacgtttgcagatccagctacacgaagcattaggcgagcgtgcacatttgtgtttttccgccacggattgccttgaagtgctgccggtgggctgcaataaaggcgctgcactgacggtgctgacccaacatttaggtttatcgttgcgcgattgcatggcctttggtgatgcgatgaacgatcgcgaaatgttaggcagcgtcggtagcggatttattatgggcaatgcgatgccgcaactgcgcgcggagctcccgcatttaccggtgattggacattgccgaaatcaggctgtctctcactatttgacgcactggctggactatccacatctaccttattcccccgaataa

SEQ ID NO: 41049 - DNA, 459 bp, Escherichia coli
atgttagataaaattgaccgtaagctgctggccttactacagcaggattgcaccctctctttgcaggcactggctgaagccgttaatctgacaaccaccccctgctggaagcgcctgaaacggctggaggacgacggtatccttatcggcaaagtcgccctgctggatccggaaaaaataggcctcggcctgaccgcctttgtgctgataaaaacgcaacatcacagcagcgaatggtattgccgctttgtcacggtggttaccgaaatgccagaagtgctggggttctggcgcatggctggtgaatacgattatctgatgcgcgtccaggttgccgacatgaaacgctacgacgagttttataagcgtctggtaaacagcgtgccggggctgtcggacgtcacttccagcttcgcgatggaacagattaaatacaccacttctttacccatcgaataa

SEQ ID NO: 41050 - DNA, 1773 bp, Escherichia coli
gtgcgattatttgctcaattaagctggtatttccgtcgggaatggcgtcgctatctcggggctgtcgccttgcttgtcattatcgcgatgctgcaactggttccaccaaaagtggttggtattgttgtcgatggcgtgacagaacaacactttactaccgggcagatcctgatgtggatcgccaccatggtgctgattgccgttgtggtttatctcctgcgttacgtctggcgcgtattgctgtttggtgcgtcttatcaactggctgttgaactgcgtgaagattattaccgtcagctaagccggcagcatcctgagttttacctgcgtcatcgcacgggtgacctcatggctcgtgcgactaatgacgtcgatcgcgtcgtgtttgccgccggagaaggggtgctgacgctggtggattcactggtaatgggctgcgctgtgttgattatgatgtctacgcaaattagctggcagttgaccttatttgccctgttaccgatgccagtgatggcgatcatgattaagcgcaacggcgatgctttgcatgaacgctttaagctggcacaggcggcgttttccagtcttaatgaccgcacccaggaaagcctcaccagtatccgcatgatcaaagcctttggtctggaagatcgccagtcggcgttatttgccgcggatgccgaagataccggcaaaaaaaacatgcgggtggcgcgtattgatgctcgtttcgacccgaccatctatatcgcgattggtatggcgaacttgctggcgattggcggcggtagttggatggtggtgcagggcagtttaacgctgggccagctcaccagttttatgatgtatttaggtctgatgatttggccaatgctggcgctggcatggatgtttaacattgtggaacgtggtagtgctgcgtacagccgtattcgcgcgatgctggcggaagcgccggtggtgaacgatggtagcgaacccgtgccggaagggcgtggcgaactggatgtaaatattcaccagttcacgtatccgcagactgaccatcctgcgctggaaaacgtcaatttcgccctgaaacccggtcagatgctgggtatctgcgggccgactggttccggcaaaagtaccctgttgtcgctcattcagcgtcatttcgacgtcagcgagggggatattcgctttcatgatattcctctgacgaagttacaactcgatagctggcgtagccgcctggcggtagttagccagacgccattccttttttctgacaccgtggcgaataacatcgcgctgggttgcccgaatgccacccagcaagagattgagcatgtcgcgcggttagccagcgtacatgacgatattttgcgtctaccgcaaggttacgatacagaggtgggcgagcgcggtgtgatgctttccggcgggcaaaaacagcgtatctccattgctcgtgcgttattagtcaacgcggaaatcctcatccttgatgatgcgctttcggcggtggacggacgcactgagcaccagatcctgcataacctgcgtcagtgggggcagggaagaacggtaatcatcagtgcccatcgcctttctgcactgacggaagccagtgaaattattgtgatgcagcacggacatatcgcccagcgtggcaatcatgatgtgctggcacaacaaagcggctggtatcgcgatatgtatcgctatcaacaactggaggcggcgctcgacgacgctccggaaaatcgcgaggaggccgtcgatgcgtag

SEQ ID NO: 41051 - DNA, 1782 bp, Escherichia coli
atgcgtagttttagccaactgtggccgactctcaagcgcctgttagcgtacggttcaccgtggcgtaaaccgctggggattgcggtcctgatgatgtgggttgcggcggcggcagaagtcagtgggccgctgcttatcagctattttatcgacaatatggtagcgaaaaataacctgccgttgaaagtggttgcagggctggctgcggcgtatgttgggctgcaactgtttgccgccgggctacattacgcgcagtcgctgctgtttaatcgggcggcagtaggcgtagtgcaacagttgcgtaccgacgtgatggatgctgcgttacgccagccattaagcgagtttgatacccaacccgtcgggcaggtgatttcccgcgtcactaatgacactgaagtgatccgcgatctctacgttaccgtagtggcaactgtcctgcgcagtgccgcactggtgggcgcgatgctggtggcgatgttcagcctcgactggcgaatggcgctggtggcgataatgattttcccggtggtgctggtggtaatggtgatataccagcgttacagcacgccaattgtccgtcgtgtgcgcgcctatctggcggatatcaacgacggctttaacgaaatcatcaatggcatgagcgttatccagcagtttcgtcagcaggcgcgatttggcgaacgtatgggtgaggccagtcgttcacactatatggcgaggatgcaaaccctgcgcctcgacggttttctgctgcgtccgctgctgagtctgttttcatcgctcattctctgtggcttgttgatgctgtttggcttctccgccagcggcaccattgaagtgggcgtgttgtatgcgtttatcagctatcttgggcgacttaacgaacccttaatcgaactgaccacgcagcaggcgatgctgcaacaggctgttgttgctggtgagcgcgtgtttgagctgatggacggaccgcgccagcaatatggcaatgatgatcgcccgttacagagtggcaccatcgaagtcgataacgtgtcatttgcttatcgcgatgacaatctggtgctaaagaacattaatctctctgtgccttcgcgtaactttgtggcgctggtcgggcataccggcagtggtaaaagtaccctcgccagtttattgatgggctattacccgctaacggaaggtgagattcgccttgatggtcgtccattaagttcgctaagtcacagcgcgctgcgccagggcgtggcaatggtgcagcaagatccggtggtgctggcggataccttcctcgccaacgtgacgctggggcgggatatctccgaagaacgcgtctggcaggcgctggaaaccgtgcaactggcggagctggcacgcagtatgagcgacgggatttatacgccgctgggcgagcaggggaataatctctctgtcgggcaaaagcaactgctggcactggcgcgcgtgctggtcgagacgccgcaaatcctgatccttgatgaggcaaccgccagcattgactccggtactgaacaggcgattcaacatgctctggcggcggtgcgtgaacataccacgctggtagtgattgctcaccgcttatcgactattgttgatgccgacactattctggtgcttcatcgtgggcaagccgtggagcagggcactcaccagcaactgctggcggcccagggacgctactggcagatgtatcaactgcaacttgcgggcgaagagcttgcagccagcgtgcgtgaagaagaatcattgagcgcctga

SEQ ID NO: 41052 - DNA, 339 bp, Escherichia coli
atgaagctggtgaccgtgataatcaaaccattcaagctggaagacgttcgtgaagcgttatcttccattggtattcagggcctgaccgtcaccgaagtgaaaggtttcgggcgtcagaaagggcatgccgagctgtaccggggggcggaatacagcgtcaacttcctgccaaaagtaaaaattgatgtggcgattgctgatgaccaactcgatgaagtgatcgatatcgtcagtaaggcggcttacaccggaaaaattggcgacggcaaaatcttcgtcgctgaattgcaacgcgtcattcgtattcgtaccggcgaagccgacgaagcggcgctgtaa

SEQ ID NO: 41053 - DNA, 1287 bp, Escherichia coli
atgaagatagcgacgataaaaactgggcttgcttcactggcgatgctgccgggactggtaatggctgcacctgcggtggccgataaagccgacaatgcgtttatgatgatttgtactgcactggtgctgtttatgactattccggggattgccctgttttacggtgggttgattcgcggcaaaaacgtgctgtcgatgctgacgcaggtgacggtgacgtttgcactggtctgtattctctgggtggtttacggttactcgctggcgtttggtgagggcaacaacttcttcggcaacattaactggttgatgctgaaaaacatcgaactgacggcggtgatgggcagcatttatcagtatatccacgtagcgtttcagggatcgtttgcctgcattaccgtaggcttgatagttggggcgctggcggaacgaatccgcttctcagctgtgttgattttcgtggtggtatggctgacgctctcttacattcctattgcgcatatggtgtggggcggtggtttgctggcttctcacggtgcgctggatttcgcgggtggcacggtggtgcatattaacgccgcaatcgccggtctggtgggcgcgtatctgataggcaaacgcgtgggcttcggtaaagaggcgtttaaaccgcacaacctgccgatggtcttcaccgggactgccattctctatatcggttggtttggctttaacgccgggtcagcgggcacggcgaatgaaatcgcggcactggcatttgtgaatactgtggtcgcaacggcggcggcaattcttggctggatcttcggtgaatgggcgctgcgtggtaagccttcactgctgggagcgtgttctggcgcgattgccggtctggtcggcgtgacgccagcgtgtggctacattggtgttggcggcgcgttgattatcggcgtggtagctggtctggcgggcttgtggggcgttaccatgctcaaacgcttgctgcgggtggatgatccctgcgatgtcttcggtgtgcacggcgtttgtggcattgtcggctgtatcatgactgggatttttgccgccagctcgctgggcggcgtgggcttcgctgaaggtgtgacgatgggccatcagttgctggtacagttggaaagcattgccattacgattgtgtggtctggtgtggtggcatttatcggctacaaactggcggatctgacggttggtctgcgtgtgccggaagaacaagagcgagaagggctggacgtcaacagtcacggcgagaatgcctataacgcataa

SEQ ID NO: 41054 - DNA, 861 bp, Escherichia coli
atgagtcaggcgctaaaaaatttactgacattgttaaatctggaaaaaattgaggaaggactctttcgcggccagagtgaagatttaggtttacgccaggtatttggcggccaggtcgtgggtcaggccttgtatgctgcaaaagagaccgtccctgaagagcggctggtacattcgtttcacagctactttcttcgccctggcgatagtaagaagccgattatttatgatgtcgaaacgctgcgtgacggtaacagcttcagcgcccgccgggttgctgctattcaaaacggcaaaccgattttttatatgacggcctctttccaggcaccagaagcgggtttcgaacatcaaaaaacaatgccgtccgcgccagcgcctgatggcctgccttcggaaacgcaaatcgcccaatcgctggcgcacctgctgccgccagtgcttaaagataaattcatctgcgatcgtccgctggaagtccgtccggtggagtttcataacccactgaaaggtcacgtcgcagaaccacatcgtcaggtgtggatccgcgcaaatggtagcgtgccggatgacctgcgcgttcatcagtatctgctcggttacgcttctgatcttaacttcctgccggtagctctacagccgcacggtatcggttttctcgaaccggggattcagattgccaccattgaccattccatgtggttccatcgcccgtttaatttgaatgaatggctgctgtatagcgtggagagcacctcggcgtccagcgcacgtggctttgtgcgcggtgagttttatacccaggacggcgtactggttgcctcgaccgttcaggaaggggtgatgcgtaatcacaattaa

SEQ ID NO: 41055 - DNA, 573 bp, Escherichia coli
atgaaactcgtgcacatggccagtggtttagcggttgcgattgcgttggcggcttgcgcagataaaagcgcggatattcagacgccagccccggctgcaaatacgtctatttcagcaacacaacaacctgctatccagcaaccgaatgtctccggtaccgtctggatccgtcagaaagtcgcactgccgcctgatgctgtgctgaccgtgacactttctgacgcgtcgttagccgatgcaccgtcaaaagtgctggcgcagaaagcggtgcgtactgaaggtaaacagtcaccattcagctttgttctgccatttaacccggcagatgttcagccgaacgcgcgtattctgttgagtgcggcgattaccgtgaatgacaaactggtatttattaccgataccgttcagccggtgatcaaccaggggggaaccaaagccgacctgacattggttccggttcagcaaaccgccgtgcctgtccaggccagtggtggcgcaacaactaccgtaccatcgacttcaccgacccaggtgaatccatcttcggcagttcctgcccctacgcaatactaa

SEQ ID NO: 41056 - DNA, 312 bp, Escherichia coli
atggaaaaagaagattcatttccccaacgcgtctggcaaatcgtagccgctattcccgaagggtatgtcaccacttacggtgatgtggcgaaactggcgggatcgccccgcgccgcgcgccaggttggcggtgtgttaaagcgtctccccgaaggcagcaccttgccctggcaccgggtggttaatcgccacggcaccatttcgctaaccggaccggatttacagcgtcaacgacaggcattactggcagaaggtgtgatggtatcgggaagcgggcaaatcgacttacagcgctatcgctggaactactaa

SEQ ID NO: 41057 - DNA, 354 bp, Escherichia coli
atgaagtatgttgatggttttgtggttgccgttcctgccgataaaaaggatgcctatcgggaaatggccgctaaggccgcgccattgtttaaagagtttggcgcgcttcgtattgtcgaatgctgggccagcgatgtaccggatggcaaagtgaccgattttcgtatggcggtgaaagcggaagagaatgaagaggttgtctttagctggattgaatacccttcaaaagaggtccgcgacgcagctaatcaaaagatgatgtcggacccacggatgaaagagttcggcgagtccatgccgtttgacggcaagcgaatgatctatggcggattcgagtcaatcatcgacgaatag

SEQ ID NO: 41058 - DNA, 1551 bp, Escherichia coli
gtgagaacacgacatctggtcggccttatttcgggagtactgattctttcagtattgctgcctgtcggcttaagcatctggctggcccatcagcaggtagaaacatcgtttattgaagagctggatacctattcctcccgcgtcgctattcgggccaataaggtggcgacacaagggaaagatgcgctgcaagagctggaaagatggcaaggcgctgactgtagtgaagcccatctcatggaaatgcgtcgggtatcttacagttatcgctatattcaggaagtggtttatatcgataacaacgttccccagtgttcgtctctggagcatgaaagtccgcccgataccttccccgagccaggtaaaatttcgaaagatggttatcgtgtctggttaacatcacataacgatttaggcattatccgttacatggtcgccatgggaacggcacattatgtcgtcatgatcgaccccgcttcctttattgatgtcattccctatagctcatggcaaattgatgccgccattattggcaatgcccataacgttgtcataaccagcagcgatgaaattgctcagggaattattaccaggctacaaaaaacacccggtgagcatatcgaaaataatggaatcatttacgatatcctgcccttcccggagatgaatatttcaattatcacctgggcttcatcgaaaatgttgcagaaaggctggcatcggcaagtctttatttggttaccgctcgggttggtgattggcctgctggcagcgatgtttgtgctgcgcattttgcgccgcatccagtcaccgcatcatcggctgcaggatgctatcgaaaatcgtgatatttgcgtgcactatcagccgattgtctccttagccaatggcaaaattgtcggtgctgaggcactggcgcgctggccgcagacagacggtagttggttgtcaccagatagttttattccgctggcacagcaaacgggcctttctgagccattgacgctactgattataagaagcgtctttgaagatatgggcgactggctgcgtcagcatccacagcagcatatttcgatcaatcttgaatccaccgtgctcacctcggaaaaaatcccgcaattgctgcgtgaaatgatcaatcactatcaggttaatcccagacagatcgcgcttgaactcactgaacgcgagtttgccgatccgaaaaccagcgccccgataatttctcgctaccgggaggcgggccatgaaatttatcttgatgattttggtacggggtattcaagtttaagttatttacaggatctggatgtcgacattctgaagatcgataaatctttcgttgatgcgctggaatataaaaatgtcacgccgcatatcatcgaaatggcaaaaacactgaaactgaaaatggtagcggagggaatcgaaaccagtaaacaagaagagtggctacgccagcatggcgtgcactacggtcagggctggctctacagcaaggcattaccgaaagaagatttcttacgctgggccgagcaacatttgtga

SEQ ID NO: 41059 - DNA, 471 bp, Escherichia coli
atgaccgaaatacaacgcctgctgaccgaaacgattgagtctctgaatacccgcgaaaaacgcgacaacaaaccccgctttagtatcagttttatccgtaaacatccggggctgtttatcggtatgtacgttgctttttttgccaccctggcggtgatgttgcagtccgaaacgctttcaggctctgtctggctactggttgtattatttatcctgcttaatggtttcttctttttcgatgtctacccacgctaccgctatgaagatatcgacgtgttggatttccgcgtttgctataacggcgaatggtacaacacgcgctttgtacctgccgcgctggttgaagccatcttgaactctccgcgtgtcgcggatgttcataaggaacaactgcaaaaaatgatcgtccgtaaaggtgaattgtctttttacgatatttttaccctcgctcgcgccgaatcaacatcttaa

SEQ ID NO: 41060 - DNA, 552 bp, Escherichia coli
atgagcacagaaaaagaaaagatgattgctggtgagttgtatcgctcggcagatgagacgttatctcgcgatcgcctgcgcgctcgtcagcttattcaccgatacaatcattccctggcggaagagcacacattacgccagcaaattctcgctgatctattcggtcaggtgacagaggcttatattgagccaacgtttcgctgtgactatggctataacatttttctcggtaataattttttcgccaacttcgattgcgtgatgcttgatgtctgccctattcgcatcggtgataactgtatgttggcactaggcgttcatatctacacggcaacacatcccatcgaccctgtagcacgtaatagcggtgctgaactggggaaacccgtcaccatcggtaataacgtctggattggcggacgcgcggtcattaaccctggtgtgaccattggtgataacgtcgtggtagcctcaggtgcagttgtcacaaaagatgtcccggacaacgttgtcgtgggcggtaatccagccagaataattaaaaaattgtaa

SEQ ID NO: 41061 - DNA, 219 bp, Escherichia coli
atgtccgaaaaacctttaacgaaaaccgattatttaatgcgtttacgtcgttgccagacaattgacacgctggagcgtgttatcgagaaaaataaatacgaattatcagataatgaactggcggtattttactcagccgcagatcaccgcctcgccgaattgaccatgaataaactgtacgacaagatcccttcctcagtatggaaatttattcgctaa

SEQ ID NO: 41062 - DNA, 375 bp, Escherichia coli
atggatgaatactcacccaaaagacatgatatcgcacagcttaagtttctctgtgaaactctgtatcatgactgccttgcaaaccttgaagaaagcaatcatggctgggttaacgacccaacctcggcgatcaacctccagttgaatgaactgattgagcatattgcgaccttcgcacttaattacaaaattaagtataatgaagacaataagctcattgagcagatcgacgaatatctggatgacacctttatgttgttcagtagttatggtattaatatgcaggatcttcagaaatggcggaagtcaggtaatcgactattccgttgttttgtcaatgcgacgaaagagaatcctgcgagtttatcttgttag

SEQ ID NO: 41063 - DNA, 3150 bp, Escherichia coli
atgcctaatttctttatcgatcgcccgatttttgcgtgggtgatcgccattatcatcatgttggcaggggggctggcgatcctcaaactgccggtggcgcaatatcctacgattgcaccgccggcagtaacgatctccgcctcctaccccggcgctgatgcgaaaacagtgcaggacacggtgacacaggttatcgaacagaatatgaacggtatcgataacctgatgtacatgtcctctaacagtgactccacgggtaccgtacagatcaccctgacctttgagtctggtactgatgcggatatcgcgcaggttcaggtgcagaacaaactgcagctggcgatgccgttgctgccgcaagaagttcagcagcaaggggtgagcattgagaaatcatccagcagcttcctgatggttgtcggcgttatcaacaccgatggcaccatgacgcaggaggatatctccgactacgtggcggcgaatatgaaagatgccatcagccgtacgtctggcgtgggtgacgttcagttgttcggttcacagtacgcgatgcgtatctggatgaacccgaatgaactgaacaaattccagctaacgccggttgatgttattaccgccatcaaagcgcagaacgcccaggttgcggcgggccagctcggtggtacaccgccggtgaaaggccaacagcttaacgcctctattattgctcagacgcgtctgacctctactgaagagttcggcaaaatcctgctgaaagtgaatcaggatggttcccgcgtactgctgcgtgatgtggcgaagattgagctgggtggtgagaactacgacatcatcgcagagtttaacggccaaccggcttccggtctggggatcaagctggcgaccggtgcaaacgcgctggataccgctgcggcaatccgtgctgaactggcgaagatggaaccgttcttcccgtcgggtctgaaaattgtttacccgtacgacaccacgccgttcgtgaaaatctctattcacgaagtggttaaaacgctggtcgaagcgatcatcctcgtgttcctggttatgtatctgttcctgcagaacttccgcgcgacgttgattccgaccattgccgtaccggtggtattgctcgggacctttgccgtccttgccgcctttggcttctcgataaacacgctaacaatgttcgggatggtgctcgccatcggcctgttggtggatgacgctatcgttgtggtagaaaacgttgagcgtgtgatggcggaagaaggtttgccgccaaaagaagccacccgtaagtcgatggggcagattcagggcgctctggtcggtatcgcgatggtactgtcggcggtattcgtaccgatggccttctttggcggttctactggggcaatttatcgtcagttctctattaccattgtttcagcaatggcgctgtcggtactggtggcgttgatcctgactccagctctttgtgccaccatgctgaaaccgattgccaaaggcgatcacggggaaggtaaaaaaggcttcttcggctggtttaaccgcatgttcgagaagagcacgcaccactacaccgacagcgtaggcggtattctgcgcagtacggggcgttatctggtgctgtatctgatcatcgtggtcggcatggcctatctgtttgtgcgtctgccaagctccttcttgccagatgaggaccagggcgtatttatgaccatggttcagctgccagcaggtgcaacgcaggaacgtacgcagaaagtgctcaatgaggtaacgcattactatctgaccaaagaaaagaacaacgttgagtcggtgttcgccgttaacggcttcggctttgcgggacgtggtcagaataccggtattgcgttcgtttccttgaaggactgggccgatcgtccgggtgaagaaaacaaagttgaagcgattaccatgcgtgcaacacgcgctttctcgcaaatcaaagatgcgatggttttcgcctttaacctgcccgcaatcgtggaactgggtaccgccaccggctttgactttgagctgattgaccaggctggccttggtcacgaaaaactgactcaggcgcgtaaccagttgcttgcagaagcagcgaagcaccctgatatgttgaccagcgtacgtccaaacggtctggaagataccccgcagtttaagattgatatcgaccaggaaaaagcgcaggcgctgggtgtttctatcaacgacattaacaccactctgggcgctgcatggggcggcagctatgtgaacgactttatcgaccgcggtcgtgtgaagaaagtttacgtcatgtcagaagcgaaataccgtatgctgccggatgatatcggcgactggtatgttcgtgctgctgatggtcagatggtgccattctcggcgttctcctcttctcgttgggagtacggttcgccgcgtctggaacgttacaacggcctgccatccatggaaatcttaggccaggcggcaccgggtaaaagtaccggtgaagcaatggagctgatggaacaactggcgagcaaactgcctaccggtgttggctatgactggacggggatgtcctatcaggaacgtctctccggcaaccaggcaccttcactgtacgcgatttcgttgattgtcgtgttcctgtgtctggcggcgctgtacgagagctggtcgattccgttctccgttatgctggtcgttccgctgggggttatcggtgcgttgctggctgccaccttccgtggcctgaccaatgacgtttacttccaggtaggcctgctcacaaccattgggttgtcggcgaagaacgcgatacttatcgtcgaattcgccaaagacttgatggataaagaaggtaaaggtctgattgaagcgacgcttgatgcggtgcggatgcgtttacgtccgatcctgatgacctcgctggcgtttatcctcggcgttatgccgctggttatcagtactggtgctggttccggcgcgcagaacgcagtaggtaccggtgtaatgggcgggatggtgaccgcaacggtactggcaatcttcttcgttccggtattctttgtggtggttcgccgccgctttagccgcaagaatgaagatatcgagcacaaccatactgtcgatcatcattga

SEQ ID NO: 41064 - DNA, 1194 bp, Escherichia coli
atgaacaaaaacagagggtttacgcctctggcggtcgttctgatgctctcaggcagcttagccctaacaggatgtgacgacaaacaggcccaacaaggtggccagcagatgcccgccgttggcgtagtaacagtcaaaactgaacctctgcagatcacaaccgagcttccgggtcgcaccagtgcctaccggatcgcagaagttcgtcctcaagttagcgggattatcctgaagcgtaatttcaaagaaggtagcgacatcgaagcaggtgtctctctctatcagattgatcctgcgacctatcaggcgacatacgacagtgcgaaaggtgatctggcgaaagcccaggctgcagccaatatcgcgcaattgacggtgaatcgttatcagaaactgctcggtactcagtacatcagtaagcaagagtacgatcaggctctggctgatgcgcaacaggcgaatgctgcggtaactgcggcgaaagctgccgttgaaactgcgcggatcaatctggcttacaccaaagtcacctctccgattagcggtcgcattggtaagtcgaacgtgacggaaggcgcattggtacagaacggtcaggcgactgcgctggcaaccgtgcagcaacttgatccgatctacgttgatgtgacccagtccagcaacgacttcctgcgcctgaaacaggaactggcgaatggcacgctgaaacaagagaacggcaaagccaaagtgtcgctgatcaccagtgacggcattaagttcccgcaggacggtacgctggaattctctgacgttaccgttgatcagaccactgggtctatcaccctacgcgctatcttcccgaacccggatcacactctgctgccgggtatgttcgtgcgcgcacgtctggaagaagggcttaatccaaacgctattttagtcccgcaacagggcgtaacccgtacgccgcgtggcgatgccaccgtactggtggttggcgcggatgacaaagtggaaacccgtccgatcgttgcaagccaggctattggcgataagtggctggtgacagaaggtctgaaagcaggcgatcgcgtagtaataagtgggctgcagaaagtgcgtcctggtgtccaggtaaaagcacaagaagttaccgctgataataaccagcaagccgcaagcggtgctcagcctgaacagtccaagtcttaa

SEQ ID NO: 41065 - DNA, 648 bp, Escherichia coli
atggcacgaaaaaccaaacaagaagcgcaagaaacgcgccaacacatcctcgatgtggctctacgtcttttctcacagcagggggtatcatccacctcgctgggtgagattgcaaaagcagctggcgttacgcgcggtgcaatctactggcattttaaagacaagtcggatttgttcagtgagatctgggaactatcagaatccaatattggtgaactagagcttgagtatcaggcaaaattccctagcgatccactctcagtattaagagagatattaattcatgttcttgaatccacggtgacagaagaacggcgtcgattattgatggagattatattccacaaatgcgaatttgtcggagaaatggctgttgtgcaacaggcacaacgtaatctctgtttggaaagttatgaccgtatagaacaaacgttaaaacattgtattgaagcgaaaatgttgcctgcggatttaatgacgcgtcgggcagcaattattatgcgcggctatatttccggcctgatggaaaactggctctttgccccgcaatcttttgatcttaaaaaagaagcccgcgattacgtcgccatcttactggagatgtatctcctgtgccccacgcttcgtaatcctgccactaacgaataa

SEQ ID NO: 41066 - DNA, 3363 bp, Escherichia coli
atgactatgttccagtattacaaacgatcacggcattttgttttttcagcatttattgcttttgtttttgtcttgttatgccagaacacggcgtttgcgcgggcgtcatcgaatggtgatctgccgacaaaagcggacctgcaggcgcaacttgactcactaaataaacaaaaagatctttctgctcaggacaaactggtgcagcaggatctgacagatacattagccaccctcgataaaatcgatcgcgtaaaagaagagaccgttcagctacggcaaaaagtcgctgaagcgccggaaaaaatgcgccaggcgaccgcggcgttaacagcacttagcgatgtcgataacgacgaagaaacgcgcaaaattctgagcacgctttcgttgcgccagctggaaactcgcgttgcccaggcgctggacgatttgcaaaacgcacaaaacgatctggcgtcttataacagccagctggtttcgttacagacgcagcccgaacgcgtgcaaaatgcgatgtataacgcttcgcagcagctgcaacaaattcgcagtcgtctggatgggactgatgtcggcgagacggccttacgtcccagccagaaagtgttaatgcaggctcagcaggcgttgctgaatgcggagattgaccagcagcgtaaaagcctggaagggaataccgtcttgcaggataccttgcaaaagcaacgtgattacgtgacggcgaacagcgcccgtctggagcaccagttgcagctgttgcaagaagcggtaaacagcaagcgcctgactttaaccgaaaaaacggcgcaggaagccgtctccccggatgaagccgcgcgtattcaggctaatccgctggtgaagcaggaactggaaattaaccagcagttaagtcagcgtctgattaccgcgactgaaaacggtaatcagttgatgcagcaaaacattaaagtcaaaaactggctggagcgggcgctgcaatcggaacgcaatattaaagagcagattgccgtcctgaagggcagcctgctgttgtctcgtatcctttaccagcaacaacaaacgctgccctcggcggatgaactggaaaacatgaccaaccgcatcgcggatttgcgtctcgaacagtttgaagttaaccagcagcgtgatgcactcttccagagcgatgcgttcgtcaacaaactggaagaaggtcacaccaacgaagtcaacagcgaagttcacgatgcgttattgcaagtggttgatatgcgtcgcgaattgctggatcaactcaacaaacagttgggtaaccagctgatgatggccattaacctgcaaatcaaccagcagcagttaatgagtgtgtcgaaaaacctgaaatccatcctgactcagcaaatcttttgggtgaacagtaaccgtccaatggactgggactggatcaaagcgttcccgcaaagcctgaaagatgaatttaagtcgatgaaaattacggttaactgggaaaaagcctggcccgccgtttttatcgctttcctcgctggtttgccgctgctgttgattgccgggctgatccactggcgtctggggtggctgaaagcgtatcaacaaaaactggcttccgctgtgggttccctgcgtaacgacagccagctcaacacaccaaaagcgatccttatcgacctgatccgtgcactgccggtgtgcctgattattctcgcggttggcctgattctgttgaccatgcagctcaacatcagcgaactgctatggtcgttcagcaaaaaactggcgattttctggctggtgtttggcctgtgctggaaagtgctggagaagaacggcgttgccgtgcgtcacttcggcatgccggaacagcagaccagccactggcgtcggcaaattgtccgcatcagtctcgcgttgctgcctatccatttctggtctgtggtggcagaactttccccgctgcatctgatggatgatgtgctggggcaggcgatgattttcttcaacctgctgctgattgccttcctggtatggccaatgtgccgcgaaagctggcgtgataaagagtcgcacaccatgcgactggtcaccattaccgtgctgtcgattatcccgattgcattgatggtgctgactgccacgggttatttctacaccacgctgcgcctctccgggcgttggattgaaaccgtttatctggtgatcatctggaacttgctctaccagacggtattgcgcggcttaagcgtagcggcgcggcgtatcgcctggcgtcgtgcgctggcgcgtcggcagaatctggtgaaagagggcgcagaaggtgccgaaccgccggaagaacccaccattgcactggaacaggttaaccagcagacgctgcgtattaccatgttgctgatgtttgcgctgttcggtgtcatgttctgggcaatttggtccgatttgatcaccgtgttcagctatctcgacagcattacgctgtggcattacaacggtactgaagctggtgctgcggtggtgaaaaacgtcaccatgggtagtctgttgtttgcgattatcgcctcaatggtggcctgggcgttgattcgcaacctgcctggtttgctggaagtgctggtgctctcgcgactgaatatgcgccagggcgcgtcgtatgccattactaccatccttaactacatcattattgctgttggtgcgatgacggtgttcggatcgctgggcgtctcttgggataaactccagtggctggccgcagcattatccgtaggtcttggttttggtttacaagaaattttcggtaacttcgtctccggtttgatcattctgttcgaacgtccggtgcgtattggcgatacggtaaccattggtagcttctcggggacggtaagtaaaatccgtattcgtgcgacaacgattaccgatttcgatcgcaaagaagtgatcatcccgaacaaagcgtttgttaccgagcgtctgatcaactggtcgttgactgacactactacgcgtctggtgatccgtctcggcgtggcctatggctccgatctggaaaaagtgcgtaaagtgttactgaaggcggcgactgagcacccaagggtgatgcacgaaccaatgccggaagtcttctttacggcatttggtgccagcacgttggatcatgagctgcgtctgtatgtgcgtgaactgcgtgaccgtagtcgtactgtcgatgagctgaaccgtactatcgatcagctgtgccgtgaaaacgacatcaacattgcctttaaccagcttgaagtgcatctgcacaacgagaagggcgatgaggtgacggaagtaaaacgcgactacaaaggcgacgatccgacgccagcggtagggtaa

SEQ ID NO: 41067 - DNA, 165 bp, Escherichia coli
atgtcactggaaaatgcccctgacgatgtcaaactggctgtcgatttgattgtgctgctggaagaaaatcagatcccagcccgcaccgtgctgcgcgcgctggatattgtaaagcgtgattatgaaaagaagttacagagcgatgaggcttcacaaagcgagtaa

SEQ ID NO: 41068 - DNA, 528 bp, Escherichia coli
gtgaaaaccgccctgctgctggaaaaactggaaggacagctcgctacgctgcgtcagcgttgtgccccggtgtcacagttcgccacgctaagtgctcgtttcaacaggcatctttttcagactcgtgcgacaacactacaggcttgtctcgacaaggcgggcgataatctggctgcgcttcgtcatgcagttgagcaacagcaactgccgcaagtcgcctggctggcagaacatctggcggcgcaactggaggctatagcgcgtgaagccacagcctggtcgctacgcgagtgggatagcgcaccaccccaaattgcccgctggcagcgtaaacgtattcagcatcaggattttgagcggcggctacgtgagatggttgccgaacgtagagcccgcctggcgcgggtgaccgatctcgtggaacagcaaacgctgcatcgtgaagtggaagcctatgaagcgcgcctggcacgctgccgccatgcgctggaaaaaatcgaaaacaggttagcgcgtttaacccgctag

SEQ ID NO: 41069 - DNA, 378 bp, Escherichia coli
atgcaacgaatcattttaatcatcattggctggctggcggtagtgctgggcacgctgggcgtggtattaccggtattaccgacgacgccgtttatcctgctggcggcctggtgctttgcccgttcttccccgcgctttcacgcctggttgctgtaccgctcatggtttggcagctatctacgtttctggcagaaacatcatgcgatgccgcgcggcgtcaaaccgcgggcgattttgcttattttgctcacgtttgccatttctctgtggttcgtccagatgccatgggtgcgcatcatgttgctggtaattctcgcctgtttgcttttctatatgtggcgaattccggtgattgatgaaaagcaagaaaagcactga

SEQ ID NO: 41070 - DNA, 552 bp, Escherichia coli
atgaccgcgactgcacagcagcttgagtatctcaaaaatagcatcaaaagcattcaggactacccaaaacccggcattcttttccgcgatgtcaccagcttactggaagacccgaaagcttacgctctcagcatcgacttgctggttgagcgttacaaaaatgcgggcattaacaaagttgtcggcaccgaagcgcgtggcttcttgtttggcgctccggtagctctgggtctgggcgttggctttgtaccggtccgtaaaccgggcaaactgccgcgtgaaaccatcagtgaaacttacgatctggaatacggcaccgatcagctggagatccacgttgatgccatcaaaccgggcgacaaagttctggtggtggacgatctgctggcaaccggcggcactatcgaagcgaccgttaaactgatccgtcgtctgggtggtgaagtggctgacgctgcgttcattatcaacctgttcgatctcggcggcgaacagcgtctcgaaaaacagggcattaccagctacagccttgtcccgttcccgggccattaa

SEQ ID NO: 41071 - DNA, 1932 bp, Escherichia coli
atgagttatcaggtcttagcccgaaaatggcgcccacaaacctttgctgacgtcgtcggccaggaacatgtgctgaccgcactggcgaacggcttgtcgttagggcgtattcatcatgcttatcttttttccggcacccgtggcgtcggaaaaacctctatcgcccgactgctggcgaaggggctaaactgcgaaaccggcattaccgcgacgccgtgcggcgtgtgcgataactgtcgtgaaatcgagcaggggcgctttgtcgatctgattgaaatcgacgccgcctcgcgcaccaaagttgaagatacccgcgacctgctggataacgtccagtacgctccggcgcgtggtcgtttcaaagtttatctcatcgacgaagtgcatatgctgtcgcgccacagctttaacgcactgttaaaaacccttgaagagccgccggagcacgttaagtttctgctggcgacgaccgatccacagaaattgccggtgacgattttgtcgcgctgtttgcaatttcatctcaaggcgctggatgtcgagcaaattcgtcatcaacttgagcacatcctcaatgaagaacatatcgctcacgagccgcgggcgctgcaattgctggcgcgcgccgctgaaggcagcctgcgagatgccttaagtctgaccgaccaggcgattgccagcggtgacggccaggtttcaacccaggcggtcagtgcgatgctgggtacgcttgacgacgatcaggcgctgtcgctggttgaagcgatggtcgaggccaacggcgagcgcgtaatggcgctgattaatgaagccgctgcccgtggtatcgagtgggaagcgttgctggtggaaatgctcggcctgttgcatcgtattgcgatggtacaactttcgcctgctgcacttggcaacgacatggccgccatcgagctgcggatgcgtgaactggcgcgcaccataccgccgacggatattcagctttactatcagacgctgttgattggtcgcaaagaattaccgtatgcgccggaccgccgcatgggcgttgagatgacgctgctgcgcgcgctggcgttccatccgcgtatgccgctgcctgagccagaagtgccacgccagtcctttgcacccgtcgcgccaacggcagtaatgacgccaacccaggtgccgccgcaaccgcaatcagcgccgcagcaggcaccgactgtaccgctcccggaaaccaccagccaggtgctggcggcgcgccagcagttgcagcgcgtgcagggagcaaccaaagcaaaaaagagtgaaccggcagccgctacccgcgcgcggccggtgaataacgctgcgctggaaagactggcttcggtcaccgatcgcgttcaggcgcgtccggtgccatcggcgctggaaaaagcgccagctaaaaaagaagcgtatcgctggaaggcgaccactccagtgatgcagcaaaaagaagtggtcgccacaccgaaggcgctgaaaaaagcgctggaacatgaaaaaacgccggaactggcggcgaagctggcggcagaagccattgagcgcgacgcgtgggcggctcaggtgagtcaactttcgctaccaaaactggtcgaacaggtggcgttaaatgcctggaaagaggagagcgacaacgcagtatgtctgcatttgcgctcctctcagcggcatttgaacaaccgcggtgcacagcaaaaactggctgaagcgttgagcatgttaaaaggttcaacggttgaactgactatagttgaagatgataatcccgcggtgcgtacgccgctggagtggcgtcaggcgatatacgaagaaaaacttgcgcaggcgcgcgagtccattattgcggataataatattcagaccctgcgtcggttcttcgatgcggagctggatgaagacagtatccgccccatttga

SEQ ID NO: 41072 - DNA, 330 bp, Escherichia coli
atgtttggtaaaggcggtctgggtaacctgatgaagcaagcccagcagatgcaagaaaaaatgcagaaaatgcaggaagagatcgcgcagctggaagttaccggcgaatctggcgcaggtctggtaaaagtgaccatcaacggtgcacataactgccgtcgcgtagagatcgacccgagcctgctggaagacgacaaagagatgctggaagacctggtggctgcagcattcaacgacgcagcacgtcgtattgaagaaacgcagaaagaaaaaatggcttctgtatcctccggaatgcagctgccgcctggctttaagatgccgttctga

SEQ ID NO: 41073 - DNA, 606 bp, Escherichia coli
atgcaaaccagcccgctgttaacacagcttatggaagcactgcgctgtctgccgggcgttggcccgaagtcggcgcagcgtatggcgttcacgctgcttcagcgcgatcgtagcggcgggatgcgtctggcgcaggcgctcacccgggcgatgtcggaaatcggccactgcgccgattgccgcaccttcaccgaacaggaagtctgtaacatctgttcgaatccgcgtcgtcaggaaaacggtcaaatctgcgtggtggagagtccggcggacatttacgccattgagcagacggggcagttttcaggtcgttattttgtgttgatgggacatctgtcaccgctggacggcatcggtccggatgatatcggccttgatcgtctggaacagcgtctggcagaggaaaaaatcactgaagtgatcctcgccaccaaccctacggttgaaggtgaagctaccgctaactacattgccgagctttgcgcgcaatatgacgtggaagccagccgaatcgctcatggcgtaccggttggcggcgaactggaaatggtcgatggcaccacgctgtcacactcccttgccgggcgtcataagattcgtttttaa

SEQ ID NO: 41074 - DNA, 1875 bp, Escherichia coli
atgaaaggacaagaaactcgtggttttcagtcagaagtgaaacagcttctgcacctgatgatccattctctctattccaataaagaaatcttcctgcgtgagcttatctctaacgcctccgatgcggcggacaagttgcgtttccgtgcgctctctaacccggacctgtacgaaggtgatggcgaactgcgcgttcgtgtctctttcgataaagacaagcgcacgctgaccatctccgataacggcgtggggatgacccgcgacgaagtgattgaccatctggggactatcgctaaatccggtaccaaatcattcctcgaatccctgggttctgaccaggcgaaagacagccagctgatcggtcagtttggtgttggtttctactctgcgtttatcgtggccgacaaagtgaccgtgcgtactcgcgcggcaggcgaaaaaccagaaaacggcgtcttctgggaatcggctggcgaaggtgaatataccgttgccgacatcaccaaagaagatcgtggtactgaaatcaccctgcatctgcgtgaaggcgaagacgagttcctcgatgactggcgcgtgcgttccatcatcagcaaatactccgaccatatcgcgctgccggtagagatcgaaaaacgcgaagagaaagacggcgaaaccgttatctcctgggagaaaattaacaaagcgcaggcgctgtggactcgtaacaagtcggaaatcaccgatgaagagtacaaagagttctacaaacacatcgcccacgattttaacgatccgctgacctggagccacaaccgtgttgaaggtaagcaggagtacaccagcctgctgtacattccgtcccaggctccgtgggatatgtggaaccgcgatcataaacacggcctgaaactgtatgttcagcgtgtgttcatcatggacgacgcagaacagttcatgccgaactatctgcgcttcgtgcgtggtctgattgactccagcgatctgccgctgaacgtttcccgtgaaatcctccaggacagcacggtaacgcgtaacctgcgcaatgcgctgaccaagcgtgtgctgcaaatgctggaaaaactggcgaaagacgacgcggaaaaataccagaccttctggcaacagtttggcctggtactgaaagaaggtccggcggaagatttcgctaaccaggaagcgatcgccaaattgctgcgttttgcttctacccataccgattcttctgcgcagaccgtgtctctggaagactacgtttcccgcatgaaagaagggcaggagaaaatctactacatcactgcagacagctatgcggcagcgaagagcagcccgcacctggaactgctgcgtaagaaaggcatcgaagttctgctgctttccgaccgcatcgatgagtggatgatgaactatctgactgagttcgacggtaaaccgttccagtcggtgtctaaagttgacgagtcgctggaaaaactggctgacgaagttgatgagagcgcgaaagaagcggagaaagcactgactccgttcatcgaccgtgtgaaagccctgctcggcgagcgcgtgaaagatgtccgtctgactcaccgtctgaccgatacgccagcgatcgtttcgaccgacgcggacgaaatgagcactcagatggcgaaactgttcgctgcggcgggccagaaagtgccagaagtgaaatacatcttcgaactgaacccggatcacgtactggtgaaacgtgcggcagatactgaagatgaagcgaagttcagcgagtgggtagaactgctgctggatcaggcactgctggcagaacgcggcacgctggaagatccgaacctgtttattcgtcgtatgaaccagctgctggtttcctga

SEQ ID NO: 41075 - DNA, 705 bp, Escherichia coli
atggtggtatcgtttatcgctttttcaaaaaattcgacacattttaaggggattttcgcaatgcgtatcattctgcttggcgctccgggcgcggggaaagggactcaggctcagttcatcatggagaaatatggtattccgcaaatctccactggcgatatgctgcgtgctgcggtcaaatctggctccgagctgggtaaacaagcaaaagacattatggatgctggcaaactggtcaccgacgaactggtgatcgcgctggttaaagagcgcattgctcaggaagactgccgtaatggtttcctgttggacggcttcccgcgtaccattccgcaggcagacgcgatgaaagaagcgggcatcaatgttgattacgttctggaattcgacgtaccggacgaactgatcgttgaccgtatcgtcggtcgccgcgttcacgcgccgtctggtcgtgtttatcacgttaaattcaatccgccgaaagtagaaggtaaagacgacgttaccggtgaagaactgactacccgtaaagacgatcaggaagaaaccgtacgtaaacgtctggttgaataccatcagatgacagcaccgctgatcggctactactccaaagaagcggaagcgggtaacaccaaatacgcgaaagttgacggcaccaagccggttgctgaagttcgcgctgatctggaaaaaatcctcggctaa

SEQ ID NO: 41076 - DNA, 963 bp, Escherichia coli
atgcgtcagactaaaaccggtatcctgctggcaaacctgggtacgcccgatgcccccacacctgaagcggtaaaacgctatctgaaacaatttttaagcgacagacgcgtggttgatacctcacggttgttatggtggccattgctgcgcggcgtgattttgccgctgcgctcgccgcgtgtggcgaagctgtatgcctctgtctggatggaaggtggctcgccgctgatggtttacagccgccagcaacagcaggcgctggcacaacgtttaccggagacgcccgtagcgctgggaatgagctacggctcgccatcactggaaagcgccgtagatgaactcctggcagagcatgtagatcatattgtggtgctgccgctttatccgcaattctcctgttctacggtcggtgcggtatgggatgaactggcacgcattctggcgcgcaaacgtagcattccggggatatcgtttatacgtgattacgccgataaccacgattacattaatgcactggcgaacagcgtacgcgcttcttttgccaaacatggcgaaccggatctgctgctgctctcttatcatggcattccccagcgttatgcagatgaaggcgatgattacccgcaacgttgccgcacaacgactcgtgaactggcttccgcattagggatggcaccggaaaaagtgatgatgacctttcagtcgcgctttggtcgggaaccctggctgatgccttataccgacgaaacgctgaaaatgctcggagaaaaaggcgtaggtcatattcaggtgatgtgcccgggctttgctgcggattgtctggagacgctggaagagattgccgagcaaaaccgtgaggtcttcctcggtgccggcgggaaaaaatatgaatatattccggcgcttaatgccacaccggaacatatcgaaatgatggctaatcttgttgccgcgtatcgctaa

SEQ ID NO: 41077 - DNA, 960 bp, Escherichia coli
atgaagccggaaaacaaattacctgttctggaccttatttctgctgaaatgaagaccgttgtgaatactcttcagccggatttaccgccctggcccgcaacgggaacgattgctgagcaacgacagtattacacgcttgagcgccgattctggaatgcgggcgctccagaaatggcaaccaaagcttacatggttccaacaaaatatgggcaggtggaaacacgtctcttttgtccgcagccagatagcccggcaacgctattttatttgcatggaggcggttttattctcggcaatctcgatacccacgatcgcatcatgcgcctgctggcaagctacagccaatgtacggtgattggtattgattacaccctttcacctgaagcgcgttttccgcaagtgatagaggaaattgtggctgcttgttgttatttccaccagcaggcggaggattatcaaatcaatatgtcccgcattggctttgccggtgattccgcaggtgccatgctggcgctcgccagtgcgttgtggttgcgtgataaacagatcgattgcggtaaagttgcgggcgttttgctgtggtatgggctttacggattacgggattccgtgactcgtcgtctgttgggcggtgtctgggatggcttaacgcaacaggatttgcagatgtatgaagaggcgtatttaagcaacgacgcggaccgcgagtcgccgtattactgtctgtttaataatgatctcactcgcgaagttccgccctgttttattgccggggcggagttcgatccgctgctggatgacagccgtctgctttaccagacgttagcggcgcatcagcagccctgtgagttcaaactctacccaggcacgctgcacgcctttttgcattattcacggatgatgaaaaccgccgacgaggctcttcgcgacggcgctcagttctttaccgctcagctttag

SEQ ID NO: 41078 - DNA, 1305 bp, Escherichia coli
atgaaatttcccggtaaacgtaaatccaaacattacttccccgtaaatgcacgcgatccgctgcttcagcaattccagccagaaaacgaaaccagcgccgcctgggtagtgggtatcgatcaaacgctggtcgatattgaagcgaaagtggatgatgaattcattgagcgttatggattaagcgccgggcattcactggtgattgaggatgatgtagccgaagcgctttatcaggaactaaaacagaaaaacctgattacccatcagtttgcgggtggcaccattggtaacaccatgcataactactcggtgctcgcggacgaccgttcggtgctgctgggcgtcatgtgcagcaatattgaaattggcagctatgcctatcgttacctgtgtaacacctccagccgtaccgatcttaactatctacaaggcgtggatggcccgattggtcgttgctttacgctgattggcgagtccggggaacgtacctttgctatcagccctggccacatgaaccagctgcgggctgaaagtattccggaagatgtgattgccggagcctcggctctggttctcacctcttatctggtgcgttgcaagccgggtgaacccatgccggaagcaaccatgaaagccattgagtacgcgaagaaatataacgtaccggtggtgctgacgctgggaactaagtttgtcattgccgagaatccacagtggtggcagcaattcctcaaagaccacgtctctatccttgcgatgaacgaagatgaagccgaagcgttgaccggagaaagcgatccgttgttggcatctgacaaggcgctggactgggtagatctggtgctgtgcaccgccgggccaatcggcttgtatatggcgggctttaccgaagacgaagcgaaacgtaaaacccagcatccgttgctgccgggcgctatagccgaattcaaccagtatgagtttagccgcgccatgcgccacaaggattgtcagaatccgctgcgtgtctattcgcacattgcgccgtacatgggcgggccggaaaaaatcatgaacaccaacggagcaggggatggcgcactggcagcgttgctgcatgacattaccgccaacagctaccatcgtagcaacgtaccaaactccagcaaacataaattcacctggttaacttattcatcgttagcgcaggtgtgtaaatatgctaaccgtgtgagctatcaggtactgaaccagcattcacctcgtttaacgcgcggcttgccggagcgtgaagacagcctggaagagtcttactgggatcgttaa

SEQ ID NO: 41079 - DNA, 1677 bp, Escherichia coli
atgcatcacgccaccccgcttatcaccaccattgttggcggccttgtgctcgcctttatcctcggcatgctggccaataaactacgtatttctcctctggtgggatatctgttagcgggtgtgctggcaggaccattcactccgggctttgttgccgataccaagcttgcgccggaactggctgaactgggcgtcattctgttgatgtttggcgtgggtctgcacttttcgctcaaggatttgatggcggtaaaggccatcgccattcccggtgcgatcgcccagatagccgtggcgacgctgctgggtatggcgctctctgccgtgctgggctggtcgttaatgaccggtatcgtgttcggtttatgtctttccaccgccagtaccgtggtgttactgcgcgcacttgaagaacggcaattaattgacagtcagcgtgggcaaatcgccatcggttggttgattgtggaagacctggtaatggttctgacgctggtgttgctgcccgcagtggcaggaatgatggaacagggcgatgtgggctttgccactcttgcagtcgatatggggatcaccatcggcaaagtgatcgcgtttatcgccattatgatgctggtaggtcgccgtctggtgccgtggattatggcacgcagcgcggcaaccggttctcgcgagctgtttaccctgtcggtgctggcgctggcgttagggattgcctttggtgcggtagagctgtttgatgtctcctttgcactcggtgcgttctttgccgggatggtactgaacgagtctgaactgagtcaccgtgccgcccacgatacgctgccattgcgcgacgcgtttgcggtgctgttttttgtctccgtcgggatgttgtttgatccgttaattctgattcagcaaccgctggcagtgctggcgacgctggcgattattctgtttggtaagtcgttagccgcgtttttcctggtgcgactgtttggtcactcccaacgtacggcattaactatcgccgccagcctggcgcagattggtgagttcgcgtttatcctggcgggactgggaatggcattgaatttactgccgcaggccggacaaaacctggtactggcaggggcgatcctgtcgattatgctcaacccagtactgttcgcactactggagaaatatctggcgaagaccgaaacgctggaagagcagacgctggaagaggcaatcgaagaagagaagcagatcccagtggatatttgcaaccatgcgctattggtgggttacggtcgtgtaggcagcctgctgggggagaaattgctcgcctctgatattccgctggtggtgattgagacgtcacgaacccgtgttgatgagctgcgagagcgcggggtccgcgcagtattgggcaatgcggcgaacgaagaaattatgcaactggcgcatctggaatgtgcaaaatggctgatcctgacgatccccaacggttatgaagcgggtgagattgtggcatctgcccgcgcgaaaaatccggatattgagattattgcccgcgcccattatgacgatgaagtggcgtatatcaccgaacgtggtgcgaatcaagtagtgatgggcgagcgtgaaattgcccgtactatgctggaactgctggaaacgccaccggcgggtgaagtggtgacggggtaa

SEQ ID NO: 41080 - DNA, 1221 bp, Escherichia coli
atggcaatgagtgaacaaacccagcctgtggcgggcgcggctgcgtcaacgaccaaggcccgaacatcgtttggtattttaggtgctatcagcctctcacatctgctgaacgacatgatccaatcgctgattctggcgatttatcctctgcttcagtcagaattttctctgacatttatgcagattggcatgataaccctcaccttccagctcgcctcttcgctactgcaaccagtggtcggctactggaccgataaatatccgatgccgtggtcgttgccaattggcatgtgctttaccttaagtggtctggtgctgcttgcgctggcgggcagttttggcgcagttctgctggcggcggcgctggtcggtaccggttcatcggtctttcatccggaatcttctcgcgtggcccgtatggcttccggcgggcggcatggcctggcacaatctatctttcaggtcggcggcaactttggcagttccctgggacccttgctggcggcggtgattatcgcgccttatggcaaaggcaacgttgcctggtttgtgcttgcggcactgctggcgatcgtggtgttggcgcaaatcagccgttggtactcggcacagcaccgaatgaataaaggaaaacccaaagcgacgattatcaatccactgccgcgcaacaaagtggtactggcggtcagcattctgttaatcctcattttctcgaaatatttctatatggcgagcatcagcagctattacaccttttatctgatgcaaaaattcggattatctatccagaatgctcagcttcatctgtttgccttcctgtttgccgttgcggcaggtacggtgatcggcgggcctgtaggggataaaattgggcggaaatatgtgatttggggctctatcctcggcgttgcgccgtttacgctgattttaccctacgccagcctgcactggacgggggttttaacggtgattattggatttatcctcgcttcggcattctctgccattctggtctacgctcaggagctgcttccaggacgtatcggtatggtttctggactctttttcggttttgctttcggcatgggaggtctgggagcggcagttctggggcttatcgccgatcacaccagcatcgagttagtctataaaatatgtgctttcctgccactattggggatgttgaccatattcctgcctgataaccggcataaagactga

SEQ ID NO: 41081 - DNA, 195 bp, Escherichia coli; identical to SEQ ID NO: 23553

SEQ ID NO: 41082 - DNA, 1653 bp, Escherichia coli
atgaaattattgcagcggggcgtggcgttagcactgttaaccacatttacactggcgagtgaagctgctctggcgtatgagcaggataaaacctacaaaattacagttctgcataccaatgatcatcatgggcatttttggcgcaatgaatatggcgaatatggtctggcggcgcaaaaaacgctggtggatggtatccgcaaagaggttgcggctgaaggcggtagcgtgctgctactttccggtggcgacattaacactggcgtgcccgagtctgacttacaggatgccgaacctgattttcgcggtatgaatctggtgggctatgacgcgatggcgatcggtaatcatgaatttgataacccgctcaccgtattacgccagcaggaaaagtgggcaaagttcccgttactttctgccaatatctaccagaaaagtaccggcgagcgcctgtttaaaccatgggcgctgtttaagcgtcaggatctgaaaattgccgttattggtctgacgacggatgacacagcgaagttaggcaatccagaaaacttcaccgatattgagttccgtaagcccgccgatgaagcgaagctggtgattcaggagctgcaacagacagaaaagccagacattattatcgcggcgacacatatggggcattacgataacggcgatcacggttctaacgcaccgggcgatgtggagatggcacgcgcgttgcctgccggatcgctggcgatgattgtcggcggtcactcgcaagatccagtctgtatggcagcggaaaataaaaagcaggtagattacgttccaggtacgccatgcaaaccggatcaacaaaacggcatctggattgtacaggcgcatgagtggggcaagtacgttggtcgggccgactttgagtttcgcaacggcgaaatgaaaatggttaactaccagctgattccggtgaacctgaagaagaaagtgacctgggaagacgggaaaagcgagcgcgtgctgtacacccctgaaatcgctgaaaaccagcaaatgatctcgctgttatcgccgttccagaacaaaggcaaagcgcagctggaagtgaaaataggcgaaaccaatggtcgtctggaaggcgatcgtgacaaagtgcgttttgtacagaccaatatggggcggttgattctggcagcacaaatggatcgcactggtgccgactttgcggtgatgagcggaggcggaattcgtgattctatcgaagcaggcgatatcagctataaaaacgtgctgaaagtgcagccattcggcaatgtggtggtgtatgccgacatgaccggtaaagaggtgattgattacctgaccgccgtcgcgcagatgaagccagattcaggtgcctacccgcaatttgccaacgttagctttgtggcgaaagacggcaaactgaacgaccttaaaatcaaaggcgaaccggtcgatccagcgaaaacttaccgtatggcgacattaaacttcaatgccaccggcggtgatggatatccgcgccttgataacaaaccgggctatgtgaataccggctttattgatgccgaagtgctgaaagcgtatatccagaaaagctcgccgctggatgtgagtgtttatgaaccgaaaggtgaggtgagctggcagtaa

SEQ ID NO: 41083 - DNA, 480 bp, Escherichia coli
atgacacccgcagttaaatcactcgaaaaaaacaagatttcgtttcaaatccatacctacgagcacgatccggctgaaaccaattttggcgatgaagtcgtcaaaaaattaggtttgaatccggatcaggtctacaaaacgctgctggtcgcagtgaacggtgatatgaaacaccttgccgtggccgttacgccggtcgcaggtcaactggaccttaaaaaagtagcaaaagcgctgggtgccaagaaagttgagatggccgatccgatggtcgcgcagcgttcgacgggatacctggttggggggattagcccactggggcagaaaaaacgtctgccaacgattatcgacgcccccgcacaagaatttgccactatttatgtttccggcggcaagcgcggactggatatcgaactggcggcaggcgatctggcgaagatcctcgatgccaaatttgctgatatcgcccgccgcgattaa

SEQ ID NO: 41084 - DNA, 795 bp, Escherichia coli
atggatctgttgtaccgggtaaaaacgctttgggccgcgctgcgcggtaatcattacacctggcctgccattgatatctctcttcccggcaatcgccattttcatctgattggcagtattcatatgggtagccacgatatggctcccctacccacccgtttgctcaaaaagctcaaaaacgccgatgcgctgatcgtcgaggcggatgtttccaccagcgatacgccttttgctaatttgcctgcctgcgaggcgctggaagagcgcattagcgaggagcaactccaaaaactgcagcacattagccaggagatgggcatttctccctcactcttttctacccaaccgctgtggcaaatcgcgatggttcttcaggcgacgcaggcacaaaaactggggctgcgggcagaatacggtatcgattatcagctattgcaggcggcgaagcaacaacataaacccgtgattgaactggaaggggcggaaaaccagattgccatgttgctccagctccctgacaaaggactggcgctgctggacgatacgctgacccactggcataccaacgcacggttgctgcaacaaatgatgagctggtggctgaatgcgccgccgcaaaataatgaaataacgctgcccaatacgttcagtcagtcgctgtacgatgtgctgatgcatcagcgaaatctcgcctggcgggataaattacgcgccatgccgccggggcgatatgtggtcgcggtcggtgcactacacctgtatggagaagggaatttaccgcaaatgttgcgctaa

SEQ ID NO: 41085 - DNA, 396 bp, Escherichia coli
atgattcagtatgttcttgtatcgctatttacagggaagcaacagttaaaaactatgaaacaggcaacaagaaaaccgacgacacccggagatattcttctctatgaatatctggaaccgctagatttgaaaatcaatgagttagcagagttgctgcatgttcatcgtaatagcgtcagtgcactgatcaataacaatcgtaaactcaccactgagatggcattccgtctggcgaaagtttttgataccacagtcgatttttggctaaacctccaggcggcagttgatctttgggaagttgaaaacaacatgcgcacccaggaagaattgggacggattgaaacagtggctgaatatttggcacgccgtgaagagcgtgcaaaaaaggtcgcgtaa

SEQ ID NO: 41086 - DNA, 2505 bp, Escherichia coli
atgtcacaaactatcgacctgaccctggacggcctgtcctgcggtcactgcgttaaacgcgtgaaagaaagtctcgaacagcgcccggatgtggaacaagcggatgtgtctatcactgaagcgcacgttaccgggactgccagtgcagaacagctgatcgaaaccatcaaacaagcgggttatgacgcatctgtaagccacccaaaggctaaaccgctggcggagtcatcaatcccgtcggaagcactgacagcggtttctgaggcgcttccggcagcgaccgccgatgacgatgacagccagcagttgctgctgagcggcatgagctgcgccagctgtgtcacccgcgtacaaaatgcgctgcaaagcgtaccgggcgtcactcaggcacgggtaaacctggcggagcgtactgcgctggtgatgggcagtgcctccccacaagatttagtgcaggcggtggaaaaagcgggctacggcgcggaagcgattgaagatgacgcgaaacgccgcgagcgccagcaagaaaccgccgtcgctacgatgaagcgcttccgctggcaggcaattgttgcactggctgtgggtatcccggtaatggtctgggggatgatcggcgataacatgatggtcaccgctgacaaccgcagcctgtggttggttatcggcctgataaccctggcagtgatggttttcgccggcggccatttttaccgcagtgcatggaaaagcctgctgaacggtgcggcgacgatggatacgctggtggcgctgggtacgggtgtggcgtggctctattcgatgagcgtcaacctgtggccgcagtggttcccgatggaagcgcggcatctttactatgaagccagtgcgatgattatcggtctgattaatctcggtcatatgctggaagcgcgcgcacgtcagcgttcttcaaaggcgctggagaaattactcgatttaactccgccgacggcgcgcctggttactgacgaaggtgaaaaaagcgtgccgctggcggaagttcagccaggcatgctactgcgcctgacgacgggcgaccgcgtgccagtagatggcgagattacccagggcgaagcatggctggatgaagcgatgctgacgggcgaacctatcccgcagcaaaaaggcgaaggcgatagcgtccatgccgggacagtggtacaggacggtagcgttctgtttcgcgccagtgcggttggcagccataccacgctatcaaggattattcgtatggtgcgccaggcccagagcagcaagccagaaatcggtcagctggcggataaaatctcagccgtatttgtgccggtagtagtggttattgcgcttgtcagtgcggcaatctggtatttctttggtccggcaccgcagattgtctataccctggtgattgccaccacggtgctgattattgcctgtccgtgtgcgctggggctggcgacgccgatgtcgattatttccggcgtcgggcgggcggctgagtttggcgtgctggtgcgggacgccgacgcgctgcaacgcgctagtacactcgataccgtagtgttcgataaaaccgggacgctgaccgaagggaagccgcaggttgtcgcagtgaaaacatttgctgattttgacgaagcgcaggcgctgcgtctggcggcggcactggaacaaggttccagccatccgctggcgcgggcgatcctcgataaagcaagcgatatgcagctgccgcaggtcaacggtttccgcacattgcgcgggctgggcgtgagcggtgaagctgaaggtcatgcgttattgctgggcaatcaggcgctgttaaatgaccagcaagttgatactaaagcgattgaagcagatatttcagctcaggcatcgcaaggggcaacgcctgtgctgctggcggttgacgggaaagcggtagccctgctggctgtacgcgatccgttgcgtagtgatagcgtggcggcgctgcaacgtctgcataaagcgggatatcgtctggtgatgttgaccggggataacccaaccaccgccaatgcgatcgccaaagaagcagggattgatgaggtgatcgccggggtgctgccggacggtaaagccgaagcgattaaacgcctgcaaagtgaaggacgtcaggtggcaatggtgggcgacggcattaacgatgcgccagcgctggcccaggcggatgtcggcattgcaatgggcggcggcagtgatgttgccattgaaaccgcggcgattaccctgatgcgccatagcctgatgggcgttgcggatgcgctcgctatttcccgcgcaacgctgcgcaacatgaagcagaacctgctcggcgcgtttatctacaacagtatcggtattccggtcgccgccggtattttgtggccgtttactggaacactgcttaacccggtagttgccggagcggcaatggcgctctcgtcgattaccgtagtgagtaacgccaaccggttgctgcggtttaaaccgaaggaataa

SEQ ID NO: 41087 - DNA, 933 bp, Escherichia coli
atgttagatgcaaacaaattacagcaggcagtggatcaggcttacacccaatttcactcacttaacggcggacaaaatgccgattacattccctttctggcgaatgtgcctggtcaactggcagcagtggctatcgtgaccagcgatggcaacgtctatagtgcgggtgacagtgattaccgctttgcgctggaatccatctcgaaagtctgtacgttagcccttgcgttagaagatgtcggcccgcaggcggtacaggacaaaattggcgctgacccgaccggattgccctttaactcagttatcgccttagagttgcatggcggcaaaccgctgtcgccactggtaaatgctggcgctattgccaccaccagcctgattaacgctgaaaatgccgaacaacgctggcagcgaattttacatatccaacagcaactggctggtgagctggtagcgctctctgacgaagtcaaccagtcggaacaaacaaccaacttccataaccgggccattgcctggctgctgtactccgccggatatctctattgtgatgcaatggaagcctgtgacgtgtacacccgtcagtgctccacgctcatcaatactgttgaactggcaacgcttggcgcgacgctggcggcgggtggtgtgaatccgttgacgcataaacgcgttcttcaggccgacaacgtgccgtacattctggccgaaatgatgatggaagggctgtatggtcgctccggtgactgggcgtatcgtgttggtttaccgggcaaaagcggtgtaggtggcggtattctggcggtcgtccctggagtgatgggaattgccgcgttctcaccaccgctggacgaagaaggcaacagtgttcgcggtcaaaaaatggtggcatcggtcgctaagcaactcggctataacgtgtttaagggctga

SEQ ID NO: 41088 - DNA, 1293 bp, Escherichia coli
atgatgaacacggaaggtaataacggtaacaaacccctcggtctatggaacgtcgtttccatcggcattggggcaatggtgggggcggggatcttcgcgctgctggggcaggctgcgttgctaatggaagcctcgacctgggtcgcctttgcttttggcggtattgtggcgatgttttccggttatgcctatgcgcgtctgggggcgagctatcccagcaatggcggcattatcgacttctttcgtcgcggattaggcaacggcgtcttttcgctggcgctctcgttactgtacctgttgacgctggcggtgagcatcgccatggtcgcccgtgcttttggcgcttatgccgtgcagtttttgcatgaaggcagccaggaggagcaccttattttgctctacgcgttggggatcattgcggtgatgacgcttttcaactccttaagcaaccatgcggtagggcggctggaggtgatcctcgtcggcattaaaatgatgatcctgttattgctgattattgccggtgtctggtcgctgcaaccggcgcatatttccgtctctgcgccccccagctccggtgcgttcttctcctgtatcgggataaccttccttgcctatgcgggctttggcatgatggcgaacgcggcggataaagtgaaagatccgcaggtcattatgccacgggcgtttctggtggcaattggcgttaccacgttgctttatatctcgctggcgctggttttgcttagcgatgtatcggcattagagttagaaaaatatgccgataccgccgtagcgcaggctgcttctccgctgctcgggcatgtgggttatgtgatcgtcgtcatcggcgctttactggcgacggcttcagccatcaacgcgaacctgttcgccgtgtttaacatcatggacaacatgggcagcgaacgcgaactgccgaagcgaatgaataaatccctgtggcggcagagtacctggggcaacatcattgtcgtggtgttgattatgctgatgacggcggcactaaatttaggctcactcgccagcgttgccagcgccacctttttgatttgctatctggcggtgtttgtggtggcgatccgcctgcgtcatgatattcacgcctcgttgccgattcttatcgtaggtacgttggtgatgttgttggtgatcgttggctttatctacagcctgtggtcccagggcagccgtgcgttgatatggattattggtgcaatcttactcagccttattgtggcaatggtcatgaagcgcaataaaaccgtataa

SEQ ID NO: 41089 - DNA, 1356 bp, Escherichia coli
atggcgcgattccagtttaaaaaccgtaaaaataatggacttattttttttataagttttatggtgatgggagaagctgcaattgctgcaccgctgccacaatgggcgaatgccccagcggtaacgccagttgcccaattatctttacaggaaagtatattacgcgcctttgcgcgaaatcccggtgtcactcaacaggcggcgcagataggtattggcgaagcgcaaattgatgaagccaaaagtgcctggtatccgcacgttggattaaccggcaacgcggggccgtcccgacaaacggactccagcggcaggcttgataacaacgtttcgtatggcataaccctgacacaactggtgtatgactttggtaaaactaacaacgatatcaatctgcaaactgccgcccgtgacagctaccgctttaaattgatggcaaccttaaccgatgttgcagagaaaacggcgactgcctacatggaagtcagtcgttatcaggctttgtgcgatgcggctcaacgcaatattcactcgctggaaaacgtctacaacatggcggcattgcgcgctaacgcaggcctgaactcatcgtcggatgaattacaggcccagacgcgtattgccggaatgcgctcaacgctggagcaatatcaggcgcagatggcgagcgccaaagcgcaactggcggtgctcactggcgtacagccggaggcgatagccgcgccacctgctgaattagccgagcagccggtatcgctgaagaatattgattaccagtccatcccgctggtgctggcggcagaaaacttacgccagtcagcacagtacggcgtggaaaaaacgaaagcgcaatactggccaacgctcagtattcaggggggtaaaacgcgctaccagaccagcgaccgctcgtattgggatgatcagctacaactgaacgttaacgcgccgctgtatcagggcggcgcggtttctgcccaggtgcaacaggccgaagggcaacaaaaaatctctgcctcgcaggtcgaacaggcaaaactggatgtgctgcaacgagcgtctgtggcatatgcgaactggaccggcgcacggggtcgtgaagaagccggtttagcgcaatccgaaagtgcgcacaaaacgcgagatgtgtaccaaaatgaatataaattgggtaaacgcagtctgaatgatctattaaccgtcgaacaagatgtctttcaggcgcaatcggctgaaataaatgccaattatgatggctgggtcgccgccgtaaattatgccgctgcggtgaataaccttattccattagcgggaattaaacagggcttatacaacgacttacccgacttgaaataa

SEQ ID NO: 41090 - DNA, 4386 bp, Escherichia coli
atgagcctgattattgatgttatttcgcgtaaaacatccgtcaaacaaacgctgattaatcctggcgacgtcacggttgttatttatgagccttccgtggtgcaggttcatgctcaggcctctgccgttgcgcgttacgtccgtgaaggaaatgacctgctgatctatatgcaggacggcacggtgatccgctgcaacggttatttcctgcaagcggcgaatacagctgaacaatcggaactggtgtttgccgatggtcaacagctaacccatatcacctttgccgatactgctgcgggtggattagcccccgtagaactgactgcccagaccactgcgattgaaagcattgcgccatttcttgataccgttgctcagaccagcgccttcccgtggggttggctggcgggggcggcggtaggtggtggcgcgcttggtgcactgctggcaagcggtggcgatggcgactcgaaaacagaagtgattaataaccctacgccacctgctgagcctggcaacgccacaccatcatttttagttaccgataatcagggcgatcagcgcggcattctagccaccaatgacatcaccgatgacaccacgccaacctttagcggcagcgggcaggcgggggcgactattcagattaaagacagtaacggcaatactattgccagtactcaggtagacaacaacggtcactggagtgtctcgttacccacgcaaagtgcaggtgaacatacctggtcagtggtgcaaattgtcggcagtaccatcactgacgccggttcgataacgttaaccatcgacaatagtcaggccagcgtgcaggttgccaccaccgcaggcgataacattattaacgccagcgaacaggccgccgggtttacgctttctggcaccagtagccatctggcgcagggaacagaactcaccgttacgctaaacggcaaaacctacacgaccagcgtaggcgctaacggtgcctggagcgtgcaggtgccgaccgccgatgcacaggcgttaggcgaagggaatcaggcggtgctggtcagtgggaaagacgccacaggcaatacggtcaccggcgcgcagctactaacggtcgatacccaaccgccaacgcttgccatcaacaccatcgctcaggacaacattatcagtgctgcggaacataacgtcgcgctggtactgagcggcacgtcgaatgcagaagcggggcaaaccgtaacactgaccgtcaacgggaaaagccatacagcaaccgtcggtagcgacggaacctggcaagtgacgctgcctgccacggaagtccaggcactggcggagggtaattacgctgtcaatgccagtgtcagcgatcgggcagggaacaccaccagccacagcgcgaatttcacggtagacacctcagcacccgtggtcagtgttaataccgtggcgggcgacgatattcttaataatgccgagcaggccgtcgcgcagatcatctccggacaagtcagcggtgcttctccaggcgatacggtaacggtgaaattgggcactcatgtcctgacgggcatcgtgctggcagatggcagctggaatgtggcgctggacccagcggtaacccgcacgctggatcgcggagccaatacgattttcgtcaccgtgacagatgctgcaggaaatactggcgcggcgtctcgagcaatcacgctggtcggtgtttctccgttgatcaccattaacaccgtctccggcgatgacattatcagtggcgcagaaaaaggtgcgccactgacccttaccggtagcactcaacaggctgagacaggacaaaccgtcacagtaaccctggctggacagagttttaccactaccgtgcaggccgatggctcctggagtctgacggtacctgccgccgcgatgggaaatctgcctgacggcgcggtggcgattaccgcttctgtgacggatctcagcggcaataccggcaacacttcccgcaccattaccgtcgatagccaggccccggccttaagcattgatccactgaccgctgataacatcattaacgccgccgaaagcgggcaggatctgcccatcaccggcaccaccgacgctcagccggggcagacggtgaccgttacgttaaatgggcagacgtatcagggcgtcgtgcagccagacggcacctggagcgtgactgtgcccgccgccaacgtgggcgcactggctgacggcaacgctacggtcaccgccagcgtgaacgatgtcgccggtaatccgagcagcgtttcacgcgtggcgctggtggatgccacgccgccggtggtaaccattaatccggtggcgaccgataacgtcatcaacacgccggaacatgctcaggcgcaaatcatcagcggcacggttactggcgctcaggcgggcgatatcgtcaccgtgacgctgaataatgtggattacaccacggtggtggatggttccggcaactggagtctgggcgttccggcctcggtggtcagtgggctggcggacggcagttatcctgtcagcgtctcggtaaccgacaaagccggaaacacgggcagccagtcattgaccgtcacggtcaataccgccgcgccccttatcggcattaacagcattgcgggcgatgatgtgattaacgccagcgaaaaaggggccgatctccagattaccggcaccagcgatcagcctgttaacaccgccatcaccgtgacgctgaacgggcaaaattacaccaccacgaccgacgcctccggcaactggagcgtcaccgttccggcatcggcggttacagcattaggccaggccaactatacggtaacggcggcggtgaccagcgatatcggcaacagcgccactgccagccataacgtgctggtcgacagcgcgctgcccggtgtgaccattaatccggtggcaaccgacgatattattaacgccgccgaagcgggcgtggcgcaaaccatcagcgggcaggtgactggcgcggaagatggcgacacggtaactattacgttgggtggtaatacttatacggcgacggtgggcagcaatctcacctggagcgtggacgttccagcggcagatattcaggcgctgggaaatggcgatttaacggttaatgcctcagtcaccaatcaaaacggcaacaccggcagcggcacgcgggatatcaccatcgacgccaatctgcccggcctgcgggtcgatacggtggcgggcgatgatgtggtcaatatcatcgagcacgggcaggcgctggtggtcaccggcagcagctcggggctggctgaaagcacgccgcttaccgttacgattaataatgtggaatacaccactgcggtgcaggccgatggtagctggagcgtgggcgtcacggcggcgcaggttagcgcctggcctgcggggacggttaatattgccgtttcaggggaaagtagcgccggaaactcggtgagcattacgcatccggtgacggtggatctcactccggcagcgatcaccatcaacaccatcgccacggacgatgtgattaacgccgcagaaaaaggcgctgatttaaccctttccggcaccaccactaacgtagaacccggtcaaaccgtcaccgtcacctttggcgggaaaaattacactgccagcgtagcgagcgatggtagctggactgccaccgtacccgccgccgatctggcgtcattacccgagggcagcgcctccgcactggccagcgtcagcaatatcaacggcaatagcgcctcggcggtgcacaactacagcgtcgacagcagcgcgccaaccatcattatcaataccgtcgccagcgacaatatcgtcaacgccagcgaagccgatgcgggcgtgacggtgagcggcagtaccaccgccgaagcggggcagattgttacgataacgcttaacagcccgaccgtgcagacctatcaggcaacggtgcaggcggacggcagctggagcatcaatattccggcggcagatcttgaggcattgaccgatggcagccacaccctgaccgccacggtcaatgacaaagcgggcaatccggcgagcaccacgcataatctggcggtggatctcaccgttccggtgctgaccatcaacaccattgcgggcgatgacattattaacgccaccgaacacgggcaggcgctggtgatttccggttccagcaccggcggagaagcgggggatgtcgtcaccgtcacgctaaacagtaaaacctacaccaccaccctggacgcctccggcaactggagcgtcggcgttccggcggcggatgtcacggcgcttggcagcggcccgcaaactgtcaccgccacggttaccgatgcggcaggcaacagcgacaattag

SEQ ID NO: 41091 - DNA, 15567 bp, Escherichia coli
gtgccagcttccgcagtaggtgcgctgggcgaagccagctacacggtgacggcgaacgtcaccgacagcgcaggcaacagcaattccgccagccataacgtgcaggtcaataccgcgctgcctggcgtcaccattaacccagttgcgaccgacgatattattaacgccgccgaatcgggcaatgcgcaaaccatcagcggccaggtgacgggggcggcggcgggcgatacggttaccgtaacgcttggcgggaaaacttacaccgctaccgtgcaggggaatttaagctggagcgtggacgttccggcggcggatattcaggccatcggcaatggcaatctgacggttaacgcttcggtgaccaacggcgttggcaatactggcagcggttcgcgagatattactatcgacgccaacctgccaggtctgcgcgttgacaccgtggcgggcgatgatgtggtcaatagcatcgagcacgctcaggcgctggtgataactggtagcagcagcgggctggcggcgggcgcggcgctgacggtggtgattaacacggtcacttacgctgcaacagtattagccgatggcacatggagcgttggtgttccggcggcagacgtgagtaactggcctgcgggtacggtgaatatcacggtaagtggcactaacacagccggaacaacatccaccatcacccatccggtcaccgtcgatctggcggcggtggcgatttccattaacaccgtttccggcgacgatgtgattaacgccgccgaaaaaggggcagatttaaccctttccggcagcacctccggcgtggaagtggggcaaacggtcaccgttacctttggcgggaaaacctacaccgctaccgtagcgggcgatggtagctggacaaccaccgtacccgccgccgatctcagcgtgttacgcgacggcgacgccaccgtgcaggccagcgtcagcactattaacggcaacacggcttcggcaacccacgcctacagcgtcgatgccacggccccgacgcttgccattaacaccatcgccaccgacgatattctgaacgctgccgaggcgggcaatccgttaaccatcagcggtagcagcaccgccgaagcggggcagacggtaaccgtcacgcttaatggtgtgacttacagcggctccgtccaggcggacggcagctggagcgtcagcttaccgacggcggatctcagcaatctgaccgccagccagtacaccgttagtgcctcggtaagcgataaagcgggtaacccggcgtccgctaaccacgggctggcggtggatctcaccgtgccggtgctgaccatcaacaccgtctccggcgatgacattattaacgccgccgaacacggacaggcgctggtgatctccggctccagcactggcggcgaagcgggtgatgtcatcaccgtcacactaaacagtaaaacctacaccaccatgctggacgcttccggcaactggagcgtcggcgttccggcggctgacgtcactgcgcttggcagcggcccgcaaactatcactgcggcaattaccgacgcggcaggcaacagcgatgacgccagccgcacggtcaccgtgaatctcgccgcgccaaccattggtatcaacaccatcgccaccgatgacgtgattaaagccacggaaaaaggcgcggacctgcaaatcaccggcaccagtaatcagcctgcgggcaccaccattacggtgacgctgaacgggcaaaattacaccgctactaccgatagcaacggcaactggagcgccacggtgccagcgtcagcggttagcgcattgggtgaagccaactacacggtaacggcaaacgtcactgatacggcaggcaacagtaattccgccagtcataatgtgctggtcaacagcgccttgcctgccgttaccattaacgcggtggcgactgacgatattattaacgctgccgaatcgggaaatgcgcaaaccatcagcgggcaggtgacgggcgcagcgcagggggatacggttaccgttacgctgggcggcaacacctacaccgccacggtgcagtctaatttaagctggagtgtggacgttccggcggcggatattcaggcgctgggcaacggcgacctgacggttaatgcctcggtcaccaatggcgtcggcaacaccggcagcggctcgcgcgatatcacgatcgacgccaatctgcctggcctgcgggtcgataccgtggcgggcgatgatgttattaacagcattgagcacaatcaggcgctggtgatcaccggcagcagcagcggattaacggcgggaacggcgttaacggtcgagattaacaacgttacttatggcgcgacggtattagccgacggcacgtggagcctcggtgttccggcggtagacgtcagcaactggccagcgggtacggtgaatatcacggtaagcggcaccaacagtgccggaacaacctccaccattacccatccggttaccgtcgatctggctggggtcgccatcaccattaacactctctctggtgatgatgtgatcaacgccgtcgaaaaaggcgaaacgctggtcgtaagcggcagcaccagcggtgtcgaagccgggcagacggtgaccgtcacctttggcggcaaaaattacaccaccacagtggaagctaacggtagctggacggtgaatgtgccgcctgccgatctcgctgcgctaccggacggcgcgggcaacgtgcaggcgagtgtcagtaatattaacggcaacagcgcccaggccgatcgcgcgtatagcgttgatgccaccgcgccgcttgtgaccatcaacaccatcgccagcgacgatatccttaacgtgagcgaagctggcgcggggatcaccatcagcggcactaccacggcgcaggccgggcagacgctcaccgtcacgctcaataacaacacgtaccagaccaccgttctggcggatggcacctggagcgtgaatgttccggcagcggatttaagcggattaaccgccagcagttacaccgtgaccgccacggtgagcgacaaagcgggtaacccggcaagcgccgaccacgcgctggtggtagatatcactgcgccggatctcaccattaacaccgtcgcgggcgatgacattatcaacgccatcgaacatggtcaggcgttggtggtcagcggcaccagtacgggcgcggcggcgggtgatgtggtaaccgtcacgctgaacggtaaaaactacaccaccacgctggatgcctccggtaactggagcgtgggcattccggcggcggatgtcacggcgctggcgaccggtagccagaccatcaccgccagcctgagcgatcgcgcgggcaacagcgacagcacgactcacgatgtgaccgttgatcttagcggcccgacgctgaccattaacaccgtctccggcgatgacattatcaacgccgctgaaatcgttgtggcgcagaccatcagcggtcaggtcacgggaacggcggttgccgggaatacggtgattgtcaccattggcggcaatcaatataacgccaccgtgcagtcagatttaagctggagcgtcagcgtaccggcgaacgttttgcaggcgctgggtaacggtgaactgaccatcagcgcctcgttgaccaattccgcaaataataccggcaccgcgacgcacgatatcgtgatagatgccaacctgccaggtctgcgcgtcgataccgtggcaggcgatgatgtgattaacagcatcgagcacactcaggcgttggtgatcaccggtagcagtagcggactggcggcgggcgcggcgttgacggtggttatcaatagcgtcacctacggcgcaacggttttagcggatggtagctggagcgttggtgttccggtggcagatgtcacaaactggcctgcggggacggtcaatattgccgtctctggcaccaacaccgccggaaccacaaccagcattagccatccggtcacggtcgatctcgctgccgtggcgatcaccatcaacaccctttccactgacgatgtgattaacgccgccgagaaaggctctgatttgcagctctccggcaccacctccggcgtggaagcggggcaaaccatcaccgttatcttcggcggcaaaagctacaccaccacggttgccgcggataatacctgggggctgacgatccctgccgtcgatgttgcaaccttgccagacggcgcagcaaacgtccaggccagcgtcagcaatgtcgcagggaacagcacccaggcaacgcatgcttacagcgttgatgccactgcgccctccgttaccatcaacaccatcgccacggacgatattcttaacgccgccgaagcgggatcggcgctgaccatcagcggcaccagcacggcggaagccgggcagacggtgaccgtaacgctaaacggcgttaattacagcggcaatgtgcaggcagacgggagctggagcgtcagcgtaccaaccggcgatttagctagccttaccgccagctcgtataccgttaacgcctcggtcagcgacaaagccagaaattcggcttcggcaacgcataatctgacggtggaccttgccgctccggtcgtcaccatcaacacggtggcgggcgatgacatcattaacgccacggaacacggacaggcgcagatcatcagcggctcggcaacgggcgcgactaccggtaatacggtttccgtgacgattggcacgaccacctataccaccgtgctggacgccaacggcaactggagcatcggcgtgcctgccagcgtgatttccgcgctggcgcagggcgatgtgaccattaccgctacggtcaccgactccgcaggcaacagcggcacggcctcgcacactgtcaccgtggcgctcggcgctccggtgctcgccattaacaccattgccgtcgatgacatcatcaacgccgcggagaaaggcgcggatctggcgattaccggcaccagcaaccagcctgcgggcacgcagattaccgttacgctcaacgggcaaaattacaccaccactgccgatgcttccggtaactggagcgtgaccgttccggcgtcacgggtgagcgccctcggtgaagccacctacacggtgaccgcagccgccactgacgccgatggcaacagcggttccgccagccataacgtacaggttaataccgcgctgccgggcgtcaccattaacgtggtggcaacggacgatattattaacgccgccgaagcgggcgtggaacagaccatcagcgggcaggtgacgggtgcggcggcaggcgacacggtgaccgtcacgctcggcggggcgacttacactgccacggtgcaggcgaatttaagctggagcgtcgatgttccggcctccgcgctacaggagttgggcaacggcgaactgaccatttcggcttcggtgacgaacagcgtaggcaatactggtaacggcacgcgcgaaatcaccatagacgcgaatctccccggtctgcgggtcgacaccgtggcgggcgatgatgtggttaatattatcgagcacgggcaggcgctggtgattaccggcagcagctccggtctggcggcgggcagcaacgtcacgctgaccattaacgggcaaacctatgttgcggcggtgctggcggatggcacctggagcgtcggcgttccggcggtggatgtcagcgcctggcctgcgggatcggtgacgattgcggcgagcggtagcacctctgccggaaatccggtaagcgttacgcatccggtgacggtcgatctctcggcggtggcggtgagcatcaacgccattaccgccgatgatgtgatcaacgctgccgaaaaaggcgcggcgttaacgctctccggcagcacctctggcgttgaagccggacaaacggttaccgtcacctttggcggcaaaacttacagcgccacggtggctgcgaatggttcctggagcacctcggttccggcggcagatatggcggctctgcgtgatggcgatgccagcgcacaggccagcgtcagcaatgttaacggcaacagcgccaccacgacccacgcttacagcgttgatgccagcgcgccaacggtgaccattaataccattgcgggcgatgatattcttaacgccgccgaagccggagcggctctgaccatcaccggcagcagcacggcggaagcggggcagacggtgaccgtcacgctcaatggcacaaactacaccggcaccgtacagacggacggcagctggagcgtcagcgtaccgtcagccgacttaagcaccctgaccgccagcaactacaccgtgaacgcggcggtgagcgacaaagccggaaacccggcctcggttaatcacaacctgacggtggatacgtccgttccggtcgtcaccatcaacacggtggcaggcgatgatgtgatcaacgcgacggaacacgcccaggcgcagatcatcagcggctccgccactggagcggcaaccggtagcaccgtgacggtgactatcggcacaaatacctttaccacggtgctggatgccagcggcaactggagcgtcggcgttccggcaagcgtcgtctcggcactggcgaatggcacggtgaccatcaatgccagcgtcaccgatgccggaggaaacagcggcagcgctacccatcaggtgacggtcaataccgggctgccgaccattacctttaacgccatcagcggcgataacatcctgaacgccgatgaaaaaggccagccgttgaccatcagcggcggcagtacggggctggcgacgggcgcgcaggtcaccgtcacgctcaacggtcacaactacagcgccaccaccgacgcatcgggcaactggaccttaaccgtgccggtgagcgatctggcggcattaggtcaggccaactatacggtcagcgccagcgccaccagtgcagcaggcaacaccgccagcagccaggcgaatttactggtcgacagcggcctgccggacgtcaccatcaacaccgtggcaggcgacgatattatcaacgccgccgaagcgggggccgatcaaaccatcagcggggtggtgactcgcgccgccgctggcgatacggtcaccgtgacgctgggcgggaacacttacaccgctacggtacagagcaacttaagctggagcgtcagcgttccgacagccgatctccaggcgttgggcaatggtgatttgaccattaccgcctcggtcaccaacgctaatggcaacaccgggagcggcacgcgggatatcaccattgatgccaacctgccggggctgcgcgtagataccgtggcgggcgatgatatcgtcaacagcatcgagcacgggcaggcgctggtgatcaccggcggcagtagcggcctgaatgcaggtgctgtgctgacggttaccatcaacagtgtggcgtattccgccacggtgcaggcggacggaagctggagcgttggcattccggcggcaaacgtcagcgcctggcctgcggggccgttaaccgtggaggtagacgggcaaagcagcgccaataacccagtcagcgtcagccatccgttcaccgtcgatttaacggcggtggcaatcagcatcaacaccgttgccagcgacgacgtgattaacgccgcagaaaaaggcaccaatctgactctttccggcagtaccagcgggattgagagcgggcaaaccgtcaccgtcacttttggcggtaaaacctacactgcaagcgtcgccgccaacgggagctggagtgtaaacgttccggcggcagatctggcaactctgccagagggcgcggcgaatgtgcaggccagcgttagcagcgcgagcggtaacagtgcctcggcgacccatgcgtatagcgttgacgccagcgcgccgacgctcaccattaacaccatcgccagcgacgatatccttaacgccgcagaagccggaagcccgctcaccatcagcggcaccagcaccgccgaaaccgggcagacggtgaccgtcacccttaacggcgcaacctacaccggcactgtgcaggcggacggtagctggagcgtcagcgttcccacttcagccctgggcgcgctcaacgcaagcaattacaccgtcagcgccacggtcaatgacaaagcgggcaaccccggcagcgccagccataatctggcggtagacaccaccgcgccggttctcaccattaacaccgtggcgggcgatgacatcatcaacgatgccgaacatgcgcaggcgctggtgatctccggcaccagtagcggcggggaagcgggcgatgtggtgagcgttgtgctcaacggcaaaacctacaccaccaccctggatgcctccggcaactggagcgttggcgttccggcggcagatgttacggcgctgggtagcggtgcgcagaccatcaccgccagcgtcagcgatcgggcaggcaacagcgacgacgccagccgcaccgtgaccgtcagcctcagcgcgccagtgattagcatcaacaccatcgcgggcgatgatgtgatcaacgcgacggaaaaaggatctgatctggcgctttctggcaccagcgatcagcctgcgggtacggcgatcaccgtcaccctgaacggacaaaactacagcgccaccacggatgcctccggcaactggagtgttaccgtgcctgcctcggcggtcagtgcgctgggcgaagcgacctacagcgtgacggcgagcgtcaccaatgctcagggtaacagcagcaccgccagccataacgtgcaggttaataccgcgctgccgggcatcaccattaatccggtggcgacggacgatattatcaacgcttcagaggcaggcagcgcgcaaactatcagcggccaggtaaccggtgcggcggcgggcagcaccgtcaccgttgaactgggcggtaaaacttacaccgccaccgtccaggctgatttaagctggaatgtgagcgtacctgccgccgactggcaggctctgggtaacggtgagttaacggttaatgcctcggtgaccaacgccgttggcaacaccggtagcggcacgcgcgatatcaccatcgatgccagtctgcctggcctgcgggtggataccgtcgcgggtgatgatgtggtcaatatcatcgaacacgctcaggcgcaggtgatcaccggcagcagctccggctttgccgcaggcacggcgttgacggtggtgattaacaaccaaacttacgccgccacggtgttggcgaacggtagctggagcgtcggcgttcctgcgacggatgtcagtaactggcctgcgggaacgctgaatattaccgttagcggggcgaacagtgccggaacgcaaaccagcattacccatccgctgactgttgatctcaccgccgtcgccatcagcatgaacagcatcaccagcgatgatgcgattaacgccgccgaaaaaggcgcggcgttaacgctctccggcagcacgtccggcgtcgaagcggggcaaaccgtcaccgtcacctttggcggcaaaacctacaccaccacggtggcggcaaacggtagctggagcaccaccgttccggcggcggatttggcggccctgcgtgatggcgatgccagcgcccaggtgcgggtgactaacgtcaacggcaacagcgccacagcaacgcacgaatacagcgtcgatagcgccgcgccaacggtgaccatcaacaccattgccagcgataacatcatcaacgccagcgaagcggcggcgggcgtaacggtgtccggcaccagcaccgcgcaaaccgggcagacgctcaccgtcacgcttaacggcactaactaccagaccacggtgcagacagacggcagctggagtttaacgctgcccgccagcgacttaaccgcacttgctaataacggctacaccctgaccgccacggtcagcgatctggcgggtaaccttggcagcgccagcaaaggcgtgaccgtcgataccactgcgccggtgatcagttttaacaccgtggcgggcgatgatgtgattaacaacgtcgaacacattcaggcgcagattatcagcggcaccgccacgggcgcggtggcgggcgaccgcctggtggtgaccatcgccgggcagcagtatgtcaccagcaccgatgccagcggcaactggagcgtcggcgtgcctgccagcgtgatttccggccttgcggatggcacggtgaccatcagcgccaccattaccgatagcgcaggcaacagcagcacgcagacgcacaacgtacaggtgaacacggcggcagtgtcgctctcggtcagcactatcagcggcgataaccttattaacgccgccgaagcgggcagtgcgctgaccctgagcggcactggcactaatttcgcgacaggtacagtggtgaccgtgttgcttaacggcaaaggctacagcgccaccattcagagcaacgggagctggagcgtgaacgtgcctgcggcggatgttgcggcactcagtgatggcaccagctacacggttagcgcctccgctcaggacagtgccggaaacagcgccacggcctcgcgcagcgtggcggtggatctcaccgcgccggttatcagcattaacaccgtttcgacggacgaccgcctcaacgccgccgaacagcagcagccgttaacccttaacggctcgaccagcgcggaagtggggcagacggtcaccgtcacctttggcggcaaaacctataccgccacggttgccgccaatggtacctgggcgctgaacgtgcctgcggtggatctggccgcgctcgggcagggcgcgcagaccattaccgccagcgtgaacgatcgcgccggtaaccccggacaggccacgcacgccctgaccgtcgataccgttgcgccaacggtcaccatcgccacggtggcgggtgacgatattatcaacaacgccgagcagcttgccgggcagaccattagcggcaccaccaccgccgaagtgggccagacggtgaccgttacctttaacgggcaaacctggagcgcaacggttggcagcggcggaagctggtcggtgtttattccggcgcagcagtttgccggattaagcgacggcagctacaccattagcgcgacggttagcgatcaggccggaaaccccggcagcgccagccgtggcgtgacgctgaacggcgatgtacctactgtcaccatcaacacctttgcgggcgacgatgtggtgaatgcagcggaacacggctcatcgctggtgatcagcggcaccaccaccgcgcccgtcgggcagacgctgaccctgaccttaaacggcaaaacctacaccaccacggtgcagacgggcggtagctggagctacaccctcggcagcgccgatgtcaccgcgctggcggacggcaacgcctacgtgattaacgcctcggtgagcaatgccattggcaacaccggtagcagtaatcacaccattaccgtcgatctcagcgctccggcgatgggcattaatatcgattccctgcaagccgacactggccttagcgccagcgactttatcaccagcgtcagtccggtagtggtcaacggctcgctcaccgccgcgcttgccagtaacgagacggcgcaaataagtatcgacggcggcacaacctggaccacgcttaccgttaccggcacgacctggcgctataacgacagccgcacgctgaccgatggcaactatctctatcaggtgcgggtgattgacgcagcgggcaacgttggcgcgaccgacagccagaatgtggtgatcgacactaccgcgccagatcccgcggtgaaaaccatcgccatcagcgcgatcaccaccgatatgggcttgatcactaacgattttgtcaccagcgacacgacgcttgcggtgagcggcacgctgggggcgacgctttctgccggtgagttcgcgcaaatcagcctcgacggcggcgtcacctggactacgttaaccgtcgttggcaccagctggagctatgccgatggtcacacgcttactgacggcacctggaactacacggtgcgggtggtggatctggcggggaacgttgggcagaccgcaacgcaaaacgtggtggtcgacaccaccagcccggaagcggcgaaaagtatcaccattaccggtatcagcgatgacaccggaaccagcagcagcgattttattaccagcgacaccacgcttaccgtgcgcggcgtattgggcgcggcgctcggcgctaatgagttcgcgcaaatcagtaccgacaacggcgcaacctgggtgaacgtgaccgtcgccgcagacagcctgaactggagttacgttgacggacgaaccctcaccaacggcaccaccacctggcaggtgcgggtggtcgatctggcgggcaacgttggcgcaacgagcagccagtcggcgctgatcgataccgttaacccggcgcaggtgctcaccatcgccagcatcagcaccgacacggggagttcggcaactgactttatcaccagcgacaccatgctcacgctgaccggttcgctgggggcggggcttgccagcggcgaagtggcgcagattagccttgatagcggcgcgacctggacaacgctcaccaccaacggtacacagtggacttacaccgacagccgcacgctgaccgacggcagctacgtttatcaggtgcgggtgctggatctggcggggaacaccggcccggtggtgtcgaaaacggtggtggtcgatacgattaaccccaccgccacaccaacgattgtgtcgtataccgatgatgtcgggcagcggcaggggacattaagcagttcgcaggccaccgacgacactacgccgctgctgaacggtgtactttccgcgccgcttgccagcggtgaagtggtttacctctaccgtaacgggctgctgttaggggcggtgacgatggtcggcgctctgaactggacctacagcgacagcgggctggtgagcggtgcctatacctacagcgcgcgagtggtggatttggcggggaatatcacctcctccagtgattttgtcctgacggtcgatacctctattccgaccacgctggcgcaaatcaccagccagaccacgcgcgatactacgccgattattagcggggtgatcaccgccgcgcttgccagtgggcagtatgttgaagtggtgatcaacggcaaaacctacacctctgaaccgggcggcgcggtagtggtcgatccggcgcacaacacctggtatgtacagttgccggataccgatgcgctgacagtttccgcgaccgcctataccgttactgcgcaggtaaaaagttcggcgggtaacggcaataacgccaatattagcaacggcacggtgacggttaacgcggcgattgattacacaccgacctggactaccgccagcaaaaccaccgcctgggggctgacctacggcctcgactcgcacgggatgtggacggtgctggcaaaccagcaggtaatgcaatcgactgacccactcacctggtcgaagaccgcgctgacgctgtatcagagcggcaacaactacgccaccagctccattgccgattacgaccgtaacggcacgggcgatctgtttatcacccgtgatgactacggtacgggctatattaacggctttaccaataacggcgatggcaccttttccagcgctattcaggtcaccgtcggcaccctgacgtggtacggctcgattgtggcatttgataaagagggcgacggctatctcgacttctggattggtgacgctggcgggccggactccaacaccttcctgtggaacaacgcaggcacgctggtaggcaactccaccacgtcgaacagcggcggtagcgccacggtgggcggggcggtgacggggtatctttcgctcaacgaaggttctggcgtcgatctgaacaatgacggcaggatcgacctggttcagcacacctataacctgaacaactattacacgctgtcttcgctcatcaaccaggggaatgggacgtttgtctgggggcagaacaccaccaataccttcctgagcggggcgggcagtggcgctatgagcagcagcgtttccatgacctgggccgatttcgatggtgacggcgatatggatctcttcctgcccgccagccagggaagagctaactacggctcgctgttattcaacaccaacggcgtactgggttgcccggtggcggtgggcgcaacggcaaccacctacgccagccagtttagcctggcggtggactggaaccacgacggcctgatggatatcgcccgtatcgcccagaccgggcagtcgtatctttatactaacgtcagcaacgccagcaactggacgcaatcggccctcggcggcagccagagcggtaccaccagcggcgtggcggcaatggactacgactgggacggcgcggtggatgtgctggtgtccaaacagtcgggcagcgtgttcctgagccgcaacaccaacacggtgagctacggcacttcgctacacctgcgcatcaccgatcccaacggcattaacgtctattacggcaataccgtgaagctgtacaactcggcgggagtgctggtcgccacgcaaatcatcaacccgcagtcgggtatgggggttaacgacacctcggcgctggtcaacttctacgggctgaatgccggagaaacctacaacgcggtgctgatcaaatccaccggcaccaccgccagcaatatcgaccagacggtcaacaccagctggggcggtttacaggccaccgatgccactcacgcttacgatctcagcgctgaagcgggtaccgcgagcaacaacggcaagttcgtcggcaccggctataacgacaccttcttcgccaccgcaggcaccgacacttacgacggttccggcggctgggtgtacagctccggcaccggaacgtggctggcgaacggcgggatggacgtggttgatttccggctttcgacggtgggcgtgacggctaacttaagcagcactgccgcgcaggccaccggttttaacacctcgacatttaccaatatcgaaggcatttccggctcgaattttaacgacattctgaccggcagcagcggcgataaccaactggaagggcgcggcggcaacgacacgctcaacatcggcaacggcggccacgacaccttgctctataaactgctcaacgccagcgacgccactggcggcaacggctcagacgtggtgaatggctttacggtagggacatgggaaggcaccgccgacaccgatcgcattgatattcgtgaactgttacagggcagcggctacaccggcaacggcaaagccagctacgtcaacggcgtggcaacgctggatgcgcaggccggaaacatcggtgactttgtcaaagtcacccagagcggcagcgacaccatcgtgcagatcgaccgcgacggcacgggcggcacttttgcgacaactaacgtggtcacgctgacgggcgtgcacaccgacctcgccaccttgctggcgaatcatcagttgatggtggtgtag

SEQ ID NO: 41092 - DNA, 1176 bp, Escherichia coli
atgaacggacaactgcaatataaccgtggtctgactgaaccccgcctgccgcgttcggcgctggcggtacgcgttaccgctgtgatgctgctctgttttctcggctgggcgtggtacttccagcttgatgaagtcaccaccggcagcggcacggtagaaccttccgggcgcgaacaggtggtgcagtcgctggaaggcggaattctgtatcatctcgacgtgaaagttggcgatattgtcgaacagggccagccgctggcgcagcttaaccgcaccaaaacggaatccgacgtccaggaagcgatgtcgcggctgtacgcggcgctggcaacctcggcgcggctgcgggcggaagtgagcaataaaccgctggtcttccctgacgaactgaataaattccccgaacttatcgagtcggaaacggcgttgtacaacactcgccgcgacgggttgaacaaagccaccaccgggctgacgcaggggattagcctggtcaatcgcgaactggcgatgacccagccgctggtaaaacagggggcagcgagcagcgtcgaagtactgcgcctgcaacgccaggccaatgaactggaaaacaaactcagcgacgtgcgcacgcaatactacgttcaggcgcgcgaagagttagcaaaagccaatgcggaagtggaaacccagcgttcggtgatccgtggacgggaagactctctcaccaggctcaactttaccgcgccggtgcgaggcattgttcaggatattgatgtcaccacggttggcggcgtcatcgcccccggtggtaaactgatgaccatcgtgccgctggatgagcaactgctgattgaggcaaaaatctccccgcgcgatgtggcgtttatccacccggggcaaaaatcgctggtgaaaataactgcctacgattactccatctacggcggcctgccgggagaagtggcggtgatatcaccagacaccgtgcaggatgaagtgcggcgcgatgtttattactatcgggtgtacattcgcactttcagcaaccatctggaaaacaaaagcaaacagcagtttccgatattccccggtatggtggcgacggtcgatatccgcaccggcaaaaaaagcgtgctggattatctgttgaaaccctttaacaaagcacaggaggcgttgcgcgaacgatga

SEQ ID NO: 41093 - DNA, 408 bp, Escherichia coli
atgaacattagcgatgtagcaaaaattaccggcctgaccagcaaagccattcgcttctatgaagagaaggggctggtgacgccgccgatgcgcagcgaaaatggttatcgaacctacacgcagcagcatctcaacgaattgaccttactgcgccaggcgcgccaggtgggctttaacctggaagagagcggcgagctggtgaatctgtttaacgacccgcagcgtcacagtgccgacgtcaaacgtcgcacgctggagaaggtggcggagattgaacggcatatcgaagaactgcaatctatgcgcaaccagctactggcgctggcgaatgcctgccccggtgatgacagcgccgactgcccgattatcgaaaatctctccggctgctgtcatcatcgggcggggtga

SEQ ID NO: 41094 - DNA, 204 bp, Escherichia coli
atgaaggagcaaaggaaaatacccctgacgcatattatgattatcggtgcgtttatttttgccttcttgcaagtagtattattagcctccctggttcacgctgtgaatgttaacaacgaaatccaggaaggcttatttcagtcggggcgcattatggtagaaagtttgcagcatattctttcggtgcaaacggggattcactga

SEQ ID NO: 41095 - DNA, 423 bp, Escherichia coli
atgatgaatagctccattaaatcgttttccctgctggcggttatattactggctggctgtagttcacccacttcccgcatcgcagattgccaggcgcagggcgtcagtcatgacacctgttacctcgcagaacagcagcgtcaggcggctattttaagtgcatccgaggcacaggcatttaaaaatgcagaagccgcacaacacgcccaggcggcaaagaaagccatttataaaggatttggcatgacctttagaatgagcagtaaaaactttgcttatctcaatgattcattatgtgcaattgatgaagacaataaagatgccactgtttatcagtcaggtctatataacgtcattgtttatcatcacacaggaaaagtcgccttaatgaaagaaggccagtttgtgggttatttaaaatga

SEQ ID NO: 41096 - DNA, 1017 bp, Escherichia coli
atgaaaactgtaaacgtagctttactggcactcataatttcagcaacatccagccctgttgttttagctggtgataccattgaagcggcggcaacagagctttcagccattaactctggcatgtcgcaatcggagattgagcagaagattacccgctttttagaacgcacagacaacagccccgctgcgtatacctatttgactgaacatcactacatcccttctgaaacacctgataccactcagactcccactgtccagacagatcctgacgcaggacaaaaaaccgttgccgctacaggtgatgtacagacaactgcccgttatcagagcatgatcaacgcccgacagtctgcggtaactgacgcccagcaaacgcaaattacagagcaacaggcgcagatcgtagccacacaaaaaacgctcgccgcgactggagatacgcaaaataccgcgcattatcaggaaatgattaatgccagactggcggctcaaaatgaggctaatcagcgcaccgccactgaacaagggcagaaaatgaatgcgctgacaaccgatgtggcagtacaacagcaaaatgaaaggactcaatacgataaacaaatgcaaagtctggcgcaggagtctgcccaggcacatgaacaaattgacagcctgtcacaagacgtaacccaaacgcaccaacagttaaccaacacccaaaaacgggttgcagataacagccagcaaattaacacgctcaataaccatttcagttcgctaaaaaacgaagttgatgacaatcgtaaagaagccaatgcgggaactgcatctgccatcgctatcgcctcacaaccacaggttaaaaccggtgacgtgatgatggtgtcagcgggagcgggaaccttcaacggtgaatctgcggtgtctgtcggaacatcatttaatgccggaacgcatacggtacttaaagccggtatttctgcggatacacaatctgatttcggcgcaggtgtcggcgtgggatattcgttctaa

SEQ ID NO: 41097 - DNA, 363 bp, Escherichia coli
atgaatgaatttgagaagatttttaatgaaatgaatctggaccgggcattgctaccgatcctttttcgttcgaaccggtcgacagtgtggaagtatttaagcggcgatagtacggctcctgcctctgccatgtcgctgattatgctgttgcagttgatacagaaacgaaaccccgatctgttagccgaatggttaacgctttctgatttcaccattccgccagaagtttacctggaccagcctgattactggaaagggtgggtgtatacgcaacacaaggtcaataaaaacgtcctggaatatctaaaaaaacactatccggatgaagaccaaaaaagtatgagtaaaggccgggaagagtaa

SEQ ID NO: 41098 - DNA, 459 bp, Escherichia coli
atgatggagttaatagtcgttcatccacatattttctggctcagtctcggcggtttgctgctggcagccgagatgctgggcggaaatggttatttgttgtggagtggcgtggcagcagtgattactggcctggtggtctggctggtgccgctgggttgggagtggcaaggggtgatgtttgccgtcctgacgctgctcgccgcctggctgtggtggaaatggttgtcgcggcgggtgcgcgaacaaaagcacagcgacagtcatttaaaccagcgcgggcagcagctgattggccgacgttttgtgctggaatctccgctggtcaacgggcgcggtcatatgcgcgtcggtgacagttcatggcctgtcagcgccagcgaggatctcggcgcaggtacgcatgttgaagtcattgcgatagaagggataacgctgatcatccgtgcggtcatcgcctga

SEQ ID NO: 41099 - DNA, 918 bp, Escherichia coli
atgcttatctttatcccgattctcatttttgtcgcgctggtcattgtcggcgcgggcgtcaaaatcgtgccgcagggctatcaatggacggtagaacgttttggtcgctataccaaaacgttacagccggggctcagtctggtggtgccgtttatggatcgcattggtcgcaagatcaatatgatggagcaagtgctcgatatcccttcccaggaagttatctcgaaagataacgccaacgttaccatcgacgcagtctgttttattcaggtgattgacgcgccacgcgcggcttatgaagtcagcaatctggagctggcgatcatcaacctgaccatgactaacatccgtaccgtgttgggttcaatggaacttgacgaaatgctctctcagcgcgacagcatcaactcacgcctgctgcgtattgtcgatgaggccaccaacccgtgggggattaaagtcacccgtattgaaattcgcgacgtgcgcccaccggcagagcttatctcttcaatgaacgcgcagatgaaagcggaacgtaccaaacgcgcttacattcttgaagcggaagggatccgtcaggcggaaatcctcaaagccgaaggtgaaaaacagtcgcaaatcctgaaagcggaaggcgaacgtcagtcggcgtttttacaggctgaagcgcgtgaacgttccgctgaagcagaagcccgcgccaccaaaatggtgtctgaagccatcgcctccggtgatattcaggcggtgaactacttcgtagcgcagaaatacaccgaagcgttacagcagatcggttcctccagtaacagcaaagtagtgatgatgccattagaggccagcagcctgatggggtcgattgccgggattgccgagctggtgaaagacagcgccaacaagcggactcagccatga

SEQ ID NO: 41100 - DNA, 678 bp, Escherichia coli
atgcaggaaaatagtcctttgcttcagctacaaaacgtaggatatctggcgggtgatgcgaagattcttaataacatcaatttttcgctgcgtgctggcgaatttaagttaattaccggtccttctggttgtggcaaaagtacgctgctaaaaatagttgcttcattgatcagcccaaccagcggaacgttactgtttgaaggtgaggatgtcagcacactaaagccagaaatctaccgtcagcaagtctcttactgcgcccagacgccgacgctgtttggcgatacggtatacgataatctgatctttccctggcagatccgtaaccagcagcctgacccggccatttttctcgattttcttgaacgcttcgccttgccggacagcattttgacgaagaatatcgccgagctatctggtggtgaaaaacaacgcatctcattgattcgtaacctgcaatttatgccgaaggttttattgctggatgaaatcaccagtgcgctggatgaaagtaataaacataacgttaatgagatgatccatcgttatgtgcgcgagcaaaatattgccgtgctgtgggtgacacacgataaagacgaaattaatcatgcggataaagtgattacactgcaaccgcatgccggagaaatgcaggaagcacgctatgaactcgcataa

SEQ ID NO: 41101 - DNA, 273 bp, Escherichia coli; identical to SEQ ID NO: 23718

SEQ ID NO: 41102 - DNA, 435 bp, Escherichia coli; identical to SEQ ID NO: 40859

SEQ ID NO: 41103 - DNA, 519 bp, Escherichia coli; identical to SEQ ID NO: 37222

SEQ ID NO: 41104 - DNA, 432 bp, Escherichia coli
atgtttggaatcttcaaaaagaaagcccgcagagcggcaacggaaattaaaaagtttgaaaaacgcgatctggcacaggtggtgattaacgccgcatacctggtggcctgtgcagatggtgaatgtgaggcatccgagaaagcgaagatcgaacaggtactgcgtaatcagcctgcgctgtccgcgtttacgtcagaaattaatgcgattagcgcaaccattatcggtcagctggatacgaactttaaaactggtcgtcgtgcggcgttacgtgagattgaggatgtgaaacacgatacgcgtgaagcggaagatgtgctggatgtggcggtggccattgcggaggcagacggcgaaattgagccggaagagcgcaaggtgctggaagagattgccggtgttctgggtcttcgtctggagaatcacctgtga

SEQ ID NO: 41105 - DNA, 144 bp, Escherichia coli; identical to SEQ ID NO: 23988

SEQ ID NO: 41106 - DNA, 342 bp, Escherichia coli
gtggctgagataaaaacgctgcatctggtcccgcgtgaagggatgcaggtgagtgagaagccgtcggtggtgagggtgcggtttggtgacggttatgaacagcgccgccccacagggctgaatcctcaactgaagacgtttcaggcggtgttccgggtgacggatgagtcaacccggcgctggctggatgaatttttatcctggcatggtggttaccgtgcctttttgtggcgaccgccgaaacataaccggacggtgagggttgtgtgccgtgagtggagtgtcacggataatgcccggtacagtgatttcagttgcacgatagagcaggtggtgaactga

SEQ ID NO: 41107 - DNA, 1110 bp, Escherichia coli
atgcagaatgcagaaaatgtcagcgaatatctgtcattacgccatcaggggctgcaacaaagtattcagtcactgcaggtacatatcaccagcctgctggcggatatccaggagattgagaaatgtcagaatcaggtgactggtgatgtcaaaattgccatggataacatcaataccaaaacccgggaattactgacgggggtctgcacctcactggaagaggcgctgaatgactatttcagaagcggtaaacgcaaagaacagcaaatgctggaggaagaaaattcagcgcagccccgggagagaaacgcattcgctttctttcacgatattttcggaaccggaaatcagcatgacaggatgcgggactttgacccggacagccccgaaataaaattcagtgatcgcagggaagcccttaaactgatgacgcaaatcgaatcgaccgtggccagcctgcatcgtgaggctgaagcacagttccggcctgaactggaaaaaatcgtcaggggtattgaaacaggttttcgtggtacagccctgtatgccacagaaaatattgccggacgcatcaatgcccgcctggaggatgaaggtttcactgtaaaaatcagttttccggcagtcagccagttacagacccggctcgcggtaaaaataaatctgagtgcgcttatggaggaaagaacggagaccgtcacccgtcgccgtcggcagagtggcgtatggggaaccgtttgtcgatggtttggcaccagtgacctgggctgggaaaactatgacgaggatgtgagtcgcagcgtgatcaatatcaacaaggccagagaggaagttatgtcactgacccgggcatatttcggggagctgcaggcatccattgagcaggatattaaccagcccgtccgccaggaaatcgatgcctttttctgcgcattcagggagaaagttgaacaactgcgtaacacgctgattcagagctctgaagatcataaacgcgatcagcaggcgcaggaacggcttaccgggcgacttcaggcattaaatgaaagggttcctgagctcattactgacagtaaggcgctgagggaagagctggagacaatgctgtga

SEQ ID NO: 41108 - DNA, 270 bp, Escherichia coli; identical to SEQ ID NO: 23881

SEQ ID NO: 41109 - DNA, 354 bp, Escherichia coli
gtggtgattaacgccgcatacctggtggcctgtgcagatggtgaatgtgaggcatccgagaaagcgaagatcgaacaggtactgcgtaatcagcctgcgctgtacgcgtttacgtcagaaattaatgcgattagcgcaaccattatcggtcagctggatacgaactttaaaactggtcgtcgtgcggcgttacgtgagatcgaggatgtgaaacacgatacgcgtgaagcggaagatgtgctggatgtggcggtggccattgcggaggcagacggcgaaattgagccggaagagcgcaaggtgctggaagagattgccggtgttctgggtcttcgtctggagaattacctgtga

SEQ ID NO: 41110 - DNA, 240 bp, Escherichia coli
atgcataacgttgttacatcggagcatttgcgtgcggcggcagaatgcaaaaagcttattgcaacttataaaaatgttgagctgcttattcgtattggtgagtacacgatggggcaagatcctgaagcagataaggcaataaaaaataggaaattaattcagaactttatacaacaaagcaccaaagatatcagtagttacgaaaaaacgattgaaagcctattcaaagtggttgcctga

SEQ ID NO: 41111 - DNA, 384 bp, Escherichia coli
atgacacgcagaactcagttcaaaggcaattcacgttctcgtcgtcgtgagcgtttaaaggcaaaggcattagctaacggcgtactggcccgcgaagaagcaataagttcagaagtattacaccgccctactctaagcagagcgcagattcaggctaaaggtactcacgaaacgcctgagcgcatagaagacgctaagccaattaagttcatggcacaggacgtgatctggcaacagaaagaatacagacgcaatctggagcgagcggccattgtgtacgcgaatgagtttggacataagcaaccagaaactggtgtatgtcttccaaacgtagccatttacgcggcaggctaccggaaatcaaaacaactgacggcgaggtga

SEQ ID NO: 41112 - DNA, 330 bp, Escherichia coli; identical to SEQ ID NO: 24045

SEQ ID NO: 41113 - DNA, 900 bp, Escherichia coli
atgcttccatcggaaataatgatctggcagcctgagttcacagataaaatactctccaggaaacccggggcggttcagtctcagtccggattatgggggaaaatttctcaatggtccggtatcaacaaccagggccgggaggattacaggaaacgagattttgccccggacagccccgaaataaaattcagtgatcgcagggaagcccttgaactgatgacgcaaatcgaatcgaccgtgaccagcctgcaccgtgaggctgaagcacagttccggcctgagctggagaaaatcgtcagcgggattgaaacaggttttcgtggcacggccctgtacgccacagaaaacattgccggtcgcatcaatgcccgcctggaggatgagggctttaccgtaaaaatcagttttccggcagtcagccagttacagacccggctcgcggtaaaaataaatctgagtgcgcttatggaggaaagaacggagaccgtcacccgtcgccgtcggcagagtggcgtatggggaaccgtttgtcgatggtttggcaccagtgacctgggctgggaaaactatgacgaggatgtgagtcgcagcgtgatcaatatcaacaaggtcagagaggaagttatgtcactgacccgggcatatttcggggagctgcaggcatccattgagcaggatattaaccagcccgtccgccaggaaatcgatgcctttttctgcgcattcagggagaaagttgaacaactgcgtaacacgctgattcagagctctgaagatcataaacgcgatcagcaggcgcaggaacggcttaccgggcgacttcaggcattaaatgaaagggttcctgagctcattactgacagtaaggcgctgagggaagagctggagacaatgctgtga

SEQ ID NO: 41114 - DNA, 285 bp, Escherichia coli
atgattcgacggatctttcaccgtcgccgtcagctgcacgctgtcgctgttattcgtcaccacctgttgagcagggatgttcagcgtaacctgcgcgttgctggcatcgggcgcaatattgactatcttcgtatcgttgttgccgttaggcagtgtggcttcggctgtatgaacacccaaaaccgtgcccttaaaggtaacttcggccacaccactgtcgttagtattgcttttgctctgactaagttgagtatctgcggggttggtactgaaggtgacctgtag

SEQ ID NO: 41115 - DNA, 1560 bp, Escherichia coli
atgtctaaaaacgaaatatctcagttaagagatgaacaagtagataacttgatcattttgtgtgatgaagctatgagggctacgcctgaaaatgtcaagagattcatagaacccgcgcctggcgttcttgctcaatcgaaagccaagcagcacagtttgatttttggtagaaggggctctggtaagtcctcattgttgaggaaggtagttgcagatctaacaatagatagaagaccaatttcttttgttgatatggagacatttaaaggtcattcataccctgatgtcctaattagtgttcttattaaaagcctacaagaattcgaggtttggttagaaactgctgcattaaccccagctactaaaactactttttggaatcgaatttttggtagagcgccggaaaggaaacctttcaaaaaaaatcctacaaatgagcttgtccgtgagctcaaaggcatcattcaagatttagaaaataaacttttgcagccagaagaaattgatgtgcaaagaaaggaaacttccacaagaagttttgaagcttctggtaatgcttccttgaagcaaggtccagtagatgtaggagtgggagttaaaaaaggaaatacaggtaccaaagaaattagtgaaggatataaatcattaaaaactgaatacttacatcaaaatatacttaagtttcaaaggttttttaacaaactttccgaattgtctgaagggccggcatatttaatacttgatgatctatatcatattagaagaagtgatcaggctaaagttattgattattttcatagggttgccaaaggaaatggtttgtggttgaaaattggtactatcaagcatagaagtgaatggtatattcatacagatcctcctactggtgttaaacttggtgatgatgcaaaagaaataaatatagatatttctttggaaaaatttgcaactttaaaacagtttatgcaaaaaatactcactaatctaatggtagaaacgccgcctatcacagtaaatggactattaaatacgactgcagtagataggttgattattgcttcgggtggtgttactagggactttattgggatatttactaaagctattaaccatgcgagagaaagagggccagatcatcctagaggtcctcgaattggtgcagaagatgtgaatcttgctactggtgaatatggtgatatcaagcgtgaagaatttaaattagatgctgatgatgatcgtattgccttggaggaagcattcacaaaacttgtggcattttgtttgaatgatgcaaaatgtaatatttttctaattaatcaaaaaatgactggccctgtcaaggatgctattaaccagttaattgatttaagattagtgcatttagtccagtctcgggttactttgaagaaaggtgctgatggcttagtttttgaggcatatatgctggatactagtcaatatacagcatctagaaaagttcgagatcttaatttgattgacttgaattccaagacatttagtgaagagatacgtaagaaaaaacttctctatgaaggttga

SEQ ID NO: 41116 - DNA, 993 bp, Escherichia coli
atgaaaactcacgatgttgacagcctctgggataatctgatggatgagtattttttttgtaagtcgttacggagagccacggagtggagttatcgcaaggtgttgtcggggttccggaagtttgttggttttcaccggactcctgacagcattgttcgtcgtgatgttcaggaatggcgtcgttttgtgctgaaagatcaggggttaacttcccatacctggaataacaaggtgaggcacatgcgtgcgatttataactttggagaagaatctgggttgatcactgtttcagaaaatccttttagtggcatgctggttaagcaggaaaaaagacggaagaaaacgctgacaaaagcgcagatcacgcgggttgtgcttattctgcagcaattttcggaagcagagaatcagcacgccggactttatatcaaatgtgccataaggccggcgtggttctggctgacggtggtgaataccctgcgttacacaggaatgcgtctgaatcagttactgcatttacgtctgaaggatgtttgtccggcagaaaaatggatcgatttacgggctgaaggtagtaaaactcacagagaatggcgtattccggttgcgcgtcagttacagccacaactgcagaaactactggatgaagccgtcagacggggagccacaccggaagactatcttttccactacaagcgttttgttgtgccggtgtcagaagcaaaacgtataacgggtctgccggatgagcagcctgtgaaatcgtttttccgcagattatctcaggagtgtggttttcaggtgtctccacatcgtttcagacatacactggcgagtatactgatgagcactccggagcgtaatcttcacctggtaaaaaacatgctcgggcaccagaatgtatcaaccacaatgggatatgtggaaatgaatctggagattgccgcacaggcactggagcatgagctggaggtgttcactgacaggctgtaa

SEQ ID NO: 41117 - DNA, 1566 bp, Escherichia coli
atgcttaatcgcctgaaaaaactgcttcccggtaacagcaataccagcggtactgagacaaccgacccggaagtcgcccgtcagccggaacatctgccggaaggtttttatataccccggactgcagaggagctgacgtccacaccacgcaggaaacagtgtctgaagcagctgtgggaaaacagcagtatgccatccggtgtgtatcagcagttctgtcttactccggtacaaaaactcctgatggcagcacagaacgttcccgccgccagagattcccggtgggcagatgtcaacggttttggcgacctgacgctgcagttcaccacatatgccgttcgtctggccagaggatatatgtttccgcccggtgccacaccggaagagcaggccgcacagtccggtgtatggaatgccgtggtgttctggtcggcactgttttatcacctgccacttcttgcatacctggagggggaactggtcagcggaaagttatggcagccgggaatgtcttcaccgggcgaggcatttcgtttccgctaccgacagcaacgtctgcagggttcagaggcacagcaactggcagcggtgatggccgggcagttgttgccggagggggcgacagcctggctggccactgtgccgggtgcattacagaatctggcgggtgcagtctggcatcagcatccggagatggcattgattcgttcagtcctgaaaacagcggcagaagaggtggagagtccgctccttgcattgccggtgacggaagccgtaacagcacctttactctcagaaaacactgtgcagcctgaagataatgtgccatctgacagccagccagaaacatcaacaggggccattgcgccggaaatgccggcggccgtcccggaggtgggcgaatttacgctgcagccctctgtttcaggaaccgatgaggccgaagcagtcgtcccggatacgttgcagtctgcaacaggcgcggaggaaaaggctccggaggagcagagtgtccatgatgataccgatatgctgctgagcctgttttctgctgcagatgaccatgctgcagtagtgacagcagacggagaatgcttacaggaaacgcaggtgttgattgataatgatcattctcaaagaaaacatgaggatgcctctctcacattgatttccggaagctctgctccggaagctgttatttcagaaggagagatgtttataaactggttaaaaaaaggagtgaggaacggggaaatcagcctgaacggaaaaaaagataaaattcatattgttgccggctttgtttttttacctgtaccgggaattttttatgagtttacgaaagcagcaggcatcccggcagacaaaaaagatgatattcaggcatcgtttgaacgcctgagcattcataagcggcgggataaccgacgcttttattttgcacatttgtgtgaagagcctgaaaacagaagtcgttttaaaacgctaaaaggttatctggtaaaaggcaggcagctcctggatggacaggaactacaggacagtcgttatctcttttttccatga

SEQ ID NO: 41118 - DNA, 1500 bp, Escherichia coli
atgtcactgacacccaccgatgaacagtctgccattatccactggcaggggcagaagctggttgtgaacgcctttgccgggacaggaaagaccagtacactggttcagtatgcactggtaaaccccgacagcagaatgctgtatctggcttataaccgttctgtacgcgatgaggcagagcgtaaatttccgtttaatgtggaatgcaaaacctcccaccaactggcctggtcgcgcttcggcaggcattatcagaatcgcctggttgccagcctgcgtatcacggatgtggccagaaagctgaacacccgtcactggctgctggttcgtctggcactcagcagtctgaatcagtttctgtgcagtgctgacacggaaccggggctgcagcatttgccggatgaggacgcccgggccggtacggatgtctcagccatcctgaaggcagtacaggtgctgtggcatgaaatgagtcgccctgatggcacattccctgtcacgcatgatacctacctgaagctgttccagttgtcatccccggacctgtcccgcagatgggacaccattctgtttgatgaggcacaggacgccaatcctgtgacatctgcactggtgctcagtcagtcctgcagggtaattctggttggtgaccgttaccagcagatttaccgctttcgtggtgccgatgatgcgctatctcattctgttctgaacgatgcagaccgtctgtggctgacacagagcttccgctttggcccgtcggtggcccggatggcgaatctgcttttgcaacgtgccggtgagacgcgacaggtgaccggcagtggcggggaagatgaagtactgatgagccgtaccggcgcggataaaccggaagggcaccagacggtactgagccggacggtggcaggtgtgatatgcacggcactgatggccagtctgagtggcaggaaggtgtactgggtgggcggtattgaaggttaccggactgaggcactggaggacctgtactggttttcagttgatatgccggaaaagatgcagtctgatgcactgcggcgggattactgcgattttgatgaatactgccggatagccaaatccacccgggatgtggagatgaatcaggccattcgtctgctggatatctgtttcccgttgccggtgaaactgaagcttctgcgggagcataccgtcacgagtgagaaggatgcggatattaccgtgtcaacggctcaccgcagtaaggggctggaatggccggtggtgatactggatgaggattttgcggatatcaccgacccgctgatgccggaggatgaacggagggatgaaactaacttgctgtacgtggcagtcacccgtgcccgtaataccctggtactgaacagtctgatgcgccagctggtaagtgaacaaagccagaaggctgctgatacgtccccgtcagaaaacggggaaaacgatgccatatacgggcaggagggtgaaaatgcttaa

SEQ ID NO: 41119 - DNA, 3255 bp, Escherichia coli
atggtaaagacaaatccatcttcttcacaggtaagacgtgtcgcagtttatgggctggccggattgcagttcttttttcaggttaccccggcatttgccggtgtctttcaggctgatgaacagtctgtggcacagacggctatggaggccggacgtgtattgcagggcagcaacagtggtgatgcagcccgccagatgctgaccagccaggcttccgggcaggcagcagatgcggtcactcagtggctgaaccagttcggtacggcgaaaacgcagctgagcgtggacagtgacttctccctgaaaggctcgtcgctcgatgtgctgctgccgttttacaacaccccgaagaacgtgctgtttacccagctcgggatgcgggataacgacggacgcttcaccaccaatgccgggctgggccaccgttacttcacggataacggctggatgctgggatataacgtgttttacgacgtggactggcgcaacaccaaccgccgctacgggattggcgtggaagcctggcgtgattacctgaaactgtccgccaacggatataaacgcctgtctggctggcggcagtccccgaccgttaccgattatgacgaacgtccggctgacggctgggatatccgtgctgaaggctggctgcctgcgtatccgcaactgggcggtaagctggtttacgagcagtattacgggaatgaagtggcgctgttcggtgagtctgaacgccagaagaatcctcatgccatcactgccggtgtcacctggacgccgttcccgctgctgaccgccggtgtcgattaccgccggggcaaaaacggggctgacgacacccgcctgaacctcggcctgacataccgtattggtgaaccactggcgcaccaactggacagtggttatgttggggcaaaacgttctcttgccgccaaccgcctggaactggtgaaccgtaacaatgatgtggtgcttgaataccgtaagcagacgctgattaccctgcaactgccaccggatgtgtacggcgcagaactgacgaccgtcaccctgacgccacaggtaaacgcaaaatacgggctgtcccgtatcgagcttgacgatgcagaactgcgtcaggctggcgggaagattatcagcaataccggcaaccagattacgctgcagttacccgccaggtcatctgaccgtcagagcatcacgctctccggcagggcacgggatacccgtggcaacctctctgatattgcccgtacccgtattctggtgtccccggcagtacagcagcagctggcggtcagcacggataaaaccacggccactgcagacggtgcggacagtgtgcgctacaccctgactgtcacgggcagtgacggaaaaccggtcagcggacaggctgtacgctgggaacacaacggcggtacgctgaatggtgagaacaccacgaacgctgacggtatggccacagccaccctgaccagtcagactgccggcattatccgggttacagccaccacccgtaaccagacggcaaaagcggctgatgtgaccttcgttgccgccatgcagggagaactgctggctgaccgtactcaggcgcgggccgatggtcaggaggcagtcagctacaccctgacgctgaaaaccactgacggtaagcccctttcagggaaaaacgtcacattcaccaccacaaccgggaaactgagccggacgcagggcaccaccgaccagaacggtcagttgtctgtgcaactgaccagcacccgtgccggacaggcggtggtgaatgcctctgtggacggcaccaccatcagtgccgccccggtgacgtttgaaaaccgtccggataccgccattgtggtgaacaaaacctccgccgttgctgacgggcaggacagcatcattctgaccgctgtcatccgggatgccgcaggcaatccggtcgccgggcaggctgtcacctggcacacggacaaggggcagttcacacagcaggacgcggtgacaaatgctgccggtgctgcttctgccaccctgaccagtacacaggccggtaatgcacaggtatcgctttccctgaacggtacgaccaccacagtaagtgcgccccacatcagcttcacgcagcagttgtatctcaccctgcaggccggcagaaccactgctgtggcagacggaaatgacgtcatcacgtacaccctgaacgtgcgtgacgcggcaggtcagcccgtgaaggataaggccgtgcagtggagcaccgacctgggcacactttcagcctcgcagggcacaaccagtgcacagggcgaagccactgtgacgctgaccagcacgcaggccggacaggccgtggttaatgccaccgtgggtggtaaacaaatcagcgcacagtctgtcaccttcacccgtaccgtccgtggtgtcatctcggttgaaaaagagcgtgtttatccgggaaccagacagacggtcaccctgacgctaacggatgccgcaggtaacccggtcagtggcgaacgcgtggactggcatgctgacagcggtaatctctggcagacacagggaacaacggatgcacagggccgggccaccacgacgtgggaaagtaccatgcccggaacggccaccattgccgctgacgcgtatggtcagcagtacacggctcccgccattacagtcatgcctgccctgacggtcagcagcgtcaccggcatcgatgccactggcgcagacggcaaaaattttggcaaacgtgtccccagcagcacctggccgggcgcgaaattccgcatcgatacggagaatgccgccggcacggtcacctggaccgcatcctcaccggccgtaagcatcaacggtaatatcatgaccgtaaaaagcaatccggcaggcgtcaccctgacggggacggatgcagacggacagacggtaaccctgaacatgggcagcaactggtttgcgcagagtgccacaaaatcagagtggttgaatggtgactacaacggaacggctatttactcctgtcgtcagcttggcgcgcaggtggcgtcatccggcgcgttgcagggcattatcagtgaatggggcgaactggaaacctatgatggctggacaaacctgaaaaataactggctgaattccagtacaacagttgtgagtagtaatggtgtgaaaagcaccattgcgtattacttccccggcggtcgggaaggtcagctgaacggtgtcagcggttattacgcctgccgctaa

SEQ ID NO: 41120 - DNA, 393 bp, Escherichia coli
atggagttgactgcaaacctgctgaaaagccttaacaacatcaggcaaaatgccaccatatatgttcacgcataccactatactgatgatgaaaaatgcgttatggtgccacggacatctttaccatcactgaaattaacgccgttacagtcagaaataattattcgactgcttctcaatggagtcgattatataaggcacgacgggtatgttcaggggtatggagaaaaaactgtggcaacattcacaatacagggggagggacgccatcgtttcaaaacagacttatcacaaaatggggaaagtgatatagccagcaatgcactaaatcactggctacatcgtatccataaaacagatatcattgttctgtctgttgttctaatgcaatag

SEQ ID NO: 41121 - DNA, 507 bp, Escherichia coli
atggataaaaacacaataatatctgttttaattagattactaaatgaaaaacgtgaaggtctaattttgttaaacggtgagtggggggttggtaaaacattcttccttcaaaatgaatttaagcaatattattccaacaaaactcaattttatatatctgtgcttggattaaatagtttgcaagattttaaagacaaggtgttgagtgtaacttatttagagaatccacccgatatagaaataattacagagttagcatcaaatgtaaccacagctattactaaagaagaaagcactgggaagtttactggaaaaataatatcaacatttgcaggggcaatgcaacattatgtattaaaagatctttcaggagtttttattattgatgatctagaacgtatacctcaaaatttgcgagatgaaatagcaaccttttgcttacaaaattatcaaaataacaagatgttaaagaaaaagttattagcgacgaggtatacttttctataa

SEQ ID NO: 41122 - DNA, 978 bp, Escherichia coli
atgaaaacgaaaaaacatacttcacgtgccgtgaataaaacgccggaacgtgacctgtatcaactggtgaccgacaggattgtgacggccattgaaaatggtgtgccaccctggaaacgtccctggcgctcggcgcgtaacggcgcgggagagccggagatgatgccggtaaacgccctgaccgggaagccttatacgggcgtgaatgtcctgttgttgtggctgaccgcggatgaagccgggtacgccagtaattactggctgacgtaccgtcaggcgcaacaactgggtggccacgtccgtaaaggagaggtggccacgctggcggtgatttacaaagactggaaaaaacaggctgtggatgaacacggtaaccggctgacggacagtgagggggaaccgctcatggaaacggtaccggtactgaaagcgaatcctctgtttaatgtgggacagtgcgacggtttacctgagcatctgatggtgaaggcggaaggcagcgcggatgcactgccggctgataccatcagtgagcgggtgctaccggtactgaatggcagtggcgtcagtgtttcgtcacttccacaggacagggcattctaccggcctgacactgaccgtatcgtgatgcctttgtcgtcacagtttgattcggtggccgattactggaccaccctgctgcatgaactggtacacagtaccggtcatgaaaagcgtctgcggcgggccgggataagttcttttgccggccgtaaaagcccggaatatgcgttcgaagagctgattgccgagatgggcagtgcttttctgtgcgcacatctggggattaccggtgacgtacagcacgaaagttatattgacggatggcttaacgtcctgaagtctgacaaaaaagcgctgtttcgcgcctgccggcaggcacgtgaagcatcagagtatttactgatgcagcgggcttcgcaggcgcggggcgcataa

SEQ ID NO: 41123 - DNA, 480 bp, Escherichia coli
atgaatagtctgttaatactcctttacgttgttgtatggcgtgcctgcaccattcttcgggtaatcgcaccagtgtcggctgtccgtgcgtggtgtgagtatcaactggaaggtatgacgatacttcgtgatgcgtacagctcgctggcaaaggcggctggaatgcagaatgaagcatttgaatatcttaaagatattgcacgtcatctgggctacgaaagcggtggtgaccaactgaaatcaggacttttccggccgtttctgtggcatatacgtgcgaaaggccacaggctgggggctgtcatggagatggaggtatggaagacatggaagaacggctgtaacgatgtctgcaatccatgggaggatatctgcaatccatgggagcgtggatggaacgatggctggactgaatgtctgaatcaacgtgtagccggcatcctgaagcaggcctgtgttgacttttccgacgcagactga

SEQ ID NO: 41124 - DNA, 798 bp, Escherichia coli
atgctaaacgatacgaagaaaaatatccggggatatagtactgcacctttggtactgatttacgggcatcatgacattcccgcaccaacacagcacaatggtacacactgccatcaaaccagacatccgggcaatattctcgttgccctgtcaacgacagataccagcgggtacgcaatacagttgcccgcagttgcggaaaagccacaagaatgcgccgacagacagaacgaaaagaataccagggagccaacagctcctgaacaaaagaagataacggcatcatgtacctccacagtaaaaccggagatacaatcaccatacgggaatgtatctcccgcacgggttaggtataaaagacctcaatcactgttccgtgatatccgtttccagaggttaaacggatgtaccaccctccaaggcgtcccctttcaggctacggagacattacgatcacccgaaggcgcttttctcagatcgtcaaagcattggctggtagtcgcccgaaggctcccctctcagactaccggggatttggatggttatccgaagataactgtagtcacccgaaggcgtttctctcagactaccgaaacattggatggtcacccgaaagtgacagaattaacatgctcattttctgttgctctgtttatcctgtcaagattacgttatcagcaatcctgtttatgtatgatcagatctccattatcatcaaacagatcaccaaaccatgtatttacagatgatgtaatatcagatgagattggatcatatgtcccatttttcagggcataa

SEQ ID NO: 41125 - DNA, 447 bp, Escherichia coli
atgtatcatatattgatggaaataaaagcggttcgttatatcagggatatcgtactggatagtgagaacgattatacagatatcatggtgcattaccgttgtaaaacgccactgagtgaatctgatacatgtgccatgatttgccgctattttgagtcagtatattttgatgatgaagctggcggtgatttttttattccaaaaacaacggcggttgaattgtggtcggaaatgggtggtgttctcagatgtaaaccggatcaccggagcctttcgctgaaagtggataatacggttattattccggtgattccggaaattgtttatgccctgaaaaatgggacatatgatccaatctcatctgatattacatcatctgtaaatacatggtttggtgatctgtttgatgataatggagatctgatcatacataaacaggattgctga

SEQ ID NO: 41126 - DNA, 921 bp, Escherichia coli
atgagcagaaaatcgcagcgttccagagttgagatgtttcgcaaggatttcattactcttgcccgtgagtgtggcggcagttatgcgacaaaagccgacagggttcgtattgcaaaatattttctgaattatttacgggaaaacggaataaagctgcgggacacccacagtatcaatacgaggcattttcaggggtatcttctgagcagaaaagcgcaggggatttctcaccggactattcagaatgaaagggcggtgatgagagctattttacagaaggacggtcgttataaattagccgctcctgataaccctttactgagtaatgagacgctcggcctgacaaatacatgccgggatggaaaaaaaataccgttgccaccggaggaattccggaaagcatttacagaggtggaaaaaaagaatcccggtgttgcagcggcaatgcaactttcttatgtactgggtttgcgaacgaaggaagcagtccagtcatgtaaatcagttaagtcgtggatgcaggctctggaatcggggcacaattctctgttgattgtatttggcacaaaaggtgggcgcccccgggatactattattaccgatcgtgatattgtcagacaggccctgagttatgctgagaaaataatgaatgaacagagtggaaagcttatcgaacgtccgaatataaaacaggcaatagatgtttatcgctatcatgttcgtaaggctggattaaccggagagaaatcacctcacagtatgcgttaccatttttctcaggaggccagacgtttttatcgaaaagatggggtgggtgataaagagatatatgcacgggtttctatggatttaggtcatggggacggtcgggggcgttatgtgaaacaggtttactttaaaaacggtgatattcaggaataa

SEQ ID NO: 41127 - DNA, 321 bp, Escherichia coli
atggagaagaatgacaaagtacatctaatggaagaaaaggcgtaccgttttgggaaaacattaaaaaaacttccgctatggggatggggaataatagcgctcattactatgattattctattcaatatacattattcatatattttatctctgcctttcttatggtttttgtggtatgtatttatacgaattgatgacaagccatggattgaaaattatcctacactggaggaatactggcgcattcacccagatacgaaaacaaaaaatggaataaagtgttattactgtggctctaaccagataaaaagttatctgtga

SEQ ID NO: 41128 - DNA, 564 bp, Escherichia coli
atgttgagtaaaaaattgttattggtttgtgtttcatgcctggcgttaactgcctgttctgttgatgaaattgcttcggttaacaagcaaattagtgatggtgcttttgctttaacgggggcattgcgtggaaactcatcgtctgcggattcaaatggaatgccatttttagctcaggcgcaaaaaccagcgacaaaatccagtacacaggaatattctgtgcctgttgatattgatactgcagctgcgcgtctgaagcgatattatcagtttgtatcaaatgatgaagttgatgctattcgtaaaaaagacagaaatggtagttgggtcgctggcgcaattacagatgcgaatcaggaatgggaggctatgccgggaagttattataaaatggggaatgactggaatgaatacgatcatctgactattgagctggaaaaaaatggagcagggagtaaattatacattacatttaaatccccatcggacaaacgactgaatagtgaagagcttaagaaattaatgttaaatattaaaggtgttgctgaaggtacaatcaggtaa

SEQ ID NO: 41129 - DNA, 408 bp, Escherichia coli
atgaaaacgactaacaaagccgcttatctcagaggacaacggtttgccattcagtggaaacgactcgtaagaacgcttcgtcagtgggacaacttctgggttcatgcggccagaaaaagacatctgccaacctggactggacggctcccgctggctcttggattaaccggaattgtagtttgtgcactcttcagtatcacggcagttctcgggtgtctggcgtttatctgggctgttgcatacattcttcgatgtgttggtgccggatttaatacacaatgtgatagtcttgaaaagaggcatgacttgaattttgagtacgaaggagaacaatggaagcgtcctatatggagagaagaatgggagcgtcctatatggagagaacaatgggagcgcgatggaaattaa

SEQ ID NO: 41130 - DNA, 1587 bp, Escherichia coli
atgacaacaaacagctatcttgaatattttctgaccctgctgggctggctgattaataatggcctgtgggatgtgctgctgggaaccgggctgtttgcactgccgctggtatttaaggttattgggatctggctgcgggtcagggaagaaggggaggatgaggggaataaggggctgctctcgctgccccgtattgaacatgcgctgtacatgggattctttgtgattatcagttgctgtgtgccgctggtcaatgtcagtttggggactattgagtatgacggcaaccgtgcgaagcagtgcgggacatggacaccgaaggcaccggataagaccgggtatgccggtgtgatttccagcatggacggtaaaacggcgcagatcccgctgtggtggctgatggtgcacaaactttcaaaaggggtgactcaggccgccgtggcatccattccctgttcgcctgatatgcgacagatgcgttttgaggttcagcatacccggatcaacaataaggcgctgattgaagaactgcaggatttcaccaatgattgctactcactggcgctgtacagctggaagcagcaggatcagggaatgacaacggataaaaatacgctgcgggatattgagtggattggcagcaggacatttcaggcgcgttattacaatgaactgcagtcgaagatgccgagaagtgcgtttccgtggaatgcatcccgtgacagtggacgcccgaacaccggtcggggtggttacccgacctgtaatgagtggtggagtgaggcggatgtcgggctgaaaagtcgggtgatgaagcaggctgaccccggtatgtggctgcgtctgtcagcaacgatgaaaatgatcgggaatacaggcaaggagtatgaagaagcggtgatacgccgtctggtcagtccggtgaatatgacagtgtcacatggtggcagagcctatgctggttatggtgggaatgcggatttgtcgctggataacgctgtgacccgcgtgttctcaacggggggcgtggcgctggggagtctggcggcgtttccggccctggatgcgatgcgacaggcattacccatggtacaggggatcctgttgatggctatttacgtgatgttgccgctgattctggcgtttgcggcgtacgagataaagacggtgattacactgacgtttgtgatttttgcgactaatttcctgacgttctggtgggagctggcacgatggctggattcatggatgtttacagcgctgtacagttcggaaacgcacagtcgcttcaatatggcagggtttcagaatacctcggatgacctgattatgaatctggtgatgggcagtatgttcctgattttaccggcggtctggatgggagcattatcctggaccggggtgtatattggaggagcgatgactcaaagtatgggagatggttctagacaagctcaggcatcaggaggcagtgctgttaatatgttgcaggatgctgggttgcgggggatgtctgggggcacgtcagcaggctcaacaggccaaacagtaggctcggtaggtcaaaaattgaataagcaaaaataa

SEQ ID NO: 41131 - DNA, 336 bp, Escherichia coli
atgaataaacgtaacgcccgtcagcgtctgaaagcggtgctgctcacaggcggtatcctgctggcatttatggtggtggcgctgttcattgcggatatggccattcgtcatccggaaggaactgccgcattcagtacgtggatgcgggctcaccgttctggctggctgctctggcgtctgtgcatttatatcctgctgggctgggggatctggcgtatcgcgcatgcgccgggattccgggcggaataccgccagccactgatacgtatctgttgcgccagtgtgacgtttattctggtctgtgaatacgcgctgctgaagacacagggaggctga

SEQ ID NO: 41132 - DNA, 1452 bp, Escherichia coli
atgaagcataaaccacaactgataaatgtcgtggcactggccgtcatgctggcctgcagctctgtggccggtgcggcggagaatgaacgcggtacgttcggtctctccctgccacaggtgaatgacagtgccatcgggtacgggaaatccattgacggtgccatctcggacaaactgttttacaccctggggggcgggtcagtgatatcgcagccggcaacccggagcaacatgaagaagctcggggtggatattggctggagcagcaacctgatgtgcggcaactttgacctgaaaaccacggtgagcaatcagctgaacggggtgacggacggttttaaaaacctgatgggggatgtgatacagggggcgacgggtgcggtggccagtctgccggcgatggtcatccagcgggcgaatccgggactgtatgatgccctgactaacggggtgttacaggcaaatgtggcgttcgacaaggcacagctgaactgtcagaacatggcgaagcgcatgatggagttctcggacagcagcaagtggacacaggctgcggttatggaggagtacaagtcactggtcaacagtggtgaagcggatgccattcgtattgatcatcaggcacagaattttaaaggaaattcaggacgtagctggattggtggtcagaaacggggaggtgcagggcaaccagctatccgtcccacacatgatctggctgcagcgggttttaacatgatgaataacctgccggttaccagtacatcaatggtcgggagtaccagttgtaccggaagtgtgtgcagtaagttcagtaatgctgaagaggcggcaaaggcggtggtgaaagtgctgggtgatcgcactatgcgaacctgtagtaaagcaaatgaatgcaccagtggtggtgaagagcagcagtctggtgcgatcgccggaaccggattcacgccgatgctggaagaagcggtgaaagtgaatacggagcaactggtaaagctggttaatggtactgaaaaaccgacagcagcaaatctggctaaactccggtcaggcagtctgacagtaacggccggagtgattaaggcgctacaacgggatccggataatgctgcactgaccggacgtctggccggcgaactggcaatggcagatacggtggagacggcgctattgatgcgcagaatgatcgtgacgggaatgtctgaaccgaatgcgatgttacaggatgatgcgttggcagagggggagcgtcgtattgaagcgctggatcgggagattgcggcactgaaaaacgagatggacttgaagcgtgaactggcccgcaacagcgtactgaccattattgagcgtgagaatcagcgagttggcgttaacccgcagacggaaagtgcagacagctctgatacccgaattaatcaactggagcagggaacaggtgaagatgaataa

SEQ ID NO: 41133 - DNA, 264 bp, Escherichia coli
atggacaaaaaacagcttgaaaaagagattcttgaaaaaacacaggagctgattcgtgctcgtgccgattatgacagtgcgcaaggtgagttgcttgatgaactgaaggcagattgtgaacgtagtggaggaagcatggctcaggaagcgaggcgagaagcacttcaggaagagctgcgcaatcgtcgggattcggctgaagcaacattaaagcgatacgaaaaagatttttctgaacttatcaaaaaatatcaggatctttga

SEQ ID NO: 41134 - DNA, 393 bp, Escherichia coli
atgatggcactgaaatacccgacgctgagtctgagcgcagaaactgtaaaaccgtcgccggggctgttctgtgtggaggcgcagggcgctgccagcctgacagaagagaaccatgctgaactgatgacactgctgggccatatccggcagaggctgacagcaccggtcaggatgacctgccatccgcatcgcgtgggattcagcaacagtgtggcacttcacctggagggggcttcaggcgggcaggtggatattctgctgacggtgagtgggcagtcaggctggccggcagagagtgattacgcgcatccccgctggtacctgacggtacaggatacggtggatgcgttttatctggtgctttggcttaatgagaagctgcaaaaaggataa

SEQ ID NO: 41135 - DNA, 399 bp, Escherichia coli
atgaagtggtgttttcgttttctgaaacgtcttgtttctctgccgcacacaatgctgttacgcctgtggcagaccgtgttttcagtgtgtctgttgctctggatgagtatgcagccggccctggctgatctgcccaccatggaacctccgtcctccggcggtggcagcggtctgtttggacagattaaaggctattcccaggacggcgtggtgctgggtggtctgattatctccgccattgggtttattgtcgtggcgaattccgcaatttccacgtttgcgggagtccagaaaggacaaaaaacctggacggagtttggggccattgtggtggtgggggtgattctgctggttgcggtgatctggctgctgaccaaatcggcttccatcattctgtaa

SEQ ID NO: 41136 - DNA, 345 bp, Escherichia coli
atgcgttcttttccggcatcagcctgtcgtgccggccgtctggccggggctgcggggatgctgtttcttttcacccttgtcatacccgttcaggcggctgaacaggatgaactggctaccgccatgcgccagcttgaccaggtgcaggcggcgctggagcgggcccggggggccgctgtgcagtccggcgcgtctgagccaccccgttacttctttgattatccccgggcgcgtgccgatctggagaccattcgtgatggcatcgatcgctatctcacgccttcccgggcccagccccgtgcaacgtcagccgtgaacggtcactaccggcgggagcgtccctga

SEQ ID NO: 41137 - DNA, 189 bp, Escherichia coli
atgactgagcttacactgaagatatatgctggcgcacttgccttctggctcctgttttactgcttcatcaaagttgcagaactccgttttccgccctgggtatggaccatcatgcaatgcatcgccgttttttttatcatcacactgcccgttttcctgcgggaattgatacgcagccctgctttctga

SEQ ID NO: 41138 - DNA, 222 bp, Escherichia coli
atgcctgaacatctgtttcagcccctacttctgggctggtcatttttttgcgccttctggtttgtatttctcaattacctccgtctggaagaaccccattaccctctgtgggcatgttacgttatacagaccatcaactggatcattattgtactgaatgttattgtcatccccgtgctgacagtgacaatcttccgcccgtttctctcatcggtgaactga

SEQ ID NO: 41139 - DNA, 774 bp, Escherichia coli
atgggccctttagttattatggtcgttctggtgtgcggcttctggtatacagagaatcactatcagtcccgcatacgacatgccagaaccaacggatggacatcgtatttttatgttgcaatgcatggatgtcggttcgttattattggtttcagcattactgtcgctttattgctggtattaattgtatttagttttattacgtcagttttgcattttttctttccggctataagcgaacgggatctttattcctggttaattgaagatgatattttctcctgcccctcgtttctgatatttacaatgggagtgggttttttatgggctgcatttgaagttgagggggctaaatatcagttgaatgatgaaaacagaagactggcagcatacagagaggttgctgcagaagatgctatggagtcattgcttgttcaggcgattgatgaagaaaagctggtttttatcacgttaaaatcccgtaaagtttatattggctatgtggctgcgccgagaattgaacacagtcatacacagcatttagttattattccttatatcagtgggtatcgtgataaagataccctgctgttttgtgaacagcaccaatattatgcgctttatctgaaagatggtattacagctgattcctctccgctgaatttgcaacatttccggcatgttattccagtggatcaggttgaaactatttctttattcgatacaagtatatatccttcttttgatgagtgtacttgcaggaagccctcatag

SEQ ID NO: 41140 - DNA, 195 bp, Escherichia coli
atgactaaattcttggacagaattgctgttgtatctggcaaatttatgcagatgcaatcacagccaacgcttgaacaaacaagcaataataaaattacgactgatgcgaatggtaacgcgacgttgaatatgagaaataaacaggttcagagcgccatgctggcgcgaatgagggaactggcagcaaaacgttaa

SEQ ID NO: 41141 - DNA, 789 bp, Escherichia coli
atgagtatgccactgctggcccgtgtgcaggcaaatattccggcctgggcacatgaacggctggccgcatgggatgctgcagagtttgcggcaatgtcggattttattacggaacactactggacgggacagggcagtatcaatgtgtaccgcattgtggggactgaccatccacagtatgccggaatgacctggcaggcgctgctggagcgcggtaaacgcatggacatcaatatcccgttactcgaaaagaatccgggatattacacgcaggcagagcaacagcatgccgggatgggttttgtcagcatggatggcattcactggtatgtcagtgctgacggtaatcaccgcagctgtctggcccgctttctgtttcacctgcagggggaggggcgcacacagcttcacaatgtggcccagagtgtttatcacacggaccgggagttccggtctgcctgtcgggagattcacaacctgacagaaccgttgtcccggcatggggtgtatcttcgtctgcagacccggcggcggtgtgtttcccgcgaagacctggcctgctggaaagtggaccgtttcagcacagaggcgcagctgacagtggatgatgtgcgtgcaggcggacatgacaggccaccagtgtataaggcattactgctgaatgcggcagacgcatggcgggaagtggtggcgttacagcgcagactggaagctctgtccgcatcaccggagaacgatttaccgcgctcatggtggcggcgtcttttacagagaggtacccggtcatga

SEQ ID NO: 41142 - DNA, 294 bp, Escherichia coli
atgatgcaggtacctgtgataaccgcagttcagatggtcagcccggtgctgatggtctgtctggtgttctgcctgctgaccgtgttgctgatgcttatcctgcggggagagtggcgaaaacagaaatgcgcccggacccgccgccatcagcgttgccgcgccaccgtcgcccggttactggccaggctgacactgtggccggatatcgaactggtcagcggtcagcgtctgctgaaactgctgaaactgctgaatggtacgttactgaccgataagggagaaagagaatcatga

SEQ ID NO: 41143 - DNA, 699 bp, Escherichia coli
atgagtgaagataaactgaaccagaaagaagtgcgggccggcgcattgcagtcctcgctgtccattctgttacatacccattatgcaatccgcctgtgggaagggcgcttacccggacgagagtccgggaatgtgccccggattatgagtatgccgcaggcaataaaacgagcaggggggatttaccgggattcccaggcagataatccctatgccgatgaagctatgtggaaggtggaaaatgcaattaatgctgccagtgaaaaagtacacgctctggttggctggctggagcaggttctgtgtgccgtgccggcgaatattaccatgactgatgttgtatcccgttctccattaaatattggggtttacagtagttctccgctgggttatcgctgcgtctggctgcttgtgggatatgatcagatggctctgaaagcgtttcaggcatctcactttggtctgatttcccggcagaaacgggacgagttactgtcacatggtgggtatcttatccggaaaatttacggcattttaagggggtattatgccatccctgtcacgcgacaggatctggaagaaaaaacaccggcaggagaacaggcgatggcacgcctggggcttcctgccgctgatattatgaatggtcagttgcgatcatcattttctcccccactgaagaaaaagaagaataaatag

SEQ ID NO: 41144 - DNA, 390 bp, Escherichia coli
atgaacagtattaattatcaggcactgcgtaaggttgctcaagattatcagtcgacgctggcgtggtatgaggctatcccggatagcccaaatgttgaggttgattgtggtagagctttggctgcgtttaagtgtcaaatccgtcacagggaagtggatattatcgccgatctgctggatgaactggaagcagcaaaaaagcgcataacagagctggagacacgggaggtggctttaccagcagagaaattttgcccggcggagcatgcaggccgcctgctatggacagaaaccgaagtatggaacagggcaatttctgcctgcgttgttgcaatccgcgctgctggcattcgtattaaaggagaaaatggcgccagtattaaggattaa

SEQ ID NO: 41145 - DNA, 285 bp, Escherichia coli
atgacaatttttgtaacgcgcacctttgttcgcagcaaagtcatcaatgccggacggcagttgttgatgatttgtattcatcttttttcctttttaagtcaatcagttatgggtataaagatgctgtccgtaccttctgaccggggtcgccaaacttaccggtctgaaaatgtacagacagttaccgggattttattcccgacagctgtacgttcggcaccctttttccttttttcacatagccaggtttccggcagtcagagggggagggtacgccatggctga

SEQ ID NO: 41146 - DNA, 261 bp, Escherichia coli
atggtaaagccgtcgtttaaatccctgacaggacgcagccggacagtgtgtgtcgggtgtggttactccggtgtgcggtttggtgatgctgcaggtcagggcacccggcagtgggtgaaggtgaatcatgagagcgggctggggctgtgctccggctgtgacgcctttcttttgcaggaacgccagcgtcgtcagcggcatgacccgcttttttcatgttgtatttccggcaaaaagcgaaaaacggaggaggcggcatga

SEQ ID NO: 41147 - DNA, 267 bp, Escherichia coli
atgctttctgttccagcatcatcctgtcgtctggtcggtactttggggatgctgtttcttttcacccttgccatacccgttcaggcggctgaacgccgaggcttaggtcgagcagggagtagagtggtttttttaacggctggacacttgatcccggaccgttacgtgctggttgatgctcatcaacagcctgtagatttcactcaaggtgaatatgggtttactgctggcgttggctcaaaactcccgacgagtcttaatctgtga

SEQ ID NO: 41148 - DNA, 330 bp, Escherichia coli
atgaaaaccttccgctggaaagtgaaacccggtatggatgtggcttcggccccttccgtaagaaaggtgcgctttggtgatggctattcccagcgagcgcctgccgggctgaacactgacctgaaaacgtacagcgtgacgctgtctgtctcccgtgaggaggccacggcgctggagtcgtttctggctgagcacgggggctggaaggcctttctgtggacgccgccttatggctaccggcagataaaggtgacctgcgcaaaatggtcgtcgcgggtcagtatgctgcgtgttgagttcagcgcagagtttgaacaggtggtgaactga

SEQ ID NO: 41149 - DNA, 561 bp, Escherichia coli
gtgacgccgattccggacggcaccgatacctataccacgccgccattcccggttcctgatccgaaagaattcaacgattatattctggtttttccggcgggatccggtattaagcccatctatgtttacctgaaggaggatccgcgaaagctgcctggtgttgtaacagggcgcggcgtcctgctttcaccaggaactcgctggctggatatgtcggtatccaataacggcaacggcgcaccaatcccggcgcatattgctgataaattgcgcggacgggagtttaaaacctttgatgagtttcgcgaggcgctgtggctggaggtgagtcaggatccggagttgatagcgcagttttcaagtggtaaccaaacacgtataaaacaaggattaaccgcaaaagcacctattgacggttggtattatggccctaaagaaatagttaaaaaattccagatacatcatcgtgttgcagttgaatatggcggcagcgtatacgatattgataatttacgaattgttacccccagactacacgatgagattcactacaggagataa

SEQ ID NO: 41150 - DNA, 312 bp, Escherichia coli
atggggaaaaatgcagtaggagttcttgcatgttcaagtcctggagagtctcgaacatgtgtcgatgctgtagatgatgaagtttgtgattctaacagttacgaagttattagccgtgctgatttaaaaatgaatggtggttccataacaactaatggtattaatagctatggtgcttatgctaatgggaaaaaagcatatattaatttagattatgtggtacttgaaactgtggctgatggaagttatgcagttgctattcgacaaggtaacattgatataaaaaagttctattacaacaaatggcactaa

SEQ ID NO: 41151 - DNA, 351 bp, Escherichia coli; identical to SEQ ID NO: 6245

SEQ ID NO: 41152 - DNA, 420 bp, Escherichia coli; identical to SEQ ID NO: 19219

SEQ ID NO: 41153 - DNA, 369 bp, Escherichia coli; identical to SEQ ID NO: 20457

SEQ ID NO: 41154 - DNA, 1200 bp, Escherichia coli
atgaatgaatcccttggtattactccagaggattttgctaatatatcttcaatattttttgtgtcctatttgatttttcaaattccgagcagtattggattgcaaaagttaggtgcaagaaaatggattagcgccattattgttggttggggaacagtaacaacgttaattttctttgccaaagacacccagcatatattgctcgctcgggtctttttgggaatatttgaagcggggtttttccctggcatggtttactacctggcatgttggttcccggcgcgcgaacgtggaaaagtgaatagcttttttatgttatcaatcgcagttgcatctgtgctggcggcaccaatgtctggttggattattgaacatatgaataccggtaactatgaaggatggcgctggctttttgctattgaaggcattcctacggtgttattgggggcgctgaccttttatttactgccagatcgtccggaaaaagcccgctggcttacaccatcgcaagtcaccgcattggtcgataaacttaattctgataacgaaaaagccgcagcattaaataaaaatacaaatgcatcttttctgtcaatcattaaaaatccagtattactacaactctcatttgcttatatgtttattcaggcagcggcgttggcggcaaattactggttaccggggttggttaaaggattttcatcggatttcacagataccgatgtcggtttgattatgagtattccgtttattttcgcgatgttcagtatgccattatggggatggcattccgataaaaagaatgaaaggaaatggcatgccgcactaccgatgttggttgcaggttgcggttttttaatgatcgcacttgtaccttcgatgacgctgcgcatgatgggattaacattatacggtgtaggcattctcagttattacggtccgtactgggctttaccctcagctttactttcaccatcaggcctggcaatcagtattgcgtttattaactcttgttcaagtttgggtggttttctgatcaataaatcacttggctatgtttctacacattatggagccacggggatatttattgttgaggcgattctttgctttatcgccgtagctattttgttatcaatgaaaattgataataaaaaagataacgcccagaaagacaatgttatttcacatgctaaataa

SEQ ID NO: 41155 - DNA, 1203 bp, Escherichia coli
atgaatagtaaattgatttctttggatttattcgctggggcaggtggccttacttgtggtttagatatggctggcttccagcctatttttgctaatgaattggtttccgctcatgctgaaacctatgctttcaatcatccaaagacagaggtcatagttgatgatattagagctatagccgaaagtaatttgatgaaaaaattatcattaaaacctggtgagttggatttattggctggtggaccaccatgtcaagggttttcaattaatgcaccaattagatccttagacgatgagaggaatcatttatttaaagattttcttcggattgctgcaactttaaagccgaaggctattttaattgagaatgttccgggtattgtttcattaggaaaaggaactgttgttgagcaaatatataaagaattagtatcattgggatacagtgtagatcatcgtattctctttgctggccactatggtgtcccacaaatgagatttaggacaatctttttggctatttatgggtataataaaaaaataaatttcccagagcctaaatttaacgcaaaagcagtagccaacttttcaggggctaaagaattgtgtttgcccatttcacctttattttcaaagaaattgaaacctcatactacagtctggaatgcaatttcggacttacctcccatcattggggggcgaaataataatgggttaccttatgcatcaaaacctacatgtgattatcaaaaatgtctccgtggtgattcagagttagtaatgaatcacgtatcaggtagtttaggttctattaatttggaacggttgaaatatattccacaaggtggaagttggagagatattccatttgatctattgcctgctggcttgaaaagagcgagaagaagtgaccatacaaaaagatacggtcgtttgcatccggatggattatgttcaactatacttacaaaatgtgatcctcattggggaagtttttttcatccaacacaagaccgcgtaatttctgttagagaggcggctcggatacagtcattccctgataattatatctttaaaggtaatcttacccagcaatatgagcaagttggcaacgcagtgccaccattaatggccaaagcccttggagaagaaattattaatatgattggatatggaaatgagcaacagaagagatttggttga

SEQ ID NO: 41156 - DNA, 906 bp, Escherichia coli
atgagcaacagaagagatttggttgaaatattcggatatagtccagtagatcttactcctgaagtaagatctttatggactttgggggcgtgtccttttctgaataaggaatgtgtaaagataaatcatgatcaaaccataatatatggtacatgtagtgtaacatccccgtacggggatgttatcatttgtccaaatagattatatgcgaataattatgaaactttgttaaaggttagccatgacgcattcgggagtgatgttcctttcctgacgtatggccaattcattgaacaacgggctaattataaagattgtataattgcccttggtaaaaactcaggaaaagaagttcaagttggccgagcgctatcaatggattgggttttggttagaatgactgatggacaaataaaagaatatgttggaatagagattcaaagtattgatattactggaaattatcgtgatgcttggcatgcttataaaaatatcaagcctactgatgaacgaaatgaattaccaacttctcaacatggtttgaactgggctaatgttcataagagattaattccacaacttattcggaaaggcgtggtttattctcgttcaaattatgttaaaaaaggattgtattttatacttccagatattgtctataagaaatttgaagatgttattgggagcgatataccgcttttagattttcaaaataataaaacaatcacagtctacacttatggtcttggtacgaatgtagcaagtggacagcaacgttcgttagtacagatgagaaagataatattcgatcttgatgagttttctaagcgatttacaacaggtccaaatttgccaagtggtgaggacctggatgcagtaataaaaaaagccttaggggtcttgtag

SEQ ID NO: 41157 - DNA, 138 bp, Escherichia coli
atggctaatctttatgatctaaaaaaatttgacctcaatttactggttatatttgaatgtatttatcaacatctcagcattagtaaagcggcagaatcattatatataacgccctctgctgttagtcagtcgttataa

SEQ ID NO: 41158 - DNA, 147 bp, Escherichia coli; identical to SEQ ID NO: 23041

SEQ ID NO: 41159 - DNA, 468 bp, Escherichia coli
atgcttaagacaaacagtctgcgagagtccatgcttcatgggtgtcggtggtgccaggctaatcccgagaaattcaccattttcgtggagagcggcaacattgaaacgaccggggaaacgccctcgtttgtttaccgctatcagatggtgatgtttgtcatggattacgccggagagctggacgacctcacgctgccgctgctggcgtggttatccgaaaatcagccacagttgttgctcaaccctgagcgtaatcaggacatcaaattctccgccgttatcaatgacgatgacagcgccgatctcctgtttacgctccccctgcgggaacgcgttcgcgtcacgcgcagcagtcagggcacaccgcaggcagaacacctgccagagccaaaaccccgcctgccatcttccgaaggcgactggtcgcatatattccaggatgtgacgtggggtgaaagcgatggataa

SEQ ID NO: 41160 - DNA, 864 bp, Escherichia coli; identical to SEQ ID NO: 7260

SEQ ID NO: 41161 - DNA, 246 bp, Escherichia coli
atgcggcgggtctgcctgggtgagccggttgcccgttccgggaagctgccgacactggcaccgccgttactgcgtcagctggccgccatcgggaataaccttaaccagacagcgaggaaggtgaacagcgggcagtggtcttccggtgaccgggttcaggtggtggccgcactgatggccatcggggatgagctgcgccggctgcgtctggcggtcagggaacagggggcgcgggatgatagttaa

SEQ ID NO: 41162 - DNA, 327 bp, Escherichia coli; identical to SEQ ID NO: 23069

SEQ ID NO: 41163 - DNA, 261 bp, Escherichia coli
atgcgtaaactttatgccgccattttttccgcagccatttgtctggccgtatccggtgcgcctgcatgggcatctgaacatcagtccacgctgagcgcggggtatcttcatgcctcgacgaacgttcccggcagcgatgatctgaacgggattaacgtgaaataccgttatgagtttacggacacactggggctggtgacgtcattcagctatgcaggagacaagaatcgccagcttacccgttacagcgatacccgctag

SEQ ID NO: 41164 - DNA, 378 bp, Escherichia coli; identical to SEQ ID NO: 7410

SEQ ID NO: 41165 - DNA, 1338 bp, Escherichia coli
atgcactctcaaatctgggttgtgagcacgctgcttatcagcatcgtgttaattgtactgaccatcgtgaagttcaaattccacccgtttctggcgctgttgctggccagcttcttcgtgggaacgatgatgggtatgggaccactggatatggtaaatgctattgaaagtggaattggcggaacgctggggttccttgctgcggttatcggcctgggcacgatactgggaaaaatgatggaagtatccggggccgcagaaagaattggtctgacacttcaacgctgtcgctggctttcagctgatgtcattatggtgctggttggcctgatttgcggcatcacgctgtttgttgaagtgggcgtcgtgctattgattcctctggctttttcaattgccaaaaaaaccaatacctcattgttaaagctggccattccgctgtgtaccgcattgatggcagtgcactgcgtggttcccccacatccggctgctttatatgttgccaataagcttggcgcagatatcggttcggtgatcgtctacggtttgctggttgggctgatggcatcactgatcggtggcccacttttccttaaatttctgggtcaacgactgccctttaaacctgtacccacagagtttgccgatctcaaagttcgcgatgaaaaaacactaccgtcattaggcgcaacgttattcaccatactgctacccattgcgctgatgttggttaaaacgattgccgaattgaatatggcacgtgagagtggtttgtataccttgcttgagtttattggcaaccctattactgccatgtttatcgccgtgtttgtcgcctattatgtgttgggtatacgtcagcatatgagcatggggacgatgctcacacatacggaaaatggtttcggttctattgctaatattttgctgattatcggggccggaggcgcattcaacgccattttaaaaagcagcagtctcgctgatacgctggcagttattctctccaatatgcatatgcacccgattcttctggcctggttggtggcacttattctgcatgctgcagtgggctccgctacggtggcaatgatgggggcaacggcaattgttgcacccatgctgccgctgtatcccgacatcagcccggaaattattgcgattgctatcggttcaggtgcgattggctgcacgatcgttacggactcgcttttctggctggtgaagcaatattgcggcgctacgctcaatgaaacatttaaatactatacgacagcgacatttatcgcttcagtcatcgctctggcgggcacattcctgctgtcatttatcatctaa

SEQ ID NO: 41166 - DNA, 237 bp, Escherichia coli
atgatggcgcagcagtgcgatctggaagtgggtgattttgtctggaccggtggcgacacgcatctctacagcaaccatatggatcaaactcatctgcaattaagccgcgaaccgcgtccgctgccgaagttgattatcaaacgtaaacccgaatccatcttcgactaccgtttcgaagactttgagattgaaggatacgatccacatccgggcattaaagcgccggtggctatctaa

SEQ ID NO: 41167 - DNA, 582 bp, Escherichia coli
atgaaacagtatttagaactgatgcaaaaagtgctcgacgaaggcacacagaaaaacgaccgtaccggaaccggaacgctttccatttttggtcatcagatgcgttttaacctgcaggatggattcccgctggtgacaactaaacgttgccacctgcgttccatcatccacgaactgctgtggttcctgcagggcgacactaacattgcttatctacacgaaaacaatgtcaccatctgggacgaatgggccgatgaaaacggcgacctcgggccagtgtatggtaaacagtggcgcgcctggccaacgccggatggtcgtcatattgaccagatcactactgtactgaaccagctgaaaaacgacccggattcccgtcgcattattgtttcagcgtggaacgtaggcgaactggataaaatggcgctggcaccgtgccatgcattcttccagttctatgtggcagacggcaaactctcttgccagctttatcagcgctcctgtgacgtcttccttcaacattgccagctacgcgttactggtgcatatgatggcgcagcagtgcgatctggaagtgggtga

SEQ ID NO: 41168 - DNA, 378 bp, Escherichia coli
  misc_feature (216)..(225): n is a, c, g, or t
atggcaaccgctggaatgcttctcaaactcaactctcaaatgaaccgcgagttttacgcatccaatctctaccttcacctgagtaactggtgttctgaacagagtctgaacggcaccgccactttccttcgcgcccaggcacagagtaatgtgacccaaatgatgcgcatgtttaactttatgaagagtgtcggcgctacccccatcgttaaagcnnnnnnnnnnaatttcctgcgcgatctggaaaaagaacagcagcatgatggcctgttactgcaaaccattcttgatgaagtgcgcagtgcgaaacttgctggtatgtgtcctgtgcagaccgaccaacatgttctgaatgtcgtgtcgcatcagctgcattga

SEQ ID NO: 41169 - DNA, 486 bp, Escherichia coli
atgaaaaagttaacagtggcggctttggcagtagcaactcttctctctggcagtgcttttgcgcatgaagccggcgaattttttatgcgtgcaggttctgcaaccgtacgtccaacagaaggtgctggtggtacgttaggaagtttgggtggattcagcgtgaccaataacactcaactgggcctgacgtttacttatatggcgaccgacaacattggtgtggaattactggcagcaacgccgttccgccataaaatcggcacccgggcgaccggcgatattgcaaccgttcatcatctgccgccaacactgatggggcaggtgggggttgattatctgattaaccgtgactggttggttaacatgtcagtctggtacatggatattgatacgactgccaattataaactgggcggtgcacagcaacacgatagcgtacgcctcgatccgtgggtgtttatgttctcagcaggatatcgtttttaa

SEQ ID NO: 41170 - DNA, 222 bp, Escherichia coli
gtgattcagcaaggaattaccggaaaagaactctctattttctcttcacgcttaaatgcaaataaattcccggtcgttatcgactggttaagtaaagggttaattaaaccagaaaaactaattacccatacgtttgatttccagcatgttgcggatgccattagtttatttgaactggatcaaaaacattgctgcaaagtcttactcactttttctgaataa

SEQ ID NO: 41171 - DNA, 1053 bp, Escherichia coli; identical to SEQ ID NO: 11597

SEQ ID NO: 41172 - DNA, 138 bp, Escherichia coli
atgcgagaaatgagttacatattttccattgagagaaataaacaggtgaacctctatattttgaagttagttttttatttgttaaatgaaattcaatacaatccagtcctaaagataggcctttacctcgatatttga

SEQ ID NO: 41173 - DNA, 600 bp, Escherichia coli
  misc_feature (511)..(520): n is a, c, g, or t
atggaaaaagtttatgataccactagaattagtaatcttgctaacgacccgaaacagttttgttcttttttttgtgagtacataaaaagagatgatattagtatagatatcgccttggatgtgctgagaatatcttccatctattataatagattttcagttcagactgaagttgagtataacaatacattcaaaaaatgtattaatgagctagtaaactcatttcctgataacattgaactaatctctgagttcgagagtcaatgtaaaattatgcatgatataaataattctttctttgcggctacaaaatgtgctggtatttggcgtaaaaatacaaaaaaatcacatgcattaatacttaatctcatcatgttttgtgagatgtttttatcatcattatcatccttggttgtggtcaatgatcctaaaaaaatgaagaggatttttccattatttatcgtttctgaaaatattaatattcatgctgaacctgatatcgaatattttnnnnnnnnnngaggtagccaattacaccggaagaatattttcttatttacggactcatgggccattgaaactaacttcttgtgtgaataa

SEQ ID NO: 41174 - DNA, 441 bp, Escherichia coli
atgcacgcctggggtattgacggccaccagctgacggtggaaatcacggaaagcatgatgatggaacacgataccgaaatctttaagcgcattcagatcctgcgcgatatgggcatcggtttatcggtagatgattttggtacaggcttttccggattatcccgcttagtcagtcttccggtaacggaaatcaaaattgataaaagttttgtcgatcgttgtctgaccgaaaaacgcatccttgccttactcgaagccattaccagcattgggcaaagcctcaatttaaccgtcgtggctgaaggcatcgaaaccaaagagcaatttgagatgctacgcaagatccactgtcgcgttattcagggatatttcttttcccgccccctgcccgccgaagaaattccaggttggatgagcagcgtgttaccgctgaaaatctga

SEQ ID NO: 41175 - DNA, 303 bp, Escherichia coli
  misc_feature (164)..(173): n is a, c, g, or t
atgcacgttacagccaagccctccagttttcaatgtaatctcaaatgtgattactgtttttaccttgaaaaagagtcgcagtttactcatgaaaaatggatggatgacagcactctgaaagagttcatcaaacaatatatcgcagcgtctggcaatcaggtctnnnnnnnnnntttacctggcaaggcggtgaacccactctggctggcctggattttttccgtaaagttattcactatcaacaacgctatgcaggccaaaaacgaatttttaatgcattacaaacgaatggcattttattga

SEQ ID NO: 41176 - DNA, 1434 bp, Escherichia coli
  misc_feature (1393)..(1402): n is a, c, g, or t
atgagaaacctctgtttcttactgacgttagtggcaactctgttgctccccgggcgactgattgccgccgccttaccgcaggatgaaaagttaattaccgggcaactggacaatggcttgcgatatatgatttatccgcatgctcaaccaaaggatcaggtaaatttatggctgcaaattcataccggttcattgcaggaagaagacaatgagcgcggcgtggctcattttgtagaacatatgatgtttaacggcacaaaaacatggccgggtaataaagtcatcgaaacatttgagtcaatgggcctgcgttttggtcgcgatgttaatgcctataccagctatgacgaaacagtgtatcaggtgagtttgccgactacgcagaaacaaaatctgcaacaagtgatggcaatcttcagtgaatggagtaatgccgcaacctttgaaaaactcgaagtagacgctgaacgcggcgtaattactgaggaatggcgtgcccatcaggatgcgaaatggcgcacctctcaggcgcgccgccctttcctgctggcaaatacccgtaatttagaccgtgaacctatcggcctgatggataccgtcgccacggtcacaccggcacaattgcgccaattttatcaacgctggtatcaaccaaataatatgacctttattgtggtcggcgatatcgacagtaaagaagcgctggcgctgataaaggataatttaagtaagcttccggctaacaaagcagctgaaaatcgcgtctggccgacaaaagccgaaaaccacctgcgctttaatatcatcaatgataaagaaaaccgggtgaacggcatcgcactctattatcgcctgccaatggtacaagtgaacgatgagcaaagctttatcgaacaagctgaatggagcatgttggttcagctgttcaaccaacgtctgcaggaacgcatacagtcgggcgagttgaagactatttctggcggcactgcgcgcagcgtcaaaattgcacccgattatcagtcgctatttttccgtgtaaatgcacgagacgataatatgcaggatgctgcgaatgcattaatggcagagttggcaaccattgatcagcatggtttttctgctgaagaactcgatgatgttaaatctacccgccttacctggctgaaaaatgcggttgatcagcaagctgagcgtgatttacgtatgctgaccagtcgcctggcatccagctcattaaataatacgccgttcttgtcgccggaagagacatatcaactttcgaaacgtctgtggcagcaaattaccgtgcaaagtctggcggaaaaatggcagcagttaagaaagaaccaggacgcattttgggagcaaatggtaaacaatgaagttgccgccnnnnnnnnnnggcagaaatttatcgttaacagtagacgctga

SEQ ID NO: 41177 - DNA, 219 bp, Escherichia coli
atggtgctaccgaaagccgaaattccacatatcaaagccaaatatacccttgatggtaaagaactcaccgcgccaattagcgcccatcagcgggtaggggaaattgaactttacgaccgtgataaacaggtggcgcactggccgctggttaccctggaatctgtcggggaaggcagcatgttttcccggctgagtgattatttccaccataaggactga

SEQ ID NO: 41178 - DNA, 264 bp, Escherichia coli
  misc_feature (203)..(212): n is a, c, g, or t
atgaatgttgacggcctgaaaacgggtcatacttctggtgccgggtttaatctcattgcttcggctgtagatgggcagcgtcgtctcattgcagtggtaatgggggctgacagcgcaaaaggtcgtgaggaagaggcaagaaaattactgcgttggggtcaacaaaactttactacggtgcaaattttgcaccgtgggaaaannnnnnnnnngaacgcatctggtatggcgataaagaaaatatcgccctgggaacggaactag

SEQ ID NO: 41179 - DNA, 855 bp, Escherichia coli
  misc_feature (228)..(237): n is a, c, g, or t
gtggatgaattcgttcgttggggatgcagccagatcctcgatcctgatagtccctacattgccctttcttgtgctggcgggaactggatcactgccgaaaccgaagcgccagaagaagccatttccgaccttgcatggaaaaaacaccagatgccagcatggcatttaattaccgctgatggtcggggtattactctggtgaatattggcttgggaccgtccaatgcnnnnnnnnnngtgggaccgtccaatgctaaaaccatctgcgatcatctggcagtgctacgcccggatgtctggttgatgattggtcactgtggcggattacgtgaaagccaggccattggagattatgtccttgcacacgcttatttacgcgatgaccacgttcttgatgcggttctgccgcccgatattcctattccgagcattgctgaagtgcaacgtgcgctttatgacgctaccaagttagtcagcggcaggcctggtgaggaagtcaaacagcggctgcgtacaggtactgtggtaaccacagatgacaggaactgggagttacgttactcagcttctgcacttcgttttaacttaagccgggccgtagcaattgatatggaaagtgcaaccattgccgcgcaaggatatcgtttccgcgtgccatacgggacactactgtgtgtttcagataaaccgttacatggtgagattaagcttcccggccaggctaaccgtttttatgaaggcgctatttccgaacacctgcaaattggcattcgggcgatcgatttgctgcgcgcagaaggcgaccgactgcattcacgtaaattacgaacctttaatgagccgccgttccgataa

SEQ ID NO: 41180 - DNA, 477 bp, Escherichia coli
atgataaaaatcacaccacataaaataacaatactcatgggactattgttatcgccttcggtatttgcaacggatgttaatgtcgattttaccgctaccgtgaaagcaacaacctgtaatattacacttaccggaactaatgtcactgataatggaaatgataagtacaccttagttattccctcgatgggaatggataaaatagccaataaaacagcaagttcacccgcgctaattatccccctggccagtgatacaacctccaccacaagctatatcggaatgggatttaaaaggaaggcgacttcaggcgatacatttctgaaacctaatagcgcagaatatatacgttggagtgcatcagaaattagcaccgatggacttgagatgactgtcgcactgcgtgaaacaagtgtagggaaaggtgttccaggcaagtttcgcgcactggcaacttttaacttcagctatcaataa

SEQ ID NO: 41181 - DNA, 309 bp, Escherichia coli; identical to SEQ ID NO: 11590

SEQ ID NO: 41182 - DNA, 552 bp, Escherichia coli
atgattggtcactgtggcggattacgtgaaagccaggccattggagattatgtccttgcacacgcttatttacgcgatgaccacgttcttgatgcggttctgccgcccgatattcctattccgagcattgctgaagtgcaacgtgcgctttatgacgctaccaagttagtcagcggcaggcctggtgaggaagtcaaacagcggctgcgtacaggtactgtggtaaccacagatgacaggaactgggagttacgttactcagcttctgcacttcgttttaacttaagccgggccgtagcaattgatatggaaagtgcaaccattgccgcgcaaggatatcgtttccgcgtgccatacgggacactactgtgtgtttcagataaaccgttacatggtgagattaagcttcccggccaggctaaccgtttttatgaaggcgctatttccgaacacctgcaaattggcattcgggcgatcgatttgctgcgcgcagaaggcgaccgactgcattcacgtaaattacgaacctttaatgagccgccgttccgataa

SEQ ID NO: 41183 - DNA, 141 bp, Escherichia coli
atgatagtcattgatattctggctttcgagtttctgcccaagcaactcatcagcataaccaagaacgatttccgcaataaaatccataagggcagaaccttgaggaatgccgttagtctgcccccatcgcatctgtcgtaa

SEQ ID NO: 41184 - DNA, 684 bp, Escherichia coli
gtgagtagtgaagaaagtatcacggaatcagttaagcaggcgttgaaggaacgagtagctaaccctttatggggctacatcattttgtcatgggtgggatttaactggaaaagcattgctatcatgtgtcttagtgaggcttcggttgttactcgtattcaacaaatcacatcgacggaagacttctatctaaaaacattatgctatcccgtagggctagggttcattttggcgacctttttcccttacttcagcaaccttgtaacactacttcaaatcaaggcaaccgcatggcgagcaagacaaaaagtagaagctgaaaatcttgaagagtcagctagactgacgtcaaagttgaagattgagaaacaaaaaaaccttatcgaaagagaaaaagaagatacaagtaatttgaaatctcaggcagagaaattggcgacagatgtagataacttaaatgctgagataggaaagttagagaatcaaaaaaagcacttgtctcgtgaacttgatttcctgcaacaagatgttatgtctattgaagacctgatttcaaaacttgttgcggatgagtgttctattgatgagtacagaagcgaattaaaaaaacttgttagcccagaaataatgatgcaagcaagaaaccgtaagaatctcccaagtttatttggaagaaaaatctaa

SEQ ID NO: 41185 - DNA, 522 bp, Escherichia coli; identical to SEQ ID NO: 25587

SEQ ID NO: 41186 - DNA, 513 bp, Escherichia coli
atgagtaaagcggctgaattgctaagacttgcggctgaaactattgaggcaagaggggaacaaaacggatacgatcgaaaagaagaaaaatcagcgccaaaaatagcggctattttcaacgctaagaaggggacaaatttaaccccacttgatgtatgggatctaatgatttgcctcaaggaagcgcgtttaggggctattctcgctaatggaactgatccgctcgacactcttatagaccttattgcttataacgcgcttaaggccgaacagatattagcggaacgggaggaagaacaaaagaaaaaacagggcgtttttgatctccctatcggtggattgaagaaaacttttgctgatcttgctggaccagagccatctattgtacctgggacaatcccacctgtgatgttttacggtggtgagattactaatcggcttgatgtgaagtttgacaacgaatcgctattacgcgcggcggggtatcataaaaatggaaagggtgacaattga

SEQ ID NO: 41187 - DNA, 324 bp, Escherichia coli
atgtcgattacactgagcgacagtgcagcagtgcgagtaaatacctttctggctaaccgcggcaaagggtttggcctgcgtctgggcgtgagaacctccggatgttcaggtatggcttatgtactggaatttgttgacgaaccgacgccggaagacatcgtgtttgaagacaaaggcgtgaaagtcgtggtcgatggcaaaagcctgcaatttctggacggtacgcagctggacttcgtaaaagaaggcctgaacgaagggtttaaattcaccaacccgaacgtcaaagatgagtgtggttgcggcgaaagcttccacgtttga

SEQ ID NO: 41188 - DNA, 396 bp, Escherichia coli
atggtaagcgcgctgtatgccgttttaagtgcgttgttattaatgaagttctcttttgatgtcgttcgcctgcgaatgcagtaccgcgttgcctatggcgacggcggttttagcgaactgcaaagcgctattcgcattcatggtaacgcggtggaatatattcccatcgcgattgtgctgatgctgtttatggaaatgaatggcgcagaaacctggatggtgcatatttgcggcatcgttttgcttgctggtcgtctgatgcattattacggttttcatcaccgtctgttccgctggcgacgttccggcatgagcgccacctggtgtgcgctgttgctgatggtgctggcgaatctttggtatatgccctgggagttggttttctccctgcgttag

SEQ ID NO: 41189 - DNA, 846 bp, Escherichia coli
atgggtacggagcaccgtgattccggtttccaaagtattgatacacaacttagtaccaatatggatggtaataatcagttcaatatgagcagtagcggttatagcaacgataaccgcgtgagctatagcgtgaacgcgggttatgggatgaataaaaccggcaaagatctcagcaacattgggggttatgccagctatgaatcgccatggggaacgctagctgggtcagtctctgctaccagcgataataaccgccagtactccgttaatacagatggtggatttgtgttgcacagcggaggactgacgttcagcaacgacagtttcagtgataatgacaccattgctctggttaaagcaccgggtgcaaaaggggcgcgtattaactacggcaacaataccgttgaccgttggggatatggcgtaaccagtgctctttcaccataccaggaaaacaaaattgctctggacactgaaaacctggaaaacgacatcgaaatgaagagcaccagtacggttgccgtaccacgccagggctcggttatctttgctggttttgaaaccaatcagggacaatctgcgattatgaatatcaaacgcagtgacggaaaaggtatccccttcgccgccgatattcatgatgaaacaaatgcaatcattggcaacgttgggcagggcgggcaggcatttgttcgcggtattcagcagcagggcacgataaaaatcacctggctggaagccagcatgcccaaaacctgtattgcgcagtaccagcaacccaatgtgacatcggagaaaatccagcaaacgattattctcaataatattctttgccagctccaataa

SEQ ID NO: 41190 - DNA, 207 bp, Escherichia coli
atgggaaccgattgccggatacggatgggaaagtacctggcgaccgctggcgtaacggcacgcgataactggaattacatccctctcccggttctactgccattggcctctgtgggttatggtccagtgacttttcagatgacctacattccgggtacctataacaatggcaatgtgtactttgcctggatgcgctttcagttttga

SEQ ID NO: 41191 - DNA, 1104 bp, Escherichia coli
atgaagattaaccatgaggatttaattgatcttataaaggcatcactggatgcgaattacagcgaagttcgtagtgttagtaatcgcattgttcgcgcaattagcgctcaggatgctgacttagcaaagcaaattaagtctatcatccgtaaaaaaggggtaccattacgtagctctggttatacggacagtttgcccttagatccgaaatcaaggatgcctttagtggaagaagtcgaatggcctgcaacgcctttatttctttctgatgaatcacagcatatttttcatgcttttattcagaatgttatccatcagaatgaacttatagagaatggaattccaggtaaattgaatttacttctttctggtccgccaggaacaggtaagacattagtcgctggtcatatcgcatccaaattaaacaaaccgctctatgttgttcggcttgactctgttatttcttctctgttaggtgatacagcgaagaacctaagacagatttttgacttcgtcccgacaaaagatggtgtgttatttcttgatgaagtagatgcggttgctaagcttcgtgatgacaatcaggaagttggagagttaaaaagagttgttaacacattaatccaaggactggattctcttgatgattctgctattgtcattgctgcaactaatcattcgaagctattggatccagcaatttggagacgtttcccatataaaattagctttggtttgcctggacaagatgtcagatgtgctatgtgggaacattttttatttagagatgatacggattcatttctaagtaaaatgttatctatcatatcaactgggctaacaggtgctgatattgaaaatatcagtttatctgcaagaaggcatagtgttttatctggcaatggactggatataccatctgttgtttatgctatattgaatagcgttgcggatagtacagcaattccttttggtaaggatataaattcgagtgttaagaaaaatttagcgaaggaattatctaagtttaaattatcacaggcagatatcggtagacttttaaatgtgagcaggcaaactatatcaggttatttcaaggaataa

SEQ ID NO: 41192 - DNA, 2268 bp, Escherichia coli
atggtcagtgaaaataaagctaaaattttaaacccaataattactttattgaaaccaccaacgccagaggcgattcctgttggagggaaaagtcgtaaaaatattgttggttcacggttgaaacaacagcgtgaagttttatcctcagagatagattccatattaagaacagaaagtgaaatagttaaacatcgtggtaagtatcatatagtaacaagtatgtttgaggactcatatgcaccatcgtttataccagattcattattctgttccagtgttgaatgtaagatagttgcaccagcatacaatggatatttaattgaggtcaatagcaatgctttattgaagttgaaaaataaaattaataatgcaaaagctattactgatcttgtggatatttcaagggttagaagtgttagtctttttgattcatcttgtacattgcgaaatagtagccttgattcgctctggaatacagttaaggctttgaatacatttcaatttaatgtgtggtttatgcctttttttgatgagctttctagagagtctgtagtttcaacttttttaaattttttaaatgatggtatcatcgcttttggttattcagattttgacataaaaactataaatcaagatgctgctgttggcggggataatatagtcatagttccaccgttacttattgaagcgataaaaaagtatcgtaaatcaggtcaagcatccgttaccgtcactgtagagactaaagatagtttaaacaggatgctgaatagcagtgctgtgtatcgtatagatcctgtatcaccgctaaacgtaacagatactcctcctggtaatggggctgaacctgttccaccaatattgggggataagaaaatgccaactgtagttgtaattgatggtgggtgcaatgcgaaatcatattcaaaattaaatatatataaactaaatccgctaattccagatcatgatgcagattgtaaacatggtaataaagttgtatcgttgttatgtcacggttatgcttggaataataatttaaacttacctaaattgcaatgtagctatataagtgcacaggctattgcgaaaaggggagtgttgaaacaaccaactccggatcaatttttaaattatttaagaatggttgctgacaaaacgtcatctatcgccaaggtctggaatctttcgtttaatgaagacgctcctcattataactgtaatgagataagttatctgggacataaaatcagtttgttggctcgagaatttggtattctgcctgtaatatctatcggtaatgtttcaaagaacgaaaaacaaaaaaatctttgtccgcccgcagattgtgagtcaggaattacagtaagtgggagaacggccaatcatgaaggaatgccttcagatggctgtcctttaagtcggaaaggccctgctcctgcaggaatgaaaaaacctgagttatcatggttttctcgagttagggtgataggtggaacagtagatatcggaacaagttttagtgctccattagtttcatctattgctgctcataccttttcgaatattaaaaatgccactcctgatttggttagggcattattgattaacaggagtgagttgctttctcatgatgatgcattaggatgggggactccttgggatggcgatttactgccatggtattgtaaagatggcagtgtcacattaacgtggatatctaagttaaaggctggggctgcttattattggaacgatcttccattacctccagagatgttagttaatggtaaattagttggtgagatatctctgacagctatactaaaacctaaggtttctgagttcggaagtgagaactatttttcgacaaggctccaatgttcgttacaggcaataaaagaaattaacgggacgctaaaaacagaaagccttcttgggtcaatgaaagaatcttctgttgatgagcgtaaagctagaaatgaactttctaaatggagccctattcgccatcatgcagagtcgtttaagagaaaagatataacagggtgtaaaattcggctttatgctaggatatatgctagagatttgtatcagtatgggttaaataaccaacgggagcttgaagagcaagaggtttcctttgttttaacttttaaaagtgtatcaggatcgtcctcaatatatacatcaatggttcagcaacttggtgtttatgttgaaagtgctgttatagataatcacattaacatagatgttaataagtga

SEQ ID NO: 41193 - DNA, 213 bp, Escherichia coli
gtgaaaaactcacaggaatcttttagcactaaatttgcagtcatacgttgtgatgatctgtcagttattgttgaaatggattatttccctgatacacaaaaagcaatgatgtatcggaatggtcgcaaggcaatttttttaccgatgaggaatagtgatattatgggaaatgataaattgccagatgaattgcgagtcagggcatcctgttag

SEQ ID NO: 41194 - DNA, 456 bp, Escherichia coli; identical to SEQ ID NO: 9452

SEQ ID NO: 41195 - DNA, 276 bp, Escherichia coli
atgtccaacatttggggtgcagttcactctgccaccaacaacctcggctttatgtatgagctggatgctatcgcggcgtgcgtggtaggcggtgtatcgttcagcggcggtgtggggacggtgattggcgtggtgaccggggtaattatctttacggtcattaactatggcctgacgtacatcggtgtaaacccatactggcagtacatcatcaaaggggcgattattatcttcgccgtagcgctggattcactgaaatacgcgcgtaagaagtga

SEQ ID NO: 41196 - DNA, 453 bp, Escherichia coli
atgtctatagactggaactggggtatttttttacaacaagccccgttcggcaacaccacctatcttggttggatctggagtggttttcaggtgacgatcgctttgtcgatctgcgcctggattatcgctttcctcgtcggttcatttttcggcattttacgtaccgttccaaaccgttttctctccggtctgggtacgttgtatgtcgaactgttccgcaacgtgccgttgattgtgcaattctttacctggtatctggtgatcccggagctgttgccggagaaaatcggcatgtggtttaaggccgagctggatcccaatattcagtttttcctttcatccatgctttgcctggggctgtttaccgccgcccgtgtttgcgaacaggtacgcgccgcgatccagtcgctgccgcgtgggcagaagaatgccgcgctggcgatgggtctgtga

SEQ ID NO: 41197 - DNA, 237 bp, Escherichia coli; identical to SEQ ID NO: 9729

SEQ ID NO: 41198 - DNA, 522 bp, Escherichia coli; identical to SEQ ID NO: 25587

SEQ ID NO: 41199 - DNA, 405 bp, Escherichia coli
gtggtggccatcggtattaccggcagtctgctgggttataaaattctggatccgattgcggcattggtggtcgggctgtttattctgcgcatgggggtgaaatttaccctgcattcgcttcaggatttaatggatcgcggtgcggatgaagaaaccattgccaaaatcacgcaatctgtgatggatactccgggggtggagggggttcatgatctgaaaacccgtaagtccggcgattatttgctggtggatgtccatattgaaattgatgaaaacctgacggtcaaagaagggcatgatatcgctattgcagcggaaatgaatatccgccgtgatccgcaggtgctgagtgtgatgacgcatgttgatcccgcccagtccgtccgggccgggctgacaacatga

SEQ ID NO: 41200 - DNA, 1512 bp, Escherichia coli
atggagtttagtgtaaaaagcggtagcccggagaaacagcggagtgcctgcatcgtcgtgggcgtcttcgaaccacgtcgcctttctccgattgcagaacagctcgataaaatcagcgatgggtacatcagcgccctgctacgtcggggcgaactggaaggaaaaccggggcagacattgttgctgcaccatgttccgaatgtactttccgagcgaattctccttattggttgcggcaaagaacgtgagctggatgagcgtcagtacaaacaagtcattcagaaaaccattaatacgctgaatgatactggctcaatggaagcggtctgctttctgactgaactgcacgttaaaggccgtaacaactactggaaagtgcgtcaggctgtcgagacggcaaaagagacgctctacagtttcgatcagctgaaaacgaacaagagcgaaccgcgtcgtccgctgcgtaagatggtgttcaacgtgccgacccgccgtgaactgaccagcggtgagcgcgcgatccagcacggtctggcgattgccgccgggattaaagcagcaaaagatctcggcaatatgccgccgaatatctgtaacgccgcttacctcgcttcacaagcgcgccagctggctgacagctacagcaagaatgtcatcacccgcgttatcggcgaacagcagatgaaagagctggggatgcattcctatctggcggtcggtcagggttcgcaaaacgaatcgctgatgtcggtgattgagtacaaaggcaacgcgtcggaagatgcacgcccaatcgtgctggtgggtaaaggtttaaccttcgactccggcggtatctcgatcaagccttcagaaggcatggatgagatgaagtacgatatgtgcggtgcggcagcggtttacggcgtgatgcggatggtcgcagagctacaactgccgattaacgttatcggcgtgttggcaggctgcgaaaacatgcctggcggacgagcctatcgtccgggcgatgtgttaaccaccatgtccggtcaaaccgttgaagtgctgaacaccgacgctgaaggccgcctggtactgtgcgacgtgttaacttacgttgagcgttttgagccggaagcggtgattgacgtggcgacgctgaccggtgcctgcgtgatcgcgctgggtcatcatattactggtctgatggcgaaccataatccgctggcccatgaactgattgccgcgtctgaacaatccggtgaccgcgcatggcgcttaccgctgggtgacgagtatcaggaacaactggagtccaattttgccgatatggcgaacattggcggtcgtcctggtggggcgattaccgcaggttgcttcctgtcgcgctttacccgtaagtacaactgggcacacctggatatcgcgggaaccgcctggcgttctggtaaagcaaaaggcgcaaccggtcgcccggtggcgttgctggcacagttcctgttaaaccgcgctgggtttaacggcgaagagtaa

SEQ ID NO: 41201 - DNA, 426 bp, Escherichia coli
atgaacgccttatccgacctacacagcaccgaactcgtaggcctgataagacgcggcagcgtcgcatcaggcaatgctgttattgtcggatgcggcatgaacgccttatccgacctacacagcaccgaactcgtaagcctgataagacgcggcagcgtcgcatcaggcaatgctgttattgtcggatgcggcgtgagcgccttatccgacctacacagcaccgaactcgtaagcctgataagacgcggcagcgtcgcatcaggcaatgctgttattgtcggatgcggcatgaacgccttatccgacctacacagcaccgaactcgtaagcctgataagacgcggcagcgtcgcatcaggcaatgctgttattgtcggatgcggcgtgagcgccttatccgacctacacacagcactgaactcgtag

SEQ ID NO: 41202 - DNA, 924 bp, Escherichia coli
ttgcaacagtcactgaaagaccttgagcgggcttacaaaaacttcttccagaatcgggctgcttttccccgattcaaaaagcggggacagaatgatgcattccgctacccgcagggcgttaagctcgatcaggaaaacagccgtatttttctgccgaaacttggctggatgcgctaccggaatagccgtcaggtcacgggagttgtgaaaaatgtcactgtcagccagtcctgcggtaagtggtacatcagtattcagaccgaaagtgaagtatccactccggttcacccttcagcatcaatggtcgggctggatgctggcgtggctaaactcgccacgctgtcagatggcacagtctttgagcctgtaaacagttttcagaaaaaccagaagacgctggcgagacttcagcgacagttaagccgcaaggtcaaattcagcaacaactggcagaagcagaaacgcaaaatacagcgactgcattcccgtatcgcaaatatccgcagggactaccttcacaaagtcacaacgaccgtcagcaaaaaccacgcaatgatagtcattgaggatttgaaggtcagcaacatgtcaaagtcagcagcgggtacggtcagccagccggggcgcaatgtccgggcaaaatcaggtttaaaccgttcgatactggatcagggctggtatgaaatgcgccgccagcttgagtacaagcagctctggcgtggcggtcaggtgcttgctgctccgccagcgtacacaagccagcgttgcgcgtgctgtggtcatacagcgaaagaaaatcgcctgtcacaaagtcaattcagatgccaggtatgtggatatacagcgaacgccgatgtaaatggcgctcgtaacattttagcggtggggcacgccgttcttgcctgtggagagatggtgcagtga

SEQ ID NO: 41203 - DNA, 189 bp, Escherichia coli
atgaggcgcttcgcaggcgcatgtcgtttcgttttcaatcgtgctctggcgcttcagaatgagaatcatgaggccggtaataaatacatcccttacgggaaaatggcttcctggctggttgagtggaaaaatgccacggaacgcaatggcttaaagatgccccgtcacagccattgcaacagtcactga

SEQ ID NO: 41204 - DNA, 228 bp, Escherichia coli
atgacctccgagatgatgaacctggtgaaaaactccgccatcgcctcgaccatcggtctggtggatatggcagcgcaggccggtaaattgcttgattactcagcccacgcctgggagtcgtttaccgccattacgcttgcgtatgtgttgattaacgcttttatcatgctggtgatgacgctggttgaacgtaaagttcgcctgcccggcaacatggggggcaaataa

SEQ ID NO: 41205 - DNA, 183 bp, Escherichia coli; identical to SEQ ID NO: 6044

SEQ ID NO: 41206 - DNA, 228 bp, Escherichia coli
atgtttgagtccggccttcgcaccttcgcaccttcgcaccttcgcaccatcggaacatcaatagacatcaacggacgtttttttatgactgaaatccgcgccacacaaggcttttcgctatttttcgctcaacctaagtcaacctacatcaacttactgatgtggatacagctacagctgcggctatatcccgattcgataatgtttgtacccacacaaaacccttga

SEQ ID NO: 41207 - DNA, 138 bp, Escherichia coli
atgaccaataatattagcaatataaacaatacagctcataataagaatctcgataaaacaacattcgatgaacaacctgcttatgaaacaagagtatcacaagctaaaaaaaatactgcaaagttttgcgccaaatga

SEQ ID NO: 41208 - DNA, 426 bp, Escherichia coli
gtggtgacgcaggccgacaaaacggagccctgccatgaatgggatatggccggcattcagccttctcccgcacaggcacagaacattcgggagaaaacggaggcggtattccgtctgttccggcccgtacatccggttgttgccgtatcggcccgcaccggctgggaactggatacgctggtcagtgcgctaatgacagcacttcccgaccatgccgccagtcccctgatgacccgcctgcaggacgagctgcgcacggaatctgtccgcgctcaggcccgtgaacagtttaccggtgcggtggaccggatatttgacacggcggagagcgtctgtgttgcctctgttgcccgtacggttctgcgtgccgtccgtgacacggtggtctctgttgcccgcgctgtatggaactggattttcttctga

SEQ ID NO: 41209 - DNA, 426 bp, Escherichia coli
gtggtgacgcaggctgacaaaacggaaccctgccatgaatgggatatggcaggtattcagccttctcccgcacaggaacagaacattcgtgagaaaacggaggcggtattccggctgttccggcccgtacatccggttgttgccgtatcggcccgcaccggctgggaactggatacgctggtcagtgcgctcatgacagcgcttcccgaccatgccgccagccccctgatgacccgactgcaggacgagctgcgcacggagtctgtccgctctcaggcccgtgaacagtttaccggtgcggtggaccggatatttgacacagcggagagcgtctgtgttgcctctgttgtccgtacggccctgcgcgctgttcgtgacaccgtggtctctgttgcccgcgcggtatggaactggatcttcttctga

SEQ ID NO: 41210 - DNA, 183 bp, Escherichia coli; identical to SEQ ID NO: 36303

SEQ ID NO: 41211 - DNA, 123 bp, Escherichia coli; identical to SEQ ID NO: 23009

SEQ ID NO: 41212 - DNA, 1209 bp, Escherichia coli
atggttacagttgtcagcaattattgtcaattatctcaaacccaactcagtcagacatttgcagaaaaatttactgtgaccgatgaattactgcagtctttaaaaaaaacagcgttatccggagatgaagaaagtattgagttactgcataacattgcgttaggttatgatgaatttgggaaaaaagctgaagatattctttaccatattgttagaaacccaacaaatgagaccctatcgattatccgacttattaaaaatgcctgtttaaaattatataatttggcacataccgcaaccaaacaccccctcaaatcacatgattcagatgatctcttgttcaaaaaactattctccccttcgaaattaatgacaattatcggtgaggacattcctcttatatcagaaaaacagtcgctttcaaaggtacttttaaatgataagaataatgaactgagcgatgggacaaacttctgggataaaaatcgtcaattaaccacagatgaaatagcttgctatcttaaaaagatagccgctaatgcaaaaaatactcaagtcaattatcctactgatttctacctccccgattccaacagcacttacctggaaatcgctctcaatgataatattaagagcgatccatcatggccgaaagcagtccagttattccccataaatactggcggacactggatattagtttcgctacaaaaaatagttaatgaaaaaaataacacacaacaaataaaatgcatcatattcaattcattacgtgcactaggccatgaaaaagaaaattcacttaagcgcatcattaatagttttaattctgaactcatgggagaaatgtcgaataataatataaaagttcatttaactgaacccgagataatatttttacatgccgatcttcagcaatacttaagccaaagttgcggtgcatttgtgtgcatgtcagccaaagaagtaattgaacaaagggaaagcaattctgacagcgctccctatacgttattaaaaaactatgctgacagatttaaaaaatattcagcagaagagcagtacgaaattgattttcaacatcgacaggtaaacagaaattgttatttagataaatatggcgatgcaaatatcaatgattattatagagacttagaaataaaacactcacaaccccaaaatagagcatcaggcaaaagagtaagttaa

SEQ ID NO: 41213 - DNA, 258 bp, Escherichia coli
atgaaaaaaaaagaaaagattgattttcttaatgcaataaaagcagggcactctggctttatagctggtaatcctgctcatgcattggatgataagactatgaacgccatcattcagaactacgtggcaacgatcgttcccggtaaaataggtaactgcaaagaaacttctttcacaaaatattgttccaggactataccagagcgtatttcagttgaaaaaattaacaaggttaaaatttatccagaattcttctga

SEQ ID NO: 41214 - DNA, 249 bp, Escherichia coli
atgtgtttaggttgtatgcatccatatccggctggtcactggatgtattcgttatacgatttactcgacaattcagtgttcgtggtttgtttctttgccttctgggtagcaacgggtcaatttttattaagaaccgcacacgaaaaatttaatatatcagaaacagttgagatagttatcatttttttattatggctactaatgattctgtctttttatctttgcgcaatattaaaggcttatctttaa

SEQ ID NO: 41215 - DNA, 756 bp, Escherichia coli
atgagagtagaaaataataatgtttctgggcaaaaccatgacccggaacagattgatttgattgatttactagtgcagttgtggcgtggcaagatgacaatcatcatttccgtcattgtggctattgccctggctattggatatttggcagtagcgaaggagaaatggacgtcaacagcaattatcactcagcccgatgtggggcaaattgctggctataacaatgccatgaatgttatctatggtcaggctgcaccgaaagtatcggatttgcaggagacgttaattggtcgcttcagttctgccttctctgcattagcagaaacgctggataatcaggaagaaccagaaaaacttaccatcgaaccttctgttaagaaccagcaattaccattgactgtttcttatgttgggcaaactgcagagggcgcacaaatgaagttggcccaatacattcagcaagttgacgataaagtgaatcaagagttagaaaaggatctcaaggacaacattgctctgggacggaaaaacttgcaggactctttaagaacgcaggaagtggttgcgcaggagcagaaagatctgcgtatccgtcagattcaggaagcgttgcagtatgcgaatcaggcgcaggtgacaaaaccgcagattcaacagactggcgaagatatcacacaagatacgttgttccttttggggagcgaagcgctggagtcgatgattaagcatgaggcgacccgtccgttggtgttctaa

SEQ ID NO: 41216 - DNA, 186 bp, Escherichia coli
atgttcatgcaaatagacagacgcatagatattaatggcaattcatacttagttagatgcgaagagaggcctaacggtgagtggcgtgtatatgatattgaccgtaagatcaatatcagcaccatgaacaaagacactgcctttgatgaatggaaagctgaagctaaaaaacaacataattcgtag

SEQ ID NO: 41217 - DNA, 1536 bp, Escherichia coli
atggaattacgtactccacgtgatcgtgatggttccttcgaaccacaactggtgaagaaaaataagacctgcattatcggcatgaacaaccagatcctggcgctgtatgccagagggatgactactcgcgaaattacctcagtcttcaaagaaatgtacgatgcagacgtttctccggcgctgatatcgaaaatcaccgatgccgtaatcgaccaggttgtagaatggcaaaaccgtcctctggatgcgatttatcccattgtttatcttgactgtattgtcctgaaagtacggcaggacagccgggttatcagcaaagcggtgttcctggctctgggtattaaccttgatggtcagaaagagctgccaggtatgtggctggccgaaaatgaaggtgcaaagttctggctgaatgtactgacggaactgaaaaatcgcggcctgaacgatatccttatcgcctgcgtggacggcctgaaaggcttcccggaagcgattaatgccgtctacccggagacgcagctccagttgtgcatagtacatatggtacgcaacagcctgcggttagtggcgtggaaagactataaagcggtaacccgtgacctgaaacaggtttaccacacagccacggaagaaggcgcgttgcaggcgctggatgcgttcgggaaggaatgggatgcacggtacccgcagataagtcgcagctggcaggcaaactggccgaatgttgccaccttcttcgtgtacccggaggcgagccgcaaggttataataaataaccgtcaatacggtgctccgttaacgcttacgtctgttatggtactttctgattgttattcatgggctaacgagcagtttggacatgccagtctcggtgatccgcgtcgtacacgacgccttgtgtcactggcctcttctctcgctcagcatgcaggtctttctatcgtgaaatcatcccagtccactgctcaggttgaaggtgcgtaccgcctgatgcgtaacccgtcagtgtctccggaagccattgccgaagccggatttaccgccactgcaagggcatgtgaggcacatccgctgctcctcgcactggaagacaccaccaccattagtttcagccacagtacggcatttgatgacctagggaataccactactaacccgaagacgcgcgggctgctggctcactctgtcctgatgtatgcccccgacagcgccctgccagtcggtcttatcgaacagcagcgctggagtcgggccacggacacctacggtgttaagcaccagcgaaaagaacgtccctgtgaagaaaaagaaagttctcgctggcagcaggcttcggagcgtatggctgaacggctgggggagatacagaaacgggtaatcactgtctgtggcctggaagcggatatctggcattacctgcattataaagtcagccacggacagcgcttcgtggtgcgtgctgcacagaatagccggcaggaagaagcacccggcaagctcttcgaactgccggaagtcctgacaaccgcatga

SEQ ID NO: 41218 - DNA, 600 bp, Escherichia coli
atgttcaccagttacagcgaagtcggcataaaaaatcccgacaacagcggccaggcgcttccgctcacgtatgtctgttgccgggagcaggcagaggacggtgcctgctggcatctgctgacatcagaaaaagtggcgagtgccgccgatgcgcgacgtatcgtcagccattacgagcgacgctggttgatagaggaataccacaaggcgtggaaaagtggtggtacatgtgtggaatcgctgcgtatgcagacccgggataaccttgagcgcatagtggttatcaaggcgtttatcgcggtacgggtgctgggcctgcggcagggaggtatcagtgaagaaacacaaaatgacagctgtgagaaaatactgttgccgacagagtggaaactgctgtgggttaagctggaaggaaaaccgcttccgtcacagacgccgacactgaaatgggcctgtctgaaactggcgaaactgaggcgatggcatgacagcaaacgcacaggtcgccccggttgtgtagtcatgtgggatggctggttcagacttcaggatatggttgagggttacctggtgatggagtctcttgatcaggagctctga

SEQ ID NO: 41219 - DNA, 123 bp, Escherichia coli
atggcccggcgcttcacgatggagatggataaagttaaggtgccgctcgtactggtcgagaatatcggtgatcacctgctctttgctgtagtccatcaggtcgttgccctagctgccttctaa

SEQ ID NO: 41220 - DNA, 243 bp, Escherichia coli
atggcattcgtcgatcacgatcagatcgaagaaatctggtgcgacttgtttaaacgctttttggtcttcctccgggccagttatagcctgatagagcgcgaggtgaatttcataagcgggatcaatggtgcgtccgctgactttggtcattgccgtaccaaatggctggaaatcattatttttggtttggtcgaccagaatgttgcgatcggcaaggaacaaaatgcgttttttattttttga

SEQ ID NO: 41221 - DNA, 240 bp, Escherichia coli; identical to SEQ ID NO: 28165

SEQ ID NO: 41222 - DNA, 165 bp, Escherichia coli
atgtattgcgcgcagacccctgaacttccccacaacacggcggcaatcagaacgttcagcatcccctttctggtggaacccatttttccctctgcatactgttttgtcttttcatcaatatacgttaaggataccactaccgatgacggtgagggagtagagtaa

SEQ ID NO: 41223 - DNA, 1074 bp, Escherichia coli; identical to SEQ ID NO: 30063

SEQ ID NO: 41224 - DNA, 1539 bp, Escherichia coli
atggcaatcactaaatcaactcctgcaccattaaccggtgggacgttatggtgcgtcactattgcattgtcattagcgacgtttatgcaaatgttggattccactatttctaacgtcgcaataccgacaatatctggctttctgggagcatcaacagacgaaggcacctgggttatcacctcgtttggcgtagcaaatgccattgcgatccctgttaccggcaggctggcacaaagaataggcgaattaaggttatttttactttcagtcacttttttttcgctgtcttccttaatgtgtagtttatcgaccaatcttgatgtgctgatattttttagagtcgttcagggattaatggcggggccgttaattccactgtcacagagtttattattaaggaattatccaccagaaaaaagaacatttgctctggcattatggtctatgaccgtgattatcgcgccgatatgtgggccgatattgggcggttatatttgtgataactttagctggggttggatatttttaatcaatgtccctatggggattatcgtcctgacattatgcttaaccttacttaaaggacgagaaactgagacttcaccggtcaaaatgaatctaccaggactgaccctgttagtgctcggtgttggtggcttgcaaattatgcttgataaagggcgcgatctggattggttcaactcgagtacaataataatactaacagtagtatcagttatttctctgatttctttagtcatttgggagtcgacctcagagaatccgattcttgacctcagtttgtttaagtcccgtaatttcaccattggtattgtgagtatcacatgcgcgtatttattttactctggagcgatagttcttatgccgcagttactccaggaaacgatggggtataatgcgatatgggccggacttgcctatgcgcccatcggtatcatgccgctattaatatcacctttgataggacgttatggcaacaaaattgatatgcggttgttggtgacatttagttttttgatgtatgcggtttgctattactggcgttctgtgacatttatgccaacgattgattttacaggcatcattttgccacagttttttcagggattcgccgttgcctgtttctttttacccttaacaacgatttcgttttcaggcttgccagataataaatttgccaatgcctcgagtatgagtaatttttttcgcaccttgtcaggatcagttggtacgtcgttgacaatgacactgtggggacgccgcgaatcgttacaccatagtcagttgacagcaaccatcgatcaatttaaccccgtgtttaattcatcgtcacaaattatggataaatactatggttcgctttcaggagttcttaatgaaattaataatgaaataactcagcagtcactttctatttctgcaaatgagattttccgtatggcggctattgcttttatcttacttacggtttttgtttggtttgcgaaaccgccgtttacagcgaaaggcgttgggtga

SEQ ID NO: 41225 - DNA, 261 bp, Escherichia coli
atgggtttagctgagtggttttgcggattttgctccaatcttactgtaaaagatggtggaacaatttcaactagatataggaatataacgaagcgtttaaatacggatttttgggatagcagttctgatacttctcatagtctctacgttggatcatatggtcggaacacagctacgcaaggcttgagcgatctggatatgatttttcagctaccatattccgagtatcaaaaatacaatagctacttaggaaatgggtaa

SEQ ID NO: 41226 - DNA, 225 bp, Escherichia coli; identical to SEQ ID NO: 11866

SEQ ID NO: 41227 - DNA, 405 bp, Escherichia coli; identical to SEQ ID NO: 2569

SEQ ID NO: 41228 - DNA, 336 bp, Escherichia coli
gtggatcacttttcatccgtcgttgacaactatatcttacaaacgaataaagatggccactattgttggcgaccattcgaattaattcatcctgcaatttacgttcatcttgtccataaaataacggaagatgaatcatggcaactcttgcttgaaaggtttggtgagttccaaagcaatacaaaaattgtgtgtgcaagccttccaagagaatctgaagaagatggagtttctgataaggcaaaagctgtatcaggatggtggcgtgatgttgaacaagaatctatcaataaatctcttcagtttaaaggtgatgctgccaacttactgatttag

SEQ ID NO: 41229 - DNA, 213 bp, Escherichia coli
atgcttaccaattatccggcgcatagctgctggctgtttttcgacaagattaagtgtcatcactgtcatttccagaccctccggcttttcagaaaggtcagagccctctttaacggactctgttttttggtgcggataatgattcccttacgccccttaccgtgggtgatggtgaagtcaatcgccctggggctttcgttacgcaataactga

SEQ ID NO: 41230 - DNA, 804 bp, Escherichia coli
atgaacgcagaatatataaatttagttgaacgtaaaaagaaattagggacaaatattggtgctcttgattttttattatcaattcataaggagaaagttgatcttcaacataaaaactcgcctttaaaaggtaacgataaccttattcacaaaagaataaacgaatacgacaatgtacttgaactatctaagaatgtatcagctcagaattctggcaatgagttttcttatttattgggatatgcagattctcttagaaaagttggtatgttggatacttatattaaaattgtttgttatctaacaattcaatctcgttattttaaaaatggcgaacgagttaagctttttgaacatataagtaacgctctacggtattcaaggagtgattttctcattaatcttatttttgaacgatatatcgaatatataaaccatctaaaattgtcgcccaaacaaaaagatttttatttttgtacgaagttttcaaaatttcatgattatactaaaaatggatataaatatttagcatttgataatcaagccgatgcagggtatggcctgactttattattaaatgcaaacgatgatatgcaagatagttataatctactccctgagcaagaactttttatttgtaatgctgtaatagataatatgaatatttataggagtcaatttaacaaatgtctacgaaaatacgatttatcagaaataactgatatatacccaaataaaattatattgcaaggaattaagttcgataagaaaaaaatgtttatggaaaagatcttgttagtataa

SEQ ID NO: 41231 - DNA, 1302 bp, Escherichia coli
atgagtcaggatataaataataatatagctgtcagcaaacaccgtcgaataataagacaactacggtggtggatgttaatcctttttctaatgggtgtcactgtcaattatattaccagaaactcattaggtattttggcaccagagttaaaagacagccttggaattacaactgaacaatactcctggattgttggtggatttcagcttgcatataccctttttcagccactttgtggatggctaattgatgttattgggctcaagattggatttatgatttgtgcttcattatggggaattgcttgtcttctgcatgcaggagcaggaagctggatacagcttgcgttgcttcgttttttcatgggaggtgctgaggcttctgcgacacctgcaaatgcaaaaattataggtgagtggtttccaaaatctgaacgtcctgttgctgctggctgggcgggtgtcggtttttctatcggtgcaatgcttgcaccaccaattatttactttgcacatgcgtcatttggttggcagggtgcatttatgtttacaggtgcacttgcaattctttgggttttcctttggtgggcgtgttataacacaccagaagagcacccaaacttaagtaaaaatgagctcaactttatccgacaggataacgaagctcctccggtaaaaatgccttttctgaccgcgttaaaaacagttagtaaaaataaacgcttttatggaatcgctatccctgcatttatggcagagccagcatgggctgtaatgagcttttgggtgccattatatcttgcaaaagcatatggcatggaccttaaacaaatagctctgtttgcatggttaccatttctttgcgctgatttaggaagtattgccagcggatatctgacaaaactctatacccgtctgtttgggttaagcagagtaaattctgttattgcgtcctctgtaagcggagcatttctaatggtttcgcttgctgtgattgcttttatcgacaatccatatattgctattgtacttatctccattggtggttttggtcatcagataatttcctgcatgttaagtgccctggtcgttgaatcttttgataaggggcagatggccactgttaatggaatgcgtggttcagccgcatggattgccagctttttgttctcactgattattggcgttactgctgacaaaataggctttaacccgctatttatcgccatgggattttttgatcttattggtgctttttttctggttacttttattgcagaacgtcgcaaaaaacgcacctga

SEQ ID NO: 41232 - DNA, 549 bp, Escherichia coli
atgcagggcatcagccgacgcagacggcgcggggttatcgccggaataaatccccggcagaacaaacgccgtgtcaagttcaccacccacggccagaatcagcacctgttcccccacggaaggtgcccaccatgtgcgcgaacgtcctgcgcgatgggtcagccactgaagccagtcggtgcacatgccgccggtctgcacacggcagcgaccggcgttaaggtcggtttcgacgataatgccggtgcggatcatgttgcgcagtgcgcgcgcgagttcctgaatatttgcgagagtgttcataacgggaaggatgccgccgggtcataccggcggcaatgtgacgatgaggtgtcgggaatggcacaactaacggtcgaggtgagccagaataatctcttcaatcatctgcacatcctcaccggtaaagccgagcagaggacgcgccggataatcaattttcttaccgtctttccgggtttcttccgacagaccgaactgatgcacactggcgattttcggcgacttcccgccgtaaaattccattga

SEQ ID NO: 41233 - DNA, 183 bp, Escherichia coli
atggctagaactgttaaatttactcgcgagattatgttagagaaagcaaaacgctactttgaactaacgccgggagtgaggattgaagagtggtttaaaaatgaaggcatcgataaatcaaccttccataaactcttaaagaaatatgaaatcaaggtgaagattgaagctaccgtttggtaa

SEQ ID NO: 41234 - DNA, 1020 bp, Escherichia coli
atgaaacaaaataacttctctattaccgtttacagcaacaccgcagacaccgcaaaatatcagtacgatgcatatatcgaaattcgtaactatggcagcaacgaagcagttaccctgactaacggcactaatatttataaagaagaaaatatcgattctctgtacactactctttatcatgctggttccaactggaaaaaagaatatcgcggtttagagcgtaagaaagctactttgaaagcaatgattaaagaagatcagcgcgaagtacatgctatcgctttcaaagacggtgatgaatcctatgtcgtttctatcctgcaagatgaagctggtagcctctttggtaacatgatccacgcttcccgccgtgatgcgaaaggttgctacattgccaacggtaaagttaaaaactttgctcttgcttccagtgctgttagtgcatggtctgattgtgaacatggcgagaaattcaatatttctttcttcgtttccaacaaagctaaactgaatgttaacgctgttgataagaccgtatggaaagacactcctaaagaaaaaaacgttaccaactacgaagaagaatatcaaaagcgtgatatgaaacttctggctgatgcacagcgtgctttcgagcaacgtcttgctgagatggaacgcaaattcgctatgctgatggaagaaaacaaacatctgaaagaagaaattgaagttcttgaaatccgcgtagaagaattagagaaaaaagaagttaaagcgccggaagctaaaaccgttgaagcggtagtggtagttccggcagctacccaggaagaagcgaaagaagaagaacaagaagcaccggaggcggttactgttgatcaaccgattatcaaaccagtgttaaccgccgtttcttgtgatctttctgatgccagcttaaacaaccttcttggtgtagaagaaggatataaaccatatgttccaaccattccggctatggatgagatggacctcgcattacttggtcttgcagcttaa

SEQ ID NO: 41235 - DNA, 1002 bp, Escherichia coli
atgaacatttacgcaatcgacaacaaaaaactcgacaaagaagaaactgaatcactggtaaacgttcgtctgacctccacctttgacggtggagttaccgcagactttaaattcaacgaccatattaacggcggtgattactatcaggaattgttttctattcagaatccccgagctaaagattctgagaatgtcattaaagaaatcatgaaacacggtatcaagctgacagtagaagaacatactatgattaacagcttcatcaataaaactggtgatcgtctggtttattctgtagttggctatgaacttagtggattttatgacgaagagaagaaaggcgttgctatggttgttattagccgtggtggtgttgctactgtcttcgcttttggtaatgttattcagtgtacgccgaaaacatcaaacgtttatacgatccgcattaaagaaaatagctattgccgttataatctggctttggtgtctaccgatgagaacagcgttgaacttagcgacgtgaaatattacaccttccctattgatgtagaaggcaatctggggaaaaccgtgtttcaattctacgtgacaaaacctaaagttccggcatgtcttgaggaccatgaccatcaagtttgtgcatataaagccaatctggaagcaattaaggccaaagagaaagcagaaagggaagaacgggatcgcccacgtaaagaagcagagacttatgcaaaactggttttaggccgactcaatagcatgaagactaaggtcaagaatgcgaaaacgtgggaagatgcgattaagttctaccatcaagctaatattcttttggttgaagtggaagaagcgcgggataaatgggctagcttagatcagaattatgcacgacgtagagcggtagcaaccttacagccacttgatgaactgtgcaaacttcctaagccagtaattaaaccggaagttaagaaacagcgccctaccctacgtcttgttgcttaa

SEQ ID NO: 41236 - DNA, 306 bp, Escherichia coli
atgaagactaaagatattaagattgactttgaaactgttgatgacgttcgggaacatcgcattgattctactggctgcatcttccagcttactaactcccctattggattgattatctatgtagcagaagatgacgtgtacgctatatgggatggacaggatgagtttaaaggcgggaatagccatctgatcaatactcatgagggatttgatccgactcctgtctgtatgcttgcttatcacgtaacactggatgaactaccggaagcaagcgcgcgtatccgtagaatgaaagatattaagtga

SEQ ID NO: 41237 - DNA, 903 bp, Escherichia coli
atggctctgagtgatgtgaaggtccgttcggctaagccggaagcaaaagcctataaacttactgacggtgaaggcatggttttgttggttcaccctaatggctccaaatactggcgacttcgttatcgttttggcggtaaggagaagatgctggcgctggggaaataccctgaagtctcgctggtcgatgccagaggtcgccgggatgaagcccgtaagttgttagctaacggcgtcgatcctagtgagaacaagaaagctgttaaggtagagcatgagcaagaggtgataacgtttgaagtggtagccagagagtggcacgccagcaatcagaagtggtctgcatcgcatagcgctcgtgtattgaaaagcctcgaagataatctctttgctgctatcggtaagcggaacattgctgatctgaagactcgggatctgcttgtccccatcaaagcggtggagtcgtctgggcgtctcgaagtcgctgctcgtttgcagcagcatactaccgcgattatacgctttgctgtacagagtggattaatcgactacaaccccgctcaagagattgctggtgcggttgctacggagaaaagacagcatcgtgctgctctggaacttaaccgcattcctgaattgcttcaacgcatctatcactattctggcaggccgttaacccgactagcggttgaactcacattgttagttttcatccgttcaagcgagttgcgttttgctcgctggtcagaagttgattttgatactgccatgtggacgattccgggagaacgtgagccactggagggagttaagcattctcagcgtggttcgagatgcggactccacatcttgtacccttatctcgacaagctctcaccattctggaaaaaatcaaaagcatga

SEQ ID NO: 41238 - DNA, 1128 bp, Escherichia coli
gtgagttggccgatggtgaagttagaggatgttattaatgttcactacggaaaagcattaaaagctgatcagcgtgtatcgaatggaagtgtccatgtttttggtagttcaggaattgtcggcaaccacgataaaacgctttgcagctatcccacgataattattggccgcaaaggcagcgttggtactgttacctgggctcctaacggaggctggatcattgatactgcttattacgttgagatcaaagataatagtaagttagatctccgatacttgttttatattctgagcggaattgatctcactaagaaaacgattaccacaagtattcctggattaaatagagacgatctctatgatacatttattaaattaccgccttttgaagagcagaaacgaattgtggatcttctcgataaagctgagggtatacgccaaaaacgtgagcaatccatcaaactggctgataattttttgcgcgcaacgtttttggagatgtttggtgaccctgttgaaaatccaaaaaaattaaaaaaatcccccattactgaattggcagatgtcattacaggttttgcattcaaaagtaatgagtacattaatgattcgtctgaagcggtacggctttgcagaggggcaaatacgcttacgggatatttagattgggctgatacaaaattctggccaaaaaacaaactggaaaaactagataattatttaattaaggcaggtgatattatccttgctatggaccgtccgtggatatcaagcgggttaaaagtatgcatattccctgaaaatcagcgagaaacgtacttagttcagcgtgtagctaggttacgacctcgttgcgaatcttacacaaactatatttacagttgtattaaatcgccagctttcgaaaagcattgctgcccaacagaaacaacggtgccacatatatctcctgttgaacttaaaaattttgaagttctaattccgcccgacgaacttatggttaattttcattcgattgtatcaataatcaacaatagcttaaataaaatggcgtcaggcgatattgatagcgacgccctcttctctaagttaagtcagcaggctttttcaggacatcttaagaggtaa

SEQ ID NO: 41239 - DNA, 624 bp, Escherichia coli
atggacttatttgacctgttaacaattaaatttaccttgcccgcgaaagctgcccctgtaagaaaagtgggtgggaattatgttcataaattactttgccgatcaacaacagtattggctcaagtcagaaatgcacgtttccaaggatattttgaacttgttacgggtctaaagccccctctggactatgtctatctgaaagatccaaattccagggggaaatgcgcagatggtgtagcttcccttaaagctaaggaaccatttacattcgaaaaatggcgagaagatactgagttaagctgggagcaatttccagagcaggtatttagcacttcacctaatgaaattaatgaacaatggcatcatcaatttcagtttagagaggacgatccagagcgcaattctcctggtctcagaaaaccccaactgggtgcacttcatgcaattgcaggctatttcgccactgatttgcaggtagaacctgctaccgtcgtactgcccactggaacgggaaaaacggaaacaatgctggctaccatgatataccagcgatgcgagcgaattttgctcatagtcccatctgactctctccgaacacaaatatccaaaaattcatcgatttag

SEQ ID NO: 41240 - DNA, 2652 bp, Escherichia coli
ttgccagagctaacagtcgttccacccaacattgcactccctaatgtcgctattattaagaagggaattcaggtagcggaagaagctaagcaattagctggtgaatcaaatgtcttggttgctacgaccagtgttttgtctgcctgctccgaaacagcattaaatgcactttgcgagtcgtgtagccatctttttgttgatgaggctcatcatatctcagcctcatcatggcagacaattcgcgaacgatttaaagacaaacgtgttgtgcagtttacagctacccccttcaggaatgataagaagccccttggtgggaaaattatctataattacacgatgggggaagcccaacgagcaggctattttacaaatgtaaatttgctgcctgtagaagagtattactctgaccttatggatcatgcaatcgcagaaacagctattggtcaactgcgtaaagacttaaataatggccttgatcatttgcttatggcccgtactagcaataagcagcgagcagaagaaatactgactatttatcagaatattgtaccgaactttaatccaatcgttgttcattctgattatcctaaaacggaaataaaaaaacgtcttaataaattattatcaagacaatcaagaatcgttatttgcgtagacatgttgggagaaggctatgacctacccaacctgaaaattgccgctttgcatgatcaccataagtctcttgcagtaactttgcagttcattggccgttttactcgtgtcaataaagcacagaaaattggtcaagccagtgtagtcatgaatgttgcagaccctaatgttgaaggtgaattacagcatctatattcaacaaatgccgattgggataacgtattaaggcgactctctgaaggacgaattgctaaagagattaggttgcaagaggtcgtggatgccttaaaaaggaaaggtgatttacacgatcagatctctctctggaaccttgagccaagttgttctgtcatgttatttaaaacatactgtgacaattgggagcctgaaagatacaaggaaaaactgcctagattcgatgaatcatggcatgcaatagcagaagatgagaatttgcttgttgtgctagctgttcagacaacttcagtccggtggggaaactacaaagatcttaaagataccaattataaaattctaattgctcattgggatcaaagcagatccgccttgtttgtattctcaaatgactataaagcatttcgagttgagaatctagtcagtgctatttgtgatgataaatttgaagttgtcagtggtgaaaaagtctttaatgtatttaatggtattgaatatcctttagcaagaaatttaggcgcatcccaaattggagcaatcagcttcactcaatactttggcccaaatgtcactgaggggctatcactaattgaagcgtctcaatcaagcttaagcaatattgctgcattaggctatgaatccggaaaccgtgtaatctggggatgctcgcaacgcagaggtaaggtctggtcaccacaaaaaggtggcagcattgctgattggtgcaactgggttaagaaagcctgggacaaaatttttagttctgagccggatccaaacaaccttacgcgtaactttttacgccctgttccattacttgaaccctataatgaatatccaatatcagctcaatggggtgagtatttgcttactgcgttcgaagataaagttatttttcattttgatgctatatcagctcacttatatttagtagaggtgacgactgctggaaagtttgacgatggcaatgtacggctcattttttctacagatgaaacttcatctgtatataaattatgtcttacaggtagtactacagcaaaaggttatacctatcagttgatttccggccctgaagtctttgtacagcgtggtgaatctgaatctgtatcactatcagaatatatggaaattgatccagtaatgattcattactccgatggctcattttcttacaacgctcatatagttcatgtaagccaaaatattggcctttatgacaaagacgaaattgtagcttttgattggaatggaactgatgttcgagtggaatcaatgggctatactcgtgatccatcatccatccagtggcgttggtacagtgaaattaaagataattacgatgttattattaatgacgacggtaaaggtgagtcagctgatttagttgggttaagaatagttgatgactgtattgttctctctttaatccattgcaagtattcaggctcagaagaagctggagcaagacttaaagatctttacgaagtatgtgggcaggcacagagatgcattcgttggaagcacctgaatctttcctatttataccaccacattaagcgtcgcgaggaacagtggcgatcgcgtggtcattctcgctttctaaaaggcactataaaagaccttgcagctatgaaagagcgctccagaatcacacctcttaaattccaagttgttattgttcaaccaggacttagagtaaacaaaattaatgaagaaggccttaagttacttggcagtacggccttatttatcaagaaaacaacgatggcagatttagttgttattggttctaaatag

SEQ ID NO: 41241 - DNA, 1323 bp, Escherichia coli
atgatcctattcttttatccctacataatgctttgctatagcgctggatacgctttattgcaaacactggatgggatgggggtgattagtaccaactttgtagaaatgaacgcacagggtgctcttttgagcagttactggtctcccaataaagttgctgtagtcttaggaggatgttttcttgagctctttattttattattaccctttgttttcttgagctcatggatacttgccagaaaaaagggactcatcatttgttttgttcttcttataacccctggcctattatcgctctgtcaccttcttcctgctatccagtggttgccattgacctatgaaataggaggtacaggtgcaacaggtaacgcagctggactcggaagtcttagcttcatagggctattgagtggttggattttggcagtaatcattagtgatatttttgctacaggagagaaattcagacagtggacagatattttcctaatactgacagcagttggtaacggtattttctgggtatcagacagagaggtgattgtcggtaaaactgcatatgagaaaacaattacggatattaatgatgcagccaaataccttctttttcaggtgaaagactacagccgcatgtgtgacaataacgggcttaccgaaatgtcatcttgtcagtggtcatcgtacattcaagaaacgctagaaaatattgctagtacaaaatcatctgttattgaatatgtaatacctgaaaatcttgacaccttctaccgaattcctgagtactatagcaaccaagtatctccagataaaatcagacaggaatttcaagacttcaataaaaaactatgcccaaataaatctctttccaaaacaataacacaattgccatcaccttctcgatggtgccagaccccacccccagcttactgcaataccattcaagagggaaaatataaaacaggcatgtcagaccgtttcgctgtcgccaatgagtgtgtaactacatcattattaaggtaccgccaagttttattaaaagaacaagctcgtttatccttaagtaaaaatgcccctcattatagatggatgtggtttattgctatgtctttttttattggagggaaaattgccaatgtaatgacaaaaataggtaatgtagagaatcgtctcataactgagaaacatagagttaaattcatccttctaaaaacatgtagttttattgtgcgtacattaataagatgtgccatcttatttcggaaagtgtttttttcaacgaacaattatatcaaaagattgaagaaaatagagcatgatacttaa

SEQ ID NO: 41242 - DNA, 150 bp, Escherichia coli
atgctgtttctttccatcgatagtccatgtgaagtactttttcttaaatccagcaccacagatatcgcaacttcttggtttaaacatactggctatgaagataagaacaacaaatcctatgatccattccatatcatgtacctgttttaa

SEQ ID NO: 41243 - DNA, 486 bp, Escherichia coli
atgcagtcgaaccttatgattaattatggcaaactgactaaccaactcctgcaggctgtagccaaacaaactcgtagtggcgatacccaacaatggttccagcaggagcagacgacttatatatccagaacagtaaacagagctctggatgactattgcatgagtaataattcggcaattagtaaggagactaaatgtcgcatttttaaagaggttgaaggcgcgatacagcagcctctcgatatgaactgtgcacaatcatcaattagtcactttttgcaatccaataaatactttaatcagaaagttgatgagcagtgtggtaaaggagtggatcccattacacgttttaacactcaaaccaggatgatagaacaggcctcgcgagaaatctttgaacagaattttggcaccgtgaaagtcagtgatatcaaggcgctaacagagaaggcgattgctgaaaatgtgcaggatactcgactgtag

SEQ ID NO: 41244 - DNA, 294 bp, Escherichia coli
atgaataaaaatatcctcctaaaaaaaattgttttttttaagaagcatatcgatatgtatctacttgaaaataactatgaaaacactgtggcttttatactagggatggatttttcctttgacggtaaaatgttagagggatttagagagtggctccttttacaatacaatgtacgttccaatttaagttggatgaagctcgtagaacttatctatgccgataatgtaaatgaaggtataagtaaggttgattttttattagataatttaatggagtatgttgcttccatgtaa

SEQ ID NO: 41245 - DNA, 567 bp, Escherichia coli
atgatgagcgacataataatcattggatatcaactgagtgcggtagacaaccacgcatacttttttgatgatgcccccgataatatattctgtgacaagtgtggttgttgtatcgataacacttatctgccagaagatcttaaaacaagaaacaaatgtgatattggctatacatatgatggtcgtccgattgtctcgttaaaatttaaagaatacattgagggacttgtgttaaatgttgacttttttcctgtaaacaaaaaacaaacattattcttaatgaaaccaaaagatatagttagttatacagcatataagaaaaaaaattactgtgataaatgtcatcaatatcatgatcaagttatgcctgaccctaccttttatgatgaaacaggttgtatattagaaaagggaatgtttttcacatcagaatcctttggtagtggtaaagaaaagtcaccttctattattttaggaatagaaactgctaaaataattagtgatgctatcaaaattcacaaattcagaggcgcggatatcagtaaaataacagcgcgtgttggttag

SEQ ID NO: 41246 - DNA, 300 bp, Escherichia coli
atgaaagttaatggcaagcgtattcgcgccgattttgtagccgttgatgggcatggaaatattcatgtatttgaagcaaaacatgggaatagtaggttaacgggaaatcaagaagcatcaggagtatttgatatgaataatccttctaataccttaggtggtattggtggtgggacgattacaccatcagcaggaactaaaggaacatttaaagtcgcaacttcgaatactcaaaaatcaggagcgttaggccctaaaaatacttcacatgatgcaacattccacgttcttcattattaa

SEQ ID NO: 41247 - DNA, 621 bp, Escherichia coli
atgtctaatgaattaagaaagaaatttgaaactgtactagctgattattttaagactcatcttctccttggtccgaatataaagattttgaaaaagagtatatgtattaaaaaaactaattctattaatgctcaaggagagttggcttgggggtatttaaataatgcaaatggttattttttatccctttcagttgagtcatttgaattaaaagatttttttaatgaaatgactccaccctataagtcaaatttattaacagataaaacgttgtttatgaatacgttaatggaaaaattcaagatctttgcaaccaaaattggtggtacagttgatcttccaaaaaatgaagaagaacggaataaagcttgtgagtggatctatacaaaggtaaaagatatttatttgccaagagtcatgaatctaatcgagcttaaacctgaaactattaatgatattattgcacatcctgagtattatgcttatcctttcctgactattttatacataattaagaaaaacaatattccattgtcagaactcaatatggaatatattcttagtaagaaagtttcaggtaataggtctttcgataaaaatctattagatacttatctataa

SEQ ID NO: 41248 - DNA, 171 bp, Escherichia coli
atgataaaagagccgggtaagatcattaatcttcccggcttttattattttaaccagttaaaccccaccttcaattctccggcgattaatcaccggaatatccccggtgtcgttcagcgcccccggcaggcagggaaagatcatcagaagtacactttttgtactaaataa

SEQ ID NO: 41249 - DNA, 1101 bp, Escherichia coli
atgtacgattatttaatagttggttcaggtctttttggttcggtatttgcatatgaaatgaaaaaaaaaggatactcgataaaagtaatagaaaaaagagcgcacattggagggaatatttattgtgaggaaattgaaggtattaatgtacataaatatggtgctcatatttttcacactaatgaaaaagaaatctgggaatatgtgaattcttttgttgaatttaatcgattcactaattctccggtagctttatctaaaggtgagatttataacttaccatttaatatgaatacatttaataaaatgtggggggtgacgtctccctcagcagcaaaaaataaaattgaacaacagagaaaagaaattggtaacaaagagccagccaatttggaagaacaagcaatatcattagttggtcgagatatttttgaaactttaataaaagaatatacagaaaaacaatgggggcgtgaatgcaaaaacttacctgcattcattattaaacgtcttcctgttagatttacctatgacaataattattttaatgatcgatatcaaggaataccgatcggtggatataatagaataattgagaagatgttagagggtgtagacgttcaattaaatacagacttttttgataataaagattactggattagtagcgcacgaaaaattgtttatacaggccctattgatcgcttttttaattatgagtttggtgagttgaattaccgtacattatcatttgagcatgagattaaaaatgaaagtaattttcaaggaaatgctgtagttaattatattgattcaagctatgaatttactcgaattattgagcataaacattttgaatttggcgagcaggataaaacagttattacgaaagagtttcccaaagagtatgtaaatggagatgaaccgtactatccggttaatgactctgaaaataatagaaaatatgccaaatataagttgaaaacaagccaattcgataacgttatttttggtggaagactagcagaatataagtattatgatatgcaccaagtaattgcatctgcattgaaagccgtaagtaaagaggtttctcaatga

SEQ ID NO: 41250 - DNA, 747 bp, Escherichia coli
atgagaggccttattaaggcattgattgattcacttgagcggtttgtgtgtcggaagtccacatattttattatgcctgagtcattccgttttgagcagttaggtatagaccaagataatatcaattataataattttattgaaattgaaaatgttcctcaaattgataggaatattgaattaagatacatatctcccggtcagtatgatttttatctggcttatgctggttcattagaaccaagacacagaggattagagaacttattgaaagctgtatcaatttgtcctaatgtattcctcgacatagctggtgttggaccattaactgctttgtgtaaaaaatactctcagcaatttaataatatttgttttcatggtggtttaacacctcaacaagtctatgaattagaggctaaagcccaaattattatcggtatgtactataaaacaagagataatcatctttttgcatctccgaataaatattatgagcacttggcacttggtaaagtcatgttgacaaccagcggcacccctcctggaatgaaagttgaaaagtataaaactggatttgcaattggtgaaagtttacaagacattatagattttttacaatctcttaatggaaaagaggatataatagataatttttcaataaatgcatataggatctgggtagacaaatattcggattacaatgaaagatatttatctaaacaatacatgaaaatggtgggtaagtga

SEQ ID NO: 41251 - DNA, 882 bp, Escherichia coli
atgttatcgccctcttctataaatttgggatgttcatggagttctttaaccagaaacctgacttcgcctgataatcgtgttttatcctctgtaagggatgctgcagttcactctgataatgggacgcaagtaaaggttggcaacagaacatatcgtgttgtggtcactgataataagttttgcgtcacaagagaaagtcatagtggttgttttactaatctgttgcataggctgggatggcctaagggagagattagcagaaagattgaggttatgttgaattcatcgccagtgaatatggctatggaaagaggaagtgttcattcgaacagacctgatttacctcctgttgattatgcactgccagagttacctagtgtggattataacaggttgcctgtgctgggtaatgttattggcaagggggggaacgctgtagtgtatgaagatgcagaggatgcaacaaaagtcctgaagatgtttactacatctcaaagccatgaggaggtgacaaacgaagttcgttgcttcaacaaatattatggcgccgggagtgcagaaaaaatatatggcgataatgatgatgttcttggtattagaatgaataaaataaacggggagtcgctttttaatatttcgtcattgccagtacaggctgagcatgctatttacgatatgtttgacaggctggagcaaaaaggaattctttttatcgatacaacagagacaaatgttttatatgaccgtgtaaggaatgaatttaatccaatagatatatcatcttataatgtttctgaccgttcatggagtgaaagccaaataatgcaatcttatcatggcggaaagcaagatcttattagtgtggtattaagtaaaatttag

SEQ ID NO: 41252 - DNA, 852 bp, Escherichia coli
atgtatcttattattacctctgatatcatgaaaaaaataccacctaaaataatgagtaacattattgctgtagtaatgattactcatgttttgattgcatttttccaatttgtttattggtatgctttcggaggagatctcgatgtcagttcgatttttggaggaagtggtcatcgctcattttactatggcatttatagaataactggagtgtttgacgagccagctatttattcaacatttatcatgtctttctgttttttacgtttttatttaatggggagaaatgactgggtgaattatgttggtgttgtcagtataatattatcattgtcctttgcgggtattgttatagtatttctttatttgcttgtttctgaaacttgggataaaaaaattatttttataagtataatgatttttgtggtttgcttatttgtagcttctttttatcctgaaatatatggttcagtattaactcgtttagaaaccttacaagctgggaatgatggaagcagtaacttaaagtttcagtacgttaacttttggttgagtgatgaacaacgtattttatttggcaatggaatggttggatattatgatggaaagcctaagttttttgagtctgcatttgatttgacttttatttttacaaccattacaacttatggtgttgtgttatcaattcctctatttttagttttatattattacttatttaaaggacagaagagaaaaaatcaattattgcttctaattataagtttgaaaatgacatctataatctttccatttttttgggtcttcagtggtatcataatagcatatgaaaaaaataaatatagtagttga

SEQ ID NO: 41253 - DNA, 876 bp, Escherichia coli
atgtttagcataagatccctactacctattagcgctagcgtatcagttccgacaaaacaatctcaatccatcgccacaatactaggagggagaacaatagaaaaaatggaagagagcgaaggattacttgtgtttttaggaaaaaaaaacgttggtgaatatgctcttaatattattggacaaaatgttccaagagttataacagggaaaaaaccttatgatatattattcctgaatgatgctacaaaacaagagtttgatagaaagaaaacggagtttataactcctggagcaaacaaaagtcatctacaatcaagtgatagcgatgttgttgccactgtagctataagtattgcagcgacagagatgaaaaccctcctgccaagtgatataacaccagaaaaatacaaaaaaatttatctgtctggggatggttctgctggtctacctcttcttcagtgcggaaatgactttttatcaccggtagatattgtcgaccgcatgactcaacataatcttcatgaaataggagacatcagattaacatcctgtcactcagctgacataacaaaaaacaaggacttctctcctggtgaaatagataaatcagcaaatatcaggaatggctggttggctaaggcattatttggtcagaagaagtctttagcagaacatgtctgtgccgagtttgaaagtcgtggaattaacgtttctatatcaggttaccatggcactggcgttttttatgtaccagagcatggtaaaccaacaacgcatctacgctccacaactgtgcctgcaacacctgagtgtactgtaaaaagaagtgactacagagccacttttggtagaactcaacccatagatattgactaa

SEQ ID NO: 41254 - DNA, 135 bp, Escherichia coli
atggagttggtaaaaagtggtgtggctggcaatccagtccacgtcacagaaatggacaatgccgcagaggactggcaaacggcaatgatccgctttattatcgagttcggtgaccgcttggatggtcacttctga

SEQ ID NO: 41255 - DNA, 198 bp, Escherichia coli
atgataatgtccacaccgtggctgacaccgatcgttgccgatagtgatcatgctgaggcaaatgcagtgagctatgaagcactgactccgacagaactcgactcagataaagcaggctgttatatcagcgcgcttaattatgctatgaacatccggatatccggaatattgctgttaccgggccgtatggggcagtaa

SEQ ID NO: 41256 - DNA, 213 bp, Escherichia coli
gtggtgttaggcggcgtatatgatgccgcagagtttcttgatgcgggcagttataagcatgtacaacgctgggcgaaagaagtaggcgaacgtccggcggtgaagcgtgggcgtattgttaaccgcatcaacggaccgctgaacgagcagttgcatgaacgccatgacgccagtgatttcgagacaaatacggaagataagcgtcaggggtaa

SEQ ID NO: 41257 - DNA, 654 bp, Escherichia coli
atggctgaaagtactgtaacggcagacagcaaactgacaagtagtgatactcgtcgccgcatttgggcaattgttggggcctcttcaggtaatctggtcgagtggttcgatttctatgtctactcgttctgttcactctacttcgcccacatcttcttcccttccgggaacacgacgactcaactactgcaaacagcaggtgtttttgctgcaggatttctgatgcgcccaataggcggttggctgtttggccgcatagccgataaacatggtcgcaaaaaatcgatgctgttatcggtgtgtatgatgtgtttcggctcactggttatcgcctgtttgccaggctacgaaacaatcggtacctgggctccggcattattgcttctcgcgcgtttattccagggattatccgttggcggagaatatggcaccagcgccacctatatgagtgaagttgccgttgaagggcgcaaaggtttttacgcatcatttcagtatgtgacgttgatcggcgggcaactgctagctctactggttgtcgtggttttacaacacaccatggaagacgctgtactcagagagtggggatggcgtattcctttcgcgttaggggctgtgttagctgttgtggcgttgtggttacgtcgtcagtaa

SEQ ID NO: 41258 - DNA, 384 bp, Escherichia coli
atggcggaagcggagcgtttcctgccgtcttttatcgacaacatcgataatttaatggcgaaacatggtgtcagcgatgagcatatcgtgatgcgtgtaacaggctgcccgaacggttgtggtcgcgcgatgctggcggaagtgggtctggtggggaaagcgccgggtcgctacaacctgcatcttggcggcaaccgcattgggacacgtatcccacggatgtataaagaaaacatcaccgagccggaaatcctggcgtcgcttgatgaactgatagggcgctgggcgaaagagcgcgaagcgggtgaaggcttcggcgactttacggtgcgtgcgggcatcattcgcccggtgctcgatccggcgcgcgatttgtgggattaa

SEQ ID NO: 41259 - DNA, 1905 bp, Escherichia coli
atgaaactaatttctaataaggcaaaattaaaaaagattcttaaaaatatctctgctgcaattcgtccacctaaaaccatgaaacctagcgaatgggtagaggctaatgtagttgctaccgatggtgttaaagccggatcgctaattaaattgcatcccttccaacgtggaatgatggacgcgatcaccgaagaccgtagaaaaattgtgtttaaatgttcggcgcagttgggtaagaccatgattcttaacggaattatcttccatcggatcgcgagtaaccctactaatattggggtgttgcaaagtaacgttagagaactaaattcttggatcgctggtaaggtgaagccagtattagaggcaacgccagaattaaaggcgatgatcaccgacaaatcagaccgtaatgccgttaacaactcatcgattattcagcttcgtaacggatcattcatgtatttcatgtcgctgaacagtccatcacacttgcgcggtaagacactgcctttgattattcttgatgaagttgatgcggctgatgaatcagacgaagggaacccgatccagctagcggaacaacgcgcaaccactttcggggaagatgcaaggatcgtaattgcttccactccaaccgctcgtgatggggcgattaaccaacaatgggaactctcggataagagaaaatatcatgtcgtttgccagcattgcggacacaagcacgtaatggaatggagtaacgtacatttcgattggcatacgattaacggtaaatcattacccaacccagatacagccgtttaccgttgccctgaatgtgaaaccgattggaccgagggtgatcgcctacgtgctgttgctaagggagaatgggtcgccaccgaacctaatgcggaagtaatcggttttcatgctaaccgccttatgtctccgtttagttctatccgtgcgtgtgtggtggactttgctgatagctacgcgaatatgtccctggcaacgttctataacactgtcttaggcgaaaccttcgatgatcttaacgaagaccgcacagccgacgaactggaaacgctgaaaactgatattagcctagacaatattcctgatgatgtactggctctggtaggtggagttgaccagcaaaaagaccgtctggaatctaccttgctgggtatttctcgtaaaggtctatgcgtagttgatcaccgatcattctatgatgtgaactgcgaacgccacgaatcaccagcatatgaccagctttataacttcctgaaagcgaaattctatacccgatccggtgaacgaatcccgatgctatctgctttcgtggactcatcgaacggacgagctacgcaagtgatctaccgattctgtagtcggtggcaaaatctaaccgccattaaaggcgcaagcaatgttgatgcaccaatccttccggtaaaagacacaagaacgggtggttttacccttaaaattctgggcgtaaacaaccttaaaacgatgatccgtgaaatgattaaccggaatttgagagatggcgatcctcacactgtcttccagattggtgacgttcctgatgactactgcgaacaattgttatctgaacagttgaaacggcagggtaataccacacgttgggtaaaagttggtcagcaacgaaacgaggctctcgactgcctggcttattcctatgctgcttctcgccatgtactcaataaaatgtcatgggaaaaactcgaagccatcaaagatagtttgaaccgtgaactcgaagaacccgtaaaagctcctaaatcgcaatctaacgagcaaatcgaagaaactaagccaatcacacgaccacaacgtcaaaacatcgccagacgtccaaatagaggccgtagctgggtaacatcgttctaa

SEQ ID NO: 41260 - DNA, 2007 bp, Escherichia coli
atgcttaaatttcgccgcgatcttaacggttacggtggagttattaacgaagggcataacgatcaatacgagtttgaaattgctttctcaagtacacagccttatcagcgccaattttgggatgagcaaaatcaagaaatggtggtattagatgaaattctggtacatacaccggaagcggttgatctgtctcgtctgaataataacgctccgttgctgttcaatcataatttcgataatcacattggtgtcgtttgtaacgctcgaatcgatgcggataacgtaggtcgtgctctggttaaattctccaagcatgggactttggctaatgatattcgcaataaagtcattgaaggtacgatggaaaaaatttctgtcggttatgacattaaagaatatcaaatcgattacgccaaagggcaattgattgttactaagtgggcgccttttgaaatttcatttgtgacggtccctgccgatgattcggtcggtttaaatcgctctctaaatactatcacagttaatttggaggctaaacgcgatatgactaaagaacaaatcgaagaaatcaaagaagaacaagaacccgctcaggttgaagaaactccggtagaagaaaataaagaaccggaagttgaagaaactcaagagcgccaagttgaagagaataaagaaaatgaaaatctcgaagacggaaaagacgctgaacatcctgaaagtgttgatgatgatagttcaactgttcgggaaacagaagaaataaaagaagaacgtgaagctgctccggttgaagaagaaaaaaccgaggaagtggctgaacgttccgaagaagatgaattagaaattcgcgaaattgcacgcgaactaaatattgatgacgaagaattgaaacgcgcattagcaattaaagacatgacgccggaagcattccgcactaaggcactaaataaaatcgctactgctcaacgtaacaacgaacaaattaataaggaacaaatcatggaaaaaactttcgatcttaataacgtaatccgctccctggtagatggcgacgtgctcggcgctaacgaagctgaatattccgctatggctgctactgcaactatgcagcgtggtcgtgctgctcgtggtggctctgtattcgttccggctgctgctatgcgtgctgcttccgaaggtaacaccaaagctactctgactgatatcaccgacgaaaaactgctgactgaatcctacatcgaaatgctgatgcctcagtccgttctgggtcgtctgggtgtgaccgtcctgtctggtctgaatagcccgatcgctgtaccgaaaatgactgcttccagcgttgatgctttcggcttcgtggacgaaaatggaagtgcccccgagtcgaaggctacctttgcaaacgtgaaaatgtctcctaagacgtttgctggtgggaacccgatcagcagagctagcatcaagcaagttcccggcatcgctaccctgatcactgatcacattaacaaatctgttcggatcaaactggaacaactgattctgtctgataaagaaaatgctcgtggtccggctggtctggttaagcaactggtagacggtggtcgcgttactaagaaagccgcttttagctacaaagacttcctgaaagaaattgcagcactgaccgacgctggcgttccggcacagtccatcaagtttgcaatgagcggtgcaactgctgctgaactggaatctaccctgaaagataacggcgtttccggttatatcatcgaaaacggcaaactggctggttacgaagtagttacttctggtgttatcccggcagaccacatcgttctgggcgatttcagcggcattatcgttggggaatggggaggtcttgagctagatctggacgattcaacgtaccgtgcccagtctgcgatcgtgcctcgtgtatggctggatttggactacgttgtagcacagccggaagctctgaaagttcttcacatctccgctgaatga

SEQ ID NO: 41261 - DNA, 834 bp, Escherichia coli
atgaatattacacaagataacttagacattttcacggggtcacatgttgtcgtttccgtgtctgatatggttgataaccagccggacttcttcgatcccagctttagcccgattgataacgtggcatcattcccgacgatcaccgaatccaccgagatagaaactcttgaggaatatgatcatgatgctactggtaaacttgccggataccgcaaattagaaccgactacgcttgttttaaaccgtgttatcgacgacgaacatcaagcaatgttgatgaaagcggtagaggataaaacacctttacgcttccgtatgttctatgttgtgaactccggttacagtgctgctaacacaggttactatgtgatctatgatgcttatgtcacatcacacaaaacccgtggtagcgataacaaagctgtaactatggaatttaagatcgaacctgatggcgggattctggatcgcggtattgcaaccgagggtcgtctgctccgtcagggcgatatgggcgttggtgcaggaattagcccgttcactggtcctaccgatagcgaagtattagcgggtaacagatttgtaacttacaagggatcgagcgcatctaacccatttagtgctgatacttcactaattcacgttcaacctaatgaagatggcggatggcaattaacttgcaccgcctccggcgcaccacgtttacgagttcgcacagtccagaaagacggtaattctggatgggtgaaagtgtattccacagaagaaaaaccgacaccagccgagattgaagccgtttctatccatgaccggatcgacttcggggaatactga

SEQ ID NO: 41262 - DNA, 3411 bp, Escherichia coli
atgcaatcaatccaatttaaacgaactaatgtttctggcaaaaagccaacgccggaacaattacaggtcggtgaggtggcaatcaaccttaaagaccatgttatttttaccaaagaccgagatcatgaagtagttcaaatctctgtttctcctgaaactcacgcggcactagaatctaaagttgatgctaacaaacaagaattggatagcacaattgcagtaaatgaccgcaatattcacgctaaagtagatgaaattaaacaaactactgattctactatcgcagcaaatcatgcagaaattaacaataaagttgatgtaattaaacgcgaaaccgacgcgacaatcgaagctaataaaaataaagctgcttccgatcttgcaggtgttaaagctgaattgtcggataccatcaacgctaataaaaatgcggctgctgtagcaactcaggaactggacacccgcatcaataaaaaagttgatgatattaaatcccgtactgatgcaaccatcgcaagcaatcacaaagcaatcaatgacaaggttgatttgattaaggcagaaactgaccgcactatcgcagcaaatcaagcctatgcggaaaatcagttaactgacacctacaataaccttactggtgtgattgcagctaataagcaagaggcagcggatagcgtcgcagcattaacccgtgatgttgaagccaaaaattcagcaattcatagcaaagttgacaataacaagtcttacactgattctgaacttgcacgtttagaaagccgtattgatgcagccgatggatctgctgatggcaagtacatcaaaaaacacgtaaacacttatactgatggttatttgctgtctaagaccgcaaactattttgatgatccaaatgcgcgtaatcttgattactttggtgcattccgcatgaatgacctggcgggtcatattgcaatgatcttgcatgttccgcatccatctggtgttaatcatgctcgtggctttgagttcacttatgggtctaatccggttcatacggtaagaacatacggctatgatgaattgggtcatttggcatattctcaccgcatgtatcatgaaggtgataaacctactcctgccgaaattggcgcatattcgaaagcagaaattgaccgactgttccagaagaccatcgattttggttctgaaagtggatggtttaaaatcgctacagtatatctaccacaaaactacggtcgtagtgctaaaattagattggttggtggtaatggttataacgttggtcagacaggacaatgtaatattattgaattggttttaaggactggcaacgattcccctaaaggaattaatattgttgcatatcatcatatatctggatatgacaaccaattttgtgccattaatacaagcaacgataattatgatatctatgctcaatattcccaacatacttcacttgttttagttgaatatcaagcgtctaacgatgttaatttaactgtgcttgaccgtccagaatatgtaggcgaaaaacctgtagccgaacatatattcgatgcatatacaatacgctcctttaacagtttcagtaaccgtgggacattaaattttgctggaaaccatcaaggccaatatgacattgagcatttgaacgaacagcaaacaaatgctaagaaaatgttgcgtcgcttccgtagttctgctcctgccactatctggcatgagacagttgatgataacgcatatcgtcttgctactggatacgaagatacaaatcaggaattattgctgacagcaacaaccgggttacatgtcaagagattaacattggatggcggtgctgctggtggaaattctggtattgatattcgtcgaggaccaaacgaagcaagccattttaattttatggattatcgcactggtcaagatgttcgtaatggctggtttggttttggtgatagaacaaccaaagattttatttggtggaacgataacggtcaaaactcgataaacctgattgaagatggtgaattacatattactggtggtaaaggccagaaaattgtaatgaatagcgaagttgcattatctgaaaatgctcgtttggctgttaaaggtggtaattatggtttgatgttccgtaatgatggaactagcttccatattctttccacagatcacggtgattctttcggtgggtggaatagccgtagaccatttagttatgattttgctggtggtggattagatctaggtggcacagcgaccgcacgctgtttacatctgggaattgatggtagcacccgcatcgaggataacttagttttccgagcgggggcgcgtcaatcaatggactacttagaatttgttcattggggggcaagcaatacaggtcgaaataacgttttaagtcttcgtgactcaaaaggatttttcgcagaatttgaacgattgggtgataataccattaaaaacaccttcttcgggaaactgaaagttaatcgtggatctgacgcaatcatcatgaatgccgaaagtggcgattcgtctatatatttgctgggtacttgtgctgataataacaactggtatatcggtaaaggtggtgctgataatggattagcgttctatagttatgctactaatgctgctgtaaacattacaaacgcgggtgatatcgctctaagtccaaaaggtgtcgaaatgactcatgtcaacaacgttcgattctatgttcatggtgaacgttggactgctagccaatctggaggttggggcgatcaatggggcttagaagcgccaatattcgtcgatcatggctatgttggaccagatagctattatccaattattaaaggaagaagtttaatcaccaatcagggctatacaactgccgtcgattttggtatgcgtcgtgttcctcaaaattgggggcaagcaattattcgcgttggatctgcggaggcatcgccagcggctggtcatcctcaagcggtgtttgaatttcatcatgatggtactttctattctcctggtaatggtaactttaacgatgtttatattcgttccgatggtcgtctgaaaattaatgttgaagattacgaagaaaatgcggtggataaggtaaataaactcaaagttaaaacctacgataaagttaaatctcttaatgaccgagaagttataggtcatgagattggtattatcgcacaggatttacaagaggtattaccggaagctgttaaaaccgcaaaaattggtggtcttgataacccagaagaaattttaacaatttcaaactccgcagtgaacgcgcttttaattaaagcggtccaagaaatgagcgaagaaaataaacttcttcgtgaacgtcttgctgctattgaggctaaattatttggttaa

SEQ ID NO: 41263 - DNA, 297 bp, Escherichia coli
atgggatattgggtaagtagtgaaattaatactaaaatcgatgctttaaaatggcatgtatttgatattcctaacggctatggtactgctcgtgctggtgtcgctgtaatgcgtcataatgctggtggtgggtggtctgatgcacatattaacgtagatggtttgaccgttgctcgtcgtcgtggtgggaccaattggggatctactataaattcgtttgttcctgctggctgcaccgtctcctttggtttagggggtgaaggtggtgttgaatattttaaattcatggagttttaa

SEQ ID NO: 41264 - DNA, 306 bp, Escherichia coli
atggctggatggataaatcaaagaatgtcaaacgctattagtatttgggctaatggtggatattttgatatccccaacggctgggttactgattcatgcggaattgtttttgctcatatggaagccattaacggtgctggtgatcttgattctgaattggctgtaaatggattgattgaatcaggtcatcatgctggtgatgctgggagttggggcgctagttctttagttggcgctggtgctaccgttagctttacattgggtaaaggtagtttgcattatttcaaattcaggagaatgcactaa

SEQ ID NO: 41265 - DNA, 303 bp, Escherichia coli
atggcattttgggtagatggcgctttggggaatagggcgggtaaagcaaatcaaggatggtttgatattcctaacggttggacagccgacgctttcgggactatttcattctgtgctcattcttccggtggtggcggtggtgactctgaattgcttattcatggtttttgtgtttctggaagccataagggtcatgattggggacagatccattcttgtattgcaccgcaaggggcggtaattaccgttagcacaaatagggggatcgctcatcttcgttatcgtaggttgagtaaccgttaa

SEQ ID NO: 41266 - DNA, 471 bp, Escherichia coli
atgactactaaatttgatattttttctggtggcctcgttggtctgtttctgcatgaagaagtaactaacaccgatcttgacagtgaaagctatctggaaattccagaatgtgcggctttcccggaaactggtgtagaacgttctactatcgatgttcctaacttcggtggtccgtataaccgtaagctggttggtcgtatgtctgtaccggatatcgaactttcgatcaactacatgccgggtaacgaagtacacgaaaaactgattaaagcaaccgaagacggtaagcgcgtacagcttaaaattgcttactacatcgacgctacgaaaaaatctggtgtgcacatcgcttataacggcttcctgtctaaaactaccatgactggtggtgaggatgctgtagtaggccgtaccttcacctttgtagtagatggtgctccggttaaacaagctgttttccagaaagtctaa

SEQ ID NO: 41267 - DNA, 210 bp, Escherichia coli
atggataatcaaaatactcctgtttttgatgtatgtggttggtactgtgtgccagttaaagatcataattcagttatagttcaactgtcctgcaaacaaccaccatttgaatctgataaaattatcgaaagtccaatatattcttttcccataaaagaaataccaaatctcataaatacattacaaaacatttatgaagaaaataattga

SEQ ID NO: 41268 - DNA, 165 bp, Escherichia coli
atgagtctttcaactgtacaaccgcaggggagcagcaatgaacaacttaatgacaacaaaacaagtcgccgaattctgtggcgtttcaatatcgacggtgcttcgctggaacagcgtaaacaggaggactggcaaaaaatacaggccagattttccagatcctga

SEQ ID NO: 41269 - DNA, 1038 bp, Escherichia coli
atgagaaaaacgcccccctcattaaatcttggcatcatctactctttattattctctatggcagtgctcatcatcatgccacaggaagcgcctttataccccattgttatttggttgtgcatgattattctttgcgggttcatcatacacaaatactggtataataattcacctaatcaacgggtcattcgcctcccccaaaaccatagaaaaacacaaaattcagcattattgtcaacagtgctatttttactgacatgcatttctatcaaatttatcagtcaaatcagcatacctatttttagtgcacttattttttctacgattttgtgtatcacaaatactatattatctcacataaaattgctcaatagaatagaaaaaaaaccactaacagatgcaaagatcggaattaaatactcgtggttaatcatctcattaatctcatattattacgcacgctctctaacatcaaatatattggatattcctttcgatacaacatcaaacaaactcataacagcagtttttgcattgttttttatttttacattctatcttgccatttacctcgcttacattagttacttagcaaacatatcgcctaaaataaaaaaaaggaaagcagcaacatctgacgacttaagatattctatgtctttttttgccccattatttcttattggttacatttcacttattgtactttgtatacagacgaactccatcattaattttggtattaagtttgccgtaatgtatgatgctcgcgatactttcttttgtaataataagtatatgtggctcagcaaatattctgacgctcgctttatgtttatcaccgatgggaattatcgtgcattaatacctcaccatgatgactttggtatattacgtttgacctgtataactagtgaacctttctattcactagttgctgtacaaaataaagaagatgttatgttaacggttttgagaaagcaggcagaaattcttgctagtgacataaagatggagaaagcactgaatgtccaatga

SEQ ID NO: 41270 - DNA, 243 bp, Escherichia coli
atgaaaaagatacctttaggcacaacggatataacgctttcgcgaatggggttggggacatgggccattggcggcggtcctgcatggaatggcgatctcgatcgacaaatatgcattgatacgattcttgaagcccatcgttgcggcattaacctgattgatactgcgccaggatataactttggcaatagtgaagttatcgttggtcaggcgttaaaaaactgccccgtgaacaggttgtag

SEQ ID NO: 41271 - DNA, 1602 bp, Escherichia coli
atgaaaacgtccaccattcccacccttctggggccggacggcatgacatcgctgcgtgaatatgccggttatcacggcggtggcagcggatttggtgggcagttgcgggcgtggaacccaccgagtgaaagtgtggatgcagccctgctgcccaactttacccgtggcaatgcccgcgcagacgatctggtacgcaataacggctatgccgccaacgccatccagctgcatcaggatcatatcgtcgggtcttttttccggctcagtcatcgcccaagctggcgctatctgggcatcggggaggaagaagcccgtgccttttcccgcgaggttgaagcggcatggaaagagtttgccgaagatgactgttgctgcattgacgttgagcgaaaacgcacgtttaccatgatgattcgggaaggtgtggccatgcacgcctttaacggtgaactgttcgttcaggccacctgggataccagtccctcgcgactgttccggacacagttccggatggtcagcccgaagcgcatcagcaacccgaacaataccggcgacagccggaactgccgtgccggtgtgcagattaatgacagtggtgcggcgctgggatattacgtcagcgaggacggctatcctggctggatgccgcagaaatggacatggataccccgtgagttacccggcgggcgcgcctcgttcattcacgtttttgaacccgtggaggacgggcagacccgcggtgcaaatgtgttttacagcgtgatggagcagatgaagatgctcgacacgctgcagaacacgcagctgcagagcgccattgtgaaggcgatgtatgccgccaccattgagagtgagctggatacgcagtcagcgatggattttattctgggcgcgaacagtaaggagcagcgggacaagctgaccggctggattggtgaaattgccgcgtattacgccgcagcaccggtccggctgggaggcgcaaaagtaccgcacctgatgccgggtgactcactgaacctgcagacggctcaggacacggataacggctactccgtgtttgagcagtcactgctgcggtatatcgctgccgggctgggtgtctcgtatgagcagctttcccggaattacgctcagatgagctactccacggcacgggccagcgcgaacgagtcgtgggcgcactttatggggcggcgaaaattcgtcgcatcccgtcaggcgagccagatgtttctgtgctggctggaagaggccatcgttcgccgcgtggtgacgttaccttcaaaagcgcgcttcagttttcaggaagcccgcagtgcctgggggaactgtgactggataggctccggtcgtatggccatcgatggtctgaaagaagtacaggaagcggtgatgctgatagaagccggactgagcacctacgagaaagagtgcgcaaaacgcggtgacgactatcaggaaatttttgcccagcaggtccgtgaaacgatggagcgccgcgcagccggtcttaaaccgccagcctgggcggctgcggcatttgaatccgggctgcgacaatcaacagaggaggagaagagtgacagcagagctgcgtaa

SEQ ID NO: 41272 - DNA, 738 bp, Escherichia coli
atgtttgcagcaaagcccgaattaagtcaaagatgtatttctggactcctcacaactgggccaaatgatgaaaacgtaaataataaaccgtcaagtgatatgccgaacagaatcaaaccagttgtaagcgattcacaaatcggtatatatacaactgacagtaatactctgaaggatggattgtgtagccaagcccacataggaactcaaccttatcggccaggtgctgactcgccgataactgtgagatcattcctacaaatcacactttccaacaataattacaaatcattagagcatctgcaaacacgagcagagaattatctgaggtatcgcaaagcagaagagaatattctgcgttcgaccgttgaggggctaaccaatccagaatctcctgtattcaaacaaacagcatggatggggcatctggagcgtggcctttggaaaacggaaacacgctgggatggaaacgaccgcgagcagctaggcaaagaggctcttggctcagaggagccaaaacctggttcaccattttacggtagtcgtggactaaaattatccgacagtgcgcattctgccttctcaatgatgctgtgcggttctgaaggtccattcacaaaagaacaagcactctctggtttcgagcttgctcaaactggccaagtgctggctggaaggctaaagattcaggagcgagttaaattccgcgcagacaaccgcattgatgctcagcgctga

SEQ ID NO: 41273 - DNA, 249 bp, Escherichia coli
atgcgtgttgagagctgtatcgctaaagaaaaaatcagcaaaatgccaaaaggttctgttcctgccctgcaacaggaaatgctgcgccgtatcaggaaacgatatgacaatgcagaaatcatcatcaaatctgccagtaatgatggactcactattttaagagccacagataaagagtccgcacacaaatttgtacaggaaacacttcaggaagccagggaaacagcggacgactggtttattcactga

SEQ ID NO: 41274 - DNA, 1224 bp, Escherichia coli
atgaattggcaaaagaaaaagatagaacgttcaatcaaataccaaacaagagtatttagcgaacatataaatgaactagtaatcaccagaagaaatggtaaggtaatcactgttaatgatgggagggaaatgattgagtttgtgtcatgctcttatcttggactggaaacacatgaaaatttaaaatatgcaataactaatgcaattgaaagatttggagtccaactttcggtcgccagaacgcgcgtaaaagttgatttattcgaacagttggaaaatcgattaaataaaataatgaatggggcacacacattaacatttaatgcggttactccatgtcatttagctgtactaccgcttcttgcatcaggaactttacctaattataagtttaataaaagaccgtattttattttagagaaaacagcgcatgcaacattacaaataaatagggggctgttacaacaattcggtgaaacaatcagggttaactttcaaaataaaaatgatatagaagaagcatttaaatatgcttcaataaataatatggttccaatatctatatctgatagtgtcggttcgatgggtggggtggctcctgtcgaatttattgttagaatggctaacagatttgatgggtatgcctatattgatgatgctcatggcacatcaatatatgggataaatggatctggatatgtaatgtcttgcctggataacaagcttgatgatagaattatcatcgcgggttcattatctaaagcctttggttctcatggtggatttattgcatgcaatcatcctgacaccataaactttataaaaacgtatggaacgacgtatgcttttggtggcccgccatcattaccagggattgctgcatgtattgcagcggctgatttacacctcgatggtacagtatctttgcgccaaaatgacttacaacaaataataaaatactttgataacaaatttaatgaaaccgaagtcataaataaaaggactacaatgccaatacgtggattgttaattggcaatgaagaaaaagctatcacaatatgcaaaaaaatgcatgatcgtggttttgctacaaccgttgctatgtatcctacagtggaagagggaaaggcgattctacgttgtgcaatatctgctattcataccagagaaaatatagatagcctacataaaaactttatggaatgtattaacgaaccgggttag

SEQ ID NO: 41275 - DNA, 696 bp, Escherichia coli
atgacggatttgattgcttacaaatcgaacgcgttggttgaagctagctacaaactaaccttgcaggagcaacgcttgcttttgctttgtattagccgattgaactccagcaatgcgacgccggaatcgcagaaaactatgatgattacggcagaggatttttttaattcatttcctgacatgggtcggaatcacgccgaagaaaaattacaagaagcgatagatcgtttatgggataggtcgattattctcaaagatgacgagaagcgagaagaaatgcgttggctccagtatcgagcacactacctcaagggcgaagctaaagttcagataaccttcgcagatgctgtaatgccctatctgacacaattaaaaggtcaattcacgaaagtagtaattaaaaatatatcaagattatcaaggagctacagtattcggatctacgaaattctccagcaattccgtagcacaggagagagggttattgctcttgatgattttcgcagcatgctacaaattgataaaaagtataaggatttcaaaatattaaatagatctttgataaaaccatcgatagcggaattgaatcaaaaaagcgatctggctgtgacggtagagccaatcaagaaggggcgaacggtggtcgctctgcgttttctgttcaaggaggacaaacagatcaaagctcctatctaa

SEQ ID NO: 41276 - DNA, 261 bp, Escherichia coli
atggtttatagcttctccgtaacctgccaggcataccccattctccgtgatggtgctgactatcagatgactgtaatccggcgacggaagcgcaagaacgggacgcagcccgtcctcctggcgcacaaatccgacaagcacttcctccggccctttgcacaacagcagattcagcgtcctgctgtttccctctctcgaaaatacaacaggcatgagttgttccggtacagcatcagcggtgatatccacccggtgcgctga

SEQ ID NO: 41277 - DNA, 1227 bp, Escherichia coli
atggcgaaagaacttggtggatatggcccaactgccggtgaatctatgggggggacaggggcgaatttgaatcagcaaggtgggcataataatagtggtgttcactgggggggaggctccggacacggtaataatggtggtcagggtaatacaagctcatcgaattcaacatcgacagtgatgaagccaggtgagtcatatctaaccccgtggggagatgttgttattaataaagatggtctcccagtgatgaatggtgttgttatgacagaagataattcttctttggttgataatccattagggggggtctccagagttcttaactctttaattagtgatatgccatcactttttaccaaggcgacaggaaataatcacgataataacatcactgctgttaatgcagtatctccagaaactcgagccagtgatatggagaaaagttctaagatggtgagtgctctgattgatgaaaagcagaaccagaaaaatcagattgctgcgcagattagtgaaaaaaataaaaaaatagaggagatgaaaaaaatattcaagcatcactcctatcatggaattactgatcttgaaagggatgttgatgagttacaaagaaaatctaatcagttggatgctgatattagcaagttatatgattacaaaaacacattgaaaagcgatgtggataaaataaaggatgctgttgcctatacagctactttctatgaaaaagtaacagaaaagtatggtgagaaagctgaattattagcgaaaagtttggctgataaagctaatggaaaaactattcgtggtgttgatgatgctttggctgcatttgaacgatatagaagttctttgggtgataagtttaattctgctgatcgtgccgctattgtcgcaggaattcaggcattagatgctacgaatacagcaaacagtttagctaaatatagtaaagcatttggttatttaggaaatgctattgatctggctgatattcttgttgaacttaaaaatgcattgacaacagataattggcgacctgtttttgttaaactagaaattattaccgcaaatcgtgcagccgtggctatttctgcaattgttttttctattattacaggagttcctatggggattgttggttttggtgtccttgtggctttagcaggatctttttttgatgagcagttagttaatgaaattaactcgcaactaggtatttaa

SEQ ID NO: 41278 - DNA, 138 bp, Escherichia coli
atggttgttaagctggtcattttttttgaccagcttgtccttatctataaaaagataaataatgctgaatgggattgcgaaaataatacaaaaaaacacatatataacgtaaaatcgattaaccccattggagtttaa

SEQ ID NO: 41279 - DNA, 141 bp, Escherichia coli
atgaagaaaatgttttttgtaggtgttgtaatcatatcattttgtttggttgcatgtcagatgaataatattaaaggtaattcaggtggttcattttcgtcatctaactcaggtgtcggtatccaagtgaagaaatcgtga

SEQ ID NO: 41280 - DNA, 240 bp, Escherichia coli
atggttgcttttgtggcatatttctggctcttctcatttctgacaggatattacaaacctcagtttaagaaagaatatgaaatgattaattataatgatgcttggtattatgttcttgctcgttatgataattgtctggttttgtctacttcttttaatgcaggtagtaagaggtttgtcatttatcaatcagcacaagataagaatcttcaggttgatattgtaaggaccagaatttaa

SEQ ID NO: 41281 - DNA, 2688 bp, Escherichia coli
gtgctgagtatctttttcgtcgtgcatcgctataacgacttgcagcgtcaactggaagatgccggtgccagtattattgagccgcttgcagtttctactgaatatggcatgagcctgcaaaatcgcgaatctatcggtcagttaataagcgtactgcatcgtcgccattccgatattgttcgcgcgatttcggtttatgatgaaaataaccgactctttgtcacctccaattttcatcttgatccctcatcaatgcagctcggcagcaacgtgccgtttcctcgccagctcactgtcactcgtgacggcgatattatgatcctccgcacgccgattatttctgaaagttactcccccgacgaatcgcccagtagcgatgccaaaaagagtcaaaatatgctgggatatattgcgctggagctggatcttaaatcggttcgcttgcagcaatataaagagatctttatttccagcgtgatgatgctgttttgtatcggtattgcgcttatttttggctggcgcttaatgcgcgatgtaaccggtccgattcgcaacatggtgaataccgtcgaccgcatccgtcgcgggcaactcgacagccgggtggaaggatttatgctcggcgagctggatatgctgaaaaacggtatcaactcgatggcaatgtcgctggcggcttatcacgaagagatgcaacacaatatcgaccaggcgacgtccgatctgcgtgagacgctggagcaaatggagattcagaacgttgagttggatctggcgaaaaagcgcgcccaggaagcggcgcgtattaaatccgagtttctggcaaatatgtcacacgagctgcgtacaccactgaatggtgttattggctttacccgcctgacgctgaaaacagaattaacaccaacgcagcgcgatcacctgaatacgattgaacgttcggcaaataatttgctggcaattattaatgatgttctcgacttctcgaaactggaagccggtaagctgattctggaaagtattccattcccactacgcagcacgctggatgaagtcgttaccctgctggcacattcttctcacgataaagggctggaactgacgctcaatattaaaagcgacgtgcctgataacgtgatcggcgacccactacgattacagcaaatcatcactaacctggtagggaatgcaattaaattcaccgagaatggcaacatcgatattctggtagaaaaacgtgcgctgagtaataccaaagtgcagattgaagtgcagattcgggataccggcattggtattcctgaacgcgatcaatcgcgcttattccaggccttcagacaggctgatgccagtatttcccgccgtcatggtggcaccgggctggggctggtgattacacaaaaactggttaatgaaatgggcggcgatatttcgttccatagcctgccgaatcgtggttcaactttctggttccacattaatctcgatctgaacccgaacattattatcgaagggccatccacccagtgcctcgctggtaagcgcctggcctatgtcgaaccaaactccgcagcagcacaatgcacgctggatattttaagtgaaacgccgctggaagtggtttatagcccaacgttctccgcgctgcctcccgcgcattacgacatgatgttattaggcatagcggtgaccttccgcgagccgctaacaatgcaacatgagcgattagcgaaagcagtatcgatgaccgatttcctgatgctggcacttccttgccatgcacaagtcaatgctgaaaaacttaagcaagatggtatcggcgcgtgtctgctgaaaccattaacacctacgcgcctgttgcctgccctgacggaattttgtcatcacaaacaaaacacgcttttgcctgtaaccgatgaaagtaagctggcaatgacagtcatggcggttgatgacaaccccgctaacctgaaacttatcggcgcattgctggaagatatggtgcaacatgtggaactttgcgatagcgggcatcaggcggttgaacgggcgaaacagatgccgttcgatttaatcttaatggatattcaaatgccggacatggacggcattcgggcatgtgagctcatccaccagctcccgcatcagcagcaaacgccggttatcgcggtaacggcgcatgcgatggccgggcaaaaagagaaactgcttggcgcggggatgagtgattatctggccaaaccgatcgaagaagagcgattgcataatttgctgttgcgctacaagcctggcagcggtatttcctctcgcgtcgtgacgcccgaagtcaacgaaattgtggtcaacccgaatgcgaccctcgactggcaactggcactacgccaggcagcaggaaaaaccgatttagcgcgcgatatgctgcaaatgttactcgatttcctgcctgaagttcgcaacaaagttgaggaacagctggttggagaaaacccggaaggcctggttgatttgattcataaactgcatggcagttgcggctatagcggtgtaccgcgtatgaagaatctctgccaactgatcgaacaacagctacgtagcggtactaaagaagaagatttagagccggagctgctggaactgttggacgagatggataatgtagcgcgcgaagccagcaaaattctcgggtaa

SEQ ID NO: 41282 - DNA, 519 bp, Escherichia coli
atgatttttaccaaaatcattaggggattcatcagtgctcagcgtaacggtacacactcaacccgcacaccaacaggcatggatctttctcaagatatcggcacaattatgcgtgataaagctgggctaccggtcatgagcggaacatccggttcctcctctgatgccactcttgcaacacgttacgctgccgagcattttggtaagacatgggccgctccaggcttaagccaagcagaaggatgcaaagctatctcggatctgtcacatcactattttcgtgcagaaggctccagtccaccacaatcaatggcaacgggaataaataaggttcgttatgatgcaggaatggaagagaaatatgtaaatacactggatatatttacacatagctacccagaaatttatgctggggttgcattgacgattgctggggctggcggtaatgatgagcaggcaatgtataatgttacgcaagaagccgctcgtattctgcacgaagctgaaactaaagattga

SEQ ID NO: 41283 - DNA, 273 bp, Escherichia coli
atgaacgatagctaccgacaattcgaagagtggtggtcaaaatacaaaagcccgttcacggaagacgacgggttaaaagagtttgcctgggtgatatggcaggcatcaagggcagctattgaactggatatcgactggcccgaatcgaatgacaacttttggaaaggtggcgaagaaggcgcttatgcgatggggcatgaggatgggaaggacaaaacggtaattgcagtgatgaaagccatcatagccgctgaagtcaaagtgaaggagtaa

SEQ ID NO: 41284 - DNA, 411 bp, Escherichia coli
atgaagcaaacaatcttcctccgaactaagcaacaacagcaagccgcaatcaacgccatcctctcagctcctctcgataaagacaagccagtcaccatccgcattactgactacaagcgcaaccttgaccagaacgcaaaatttcacgcgatgctggcggatatcgcacgtcaggttcaatggtgcgataaatggttaaaaccagaacaatggaaggttttgttgatcagcggtcatgcagtggcaacaaaacaggaagctgatgttttgctaggccttgaaggagaatacgtcaacattcgcgaaagtagcgcacagatgagcgtgaagcgcatggcaagcctgattgagtacacgacagcctgggctattggtcagggtgtcagatttaccgacaggaggtacgaatga

SEQ ID NO: 41285 - DNA, 657 bp, Escherichia coli
  misc_feature (637)..(646): n is a, c, g, or t
gtgagaaaaattacgacatttaactcgattgaagttcggggtgttcctgaatgtataaaatatattacatctttatcagaaagtcttgataaagaggcacagtctaaagccaaaaataaagatgttgttaaggtctttaaactgaactatgcgtcagcgacagatataacatacaaataccgtgaccaaaatgttgtcgtcccaggtgttgtctccattctgaagacaatggcaagtaatggttcgcttcccagtaccggtaaaggtgccgtcgagcgaagcggtaacctgtttgataacagtgtaacgatttccgctgatccacgtcttaatgcagttgttgtaaaagaccgcgaaataacgatggatatctatcagcaattaatttctgagcttgatattgaacaaaggcaaattgaaatttctgtctcaattattgatgttgatgcaaacgatcttcagcagctcggcgtaaactggtccggtacgttaaatgcaggacaaggtacgattgcctttaatagctctaccgcacaggctaatatcagctcttctgtgataagtaatgccagtaattttatgattagggtgaatgcgttacaacagaactcgaaagctaaaatactctctcagccgnnnnnnnnnnaccttaaataa

SEQ ID NO: 41286 - DNA, 645 bp, Escherichia coli
atgaatctgactattgaagatattacccgtgctatgcgtgatgatagcgttaaatctatgcttttaagcgaggttgctgttgtatgtgaggtgtcatatcagaaggcggaagaggaattgcttagatgttgggatgcattaaaagaaaagccaactaagaccgatggtgattatgtctttgaaggtagaggtggaaagcgatccgtgttgattatcatgatgggattaagtgctaacatcgcttacatgatcgtcaaagatattcgccgtatggaagaggaactagaacaacgaaataataaagaacttgctttctataattctttgagtgatgcggataaggttgaatatcttcgtttgaaggatgctcttgctaatgcagatccagaacaccagaagatagaatggatgaggctggcactgtttcaagcacaaagagagaaagaacaaagaaatagaatagaagaagaaattatggctgctgccgaggccatgagagcgaaaatcaagttacaggaagccaaccccacgaccattaaggttaaagccgttaaaacgcgtgttagaaagcctaagactaagaaatgtcctggtgatttgcttgatagtgaaaactgtattgaccttgctatcttcggaatctga

SEQ ID NO: 41287 - DNA, 237 bp, Escherichia coli
atgctaattaatcagcaacaaagagatgaagtagaattagccttttcttgttgtaccgatcatgaatatcgtttaccagttaagcataagcatttaaaaaccgactacacaacatctggctttagtcgtgaggaagcgaaagagattttaatagagttttaccgcgataatgggtatacagacgttcacaacttctttagaaagcatcgagtttcggagagtccgagattggtttga

SEQ ID NO: 41288 - DNA, 522 bp, Escherichia coli
atgccatttacattttatttgtcgtccgaggatcaattgtcaatacaaaatattgaagctttgcaaaacgcagccagagcgaattatacagggaatattataataggagacaggcagttttctgttcgttatcagagcgctatggacgcttttattgttaatcctgttcagggggaactgtattcaggtcttaataatagtgttttggatgatgttaccagtctggctgacgttattgagagtcggttgaatggaggaagctcatttcttgatgtattcgacagatatatgatacaaacaatgcaaaccatgatgaatggtaatgagagcgagcctgaatcgttagcgactcgattatcttcaagtgctttttcggtttctcctgaggatatattctgtataccggaggcattgcagtgtccgattacattggcaattccagagcgtggtgtttttcttagaaactccgagggttcctcagtgtgtagtttatatgatgaaaatgctctctcgtataattaa

SEQ ID NO: 41289 - DNA, 729 bp, Escherichia coli
gtgtcgcatcgttctgaatttcagcacgtaatgactgaaatacgtaataatcctgtaaaatttctggaagagaatttaattcttaatccacagtgctatgcccatcatgatgagacatctttaattacagttaatattacaagagaggatggcttgttaagactaaaagaaatggaagatgatatggctggtagtgattacattctgtttacaggtatgcgtgatactgatagtccggaacgttttgatgcgcctgcagttataagcttgggtaatcagtgtataagcctccggcgaaatgatatttctcaaactatccagcaaagttcaccgttatggctaaccaatcagcaaagcggctgtagtgttcttattgtccgccatggattatcagaatccggagagcagcagtattcaatgatacatatgcgcccaagagatggtaacgatttcatagatgaacttacgccagagctttatgctaatactcaggaggttttgctggagagagatattcagcgcacacttgctaacacctttcccaatgaacatccggaggcctttattttgattccttcggcggaaaaatttattgtagatggcaattgcattcaactgattggtattggtaatgagcagggggagtttgatttttacagacaagtttatccagtgacaggtggagagcaccaggttgaagccttgatgtggacgcatttgcctgcatga

SEQ ID NO: 41290 - DNA, 267 bp, Escherichia coli
gtgagtctaattgagtcaaaagttgtagggtgtcctaacatttcctttaattgcaaaactggtccagctgagataattaatcataaatatgatggattattaattgatgcggggaatattgaggcgttagccaaaggaatacagttgttaatagacaatcctattattagagatgagtatgcgaaaaatgcatgtatgaacaatgagagatatatgctagaaaatatctgtgaagaatatcttagcttctttaatattaaagcataa

SEQ ID NO: 41291 - DNA, 492 bp, Escherichia coli
atgcagctgctagctggtaatgttattggcaaagggggtaacgctgtagtatatgaagatgctgaggatgcaacaaaagtcctgaagatgtttactacatctcaaagcaatgaagaggtaacaaacgaagttcgttgcttcaaccaatattatggtgccgggagtgcagaaaaaatatatggcgataatggcgatattattggtattagaatgaataaaataaacggggagtcgctttttaatatttcgtcattgccagtacaggctgagcatgctatttacgatatgtttgacaggctggagcaaaaaggaattctttttatcgatacaacagagacaaatgtcttatatgaccgtgtaaggaatgaatttaatccaatagatatatcatcttataatgtttctgaccgttcatggagtgaaagccaaataatgcaatcttatcatggcggaaagcaagatcttattagtgtggtattaagtaaaatttag

SEQ ID NO: 41292 - DNA, 537 bp, Escherichia coli
ttgtcagatggtgtatttaagatcaccaagcagagcaataaaacctggtccctgacgcatccggtggatgacgcaattaccctgctgacacagggcggcagactgacctgtaagttccgcctgtcaggcgcactgaccaacaatcagttcgggctggggatttatctgtatacggatgctcccgttcctgatggtgtggcgatgacaggtaccggtaatccgttcctgatgtcgtacttcactcagaccactgacggcagagtgaatctgatgcatcacaggaaagccggaaacacgaagctgggggagttcggcgattacggtaacgactggcagacgctggagctggtgttcaccgccggcagtgccacggttactccgaaactgaatggagtggctggcccggcattccaggtcataaaagacagtctgacactggggctgaatgcgctgacgctgacggatgttacaaaaaatgcagcgtatggcgttgagatagaaagtctggtgctggagataaatgcacccgcagcataa

SEQ ID NO: 41293 - DNA, 606 bp, Escherichia coli
atgcccgatgtaaaaaaatttttttgtaaagataaaaataatgaagaaaaagttaagctatttagcttaggtcgattgaatagagaagggatgtgtcaaaaaggtcaacatgatttaattatggccatatctttactaggtaaaagcttttcggatattgcttcatgtacaattgtaggtgatggagaatattatgaatatctagagtcattaatttacaaattaggacttagcgaatgtatcaaactgattcgtaagatgtctcatgatgaaataattagtcacttaagtttgtctgacattgtggtgttgccatctcgttttgagggaatgtctatgtttgcccttgaagcattatatactcaaaatttatgtctattcagcaacacaggtggtttaagtgatatgatagttaacgaagattacagctaccccccgcaagatattgatgcattggccaaagcgattgatcgggcaatacacttaaacaaaagcgatttgtataatgaaaagatgaattcatatgaaaaggcgctatctttttcttatgaaaatgttaaaaataaatttgataaaatatttaaaatggtagtatcaggaatatga

SEQ ID NO: 41294 - DNA, 537 bp, Escherichia coli
ttgtcagatggtgtatttaagatcaccaagcagagcaataaaacctggtccctgacgcatccggtggatgacgcaattaccctgctgacacagggcggcagactgacctgtaagttccgcctgtcaggcgcactgaccaacaatcagttcgggctggggatttatctgtatacggatgctcccgttcctgatggtgtggcgatgacgggtaccggtaatccgttcctgatgtcgtacttcactcagaccactgacggcagactgaatctgatgcatcacaggaaagccggaaacacgaagctgggggaattcgggagctacggtaacgactggcagacgctggagctggtgttcaccgccggcagtgccacggttactccgaaactgaatggagtggaaggcccgtcattccaggttataaaagacagtctgactctgggactgaatgcactgacgctgacggatgttacaaaaaatgcagcgtatggcgttgagatagaaagtctgatgctggagataaatgcagcggcatcataa

SEQ ID NO: 41295 - DNA, 402 bp, Escherichia coli
atgcttttaattcaacctggatttggccttagcatcaaaaaagggcacatgtttggcgagaaagagtctcaacgaaaaatggtgtctatccggttgccatttatcagtatttattggctaaacagggaggcaacaaattattggtatacatgcgccagagcagcatttaacgaccctgactggtttgtgaaaaaccaccacgcagttcgtcaggcaaagagaaaggccaatacgacatacatgaaggcgtatcgaaaagcatggaaagaacaccgcgatcgataccagcaagacatggaaaagcttgaatcagaaaacatggaattaagacgaaagcttggtgaagtaaaacgagacattgatgcttacaagcgactttttaatggtgaaagccatgcttag

SEQ ID NO: 41296 - DNA, 144 bp, Escherichia coli
atggataaaacacttatggctatccagactaaattcactatcgcctcttttattggcgatgaaaagatgtttcgtgaggccgtcgacgcttataaaaaatggatgttaatactggaactgagatcaagcaaaagcattcactaa

SEQ ID NO: 41297 - DNA, 525 bp, Acinetobacter baumannii
atgaaattatcaaataaatcccaagcattgtatgacatgattgctccagcagtggaggcatgtggtgtcgacctttggggaattgaattccttccacaaggtaagcgttcattattgcgtatttatatcgatagaccggttgatgaaaatgctgaaccagtgattaatgaagatggtgaagtagagcaaggccgcggtattggtgtagaagattgtgtccgtgttacacaacaggtcggcgcaatgctggatgtccatgatccgatttcaggtgaatatgcattagaagtttcttcaccaggttgggatcgcccattttttcaactcgaacagttgcaaggctacattggacaacaggttgctttgcgtttgattgctgcagtagaaaatcgtcgtaaatttcaagcaaaactccttgctgtagaccttgaaaatgaagagattcaggttgaagttgaaggaaagcatgtgcttgatatcgacagcaacaatatcgataaagcaaacttgatctatcaagattaa

SEQ ID NO: 41298 - DNA, 1485 bp, Acinetobacter baumannii
atgggccgcgaaattcttaccgttgttgaaacggttagtaatgaaaaaggtgttagtcgtgaagcgatcttcgaagctttagaacaagctctagttgctgcaacgaagaaaaaattttacgagggtaccaattctgaagaagctcagcttcgtgtagaaattgatcgtagaactggtgattaccgtacattccgtcaatggactgttgtggcagatgaagatcatgaaatgccagcatgccaagacgcaatttctgatgttgatcctgcaaaatggtcaattggcgacgttcgtgagcttgaagtagaatcgattgagttcggtcgtatcgctgcgcagattgcgaaacaggttatcgtacaaaaaattcgtgaagcagagcgtgcattagttgctgatgcttatgaatcaaaagttggcgagctaatttacggtgaagtgaaaaagcaaactaaagatggtttcatcattgacttaggtgacaatgctgaagcttatttagctcgtgaagaaatgattcctaaagagattcttcgtccaaaacaacgtgtaaatgctattttatatagtgtaaaccgtgaaggccgtggtgctcagcttctattatcacgcgctaagcctgaaatgcttattgctttgatgaagaaagaaattcctgaaatttctgaagaaattattgaaattaaagctgcggcgcgtcaaccaggtgttcgtgcaaaaatcgcagtaaaaacgaacgatcaccgtattgaccctgttggtgcatgtattggtatgcgtggaacacgtatccaggctgtacagcaagagttaaatggtgagcgtattgatgttgtagtttggtctgatgatccagctcaatacatcgcaagtgcattagaaccagctgatgtatcaggcattgtgcttgatgaagatgcaaaaagtgcagacatcatttttgctaccaacgatcaattggcacgtgcgattggttcgcaaggtcaaaatgttcgtttagcttctgatttaactggctacaaactcgacatgatgcttgaagaagagtatcgtgctcgtcagcagaatgaagctcagcaatatctcgacatgttcgtatcacgtttagatattgaagaagacttggcaatggcgttagtagagatgggcttcacttctttagaagagattgcttatgtgccagctgaaacttttgacgaaattgaacttgacgctgagttagttgagttattgcaaagtcgtgcaaaagaagctgcattaactgatgcattgaaacagcaagaaaatattcaagaaccgagtgcagaccttctcaatatggaaggcatgacctctgagatcgcttactcgctagccgctcgcggtattattactgttgatgatttggcagatcaagcaactgacgatatttctgatattgaaggtcttggtcatgaaaaagcaggtcaattgatcatgaaagctcgcgaatcatggtttaactag

SEQ ID NO: 41299 - DNA, 2700 bp, Acinetobacter baumannii
atgacggacaagtcgattaaagagttagctctcagcgtaggacgtcctgttgagaagctcctagaacaggctcgtgaagcaggtttgcctcaacgtacagcagacgacattattaccactgaacaacaggacaccttagtcaattatttgaaaaaggtgcatggtcaggaaagtggtaacacaggaaaaattgcgttgaaacgtaaaacaaccagtaccgctaaagttgcaagtacttcgggtaaagcaaaaactattaacgtagaagtacgtaaaaaacaggtttttgctaaaccaaacccagaacaaattgcagcagaagctaaagcgcgtgcagaagcagaagctaaagcgcgtgcagaacaacaagcgcgtgaagctgcagagcaaaaagcgcgtcttcaaacagagcaaaaagcaaaagcaactttagatgcaatgcgtgctgctcatcaacaagatagcgctgcacagtcagcttctaaagctgctgttgtagtgaaaaaacgtggtggtggtacagtaaaacctgcaccaaaaccagcagaaacattagagcaaaagaaagcgcgtgaagcacaaacagctcagttgaaagcaactgaagaagctgcacgtcgtaaagcggctgaggaagctcagcagcgtacgcttgaacaaatgcgtaagatggcatctaaatattcaaatgatgatgctactgcaactattcgtgtgattgatgattctcctcttgcttcaggtcttgttggccaagcttatgaagattcatttaatcaagaagaccgtgaaattaaacgtggtggtgctacaactaaccctcgcgctggtaagaaaggcggtcgtcgtggtcaagaagagcaaagcttcgttaaccataacaaacgtggtttaaaatcaagccaagcgaacaagcatggttttgaaaagccagttaaaaagcaagtctatgatgtagaaatcggttcaagcattgttgttgccgatcttgctcaaaagatggcgattaaagtacgtgaagttatcaagacacttatgaaaatgggtgaattggttaaccagaaccagacaattgaccaagatacagctgcacttgttgtagaagaaatgggtcataaccctgttctagtttctgatacacaagcagaagataacttacttgaagcagctgaagaagcacgtggtgaacaaactactcgtcctccagttgttacaatcatgggtcacgttgaccatggtaaaacatcattgcttgaccgtatccgtcgttctaaagtggcggcaggtgaagcaggtggtattacccagcacattggtgcatatcacgttgaaacagacaaagggattattacattccttgatacaccgggacatgcagcatttacttcaatgcgtgcacgtggtgctaaagcaacggatatcgtggtattggttgttgcagcagatgacggtgtaatgccgcaaactgcagaagcgattgaccatgcacgtgcagcaggaactccaattattgttgctatcaacaaaatggataaagaatctgctgatccagaccgtgtgttaaatgaattaacaaccaaagaaatcgttccagaagaatggggcggtgatgttccggttgctaaggtttcagcacatactggccaaggtattgatgaactccttgatttaattttgattcaatctgaattgatggaattaaaagcatctgctgaaggtgctgcacaaggtgttgttattgaagcacgtgtggataaaggccgtggtgcagtaacttcgattcttgttcaaaacggtacattaaatattggtgaccttgttcttgctggttcatcatatggccgtgttcgtgcgatgtctgatgaaaacggtaagccgattaagtcagcaggaccatctattccagtggaaattttgggtctaccagaagctccaatggcgggtgatgaagttcttgtcgtaaatgacgagaagaaggcacgtgaagttgctgatgctcgtgcagaccgtgaacgtgaaaaacgtatcgaacgtcaaagtgcaatgcgtcttgaaaacatcatggcatctatgggcaaaaaagacgttcctacagtgaacgttgttttaagaacagatgttcgtggtactttagaagcattgaatgctgcattacatgaactctctactgatgaagtaaaagttcgcgtaattagttctggtgttggtgcgatcactgagtctgacgtaattcttgccgagtcttcagaagctgtattgttaggcttcaacgttcgtgctgatacagctgctcgtcagaagagtgaccaagacggtatcgatattcgttactacagcatcatctatgaattgattgatgatgtaaaagatgccatgagcggtaaacttgctcctgaacaccgtgaaactatcttgggtgttgctcaagtacgtgaagtgttccgttctagtaagtttggtgctgctgcgggctgtatggttatggaaggcgtgattcaccgtaacaagccaatccgtgtcttacgtgatgatgttgtgattttccaaggtgaacttgaatcattacgtcgttacaaagatgtcgttgatgaagttcgtgccggtatggaatgtggtcttgccgtgaaaggttataacgacatcaaacctcttgataagattgaggtttatgatgttcaaatggttaaacggagtctttaa

SEQ ID NO: 41300 - DNA, 402 bp, Acinetobacter baumannii
atggcgggtggacaacgcttaaagcgaatggcggattcagtacagcgcgagctttctgaacttatccgtcaggagttgaaagatccgcgtctgggtggtcttgtgaccatctcaggcgttaaagtcagtccggacttaggttatgccgatgtctatgtgaccgtgatgggtcgtgaattaagcgatgaccaaaacgaagtggctcaccgtgaaacactagatattttgaataaagcatctggttttttacgtcaggagttgagtcgtcgtattaaaacgcgcatcacgcctcgcttgcgtttccattacgataaaactaatgcatatggtaactatatgtttggtcttatcgaaaaagcggtacaagatttaccgaaacgtgagtcagatgacgaagagtaa

SEQ ID NO: 41301 - DNA, 405 bp, Acinetobacter baumannii
atgcaaattacaatggaaattattgtttcgatctttctggttttcggtgctttttttatgttagtcggatctatcggtatggtacgtctacccgatttattcatgcgactacatgcacctaccaagtcgagtacattaggcttaggtagctttttaattgcttcaatgatcttttttgcttttcaaggccgatttggctttgccgagttacttattacactgttggcttttattactgcacctgtatcagccaacttaattgctcaagccgcgctacatttacgtttacgctcattgagtggtgaagttcctgaagctattgaacgtcctctaccgtgggatcgttataaaattgggcaacgtttttcacaaaacaccccccccatggaacctcctcaagaataa

SEQ ID NO: 41302 - DNA, 276 bp, Acinetobacter baumannii
atgaccatcctaccttatgctcttggcattagcttgattgctatcacaatctctatgttgctttgcctttttcgaatggtgatgggaccatctattgtcgaccgcctactagcgcttgataccctatttttaaatgcgacctgtctcattattgtgttaggcatttattggacaaccacctctttattcgaaggggcgttgttagtcgctatgctagggtttgtttcaacggctgctttagctcgttattttacaaccggtcatgtaatcgattag

SEQ ID NO: 41303 - DNA, 528 bp, Acinetobacter baumannii
atgcagctatctaaattgcttgaccgctggtttccgcatccatttgtttcttttttgattatcatcttctggttaatgctcgcgcatagtcttgatgcgagcgacctgcttatggctgtaattttggggcttgttattcctcgtctagttcgtccttttattaccagaaccccgcatatccattggaaacctgccataaaactgtgttttgttgtcttgtgggatattattgtttccaattttcgggttgctaaactggtattagggtcaccgaaaaaattacatcctaaatggtaccgtgttccattagaaacagaacatgaacaagtaaactctttactggcaatgattattaccacaacgcctggcacggtctctgccggtattgatcaagagcgtggtgatattttggtccactctcttagcacagaaaatactgaaagtgatgtgcaagacatcaaacaacgctatgaggctccactcatggaaatttttgatgtgaaaagcaaatcggaggacaacgcatga

SEQ ID NO: 41304 - DNA, 1812 bp, Acinetobacter baumannii
atgtttgattttttatctttttggcaagctaatacaccaattttcagtatcctcatcccggcatttactggttttatcttattgcttctaggtaaccctggcgctggtgcattaaaagaagattggcgacaaccttggcgccgtggcattagtttgatctcagcaatagctgggttaatcactgctgttagttatctgcttgttgcaaacactggccaaattacggtttatcagttgagcgagtggtcagctccctttggtattgtgctggtactcgaccgcctttcagcttttatgctagttttaacttatgccttagcagttccggttttatggtatgccagtgaaaactgggatacgagaggtcgctatttccacgccatattccattttcttttaatggggctatgtggcgcatttctcacaggcgacttatttaacctgttcgttttctttgaaatcttgctcatggcatcctacgtcctcttattacatggacaaggaaaaccgagatttcagcttggtatgcattacgtcattatcaaccttttagcctctgccctgttcttaattggtcttggcatgatctatggcagtgtaggtagcctcaatatggctgacgtttcacgtttgctaccgactttagatgctgatcaacataaattagcagttgcaggtgccttactattatttgtcgtgtttggtattaaagcggccatgctaccagttggtttttggctaccaaaaacttatgccgtggcaagtacacctgtcgcagcaatttttaccattatgaccaaagtggggatctatgccattttgcgtgtcaatggaactgtatttaatgatgtactcagccaagaaatctttaaaagctggttgcttccaattggtttagtgacttctttatatggcgtgattggcgcaattggtgcagatcgcctcagacgttttgttggctttatggtgctgtcttcaattggtactttattgattgcaattgccatgtcaaacacgcaagcgtggtctggagcattattctatttagtccatagtacattgattggtgcagcattttacctgttctgtggctggatgacttcacagcgcggtgattttaaagaccatttaaagattgcaccgagaattaaacaagaaaaagcagccatgctgacttatttcctgattgccatgatgctcgcaggcttaccaccttttagtggcttctttgggaaagtatttattttgcaggctactgttgaaactgcatatcaaggctgggttattggtattgttcttttggtgagtttattaagtattattgcattaacacgtgtcggctttattttattctggcgtgcatcaccaccagaagaagacccgatcaatcctgcttatattatttatcgtgctttacctgaaaaagcaccgccacgtaacgatacagtcatctatatcttgcttgccggtttagtggcttatgtagcatttgcttcacctgtattgcactacaccacaaataccgctcagcaaattcaagatcatgccctgtatcagcaatctattcttaaaactgatcaaaatggcgaagttattagtgttcagccatatgactcaacttatttaccagaaacaaaatatggtggtgaagttgaagatcataatgcctatcttattcctgacattatttcgaaagatactttcaacggtgagcatatttctgaatataagcaccgccaaattcagcagcaagaaaaattgcaaaccccaaccattgctgatgaaagtcaactgaaacctatggagccataa

SEQ ID NO: 41305 - DNA, 369 bp, Acinetobacter baumannii
atgatcagtttagaattcttactggcctctgccattgggctacttgttgcgacaggcatttatctaattttacgtgcgcgtaccttccctgttgtgttgggcttagcagtgctgggctatgcggttaacttatttttgtttgcgatgggtcgcttgcaagtcagctcaccagccatcctaaccgaaaccaccaatattacagatccacttccacaagcacttgttttaacagcaatcgtaatcggttttgctactactgcttttattgtgcaacttgcattacgtagccgttatgaatccggtagtgaccatgttgatgctaaagaagatatttctccaacatacgacccacgtgaggatgagccgtga

SEQ ID NO: 41306 - DNA, 2838 bp, Acinetobacter baumannii
gtgctaccgataattatcttattaccgttaatattaggcaccacccttgtttcattgcttcaacggttttcacgtggagtaacggctttaggggcgatcggagtcagtttaaccagttttggtttattactgactcaggctaaaactgtgcttggtggtgcaagcattcaacaaagttgggattggttaccacaattaggaattaatctgagctttagacttgatgcccttggtttattattttctcttcttattaccggtatcggtacactcatttatatttatgcctattattatctaggccctaaaaattcattaagtaaattatatttattactcatgctgtttatggcagcaatgctcggtatttctctttctaacaatttaattattttattagtcttttgggaacttaccagtatttcatccttcctattagtcggttactggagccattacgaagctgctcaacgtggctcgcgtatggcacttaccattacaggtatgggtggactcgccatgctaggtggatttgtcttattaggacaaatcacaggaacctacgaaattaatgatattgtcggaatgaaagacctcattcaaagtcactatctgtttgttccgacgcttttgcttattttactgggtgcatttactaaaagtgctcagttcccgttccatttttggttacccaatgcaatggcagcgcccactcccgtgtcggcctatttgcactctgccaccatggtaaaagctgggattttcttattagctcgtcttgcacctattttcattggcgctgcgctttatcacaacattgtcacgtttgtcggcctatttacactttgtatggccgcatgcttcgcaatttttaaagaagatctaaaaggactactagcctattctacaattagccatttaggtcttatcgtttgcctgcttggtattggttcacctttagctgttgctgcagcaattttccatattattaaccacgccacctttaaagctgccctgtttatgattgccgggatcattgaccatgaaacaggtacacgtgaccttagaaagttaagtgggatttggcaactattaccgtttaccgcaacattgactatgattacagcggcatcaatggcaggtgttcctctcactaatggctttatttctaaggaaatgttctttaccgagctattagcgagcctttcaggatcaactgttatctttgctagtattattgcgacgcttgccggtatttttgcagtcagttattcaattcgcttagtacacggcgtattttttgatggccccataggtaaacaagttccaaataaaaatgcccacgagccacctatcggcatgcgagcaccagctatattgcttgcgacattatgtattttggtcggtattttccctgccctactggtcgagcctctagttaacagtgtgacacgtgcaagtcttatgcaacctgattttgcaggtactcatcttgcaatttggcatggatttaatgcgccattaatcatgagtattattgctctggttggcggtacgcttttctattttgccctagcaaaagatggcatgattcgtaagatcgaccttgacccacgtttagggcgcttacaaggccgtattttatttgacttattcttaaagcatttattattaacaagccgaaaaattaaacaaaaaaccgaaaatggttctttgcaaagttacctgttcttaatcattgcttttagcatcgtcatggttactctgcctttgttcaatcagggccttaccacaggtacacgtgagctgactcacgcaccatggattgcagtagttctttggctgaccttattctcaggttgctggatgatgctttggttccaccatgaacgtattaaggctgtactcattagcggtgcaattggtcttgtggttaccatggtatttgtcaccatgtcggcgcctgacttagcactcactcaaattacggtagatgtagttacgactgttctgttgttgatgagcttatcgttactcccacaacttacgccatatgaatctcgtcgctcaagacgttggagagatgctgcgttagcaattattggcggtttaggaattggttggattacatggcttattttaacgcgtgatcataattcgatttcatggttctttgctcagcaatccttaccacttggcggcggttcaaacattgtaaatgttattttggtggacttccgtggctttgatacctttggtgaaattacagtactaggcattgctgcgattggtgcgctatgcctgatggatggcatgcgcgtacatggcaccaccatgacccaaggcctcacctaccgctttaacccatctccgctcatgttccgtatcacggcctcttgggtattacctttagcattggtcgtaagtgtctatatctttatgcgtggacacaactacccgggtggtggctttattgcaggtctaattacctcaatggcactgattattcagtacattgctttaggtcaagatcaagcagaacaaatgttaaaagcccaatccggtcgtctttacgaaatctggattggctccggattaacaattgcaggccttactggcattgccgcatggttctgggcacgtccattcttaaccagtgcgcacgtctatgttgaattaccagttttaggtaagttgcatctggcttcagcagcgagctttgatctaggtgtgtatatcaccgtagtaggcgctaccatgctactcatttctgtattaggggactctcgccactcgagtatgtctggtcctgtacctcatggggagaaatcatcatga

SEQ ID NO: 41307 - DNA, 1383 bp, Acinetobacter baumannii
atgaaacttgaatctatccaatttaaacatattgctctgtttcatgacctaaaaatacagtttcaatatgacaaacaaccgattactttaattttaggcgagcaagcaactggcaaaagtatgctactcaagcatatttatcatgctttaacatggtttcctgcgcgccttaaagatgcacgccccccaggcattgtcatgccagatcaggacattagccattctcgtttgcagtctaaaatagaagtcagcatccagattccaccggaatttggacagctccctgaaaccacttcaacccagcaaactgacacatctctttgtagttggaaactgttcaagaccttaaattcaagtggcgtagggattagtcaagttgaaactcagcagctcgatcaaaccattaccctttatcatcaagtcacaagaaaagatccacttcaaggtcttcccttactcgcttattatccgtcagagcggtttgttaacgatataaatttactgaataaaaatttaccgggtattacccagtctatttctgcttatgacattagcttcattccgtttaccactttcgcccgcttttttgagtggttacgtgaaattagtgatattgaaaatgcgcaagcggctcatgttgtgcagcgaattatttcgaaacaatccaattcacaagatcaggaagaaattttacgtcagctacaacttgaattggcaggacatcctaaacagcttccttcacctaatttgtacgcattaaaatcggcgttaaagactatttttcctgagcttgaagacttttatttgcaatatcacccaaaacttcaacttatggcacattacaagggtgaagttttggcctttcaacaactttccaacaccactaaaacatggattgcactcgtaggcgatgtggttcgcaggctttgtttgctcaatccgttgagcttagacccttgtcttgaaggtgaaggcgttttgttaattgaccagatcgattcacaactagatgcagcacattgctcagaaattttaaatcgtcttcatcgcgcattcccacgcttacaaattattgtgaccggaagccgtgaagaattgcttgaacatgcagccgcatatcaatgttttaaattagagcatggaaaaataagtccacttgatttaaatactactcagcagcaactcgaacatctttatacgttattacaacgagatgaagcgttaacgccacatatagatcccctaccgcttgataccgagccggcaacagctcaaattgatagtttgtaccaacaaatccaaaatctaaatgaacagcaaaaaaatgaattattacgtatgattcatgcaggagacacctcggaagaaacctcctctctttaa

SEQ ID NO: 41308 - DNA, 1503 bp, Acinetobacter baumannii
gtgtcgaatatcgaaaaacctaaagccacctatgagcaagcaattgccatagataacgcacgtcttgggcaatcatttaaagtgattgcctatgcgggcacaggtaaaactactacgttgcaaatgattagtgatgccatgcctgaacggcgtggtatgtatttggcttttaacaaagccattgctggtgaagctcaaaacaaatttcatcgcaatgtagattgccgtacttttcactcactcgcctttcgcagtgtgccacgtggcgtaactgataaattacgcttacctcgcttaagcccaagcttcattgcaaaagaatatcgactagaaccgattaccctacgtcgaatgatgggtggacgttatgaaaaatacgtcttaatgccaagtcgcctcgcaagccttgtcgccaatgcagtaagctatttctgttcgaccagttctcaatatccagcgcctcgacatattcaggcgccaaactggttacatccagacgatattactgcacttcaaactcacctttaccctgctgtagaacgccgctggttagagtccattgacccaaatcatcaagcgggaattggtcacgatatttacctcaaactttgggcattatctgagcctaatattccggccgattatgtcttatttgatgaagcacaagatgctgaccctttaatgctgggtattctgcttcgtcaaaaaagtactcaggttatttatgtaggcgatgcccaccagcaaatctacgcgtggcgtggtgcagtaaatgccatgcaacaactgcctttgccagagtctcgtctaacgacctcttttcgttttggagaggcaattgccgatgtcgccaatgcgttgttaggtggcttaaatgagacagttcctttgcttggtaatccgaaccagaaatcaagtgtagtcaataaaccgcatacaaaaatgcgtgatgcgattttgtgtcgtaccaatgctcgcgcaatggagctgttattggcaggcttagttcacggcgataaagtgagtttgcaagctgaccatcaaaaactaaaccgttttgtagatgctgcaagcctcttaaagcaaggaaaacgagttactgacgttcctgagttggcatggtttaactcatggcatgatgttcatgagtactgcgaaaccaatgaaggaagcgatattaaaccattggttaagctggtagatgatcacggcactgacccattaaaaaaagcacttgcaaagattactccccttgagcaagctgactatgtcatctcgactgcccataaagcgaaagggctggaatggaaccgtgtccatattgaagacgactatcaatttaaaattaatggattagagcataagattacagatgaagagttaagattactgtacgtggcctgtactcgtgctaaagtaagtctaaatatccatcatctttatgatctgatacaacaattaaaactaagggcgcctttaagtcttcgtcagtcggttggttga

SEQ ID NO: 41309 - DNA, 774 bp, Acinetobacter baumannii
atgaataacacgcaatggctcgatgaagtaaaatttaacgaacaaggtcttatccctgccattgctcaacatcatcaaaccggacgtattttgatggtggcctggatgaaccgtgaatcacttgcactcacagcagaaaaaaatcaggctgtgtatttctcccgttctcgccaaaaactttggcacaagggtgaagaatcaggccatttccaaacggtttatgaaattcgtctggactgcgatggcgacgtgattgtattacaggttgagcaacatggcggtatcgcatgtcatacaggtcgtgagtcttgtttctaccgtaaactcaccccacagggctgggaaattgtcgatgcacagttaaaagaccctactgcaatttacggtgacaaagccaaagctgaaagtcacgatcatgctcatattactaaacaagtggatgtacttgctcacttagggcaattgatgcaagagcgtaagcaagcagaagcagacacttcatatgttgcaagcctctacaaaaaaggcatcaataaaattctagaaaaagtcggcgaagaaggcgtagaaaccattattgctgcgaaagactacgctgctcaaaatacagaaagtaatttaaatgacttgatttatgaaactgccgatttgtggttccatagtattgtcatgttgggttatttcgatcttaatccacaacttattattgacgagttaggtcgtcgtcagggtttatctggtttagttgaaaaagctaaccgcaataaggtttaa

SEQ ID NO: 41310 - DNA, 753 bp, Acinetobacter baumannii
gtgcccgagtgccaagttctcgattctgaaattctgcatcaattttatgatcgctcgaaaattatgatgggaattcttcctacgggagcgattccaaccaaacctcaacagcgcctttcaagtgttttttggagcttacctacgccacaattacaaagctttttgcaagatgagcaggctaaacaagcttggttaaagcaagtctcagaacgttggcccaaagttgcagagtggctcaaagaaattttgtataacagtcaaactcagcccaaatggctatctgcaaactatcgtgatgtcgtcatgactcaatttggtcaaggtcgaattggggtaattggagatgcagctcatgcgatgagtccacaattgggtcaaggggccaatatggcattattagatgcttgggctttttctcaatcattgcaacatgctcaaaaaaaccaaaatattgattggtccctgctctggcagcattatcaccagcttcgcggttcatctactcagttttatcaattccttagtcgcttactaacaccactttatcaatctgacgattggtgggcgggaggtttaagagatttagttttcccttggatgtatcaaattccttattttcgaaaagaaatggccatcacaatttcaggtttaaagacagggccattccgccatcttgaatatgatcaagtagctcaattacctaaagaaagcagtacgtttcatttaaaaagtgaatctctgactgatttttaa

SEQ ID NO: 41311 - DNA, 591 bp, Acinetobacter baumannii
atgaaaacacctcattttgccattattggtgcaggcacggcaggtttagccactgcgattttgctcgcccgtgaaggcaaccacgttactatttttgaacaagttgatgagttatctccggtaggtgcaggtttactgctacaacctgcgggcttagccgtatttgagcacttaggtgtgctcgacaaagccctaaccttaggtgcgaaagtcacaggcttagaaggacaacttccagacaagcgtcttttagttaacagtcactatcgcgaagcatcaacaaatctttatggtctaggtatacaccgagccactttatgtcacgttctcactcaaaaacttagcgaatattcaagccagattacttggtgcatgaatcattccgttgaaagttttgtagaacataacgatgaagttcggatatttggcagtcatcaaaatcaaaagtttgatgcttgctttgatggcctactcattgccaatggtgctcgtagtcaattacgccctaaagcatgggtaaaggttgacaaagcttatccttgggggggctgcgtggagtatcgtgcccgagtgccaagttctcgattctga

SEQ ID NO: 41312 - DNA, 1620 bp, Acinetobacter baumannii
atgattccgcacgtttcacgtttactcgaactttggcgtattgcagcgcactatagactcgatacgttgttccctgcggatgaattacctgttaaagctaagcatgcattgaatattataaaaatgcatccggcagcatggtctagtcgtgaacgcaaaaatcctttaaagcttaaagaagctttagaagatatggggccgcttgcaattaagcttggacaactcctgtcaactcgccgtgatttgattccacctgaaatactcgcccaactggttttgcttcaagatcaggtcaaaccttttgatggagaagttgccaaacaacgtattcaagattctttaaaagcagacgtaaatacactatttgctcgctttgatgaccaaccccttgctgctgcctcaattgcacaagttcatacagcggcactacatgatggacgtgaagttgttgttaaagttactcgtccagacattcgtagccaaattttacaagactttgaaattctggcttggctaggcaacaccttagaaagtcgtcttgaagctgcccgtgcattacatttatctgaaattattcaagactaccgccaaatcattttaaatgagctggacttgagtattgaggcagataacacccgtcgtatgcgccattacttcactggttcaaccatgatgtatgtgccagaagtctacatggacaccaaagatgtcatggtggctgagcgtattactggtgtccctatttcagatacggcaacctttgaccgtttaggtatggaccgcgcacaacttgcagaaaaagggttaactattttctttacgcaagtattccgcgataactttttccatgccgacatgcaccctggtaatgtctttgtagaaaccatcaacccaagcaatccacgctttattgcactggactgtgcaattatgggtgagctttctaagcacgaccaaatgacggttgcccgcatgttgcttgctgtcatgaacagcaactttatgcagctcattcaaattgtgcatcaagctggctggattccaccgggtacagatcaagacgcgttagcacgtgaaatgcgccgcactgttgggccaatggtgtctaaaccaatggatcaacttgattttgcgggtatcttaattcaagtgatggatattgcccgtcgcttccatttagaaatcccgccacagctcatgctactactcaaaactttagtgcatgtagaaggcctaggtacggacctttatccgcagctcgacatctggaaattggcaaaaccaattttgacagaatgggtcaaatctaatatgaacccagtcaaaaatgtaaaagagcttggtcagcaattaccagacctgcttttaggcgctcaagatttcccaagtttaattattgatagcttaaatggtttaaaaaatcagtctgcttggcaagaccgtcagttacgtgaaattcagcaacttcgtttgcaaatggaacaccaacaacgtcgtagctggatgtttggcagtactatgctgattttgctaactattgcgattattagcccttggtttgtatctattattttgattgtgttgagcagtttattggcgctttggcgtgtattgaaataa

SEQ ID NO: 41313 - DNA, 669 bp, Acinetobacter baumannii
atgtggtcgattctggcactcggtgcagtcgaacgtatcattcatcatctgatcgatctggatgcattaacccgcattcagctcaatcagctacagggcaaaatgttgcgtgttatcatcgatagcccgcaactttctgttgatgtattctttgaccaagaaaaagtacgtcttgaacctaccgttacagggcacagtgaaaaaccatcaatttttgagcagcgcccttttgatccacaatttaaaatttctgaagccactgcaactttgcatgtcaaagatgtcgttgaactgatcaaattattattaagcgatccagaccagattggtaatatcccgcttcaaggtgattatcacctcttacaggatattcaaaaaattatgcagcaagctgaacctgatttagctgcgcatctatcaaaatgggttggtcctcaactcgctcacgaaatcggtaagatccaacttgcaccaaaacatttaaaacgctctcttcaaagtcatctattttttgctgaagatgccttaaaagaagacagcggtttatttgccccacgttgggaaatggacgatttaaatcaggctacgcgtaagcttaatcaagacattgatcgtctagaagctaaattgcagcagctcaatgcacaactacaacccactcaagactag

SEQ ID NO: 41314 - DNA, 948 bp, Acinetobacter baumannii
atgtctaacgaaaaccaaaagccaacatctccaactgagcaggcacaaagttcagacaaagttagcccattcctaagctcaccgttaccgcaaggtacccctcaagggcaacaacaatctttacagcaaaccttaacagatacgcctgttagcggttctgttccgaaatacaatttaccacgtggtgcaggcaacactggcaacgttggtgaaacaacacactttggttattcaacagttcgaactgaagacaaagcacaaaaagttgctgaagttttccactcggttgcaagcaaatatgaccttatgaatgacttgatgtcatttggtattcaccgtttatggaaacgctttgcaattaacatgtctggtgttcgccgtggccaacacgtgttggatattgcaggtggtacaggtgacttagcaaaagtatttagccgtgaagttggtccacaaggtcatgtggtactttcagacattaacgaatctatgctcaatgtaggtcgtgaccgtttgattgatgcaggctgtaccaatgtcgattttgtacttgccaatgcagaaactttagaaccttttgcagacaacagctttgaccttgtcaccattagctttggtttacgtaacgtgacagataaagacgcagcgcttgcttctatgttccgtgtgcttaagccaggtggtcgtttacttgttcttgagttttctaaaccagtatttgagccattctcaaaactttatgacctctactcattcactgctttaccgattatgggtaaattggttgccaatgactcagaaagttataagtacttggctgaatcaattcgcatgcacccagaccaacgtaccttaaaaggtatgatggaaaatgctggcttccagaattgtgattatcacaacctgactggcggtattgttgctgttcaccgcggttttaaactgtaa

SEQ ID NO: 41315 - DNA, 708 bp, Acinetobacter baumannii
atgtctaaactcgctgcttttgatgaacttttacaacaatataaaacatttaattatcacgacaatccagtgcttgcccaacgtttgcaagatgtacaaacatggctaaaagaacggatgaaagagacgcatcacgacttttttaatttaccagaacacaaactgatggctcagtactttttaaaccgtttatatggtggaccagagttcgatgcgcttgcagcacaaattgaacgtttattgaaatatgcacataaagcagaaaaggttttacctgaaaacgcaattaagacaggtacaaagtcggtaagtttggctgtacttgccactcaacttgatgaacaagtagcaatgcagcttcttgaagactatccggcagatactgtacttaccgacgagatcatgcgcttaaccttaatcaagcttgatcaggccgaagcccgttaccagcagcttgcccttcttgacgatttaggagcagcactcgataaatacatgcgttcatttatgatgtttactgcttttaaaatgtgtaaaggtattgcacaaaaatatcacttcgaattgatgtatgattttattcaagatggttttagcgcaatgaaacctttaaaatcggctgaggcctttattaaaacttttacggaaaaagaacgccagattgttgaaaaagtacattcaggacatccgaatccgtttagagtgtga

SEQ ID NO: 41316 - DNA, 1419 bp, Acinetobacter baumannii
atgagtgaacaacaaccaaaatttgaaatacgagacgaagaacagctttcagttgatttaattgaagcacaatatgctttaaaagaaagccgagggaaacccaatgccaaaagcacactcattttaatgagtggtattgagttagctggaaaaggggaagcggttaaacagcttcgtgagtggctagatccaagatatctacgggtaaaagcagatgcaccacgtgtgctgacagattctgaagcattttggcagtcttattcagcatttattccgactgaaggccaaattgtggtgatgtttggcaactggtatagcgatttgttggttacggcaactcatgtgtcagaacctttggatgatgcgcgttttgatgcctatgttgaaaatatgcgagcgtttgaacaggacctaaaaaataactatgtcgatgtcattaaggtttggtttgatctttcgtggaaatcactccaaaaacggttagataaaatagacccatctgaacagcattggcataagcttcacggcctagactggcgtaataaaaaacaatatgacactttgcaaaagctacgccgtcgctttaccgacgattggtacattattgatggggaagatgaaaaacagcgcgatcaattttttgctcagtatcttttacaacacatgcgtcagctgcctgaacatgaaactgaagtcaaaggtaaatggcaacaggcaaaaattcccgagagtttattaaaacctgctcaggaaaaaatggataaagccgaatataaaaaagagctcgataaactcagtaaaaaaattgccgataccatgcgctttgataaacgtaatgtggtgattgcatttgaagggatggatgctgccggtaaagggggagccatcaagcgaattgttaaaaacttagacccgcgtgaatatgatattcactgtattggggcgcctgaacgtttcgaagcaagacacccgtatttgtggcgtttttggaatcgtgttaatgaagctgaaaaaattaccatttttgaccgtacctggtatggccgtgtgctggtagagcgtgttgaaggatttgcttcacctattgaatggcaaagggcatatgatgaaatcaatcgctttgaaaaagacttatttgatagccaaacgattgtggtaaaaatttggctagcaattagtaaagatgagcaagagcaacgttttaaagccagagaagagacaccgcacaaacgctttaaaattactgccgaagattggcgtaaccgtgataagtgggatgattatttaaaggcagctgcagatatgtttgagcgaaccagtaccgaatatgcgccttggtatattgtcgcaacagacgataaatatactgcacgcttagaagtgttaagagctattttaaaacagctgagagcagattaa

SEQ ID NO: 41317 - DNA, 507 bp, Acinetobacter baumannii
atgaaaattgataacattcctgactatattgatcctagcctaaatctggaacaaattcgtgatgagtgccaagaactcattcagaaaagagcttacgtctctgctggtgcagcaattgtacccattcctttttttgacgtggtagtagatttgggaattttgtcacagcttattcccgatattaattcccgttttggtttagcgcctgaacatgtcagtgtctatgatccaaaaacaaaaacaattcactgggatgaattacgaaaacgcggctttcaattttcaggctttgtggtcgctcgcactactgttaaaaaaacctttaacggtttctttggaaagattgttaccaaacaagtgacaaaattcgttccactaggtgggcaacttgtcgcagcaagtttaggctattttatgatgaaaaaaatagcccaaactcatctaaatgacagctacaaccttgctaaacgtattcaacaaaaaagtcgtggcacggttgtaaactaa

SEQ ID NO: 41318 - DNA, 3636 bp, Acinetobacter baumannii
atgggtatccatgttattcaaagtcaacgtattgatgtgttgttgcagggcgtactggcatctacgtcccagccgtcaacgcatccattacaggttttgaaagcccagcatttcattgtgccaagtcctgccatcgagcagtggctgatacaaaaacttgcagaacagcaaggaatgagcgccaattaccagttccaccaacgtgtgcgcgggtttcagtggtatgcctatcaacaggtcctcacggcgcataaggagcaggttcgtaaagccaatattccacgcttgatttttaaatggcgtgtacatcaagccttacaggaatttattcagcctgatgtcatgagcatagatagctctcatccactgcattctattgttcaacgtatttatgacagtgcagatcggcttgaacaaggtattgagaagcagctaaaaaagcaaaaaatgttgtattgggttgccgagcaggttgccgatttatttagtaactacatggtctatcgaggacagtgccagcgtggttgtgaaaatatgtgtacttgtccaaataactggttagcagcatggggacaaggacgatcactcgatatcgaaaagtatattgcccataaagataaagaagtttcggcatttactttgcagcaaacccaagagttagaacgttggcagcgctggttatggcagcagcattttcatgatgattttatgcaaatgcagcaaattgatgagttgttttggcaagagttagagcatcctgagcgccagaagaaggcattggctcgtttgccggagcaaatagtcatttttactttactggatttaccacccagccagcttcagtttttacgtcgtttagggcaatacattgatgttttgattttgcactataacccttcgcaagaatattgggccgatagtgtcgacccactctggaaacagcgctatgacttaggggtaaaagagcgttttatagcaaagaacccccaagcgaccgatgcggaaattgccgatttctttaataaatttacgcttaattttaatgctgaggcgcgtgagtcaagacatccactgttaaccagattgggcaaacaagcccgcgaccacttctcattactctcaaacttatctacaggtgaagagggtaagtgggtggatgcttttgtcgatgattttcctgaaagtttacttggcaaagttcagtcagatattttgcacttggtggaaccccaagcaaagcagtatgagcttgcccctaacgatgactcaattcagattcatgtctgccactcgacattacggcaacttgaagtattgaaagaacaattgattggctggttagcaaaaccgcacgaacagccgcgtcgtccaaatgatattttggttttagttcctaatttggcagaagtagagcctttaatacgaagtgtttttcctgctacagcgactgagcaaggcgtgcatttgcctgtcaaaatagcaggaattgcctcactcgatgcacttaatgcatggcgtgccgtgattgggcgtattcaccttatgcaagggcgatttagctttgatgagtttgctgactggcttggtttacacgcgactcaacagcgttatgcacttgaatatgctcaagtagagcgaattttaaacttacttgccgatgcagggtttaaacgtgggcttgatgcagagcatctgaaacgtagtttatgtgacggcgatgatgattatcgatatagctttaaatttgctttagagcggttagcgctcggcatagcaattcccgaacatgctacatttaatcaggtgctgagttacgctaaggttcaaccgggcgattttgagcttattggtacgctcattcagatttatcaagatttaaatgaacgccgtgactggctcattatgcatgagcagaaaaaaagtcatacggtggaatactggttgcaaacactctcgcaagatattatcgagtttgagcaggccggtgtggctgctttaaaaactgcgcgggaaattgtaaaaaaacaagagcgtatgttaacgctcgcaagctactatgccgagacagaaacaagcatcttacgtaaaatcaccttgcctttgccttatattctggatgagattcagcgaactttagaaaatcagacggctcaagctgaaccgactggacagattacctttgcccagattggacaaattcgtcctttgccttatcgtttaattgtgatgttgaaccttgatgcagggcagtttccaaatcgagacacccatgtgccatttgatttgatggatgccttacgtcaacaattaggtgaccgttcccgtcttgaggatgaccaaggcgctttcttagatgccctacttttagctcaagaaaacttatggctgttttataacggctttgatgtcaatgacggtgaggtgagagatccttctagtattcttcaagagttccgtgagcatcttgcacttattgtaaagccagaaccaaatgcacccgatcgagaagtgattgaaggtattgaaattccctctcaattaaaacagctctatcacttacattatttacagccgtttgacccgaaaggttttatggctgagaaccgctatattcgttatcaagatcactggtttaacgtggcgatgcaaattcagcaagcttccggtgttcttaagccttgggcaaatatatcttatcctttagaaatacctgacatgttggttttagacagccatcagtggatacaggatgtgactttccccgcacgtttatatttaaaaactttaggcgtagaaaacttaggaaatgtaagcgtattagatcagaatgaacctttgcttttagatggtttgggccgttataccattcgacattttttacagcaaaacgaacagcaggcacagcctgaagttctacttgatcagttgcctgtaggcaaagttcaatacagtgcatggcaacagggcatttttgaacaggaatgtttgcttgagcgccttcatcattacgcgccagccgtgacacaaacgactcagcgtgtgtggcgaattgccaaacagctacatatgaatattactgtgccaaaatctgaaactcaggattgggtcagtatggaagcatcaagtgctcgggcaaaaagacgtgcaaaagtctggttagagtacctgctttggttggcctatttaaatgaaggaagtgcaggaactgaaagacgccgtattgtggtttttagtgaccaaactgtcatctgtaaaggtattagttcggagcaagctcggcagtatttacaaccgtggtttaaaatctggcgttatgctcaacagcagccactcgtgttaccagcagctttattattaaagccacttgaaaaagccaaggcatatcagtgggaaacaacaaatccgacagaaaaaataaaactggatgagaagagctatgcggagctgttaaaatactggaatgaaacggggacatttacctctatcgatatgacacaaaatgaagcgtgcaagttacatcaagactggcgtttcattttgcaagaacaagatgcacaagcattacttcaacatgcttgtgatgagtttgcctatgacctgtatcatccggtttttcaatttcaacattcggagtaa

SEQ ID NO: 41319 - DNA, 3699 bp, Acinetobacter baumannii
atgaactcaagagtacaggtgtcttatcaacctattattgatattgaatttagtggactacatttaattgaggcttcggcgggtaccggaaaaacctatacactgtcgagtttaatggtccgtatttttcttgagaaatatttaccgggccaagtgattgcaacaacattcacccgtgctgccgctgccgagttaaaaagccggattcgtgcgcgtttggtcgaaacctaccgttacttagatgccaagcggagcttgactgaaaaagagatccttttgcaggccgagcaagaatctgacttattactgcaacatattctcaagcattttgcgacacgtattgcctatgcctgtgagcgtttaaagctcgttatcgatcagctagatgagctgtttgtcggaacacttgatagctttagccaaaagctattacgtgagtttgcctttgaaagtggcaaaattgaacgtgctcaaattaccgatgacgctaaaacctatagccgacaactgattcatgatgttttacgtgaatggatacagtctcagcctcaaacggtgattgatgcgttgtatctggcaggtgagttaaaaagtgtcgacagttttgtcaaactggtcgaagactcactgaattttagttcggctcactttaaacttcccgaaaagcctaccattcagtttgaacagcttgctcagctcaaacagctggcagcagaaattgatatcagtcttctagaaccgtattactcgcttgatggcgagcactataaacatgtaagcggcacaatattccgtaatggggcatttaataagttatttagtgaatgtttgccacagttattacaagttttaaagcaaagcgacagtattttagtttttgatgggtctttggcagtacaacgggaacttgtttttaagtttttaggccaacttgccgatcagaaagttttcaagaaatgtcctgccgaaatttcggatggattttatcagcatccttgtattcagcagattcagcagttatttggtgtgctgaaaaactatgctgaacagttcgatcagcttcatatttatttaaaagcctatttgtgtgtagaggttaaaaaacgtttaccacaggttttacaaaacaagggcgagacgactttttctcagcaaattcgcactttgtcagaagctttaaagggcgagcaggggcaacgtttcgccgtatttgtgcaggctcgataccccttaattttggttgatgagtttcaagacaccaaccaagaccaagatgacatgcttgccagcatttggcgtcatccagaacgttaccaaaaaggttgcatgattatggtgggtgaccgtaagcaggcaatttacggtttccgtggtggggatatgctcaccttcttgaatgcctacaaagatattcaagcaaagcatggtcgtgaatataagttaattcataaccaccgttcagtcgctgacttggttgaagtagttgatgcattatttcaaaggcaaatcgactttggtgaacaggttcaatatgacccgattcgggcagggactcgacctcatccggttttaattgatcaaaaccagcctaatccgcatcctttacgttggctcatgctaaaagacaaggaaacggaagcacagcaagtcgcgtggaaaatacgtgatttactcaatcagtcacatgcaggacaactttattttcaaaaagatgctcagactcaaatcttaaatgaagatgatattgcggtcttgtcgcgtaatcatgatggtcttgataaagttcaatttgaattagaacgtttaggaatacgagttaatcggccatcaaaacgaagtgtttttgattgcacaattgctcaggatgttggggccttactcactgcgattcttcatccttacgatgaggccaaagtgaaacgagctttgattagccgtttatttgctatggaccttaaacagctgttgcaactcgaacaaacggccgaaggtttaagccagtttatgacgggttttgatactattcgggaattgtggtcagctcagggctttttagtagcatggcagcaatgtttaaaccaatttggcatttggaaaaatctggttgctgtccagagtaaagataatgagcgggttgtggtgaacttgcgtcatttgaccgaaattttgagccaacatagcgagaaatatcagggcgcgcaaaatctctatcactggtatctcaagcaattacaatcaccgcttgatcgtgaatgggagttagagcgtaggttgtcgagtgaagctggcgtacagctcatgaccattcaccagtcaaaaggtcttgagtttaaaattgtctttttgctcggggccgacaagccatttcgggaaaataacaaaacacttaacttctcgacccaagatataacggttccggagtcggctcaaaccctaacacaacgtgttgttgcgattgccgataaaacatatttaaacgaaatcgagctgaagcagcatgaagaacgggctttggcggaacaaaaccgtctatggtacgttgctttaacccgggcaagtcatcgtgtttatgcgctcttacaagatacagatggcaagtctgtttcaggtttggcattttggaaaaacagagcggaaccattccagcaccgttgttgtaccgatgaaataattttggagcaaccacctgctgcaagacatttaaatcaacacatcaatattattgagatacaggcgcagcattttcctgatcagcgcttttattcgagaggcaaaaccagttttagttatctggcacagcatttaagacataaagtaggtaaagatttactcgcgagtcagagccatgaagctgttttagccgaagatgaactcgatcaggttatttctgttgaggcgcccgcagcacagccaattaactggatcaaaagtaattttccgagagggacgctcgcaggtaatttcttacatgaaatttttgagcatattgattttcaatgttcagatgagtgggtaagtgaaatacgtcgtcgttttaaaaatgactacagtagtttgtggcaagatttattaatcaaataccaagaaagctttcccgaagaacaagaagcggaatattcgctttatcacgctgtggccgaatggttgcaagagattttaagcacgccgttatatcaaggctttcgcctaaatcggttacagccagagcactatttatcagagtgtcctttttatttggcactgtcggatcgtgtgttagccatgaaacgtattcagcagctgtttgctgaatatggtatggaaatgccagagttattagaggctcgttctgcacgctatttaaatggttcgatagacttggtttattttgatggacagcgttatcacattgctgactataagagtaactacttgggtgaaaaccttgccgattacagtgtagaaagcattgcacaaagtatgtctttagccagctattggctacaagcaggcctgtatttggttgcattacatcgttatttaaaagtcaaaatgcagaattatgatattgaacaacacttaggtggggcgacttatctttacttgcgcggtatgaatggcgaagctgagcagggttattattattggcagccaagtacagaatttgttctacgactcgatgctattttagggtactttgctgaggataaaattgcataa

SEQ ID NO: 41320 - DNA, 1764 bp, Acinetobacter baumannii
gtggataagtgtgtggacaatctaaatagccctgaacaaagcgatttaagctggttaatgacttggagtacctttctaaatcaagccccgtttactgcacagacacaagctccagaggcagcttattttttgcagcagctaattgaagcgagcttgcagggtgacagttgtattgagattagcccagagcaaatagaaacacttggccaactggtgatatctgctgaacaagcaaagtctcaagttgccccttgtgtccacgacgggcaggggttggcattataccgatattggaacctagagcaacgtctagctgagcaaattcgccgattaaagcaacaaccaattcaacctgtttcatgtgaagagcatttagacttattaactgatcctcatcagcgagctgctttgcaaatggtgactcggcagagcttaagtattattacaggtgggccgggtacaggtaagacctatacgcttgctcgtattattgctgtgcttagtcaggcaattccgcatatccgtgtggcgatggctgctccgacgggtaaagctgcacagcgtatgcaagaagccttacaaaactcgtttaatgatcccaaactgcttgagtcggggctaatgagtgatgagctaagaaaccaaagtacccaaactatccatcgattattaggtatggggcatagtcaaactccacggtttaatcaaaaacagcctttgccttatgacgttattgtggtggatgaagcctctatgctggacttaaatctggcaacgttattatttgaagcggtccctgactcttgccgaattattttattaggtgatgccaaccagcttgcttctgtagacgttggagctgtacttgcagatttacagcaaatcgaggctttgtctgaaaaccgtgttcaccttcaaaccagccgtcgttttgcggaaggggctttgattggtcaggttgcccgatttattcaaatgcaaaccagtcaaattgatcatgagcaagttttacaacagtttgaaattgatattgttcaagtttcagagttacgttcaatacctttagaagctgatatgcccgatgtggttcagcttgaatatttacccgaagactcccctataacgctagaaacttactaccaaaaattgatggtgggttttcaaggctatgtgcaaagcttaaaagcttatatacaagatgatcgttcacttgaacatattgaaaatatcgttaagtcattcgatgactaccgtattttaactgccgtacgtcatgggccatttggtttacagcaacttaatcaatatgccgaacgctggttacaacaacagctaggtattgtgactttaggaggatggtatgttggccgtccggttatgatgacttataacgattaccaactcggcatttcaaatggtgacattggtttatgttttgaacatagaacccagccgcaacagtttgaagtgtatttcccaagtttaaataagtgggttgctgcaaatcggctacctaaaagtattcaaagtgcatttgccttaacaattcacaaatcacaaggttctgaatttacccatacagctgttgttcttgatcaggctgccaagaatttgttaagccaagagttgatctacactgcgattacacgagcgaaaaaagtagtgagtttattggtcgatccagaggcattacttcaatcttttacagttcgcacgacaagaaaaagcggtttagttgaaaaagttaatcggttagttcgttaa

SEQ ID NO: 41321 - DNA, 1299 bp, Acinetobacter baumannii
gtgaaaatattttcgaccaatacctgtccggtaccgaatgaccttgaatcggtcattcatcataaagatgaagtacctgccgaactaggtggaatgagtgaacagcaagttcaaaaaatctggaaaagtattgagtcactctataaaaccggaaactatccgctcattactttttgcttacgtcgtcaggggaaaattttattaaatcgaagcattggctatgctcaaggaaactctccggctggtctgcaaaagaatgcactcgtcgcaacgccagatactcccgtttgtctattttcagcatccaaaatgattactgccatgttaattcatcttttagatgaaaaaggcgaaatcaacttacttgaccccgtgagctattatattcccgagtatggggtgaacggaaagcgccgcgcgacaatctttcatttgttatctcatcgtggaggcattccttatgttgatggagatgtcacacctgaactgctttttgataaagatgaaattttaaggcgcttatacgcagcaagacctgtttctccagcgggaaatcacctcgcctatcatgcagtaacggcgggttatatcttgggagaaattattgaacgggttacagggcaagaccttcgccaatttgtgcatgagactatcgagaaaccgatggacatgccctattttaactatggcttaaaaccagaatatcgtgctgaagttgctcttaattgtgcaacaggtttgcatcctcgtttaggaacggatcattatctcaatcatgtactaggtggaggcttacaactcgctgtagatgtcactaatgatagccgttttatgaataccatctgtcccgccggtaatatttataccagtgcagaacaagctggacgcttctttgaaatgcttttaagtgggggaagctaccaaggcaaacaaattttaagcgagaaaacaatttttagagcaacactccctaccacaggagttaacattgaccgaactttattaataccgatgcgctatgccttaggaccaatgctaggcagtaatccagtaggcttatttggtccaatgactggacaagcttttggtcacctcggtttttccaatattttgtgttgggccgacccagagcgtgatatcagcgtttctttgttaactactggcaaatctgtggtcggtacccaccttcctgctctagccaacctgctttatcaaatttcgactcaatgtccacgaattcctagagatcaacgccgttcactatttggtagtgattcgcatgaaaccgatctggtatag

SEQ ID NO: 41322 - DNA, 270 bp, Acinetobacter baumannii
atggctttaactaatgcagaccgcgcagagatcattgctaaatttgctcgcgctgaaaacgacactggttcaccagaagtacaagtagctttattgactgctcaaatcaatgatttacaaggtcacttcaaagctcacaaacacgaccaccacagccgtcgcggtttaatccgtatggttaaccaacgtcgtaaattgcttgactacttaaatggtaaagaccacgagcgttacactgctttgatcggtgctttaggtctacgtcgttaa

SEQ ID NO: 41323 - DNA, 2094 bp, Acinetobacter baumannii
atgtcaatgtttaacatcgttcgtaaagaattccaattcggtcagcatcaagtcgttttagaaacgggtcgcgttgcacgtcaagcaaatacagttttaatcacaatgggtggtgtaactgtattggtagcagtagttgctgctccaacagcaaaagctggtcaggatttcttccctttaacagttaactatcaagaaaaacaatatgcagcaggtcgtatccctggtggatatggtaagcgtgaaggtcgtgcttcagaagctgaaactttaatttcacgtcttattgaccgtccaattcgtccattgttcccagaaggttactacaacgaaattcaggtaactgcaactgtggtttcttctgacaaaacgatggaagctgatattgcagcaatgttaggtacttctgctgcgttggcaattgcaggtactccattccgtggtccaatcggtgcagcacgtgttggtttaatcaacggcgaatatgttttaaacccgaattttgagcaaatggctcagtctgaccttgaccttgtggttgctggtacagagtctgctgtattgatggttgaatctgaagcgaaagaactttcagaagaccaaatgttaggtgcggttctttttggtcatgacgaaatgcaaattgcaattcaagcgatcaatgaatttgcagctgctgctggtgcgaaaccatctgaatgggttgctcctgcacacaacgaagaattacgtgcaaaattaaaagaagcatttgaagcaaaaatttcagaagcttataccattgcagtaaaacaagatcgttatgcagcattagatgcacttcatgctgaagctgttgctcaattcgttcctgaagaagatgtagacggtattgctgacgaagtagactacttatttgaagatcttaaataccgtaccgtacgtgacaacattttatctggtaaaccacgtattgatggccgtgacaccaaaactgttcgtgcgttagacgtacaagtgggcgtacttgagcgtgcacacggttctgcattatttacacgtggtgaaactcaggcgttggtaacaacgactttgggtaatactcgtgatgcattaatggttgatacccttgctggtactaaaactgacaacttcatgttgcactacaacttccctgcttactcagtaggtgaaacaggccgtgaatctggtcctaagcgtcgtgaaattggtcatggtcgtttagcgcgtcgtggtgttcaagcagttcttcctgcagctgaccgcttcccgtacgttattcgtattgtatctgacattactgaatctaacggttcatcttcaatggcttctgtatgtggtgcgtcattatcacttatggatgcaggtgttccgcttaaagcaccagttgctggtatcgcaatgggcttagtgaaggaaggcgagcgtttcgcagtactttctgacattttaggtgacgaagaccaccttggtgacatggactttaaagtagcaggttctgcaaacggtattactgcacttcaaatggacatcaagatcgaaggtattactgaagaaattatggaagttgcattaaaccaagcatttgctggtcgtatgcatatccttaatgaaatgaacaaagtaatttcacgtgctcgtcctgaaatttcaatgcacgctccaacattcgaagtgattacaattaatccggataaaatccgtgatgttattggtaaaggtggtgcaacaatccgtcaaatcactgaagaaactaaagctgctatcgatattgaagataacggtacagttcgcgtatttggtgaaactaaagctgctgctaaagctgcaattgcgaaaattcaagcgattactgctgaagttgaaccaggtaagatctacgacggtaaagtgattcgtattgtagaattcggtgcgtttgtaaacattatgccgggtactgatggtcttcttcatatttcgcaaatctctaatgagcgtattgcgaacgtaactgatgttcttaaagaaggtcaggaagtaaaagtacaggttcaagacgttgataaccgtggtcgtatcaaattgactatgaaagatattgagcaagcataa

SEQ ID NO: 41324 - DNA, 1212 bp, Acinetobacter baumannii
atgcaggtttattatttttatcgtcatcaaagcgacggctatgtttttttaagccgtgaaaagcacactgaacatattctggagtttttctggattgatagtgtgagatcggatgttgtgagccagaatgaagaatggcaacaaaaaattcagcaacttgcagatgtatccattaatgagtttcatatgcgagatattgcgaatatcgaacatccttgtgcatttgatacgcttgaagaatatgacctgcttatttttaggaagctcgtaacgccggatgatgaaattaaaaatggcgaatcacatgagagtgtatttggtttagccaccacaccgatcagttttatttttacgcctaaagtacttattagcgtacgtgagcagggcaacaagtcgattgaaaattatattcagcgccttgaaaatattttatgtaaaactctcgaagagcaaaataaaacccgtaagctgcctaattcacctgtagatctgtgtttacgtctgctcaatagtatggtggatggttaccttgatattcgttcacctttgaccagaagggtcgaacattggcaacaacagctattacaagggaatcggcgttttaagcagtggcatcaactgtttcatgaaaatatggcctttcaacaggttgaaaatctatgcgaagaacaaatcgaaaccttacaagagtttcgtgatgaaattgtagaaaactatcatcatgttattggagagaagacgcatagttctcaagaccttttattagtgcgtttaaacgatttaatgagtcatgtcgaacgtattcaaaaacatactttacgtttacgtagtgcgattcaatcggcaatagatttgcatttctcggcaattgctaaccagaccaatgagaacatgcgtattcttgccattattactgctgtatttgcgccgcttacgcttttaacgggtatttatggaatgaactttgaatttattcccgggcttaaatcaccagtaggtttttggattatgcttggggttatgctgctaagtaccattttattgctctactatttttatagacagcatttggtggggcgtggtgaaaaaagtgtgattgatttactggcgcagcagcatcgccaagatcgtatgaatttgttttggtttttggaatatgaaccgattaagcagactttgaaggaagtggaaaagattactcggttgaagtaa

SEQ ID NO: 41325 - DNA, 330 bp, Acinetobacter baumannii
atgacaaccatccattatcgagaaattgtatgtgacggccacacctttagtgctgaagtcgttgatgaacaatgtacatttgacttgcaacagtttgctcaagcctgtggtcaaagcccagactggattctagagctcattgagtacgatattttagcgattgatactccacctgaaaaacatcaattcatgggtgaagatgttattcgcgctcgtaaagcatatcgtttgcaacgtgactttgatgcaagccttgcagctgttgcggtgatgttagatttgattgatgaagtgcaacaacttagaaaacagttgaagcattttcattga

SEQ ID NO: 41326 - DNA, 957 bp, Acinetobacter baumannii
atggctaaaaattattatgaagaattaggggttaaacgagaagcctcagctgatgaaattaaaaaagcgtatcggaaattagctcgtaaatatcatcccgacatcagcaaagaaaaagatgcagaagaaaagatgcaggcaattaatgttgcctacgataccctaagcaaccctgagaaaaaagctgaatacgaccaaatgttagaccacccacaaggttttaatggttttggtcaaggggcagctcaaggtggtttcgatggtgccagattttatcgtcaaggttttacaggcggcgagcaagcagactttagtggctttgaagacttatttggacgctttggtgcaggctttggcggtggacaacagcaatatcaaagacaacaacgtagttatcgaggtgaagaccagcatgccagcatagaggtcgatcttgatattgcttaccatggatcaacacaacatatcacactgcaaattccaaccattaatgcctatggtgaaccagaggtacaacgaaaaaccttacaggtaaaaatacctaaaggcatgaaagaaggacagcaaattcgcctaagtggacaaggacaaagtggtattaatggtggtgccaacggcgatctttatatcgagattcaatataaagatacagatcgtgtgcatgtcgaaggcagtgatgtatatttgactgtagatgtagccccatgggaagccgcattagggcaaggcattgaagtaaaaacacctgcaggacctttacacgtcaatttacctaaaaatgcaaaacaaggacaacagctacgtttaaaagacaaagggataccaaataaaacgccaggccatctttatttaattttaaatattgtattcccaccggcgcattctgaaaaagaaaaagaagcctatcagcaattggcagaagcctttgcttcattcgaacctcgttcatctcattag

SEQ ID NO: 41327 - DNA, 612 bp, Acinetobacter baumannii
atgaattattttgattattttctctttatttttagtgtcattattatgattgcgacccctggtcctgtcatgattttagtggcaagtgccggacttaaaggtggttataaaaaagcactggaaaccatttttggtacaaaccttgcctctctcgttttaatttttatttcagtactcgtacttaaaggcgtattgggtattaatgaaaattatttaaatattattcgtgttttaggctgcctatatattggttatttgggttttagtattctcaaagaagtcattcaagctcctcatcctgaagcaattcaaaccgtttctgctcaaaatggcggttttaaaaaaggctttttagtgggtatttcaaaccctaaagatattattttcttttcagctttctttccgcaatttgtttctatttcacctcatctagatttaagtctaactattcttacgctgacatggatagttttagactttttaacgctatctctagtctatatatttttccgccgcctctcgaacagccatttatacccgaagatcctcggtttatgtggtctattactgttagttattgccgtttacggtttatatcagacattcatttaa

SEQ ID NO: 41328 - DNA, 876 bp, Acinetobacter baumannii
atgtctgatttacgccaacgcttttatatagaggactttcctgttcgcggtgaagtggttcatctagaagaagcattaaaaactattttagctcaacgcgactacatgcctgcggttcaaattctattaggcgagatgttgagcgctacagcattacttgcgagtactttaaaaatcaaaggtcgtatcagcttgcaaatccaggctaacggctctttcaaatgggctatggcagaatgtaaccatttaggcgaagttcgtgctttagcagactacgaaacagatccacgttttggtgaagcaacagatagcagcactgttttagcggctttggttaaccctgttttatttattaacatcgaacctgagcatggtgagcgttatcaagggattgtacctcttgatcaagcaaatttagcaggctgtttaatgcagtactatgacttgtctgcacaaattccaacccgaattgtactggcaagcaccgcacagcgctcaggtggtttgctcattcagttattacctcgtcatgatgaggaagagcaaaaactggttgatgaagatttatggccacgtttaaccatgctaactgaaacgcttaagtcagaagaactgacagagctttcagcaaatgagattttgtatcgtctttataacgaagaagaagtacgtttaccagaagttgaacacttaaaatttggttgtacttgttctaaagaacgctgtgccaaagccctcattcaaattggtgttgatgctgttcatgaaacattggaagcacaaaacccgattcaaatggattgccagttctgtaacacccgttatgagttcactgctgaagaggcactgggtctgtttggtgaacatttgagttaa

SEQ ID NO: 41329 - DNA, 1842 bp, Acinetobacter baumannii
atgtcattcctactgcaagcaactatttttcttggagcatctctgattttagtccctttgggcaaacgcctagggattgcaacagttttaggttatttatttacgggcatacttcttggcccgagtgtgttaaatattgcccatgaccctgaggccattatggagttggctgaatttggggtcattttacttatgttcctgattggtctagagctccgcccgcaacgtttgtgggaaatgcgtgactccatatttgtgatgggaagtttacaggtcgtgattacgggcataattcttatgctcaccgtattgctgctatttcaacaacactttgctgccagctttgtgattggttttgcgcttgcgctgtcttctacggcctttgtattacagcttctgactgagaaacaacagctcaataccacctacggtcagcaatcgttttcaattttgctttttcaagacattgcagcaattccattacttgcggtaattcctcttctggcaggaaccgaatctacccatcatggtattgcttattttgcagccatcatcgcgacttttaccggcttgttcctatttagccgttatgtcatgcgcccatttttccgttttgtcgccaagagtggtgcgactgaactgattacggctgtagggttatttattattcttgccgttgtgttactgatggacactttaggcattagcacaacattaggtgctttccttaccggggttcttttagccgactcagaattccgtcatgagcttgaagcgagtattgcaccgtttaaagggctcttacttggcttattctttatgaccgtaggtatgacgacacaattgtcgttactgattgaaatgccttggctcattattggtggagcaatcggcctactcgtcatcaaaaccctcgttttaactgccattgcccgctataaaaagtacagttggaacaatagcttgttactcgggacttgcttggctcaaggcggtgaattcgcttttgtaattttgagcctagcaaaaagtgaaaagattttaacggatgccttattagagcctgtcacgttgattgtgaccttatcaatggtccttaccccagtgatttactggatcatggcctgtaagatcattcccctttttcataaagaattgccacctgaatatgatgagattcctcagcaagataacccaattatcattgccggttttgggcgctttggacaaattattgcgcgtattgcccgcttacagcacttaggatttactgccatcgataacaatcttcatcaagtggactttgttcgacgttacggcggtaagctctattatggtgatgtcacccagcctgacttacttcgctcagcagggattgaaaaagcgaaagtatttattttagcaattgatgatgtcgaagactctatgaatgtcgcacgtcatcttagattgaactatccaaacctaaaattactggctcgtgctcgtgaccgccaccatgtgcacctgttaagagacttaggtgttgaacatatttggcgtgaaacctatttatcatcattaggtatggcttatcgtgctttacgcgaactcggtatttccgatgaacaagcttataacaatatcgaaatctttcgggattatgatgagaaattactcatacagcagcaaagcatttataccgatgaacaaaaggtttttgaaacccatcgtaatgctctggcagagcttgaacacctatttgaaagcgatgcacaacaagccacatcgaagcacgacgttaacttaaagcgtcatttacaaccaaatcgtatcgacattacacgagatcacgaagaataa

SEQ ID NO: 41330 - DNA, 2229 bp, Acinetobacter baumannii
atgaccataacgccaaagcctgattcagttgtttatcgtgtgcgtgttgccgtacctgtgcatctgtacgacacttttgactatacactcaccaaagcacaatatgaacgggctcaagtaggttcacgcgtcgcaatttcatttggacggcaaaacctgattggtatcattactgaaaaagttgacccacaagaatcatttacaggtaactttcagcttaaggccatttctgaacttttagatgatgagcctattttagatgaacaagttttaaatttattgacatggtcagcacaatattaccaatttccgattggtgaggtaatgcagactgctttacctgcgttattgcgtcagggcaaacccatggatgttttatttcatctatggaaaatcattccatgtgacaatgccgaagctttattaaaacgctcaatcaaacagcaagatgcttatcaaattttaaaattacatcctgccggaaccactgaaaatattctcaatttaagtggtgtagaaactgcaacacttaaagcactacaaaagaaaggtctcgtagactgtacgcttgagccacatgactttagtccatcccctgtgcaattggcgcaaatgccactcacgctcaatgaagaccaaaagaaggccacccagcacgtccttaatgcacagcatcaataccaagcatttttactagatggcttaactggaagtggtaaaaccgaagtttatttgcacatcatgcatgaggtgctaaagcaaggtaagcaagtactggtgttagtgcctgaaattggtttaacccctcaaactatttcgcgctttaagtctcgttttaactgcgacattgctttattacattcggggttaaatgactctaaacgcctacaagcatggcaacaagcacagactggaaaggcctctattattttaggaacacgttcagccatttataccccgctgccacgtttgggtctgatcattttagatgaagaacatgacctttcttataaacaacaagaaggtttccgttaccatgctcgtgatgtcgcactttaccgaggatatttacaaggctgtcctgttcttttaggttcagcaactccaagcattgacagttatcacttagtcgaaactggcaagttaactgcacttcagctgaaccagcgtgcaggccatgcgcttttaccaaaaatgcatttgattgatcttaaaattgtcaaaaaacagcatggtattagtcagcctttaatcgaacagattaaaaataccctagcaagaaaagaacaggttttaatttttttaaaccgtcgtggttatgcacctgttctagtctgtgaaagttgtggttggcaagcgaattgtcctcattgtgatgcacattttactttgcacactcagccctactcttacttacattgtcatcactgtggcactgttcatcgcttgccagaccaatgccctgagtgtcagcaaaagagcctcaaaactttaggtgctggcacagccaaggttgaagagcatttacaagaattattcccagatcatgatgtgattcgggtcgatcgtgacagcaccagccgagtcggtagctggcaaaaaatttatgatcgcattcaacaaaataaaccttcgattttgctcggtacgcaaatgttggcaaaaggtcaccattttccgcatgtgaccttggttgctattttagacatcgatgcaggtttattgagtgtcgatattcgagcgccagagcgtactgctcaattgattgtacaagtggctggtcgtgcaggtcgtggagaacataagggtcatgtttatttacagactttaaggccagatcaccctttattgaccacacttattgaaaaagattatcgggcagtggcgaaacaaacattggctgagcgtaaagttgcattactgccgccttatcgctatgccgtacttatacgcgctgaatcgaaagatcgcgactataccttgcattttttaaatgaagctgccgagcaacttcgccaaatagcaggtgatattgttgatatctggggaccaattccagcgccaatggaacgtaaagcaggacgttaccgcgcacatatggtgattttgtctgctgaccgcgctcgtctgcatttttacttaagacaatggtgggctcagttggtccatgcgccaagacagcatcaactcagactctcaattgatgttgacccgcaagaatttagttag

SEQ ID NO: 41331 - DNA, 1206 bp, Acinetobacter baumannii
atgcctgcatatcaatttactgctattgatgcttcagggaagcagcaaaagggggtgcttgaaggagactcggcacgtcagattcgccaacaattacgcgataaagcatggactccgattagcgttgacccggttgaacaaaaagataagcatcaaagccacggattattccaaaaaaagtttagtgcttacgatttggcgctcatgaccagacagctttcggttttggttgctgctgcaattcctttagaagaagctctccgcgccgtgagcagacaaagtgaaaaagcacatgtgcaaaatcttttactctcagttcgttcaaaagtattggaaggacattcacttgcacaagggatgcaacaatccgggcgttttcctgacctttatattgctactgttgccgcaggtgagcgttcaggacacttagatctcattttagatcagctatcagactacaccgagaaccgttttgccatgcaaaagaaagttcaaggtgccatgatttacccaatcattttaatgctgatgtctttcggtattgtgatgggattaatgacttatgtggtcccagagattgtaaaaaccttcgatcaaagcaaagatgccttaccatggattacagttgctttaatgaaagcgagtgattttatccgtcatgcatgggtatttattattctttttgcaattgtaggagtagtggcttttgtccgttttttaaaaactactgcgggacattatgcttttgatcgattaacactcaaattgccattattcggtaaactatcccgtggtattaatgctgcgcgctttgccagtactttatctattttgactcgttcaggcgtgccattagtagatgccttaaagattggtgctgctgtgaccaataactgggttatccgtgattcaatttcccaagcggctgaacgtgttaccgaaggcggtaacctcggtacgcaactggagcgcagtggttatttcccaccaatgatggtacaaatgattcgaagtggtgaggcatcaggtgagcttgaccgtatgcttgaacgtgcgtcgaccatgcaagaccgcgaggtgacgacatttatttcaaccttattggcattacttgaaccgcttatgctggtgttaatggcaagcatcgtactggttattgtaattgcggttatgctgccaatcgtaaatatgaacaatatgatttaa

SEQ ID NO: 41332 - DNA, 582 bp, Acinetobacter baumannii
atgaaagtaaaaaatattcaaagcgaaacagcgatgaaacaacatagtgaatctgtggtttcaaatcagtttgaaccaacgtgccattccgagcatagctctgtatcagatgtttgctcttcaagtgctttcggacttgcgacatgttcgagccgtgctcgaatgaaacgtgcctcaggctttacgcttattgaagttatggtcgtgattgtaatcttaggcgtgttggctgctttaatcgtaccgaacgtcatgggccgtagtgaaaaagctaaaattgatacgactcaaattaccttgaaaggggttgcgggtgccttagatcaatacaagctcgataatgggcatttcccaaccatgcaagaaggtggtttagatgcgcttattaatcaacctgctacagcaaaaaactggatgccgggtggttatgtgaaaggtggttatcctaaagacagctggaaaaatgatatccaatatgtcgtacctggaaaagacggccatccttttgatctatattcatttggcgcagatggtaaagaaggtggtgaaggtaacgatgccgatatttattatcagccttaa

SEQ ID NO: 41333 - DNA, 345 bp, Acinetobacter baumannii
atgaaagcatttctcgtacttgatgagctgaatcagtttcattgggcgatgcttaaatctgtcctattgattttagcattattacctattgctgaagtttcattaaagctatggttgagtactgagggaagtagccaaatcatgattggtttctttgccttaagtattgtaagcgcttggttaatggtgagcttttttaccgcattaaaaacgagtgtatggcaaactaaacagatgacttctaaatacgaacaattgctttttaaagcttatcgttatgtgccgatggtttttttatcgagtttagttgcttatttatctttgcaattatcgattgctttttaa

SEQ ID NO: 41334 - DNA, 339 bp, Acinetobacter baumannii
atggaacaaatcgagtggaatgactttttaaaagtagaactgcgcgttggtaaaattattcaagctgaggtttttgaaaaggcgcgaaaacctgcctatattttgcatgtagattttggtgaagaattgggtgtacgtaaatcgagtgcacagattactaaactttatcaaccgcaggatttgattggtaaattagttgttgcggtagtgaatttccctaaaaagcaaatagggcctatccaatcggaatgtttggtagcagggtttcataatgcagatggggatgtagcactttgtatcccagagtttgaagtacctctgggtacaaagttattataa

SEQ ID NO: 41335 - DNA, 1560 bp, Acinetobacter baumannii
atgagagcatactttgaaaagctgttagattcttcgcaacaacaaaaacagcttcctttaatttttccattgctcattgctttattttcaggtgccgtgttcagttttgcactggcaccttattattggtggtggctggcaattttgtctcctgccctactctatgcgacattgcataaccgctcagccaaacaagcatttgcaattggctggagttatggttttggtttatggtttgtaggggctttctggctctatacgtcgatccatgtatatggcgataccaatgcttttctaagcgtatgtatgattgcggttatggcccttgtaatgggcttatttacagcatttcagacatgggtttatcgacgcttcttccctgaaacaccactgactttcgcccctctctggattatttttgagtgggctaaaacttgggtatttaccggtttcccttggctgtttgtaggttatgcttttactgaacgtttactcgatggttatgcgccgctatttggtatttatgcaatttccttcgtagtcattgtattggcgtgtgctttagttgaagttctacgtaagcgtattttctgggttatccctgctgccctattggttttaggtgcatggggagcatcatatattcagtttgtacaacctaaagctaccaaaccgcttagcgtttcgctcattcaaggtaacattccacaagatttaaaatggctaaccgaatatcaagttagaacattagaaatttatgctggtttgactcaatctgaatggggccgtgacctcattgtatggcctgagtcttcaattccactcttccaaaccgacattgaaccgtttttggatgcaatggatgcacaagctaaaaagaaccataccgcttgggtaactggcataccttattgggatgtagtgaaatcgcatcaagtcggaagtccactgtattacaacagtattatggcctctggcagcgattcaagcggcctttataaaaagcagcgtctcgtaccttttggtgaatatattccgctgtcaggtttgctttcttgggttttaccagccatgcaaaatgatattagcatgagcggttttacacgtggggagagtgatcagaaaccacttttaattaaagggcacgcgcttgcggctgcaatttgttatgaagtggcttacccgaatctgacacgtcgtaatgcagaagatagcgactttttggtaactgtatctaacgatgcttggtttaccggaacagctggcccatggcaacatttacaaatggtgcagatgcgtgcgaaagaaaatggtcgctggtttattcgtgcaactaacacaggtgtaacagcgtttattgatcaaaatggtcatatcaccgaacaagcaccgattgataaagagtttgtcttgagaggcgatttaccagccatgcaaggacaaactctctataaccgtctaggtgattatccaattttaggatttgcaatattactgctggttttaggttggatttatcgtccacgtaaagtagatgtgtcttacaaatcacgtcgctaa

SEQ ID NO: 41336 - DNA, 840 bp, Acinetobacter baumannii
atgcaagaggaaccgagtccgtcgtggggtatgcgaggcttacgaaagtggttaggtacagcgccagaaacccgagatgaattattaaaactagtccaaaattcacgtcgttttttagaacctgatactgttgccatgcttgaaggtgttcttgaccttcctgctacaaaaattcgtgaagtcatgacgccacgaacagcaatgatcagtatgcaagaagatgatcagttacttgatattcttcacgtattggttgagtctgctcactcacgttttccagttttctcagctgaccaacctgataatgttgttggtattttactggcaaaagatttactgccatttttgactgaaccaaatactaaattagatattggctcgctcatgcgtcagccattatttgtgcctgaaagtgcacgttcagatcaagttcttcgtatgcttaagcacacccagacccatatcgcgattgtgattgatgaatatggatcaacagcgggactggttacgcttgaagatattcttgaagagatcgttggtgaaattgaagacgaacatgatactgcggatgaagatgcacagtatattgttccagataacgaccatacaatagcgaatgcatggatggtgcaggcacttacaccaattgaacacttcaacactgttttagatgctgatttttctgacgatgaagtagaaactgtcggcggtttattgcttcaagaaattggtctagttagtgatttacaaggtcagactgttgagcttggaaattggttatttacgattgttgaagcagatgcccgcactattcatctgattcgagctgtacgtcaatga

SEQ ID NO: 41337 - DNA, 258 bp, Acinetobacter baumannii
atgtcagaacaacctatttcacctactgtacaacttaatacgcgtggtttacgttgtccggaacctgtcatgatgctgcatcaggcgattcgcaaagcaaaatcaggagatgttgttgaagtgttggcgactgacccttcgacttcttgggatatccctaagttttgtatgcatttgggacatgaactcctattaaaagaagaagttctagatgagcagaaccataaagaataccgttatctggtacaaaaaggatag

SEQ ID NO: 41338 - DNA, 381 bp, Acinetobacter baumannii
gtgaatgattattttgtaaaacagagtttaattatatgtctttggtttttctgtattgcaggtttgttacgtattgaagtttcttggttatccgagaatattactaccttaattctatttattttgattactcttggttcagttatattaggttatagcaatacacattttgctcctgaacctaaagttaaaatgagtttgatcttacacacaaggtttatggggtttttactaattctcgatttattatttggtaaatcagtttggtacttcgatttagcgcgaaactttggttttctcggcttatttttattaggcacatttattttctacaaaaggaatcttaatttaaacgtagcaaaaatacctccttttgaataa

SEQ ID NO: 41339 - DNA, 1713 bp, Acinetobacter baumannii
atggaacacatcgaacgtgaatcgatggagtttgacgttgtcatcgtaggtgcaggacctgcaggtctatctgctgcgattaagatccgtcaattagcgattgaaaataacttacccgatctttcagtttgtgtagttgaaaaaggctctgaagtaggtgcgcatatcttatctggtgctgtacttgaaccgcgtgctattaatgaacttttcccgaactggaaagaagaaggcgcgcctcttaacgtacctgtaactgaagacaaaacattctttttgctttcagaaactacctctaaagaagcacctcactggatggttcctaaaaccatgcacaatgacgggaactatgttatctcgctaggtaacgttgttcgctggttaggtcaaaaagctgaagaattagaagtttctatcttccctggctttgctgcatctgaagtgctttaccatgaagacggtactgtaaaaggtattcaaactggtgacatgggtattggtaaagatggcgagcctacacataactttactccgggttatgaacttcacgctaaatacactctctttgctgaaggctgccgtggccacttaggtaaacgcctaattgcaaaatataatcttgataaagatgcagatccacaacattacgggatcgggattaaagaactttgggaaatcgacccagcaaaacataaaccgggtctagtgatgcacggtgctggttggccattgtctgaaactggttcttcgggtggttggtggttataccacgctgaaaacaatcaagtgactttgggtatgattgtggacttgtcttatgaaaatccacacatgtacccattcatggaaatgcagcgctggaaaactcatccactcatcaaacagtatttagaaggtggtaaacgtatttcttatggcgcacgtgctgtagtgaaaggcggtttcaactctttacctaaattgactttcccaggtggttgcttaattggtgatgatgcaggtttcttaaactttgcgaaaatcaaaggttcacacactgccatgaaatcaggcatgttatgtggtgaagctgtatttgaagcaattgctgctggagttgaaaaaggtggtgatcttgcggttgctcgtgtaaccgaaggcgaagatttattcgttaaagaattaacttcttacacagacaaatttaacaacagctggttaaaagaagagctttataacgctcgtaactttggccctgcaatgcataagtttgggcaatggattggtggtgcatttaactttattgatcaaaatgtctttaaagtaccattcactttacatgacttgaaacaagacttcgctgtattgaaaactattgatgcaacgagcttcaagccaacttatccaaaaccagatggcaagcttacatttgaccgtttatcttctgtgtttatttcaaacactgtacacgaagaaaaccagccagctcacttgaagcttactgatccttcaattccagtgaatgtgaacttaccgaaatgggatgagcctgctcagcgctattgccctgcaggtgtttacgaaatcatggaaaatgatgacggctctaaacgcttccagattaacgcagcaaactgtgttcactgtaagacctgtgatattaaagacccatctcaaaatattacttgggtaacacctgagggcggcggtggtccgaattaccctaacatgtaa

SEQ ID NO: 41340 - DNA, 612 bp, Acinetobacter baumannii
atggtaaatcaaaataattccccatcggatatgggaaaaataccgttatctgatgataaaaacttaatgaacattgcacaatacttaaaaggtgtacagcaaagtcacaaaaggtcaatcccacctttagagcaatggcatccaaagcattgcggtaaaatggatttaacggtgaaagccaatggagaatggtggcacgaaggtcaattaatcaagcgccaagccctattggatttgtttaccaaagtcctatggaaagaagagggtaaattctacctgaaaacccctgtagaacaaattgaaatcgaagttgaagatgaacctttattagtcaatcaggtagatcagattgaaatttcaggtgatgagtttctacaactgacgacgaccaatcaggatgtgattttagttgatgcagaacacccgatttttatgcgggaatatgcaggggagttgcgtccttacgtccatgttcgatttggtattaatgcgcttattcaacgtcaggctttctatcatctcgtgaactatggaacactggtcgaaaatgataaaggcgaaaccattttgcagttaaaaagtggtaatttgcacttgcaattaggcacttga

SEQ ID NO: 41341 - DNA, 867 bp, Acinetobacter baumannii
atgacagccatacagcctttatttactgaattagaacctatgcctaaagcattagcagatgccccaattggtatttttgattcaggtattggaggtatgtcggttgcagcagaaattgccaaatatttgccaaacgaacgtattgtatattatgcagatacagcctatgttccgtatggtcctcgctctgatgaagaaatcagggaactgactgctcgtgccgtcgactggttatatcgtcagggctgtaaaattgcagtcgtagcttgtaatacggcttccgcatttagccttgatcatttacgagaacattatggcgaacacttcccgattgttggcttagtaccggcattaaaacctgccgtattacaaactcgttctaaagtggttgcagtattggcaacaccagctacttttcgtggacaactcattaaagatgttgtcgaaaagtttgctgttccagcgggtgttaaagtgatgactctaacgagtttagagcttgtaccttgtgtagaagcagggcagcaaatgagccctgtttgtttaaatgcattaagagaagttttacaacctgcagttgagcaaggcgcggactatttggtacttggttgtacgcactatccttttttaaatgaagctattcatcatctttttgataaccaattcacactggttgattcgggtttggcagttgcccgacaaacagcccgtattttaataaaaaatgagttattatgtgaccaaatacgtcagaatgttgcacgtattgaatgttatgtaagtggtaataatgcagatgcattacaacctgttttacaaaatatgattccacaagaattgacatggacgctgcacaatctgagttga

SEQ ID NO: 41342 - DNA, 1005 bp, Acinetobacter baumannii
atgctcgatacacgctatcagatttttatttcaacctcaggtcgcgagatgcaacctgagcgtatggttctttcccaaactttagtcaatatggggttttttgcttgggggttagaatatagaaatcctctaacaacaacgcttgcccgtcggcaaattgatgaatcggattatgttgttttgctgctgggtagtcagtatggggagcaatcaatttcaggggcgagttatttttctttagagtatgaatatgcgttaagtcgggcgaagcccattgtcgtctttatgcatgaacaacctgaaagtcatgatatgcatttacaagagactcatccgcagcttaaagagaaatttctggcattccgaaaaaagttattacatgaagcgaatcatattttttattttaaaagcccacgtgatttagaacttgctgtccgtttaaatatgcctttaatggttgaacaatatatgggacaaggttgggtgcctgcacgccaagcgcatcatttggaagatgaaattaatcgattaaaaagtaaaattttacaattagaacaacagttatcagagtcatcaattcaagcaaatgaagtggcaccgcaagatgtttttgcttttgaatatcaaattcaggcttttcaagatggcaactttaaagagcttaagcgccagagacaaatgacttggtctcaactgttaagtattttggctaaacattttgagacagccatgccagaagagaactttgggacttgcctcaatgagtatttaaatcaggacgggttagaagacgctcgccaagagttgcctagagcacatgcagtggcaggtgcacaaattaatcataaagccctgtttcgtattaaaaagcaaatgcaatcacaaggatggattgttccaaccaagattgatcaacaacatagtttatggaaagtaacgaccaaagcccaaaagctcttgctcagttataaatggaatcatcggagtactcgattaaaagcttag

SEQ ID NO: 41343 - DNA, 1017 bp, Acinetobacter baumannii
atgtcgtttgaacaaaaaccgaaagttactgtcattttagcgaatttaggcacaccggatgaggcaactgtcccagcggtgcgccgttttttaaagcagtttttatctgatccacgtgtaattgaaattccaaaattcatttggtggattattttaaatctgtttgttttaccttttcgcccaaaaagggtagcgcatgcctatgcttcggtatggtctaccgattcaccaatgcgtgaaattgtatttgagcaaactcaacgtgtgcaggcttatttagagcgtgaaaataaacagtttgatttaactgtgttgcccgctatgacttatggtaatccgggtattgatgcagttttagaaaaactggcgactaatccgcaagagcatgtcattttattgcctttatttcctcaatattcagccacttctacagcaccgttatacgatgcatttgctaagtggattcctactcagcgaaatttgccgggtctgaccattattaaagattattatcaacatccaatgttcattcaggcattggcagaaagtgttctagtttaccaagagcaacatggaaaacctgaaaagctgttgatgtcatttcatggtattccacagccttatgcagataaaggcgacccttatgcagaccgttgtcgtattaccgcaaagttagtcgctgaagctttgcatttaaaagatgatgaatgggcaattagtttccaatcacgttttggcaaacaagaatgggtgaaaccttatactgatcaacttttacaagattgggcgaagcaaggcgttaagtctgttcaggtcttaagcccagctttttctgctgactgtttagaaacgcttgaagagctcgctattcaaaatgctgagttatttcagcaagctggtgggggtagctatgcttacatccctgctttaaacagtgatcaagcgcatattgatttgcttgcaggtttagttcaggctaatcttgatgcccttacccataccttagcccaccgttaa

SEQ ID NO: 41344 - DNA, 645 bp, Acinetobacter baumannii
atgctgcaagtcaaaattgttccagttactgcttttgctcaaaattgttctttagtttgggacagtgaaacaaaagaagcaattttgattgatgcaggcggtgatgcttcagttttgaaaaaagaagtagaagccttaggtttaaaagtaaaagcgttatggcttactcatgggcatttagatcacgcaggggctgtaggtgaactcgcaaaagagtggagtgttcctgttgttggtccgcataaagaagatcagttctggctagatatgattcaggaagtttcggcacgttatggttttccaatcccacagcctgtaaaagtcgatcaatggcttgaaggcggtgaagtgctaaaactgggtgaagatgagtttgaagtgcgttttgcaccaggacatacaccaggtcacgtcatgttctataacaagaatcatggtttactctggactggcgatgtcctgtttaaaggctcaattggaagaacagattttccacgtggtaatcatgagcaactgattgaatcaattcagcgtgagtgttttagcttaccagatgaaacccagtttatttctggacatgggccaatgagtaccattggctatgaaaaacaatttaacccgtttgtcgcaggtaaagcgggttaa

SEQ ID NO: 41345 - DNA, 195 bp, Acinetobacter baumannii
atgccacgtacatttccctgcccacgctgtggtgaaccaagtgtttgggaaggtaatgaatttcgcccgttttgttctgaacgttgcaaacttattgatttaggcgcttgggcaaacgatgaatatagactgcctacccaagatgctcctcagcaagacaagggtagtcagcatgaagatgattatgaggattaa

SEQ ID NO: 41346 - DNA, 633 bp, Acinetobacter baumannii
atgcagattcgtcaatttcaagcacaacgtatgcaagcgcctcgcgattttaccccaattgaaaatactccgatttgtgtagaaattggagcaggcaaaggtaaacatgctttgctatttagttggcaaaatcctcagcacacgttatatgcaattgaacgaactagagaaaaattcttggccatgcaaaagcagcatggtttggagccaagagataatttaatccctgtgcatgcagatgctttaccttgggttgtacatgctctatatcctgctcaagtagaacatttctttatcctctatccgaacccagaacctcataatccggcacaacgctggttgaacatgccattttttgagttcctgttatcacgcctgaaaacaggtggaacgattacattggcaagtaatattcctgaatatattgaagaagctgaacaacagttattaaacgtgtggaagctgccttaccaaaaagaaaaaattgcgcaaacttctgcacgtactcattttgaaattaaatatttagagcgtggcgagctttgtcagcagcttattatgaccaagcctgaaggttataacactcgttttgatgagtttgcaccgctacaagggcaaatacatgtcgaataa

SEQ ID NO: 41347 - DNA, 1206 bp, Acinetobacter baumannii
atgtcgaataagcggattgccattattggtgcggggccggctggtttaatggccgcggaggtgctgagccagtatgcttatgaaattgatgtgtttgagcaaaaaccttcggctgcgcgtaagtttctgatggctggtaaaacagggctaaatatctcgcatgctgaaccattaccccagttcattgaacgttacgaccatacagaatggctcaaaccgtgggttgaaaaatgggatgcagtctggattcaaaagtggatgaaaagtctgggcatagaatcctacgttggcacctcaggtcgtatttttcctgtcgaaatgaaagcggcacctttactccgtgcttggctcaagcgcttggcagaacaacaagttaaattcttttatcgtcatcgttgtattaatttacaaggtacaacggtgactttagaaaaccaaaataatcaaagcactgaaacctttacccagcaatacgatgcggtaatattggcctgtggtgctgtgtcgtggtcacaattgggcagtgatggtgcttggcagcaatggatggatcaatctagtattgaaccttttcaagcaagtaatgcaggggtattgcacacttggtcagcttttatggaaagctgttttggtgagcctttaaagcgtatcaatgcgtgggttgaacccagccaagttactcatggtgatattgtgattactcactacggtttagaaagtggggtcatttataaactcggacgtgccttaagagaacaacaaaaacaaggaaaaagcttaaatctatttttagatttattgcctgatgtagagcttacacagttagttaaaaagttacaggctagcaaaaagcaatcgctcaccaatatctggcgtaaagcaggcttagacacagctaaaattaacttaattagagaagtggttgataaagcactatggagtcaaccagagacgatggcgcaaaaaatgaaagcacttcaaattaagttagatggctttaggcctattgaagaagcgattagctgtgctggtggtgttaagcaagatgcattaacagaacgtttagagctgaaacaaacttcaggtgttttttgctgtggcgaaatgctggattgggatgctcctacagggggatatttgctgacagcatgctttgctacgggacgagcagctggtgaaggtgtgcattcattcttagagaaataa

SEQ ID NO: 41348 - DNA, 411 bp, Acinetobacter baumannii
atgtctcaagcatcgccagtttatcagggaagttgtttatgtcagggtattcgctatgaaattaaaggcgatatcggagatattatccaatgccattgtcaacgctgccgaaaatccaatggaacagcatttgcaacgaatgctcctatcaacagtgcagattttaaaattacgcaaggtgaagaccttgtcaaaaaatttgctgtgaatggtgtgtaccgttggttttgtagcgaatgtggttcaccgcttattagctcgcgtgatgctcagcctgaattgtatcgtttaagaattgggactctagatacaccattagaccaaaagccgacaatgcatatttttgctgcttcaaaggcagagtgggaatgcattcatgacgatttaccgcaatatgatgaacgtccatga

SEQ ID NO: 41349 - DNA, 381 bp, Acinetobacter baumannii
atgtattatcctttactttcaattgctttaggttcagtgctcggggcgtggttgcgttggcttttaagtttaaaactgaacccgatttatccgcaaattccgttgggtactgttactgttaatttggtcggtggctttattattggttttgcaatggcttattttgctcatagtgatttgagtccgaactataagctttttgtgattaccggtttttgtggagctctaactacattctcaactttctcaattgagatcgtcaccttattgcaaagtggtaagtggggaatggcaatgttggccatttctattcatttaattggctctttaatttttacgtgtttggggttggcgacttattattgggtagtgggcaactga

SEQ ID NO: 41350 - DNA, 333 bp, Acinetobacter baumannii
atggcacacgagttacttgcccaattacaagcaggcacagcaaaattttcagacgttttagcttatattgaagcacgctaccaacatactccaacagcttttcaaaatggcgcacagcataacgctgcaactgaaaatcaaggcagtgcaaaagttttctcttttgccaagttacaaggtttagaccaagcacaaactttaagtttatttgcagagcactacgcatctgtattggctaccccagagggaactgaccaccaaaatattcgtcagtttatgcaaaatggttgggatggtgtgaagtttgaaggtcaggctttaactgaaaagtaa

SEQ ID NO: 41351 - DNA, 255 bp, Acinetobacter baumannii
atgcgtaaagatattcatcctgcttatcaacaagtgttatttcatgacaccaatgcagacgtgtacttcttaattggtagtaccattcagacgaaacaaaccaaagaatatcaaggacaagtctatccttatgtgactcttgatatttcaagtgcatcacacccgttctacacaggtgaagtacgtcaagcaagtaatgaagggcgtgttgcaagctttaacaaacgcttcgctcgcttcaatcgtaaaagttaa

SEQ ID NO: 41352 - DNA, 1299 bp, Acinetobacter baumannii
atggcaaagaatgcaagttcacctggcaaacgatttatgaaacttgcaggaatgaccgcgagcattgcaacaaaaaccgtttctaactcgattcgaaacctgactgcggatgaagaacagaaactggctgcaaaaacaaaattatttcaagatatcgggctgcaaattgcagacaccttgggagaaatgaaaggtgcggtcatgaaggtcgggcaaattgcatcgcaatataaagatatcttcccgcccgaagtcgccaaagcgatatcaaaactacaacgccaagctccagctatgccttttgcagcgattcagcaacaagttgaacgtgagcttggcaagccgttgaatgttgcctttaaatcttttgaacaagaaccttttgctgctgcatcgattgggcaagttcacaaagctgttctgccaagtggcgaacaagttgtggttaaagttcaatatcccggtgttgatgaagcttgtgaaagtgacttaaaacaagtacgtttagcccttcgcttaatgggtgtacttaaaattgataaaaagttgcaagatcagctttttgcagagattcaagatagtctatcagcagaacttaactatgaaatcgaagctcaaaatcttgaagtctttaaaacttttcatagtaaattagacgacaaaattattatcccgactgtttataaagattactcttcaagacgtattttaaccttaagccttgaacaaggtgacagcattgaaactgctagttcttggcctatcgaaattcgaaacacaattggccgtcgtctaatccgcgctttgggtcaagaaatgttctttttaaaacgtttccactgtgaccctcacccaggtaactttgccttccgccaagatggtagtgtgattatttatgactatggcagtgttaaaacgctttccaatgaaattgtgtatagtttcaaacgactggtgaatgcagctcgccatgaagatatcgacttaattgaaacagaattactcgaactacattcactagcagaaaaaggtaaattcccgagcgatctttataaactctggattgaagtgttgttgcgtccacttaccacaacctatgattttgcagagaattcatcccatcatgatggcatgttactcgtgaaaaagtctttaaaatattgggatgtctttaaaccttcaccagatacattaatggttaatagaaccatttcaggacactactggaacctcattcacttaaaagtacatgacaacctgaatgatttatttgaagagctggttccaccttctaactaa

SEQ ID NO: 41353 - DNA, 1248 bp, Acinetobacter baumannii
atgaccagtctaaattcgtcctatgggcgctctcaagcggttcctttatctgtatttgagcagtcaaaagacgcacatattattcgttctgatgaagaggcaatagaggttgccaagcaacttgctcaagagtttgcccaagaagcatcagatcgagatagagagcgccgtctacccttaaatgaaattcaacagttctcacaaagtggcttgtgggccattacagtacctaagcaatttggtggggcgcaagtcaagtatcgaactttagcggaagtgatcaaaacaattgcgagtgttgacccttctcttgctcagttgcctcaaaaccacttggcttttattgaacatttaagactagatgcgaaacctgaacagcaacagttcttctttaacttggtgttaagaggaattcgttttggcaatgcattttccgaaaaacacagtaagacagtcgcggacctcacgactaaacttcaaaagaccgagcatggttatgaaattaatggcaagaaattctttgcaacgggtgccttgctcgcacattggattccaattgttgctataaatgaacaagggcaaccttatgctgcacttgtgccacgtgaaacatctggggtcaatattattaatgactggtctggttttggacaacgtactacagctagcggcacggtagagctgaatcaggtgccagtacgtgaagaatatctagttccaatttaccaagcatttgagcgcccaacaccagcaggtgctatttctcagtttattcaggctgcggtcgatgccggtattgcacgtggtgcaattgaagaaacgattcaatatgttaaaaaccatagccgtgcatggattgattcaggtctagaaaaagccagtgatgacccttacaccattgcaaatattggtgacctaaaaatcaaactgcgtgcagcagaagcggtattggatttggctggagatgcaattgatcaggccattgccaacaccaccgaagaacatgtaaaccaagccactctattggttgccgaggcaaaagtactcaccacagaaattgctattttggcagccaataaactttttgagttatcgggtacgcgttctactttatctgaactcaaccttgaccgtcactggcgcaatgcccgtacccacactttgcatgaccctgtgcgttggaaatatcacattgttggtaactattatctcaatggggttcagccacctcgtcatgcatggagctaa

SEQ ID NO: 41354 - DNA, 1251 bp, Acinetobacter baumannii
atgacaacagctcaaattgaattagaagaactatcggtcggtgctgattacgaaaaggttgcaaacagatttcgtcccattttcgaaaaaattgcacaaggtgcaattcaacgggaaaaagagcgaatcttgccttttgaaccgattcagtggttaaaagaagccaagttgggtgctgtacgaataccccgtaaatatggtggagatggggtttcattacctcaactgttccagcttttggcagagttagcagaagctgactccaatattgtgcaagctttacgaggtcattttgcatttgttgaagatcgcttggttgctcataaagagcattctcaggaagtctggtttcagcgctttgtacaaggtgatttagtcgggaatgcgtggacagaagttggaaacgtacagattggtgatgtcgttacacgagtcaccaaagacgcttcgggtaacttggtggtaaatggtgaaaagtactattcaacaggaagtatttttgcagactggattgatttatttgcttacgatgaagtaaatgaccgtcatgtgattgctgctatttaccgccatgaaacaggggtgagcgtgattgatgactgggatggttttggtcaaaagacaacgggcagtggtactttaaaagtacatcaggttcatttgccagcttcacaccttattccatttgaccaacgttttaaatatcagaccgctttttatcaggtggtgcatcttgcaactttaacgggtattgcgcgtgccgcggttgagacgtttagtcaggaaattcgtgaacgtaaacgtatttttagtcatggtaatggggacttggttcgtcacgacccacaagttttacaagtggttggcaaagcctcagctcaagcgtatgcaagtgaagcaattaccttaaaaaccgctgaggcactgcaaaaagcctatgaaagtcattttgccgaatccgaagtgaaagagcatcaattcaatgtagatgccgagcttgagtcggcacaagggcaggtggtgatttctaatctagtactcgatttaacaagccagttatttaatgctttaggcgcatcggcgagtagccaagtgaaacaacttgaccgtttctggcgtaatgctcggactgtgtcttcacataatccgcttatttataaagaaaaggtgattggagattgggaagtaaaccgtacggatttaccatttgtctggcaaattggagcaagcccacgggcaaagactgcataa

SEQ ID NO: 41355 - DNA, 1347 bp, Acinetobacter baumannii
gtgtcgaatgtcacgtcgtttcggtctgaattaaaacaactcttccatttaatgttacctattttaattacgcagtttgctcaagcagggttcgggttaattgataccattatggctgggcatttatctgccgcagacttagccgctattgcggtaggtgtaggcttatggattccagtcatgctcttgttcagtggcataatgattgcaaccacaccattagtggctgaagcaaaaggcgctagaaatacagagcaaattccagtgattgtccgccaatcattatgggttgcagtaattctaggggtattggcaatgctcattttgcagcttatgccatttttcttacatgtgtttggcgtaccagaaagtttacaacctaaagccagtttattcttacatgcaattggtttgggtatgcccgctgtaaccatgtatgcagcgctccgaggctattccgaagcattaggccatccccgccctgtcacggtcattagcttactagccttagtggttttaatcccgcttaacatgatttttatgtatggcttaggaccaatacctgctttgggtagcgcaggctgtggttttgcaacatccattttacagtggctgatgctcattacgttagcaggctatatttataaggcttcggcttatcgaaacacatctatttttagcagattcgataaaattaacctgacttgggttaaaagaattttacagcttggtttgccaattggtttagctgtgttttttgaagtgagtatttttagtacaggggcattggtccttagccctctaggggaagtctttattgccgcacaccaagtagcaatttcagtcacttcggtactgtttatgattccactttctcttgccattgctttaaccattcgcgtgggaacatattatggtgaaaagaactgggcttccatgtaccaagtacaaaaaattggtctaagcacagcagtattttttgctctattgaccatgtcttttattgctctaggccgtgaacaaattgtctcggtttatactcaagatataaatgttgtgccggttgccatgtatttgctctggtttgcaatggcatatcaattaatggatgctctacaagtcagcgctgccggctgtttaagaggtatgcaagatactcaggcaccgatgtggatcaccttaatggcgtattgggtaattgcttttccaatcggtctttatttagcgcgttataccgattggggcgtagctggtgtgtggttaggtttaattattggtttaagtattgcctgtgttttattgctctcacgactctatttgaataccaaacgtttaagtcaaacctaa

SEQ ID NO: 41356 - DNA, 462 bp, Acinetobacter baumannii
atgatgaaattctctagtcaacttttcctgatcttacccttagctatgggaatcggtgttgccatggcttttcagaccgcaattaatgctcagcttcgtgagcaattacactcaccattgcaagcagcattgttatcatttttcataggtactatcgtcttagccattatggtgttcttccaaagtgccgagaaaccgagtttaagtgaaatatccaatattccatggcttctctggaccggaggatttcttggggtttatgcaattagcatgagcatttatactgcacctaagcttggttttttaacctttacagggttagtcgtttttgggcaattggtcatttctatgttacttgaccattttggctggttaggtaccgaaaagacacctgttacatggcaaaggtttctaggtggagtggtcatctttgttggtgtattacttaccttgcaacgctag

SEQ ID NO: 41357 - DNA, 1155 bp, Acinetobacter baumannii
ttggccgtattaaatcctgcttctgttcctttatctttatatatccacatgccttggtgcgtgcgtaaatgtccctattgcgactttaactcacatgcggtgcctgatggtgcgctttcggcagaactcgagcaaacttatttaaaagcattggtagccgactttgaaactcaagtcgagatggcacaaggacgttcaattcacagtgtatttattggtggtggaacaccttcacttatttctgctaaaggttatgcatggctatttgaacagcttaaatcgctgcttaactttgaagatgactgtgaaattactttagaagctaatccgggaacactagaacatgacccgtttgcaggctatttagaagcaggaattaatcgtttatcgattggtgtacagacttttaataccgatcacctgcaaaagcttgggcgtattcattcagccaacaatgctatggatgcaattgagcaagcaagacaagcaggttttaagcgagttaatgtcgatttgatgcatggcttgccagaacaaacactagagcaagcactttatgatttaaagacggctgtagagcatggtgcgacacatatcagttggtatcaactgaccattgagccaaataccgtatttttccgaacacagcctgttttacctcaagatgaggtgttagaagatattcaagagcaaggtgaagcctatctaaaagcaaatggctttatcaattatgaagtgtcagcttggcgtaaagagcagccttcagctcataatttaaattattggcaatttggtgattatcttgcgattggtgcaggagcacatggcaaagtaacccgaccggatggtgtatatcgttttcaaaagactcgtttacctaaagactatttggctaaggttccagccgaacatttgcaaatgaaaaagattgaagcagatgaactaccttttgagtttatgatgaacgctttacgtttaaatgatggcgtaaaagctgagttatatgaacagcgcacaggcttaattttagatgatttaaatgatctgcttacttcattgcgttcgagagagttattggtagaggatagcggtcgtttggcttgtacagagcaggggcatattttcttaaactcggtactcgaagagttcttataa

SEQ ID NO: 41358 - DNA, 756 bp, Acinetobacter baumannii
atgacaactcatagcctcaaagataaagttgtattgattactggcggcgctaaaaacctaggcggactcattagccgtaaatttgcagaacagggtgcaaaaatcgcaattcattataatagttcggaaactcagacagatgcagagcagaccttagcagatgttaaagcattgggtgcagatgcaattctaattcaggcagatctaactcatattgaaaatattgaaaaactgtttatagatacgaaacaacattttggtggtatcgatattgcgattaataccgtcggaaaagtccttaaaaaaccgtttttagaaaccaccgaacaagagtttgatagcatgagtgatatcaactcaaaaattgcctatttctttattcaatcagcgggtcgacatttaaataacggcggaaaaatctgttcaatcgtaacctctcttcttgctgcttacacagggttctattcaacctatgaaggtttaaaagcacctgttgagcattacacccgcgctgcatcgaaagaatttggagatcgccaaatttctgtgactgctgttgcaccgggaccaatggacacaccattcttttatggtcaagagtctgccgaagcagtcgcttaccataaatcagcttcagctttaggtggacttactaaaattgaagatattgaacctctagttcgcttcttagtcaccgacggttggtggattacaggtcagacgattttcgcaaatggtggttataccacccgctaa

SEQ ID NO: 41359 - DNA, 897 bp, Acinetobacter baumannii
atggatcggttgcagcaattttatatttttacagaagtcgctaaacgacaaagctttagtgaggtagcaaatcagcttgatctacctcgctcgacagtgacgagtgccattcaacagttagaaactcactatggagtacgcttatttcatcgtactacccgtaaagtcagtcttactcaagatggccaacgaatattgccagaatgccaaaacctgttgtttgattatgaacaattagaacagttgatccagacacaaaaacagcattaccgaggcacattaaaaatttcgatgcctagccggattgtgcatcaagtgattattcctgagctgcctgatttttatcatcgttatccggatattcatttacagctcaatagttctgatgacctgactgacttaattgaaaagggaattgactgtgttgttcgggtaggagagctagataacagcagtttaattgcaagatttattggtcatttggtgatggtgaattgtgccagcccgcaatatttacaagattatggtattcctgagcagttaaatgatcttgaacagcataaattaattaattacgcaggagctgtaggagaaaagcagggagaatttatatatcaaggtggaactgtgatgatggatagtgctttaagcgtgaacaataccgaggcctatatcgccgccgcttgtgcaggtttgggaattattcaacttccttattacgatgttcaggataaaattgaacaggggattttagttgaggtgctgagtgcttacagtgcaccatcgcttccacttaatattctatatccgaaccgaagttatattccaaagcgactagaagtttttatgagttgggtgggggaagttttaaatcgcaaatgtatcgtcatcttttag

SEQ ID NO: 41360 - DNA, 1842 bp, Acinetobacter baumannii
atgagccagacaacacagaccgatatcattacgcttggtgatgttgccacaagacttcctagcttcattcccaaagtaccccatatcctaaatggtcttaaacaggcttatttaagaacttcaaatactccaacaggtttgggtattgcttttgaaaaagctgttaaaagaaatccgaaaggcacggcattattatttgaagatcaaagttattcttatgaagctttaaatgaatgggcaaaccagatttcccattactatctttctctcggagcgcgtaaaggggacgtcattgctgtaatgattgaaaaccgctctgagctgattgcaacaattgttggtttagccaaaattggtgtgacaattgcacttgtaaatacatctcaagtcggtaaggttctcgctcatagcatcaatcttgtaaaacctattgccgttattgctggtgaagaagtccgagctgctattgatgaaattcgtcaggacttaaatgtacctaaagaccgcttccactggttcgcagatcaggcaacacgtcaaaactcgggtacagcgcctgaaggctatgtcaatcttgcggaccaaattgatcaatttccaaaattcaatccgtctactacccgctctgtcactggtaacgatggtctgttctatatctacacatcaggtacaacaggtttaccaaaggcggttattttcaaacacagtcgctggacattagcatatggcacctatggacatatcttaaacttaggaacagatgacgtcatgtacgtgaccttaccgctttaccatgcaacaggcgtggtggtttgctggtgtggcgttatcgcgggcagtgcaacacttgcgattcgacgtaaatattcgactagcgcattctggaaagatgttcaaaaatttaatgcatctgccattgggtatgttggtgaactttgccgctacttgatggatgctcctgttaccgagcttgaccgcaaccatcgtgtaaccaaaatgattggtaatggtatgcgcccaaatatctgggacaagttcaaacaacgctttggtgttaaagaagtacttgagctttatgcatcgagtgaaggcaatgttggatttagtaatattttcaactttgacaatacggttggcttctctcctactccatatgccattatccagttcgataaagagaaaaacgagccaatacgcgataaaaatggctggtgccagaaagtaaaagcaggtgaagttggcctactcatagggaaaattaccagccgctcgccatttgatggttacaccgaccctgaaaagaacaagtctgtaatctggaaagatgtcttcaagaaaggcgattcttatttcaacacaggtgatttggtccgtgatatcggcttccgtcatgcacagttcgttgaccgtctaggtgatactttccgatggaaaggtgaaaacgtatcaacgactgaagttgaaaacatggtatgcgaatacgacaaaattgccgaagctgtcgtttatggggtagaaattccaaatactaatggccgtgccggtatggcagcgatcactctcgcagatggtgaagagctaaatgatgctgatttaaccgaaatggtgaccgtatttaagaaatgtttacctacctatgcagtacctgtatttttacgtgtacaaaaaaaggtcgaaacaacaggtacatttaaatatcagaagaataaactgaaggaagaagcgtttaatccaagcaaaacttctgaacgtttactcgctttattacctggtgcaagcagttattgtgatatcacaactgaaatttttgacaatattcaggcgtataaataccgtttttag

SEQ ID NO: 41361 - DNA, 3333 bp, Acinetobacter baumannii
atgaaacgtatgttgattaatgcaactcatgccgaagaagttcgcgttgcacttatcactggtaatcgtctttacgattttgatttagagaatcgtacccgagaacagaaaaaatccaatatctataaaggccatgtcacccgcgtagaaccatctttagaagctgtttttgttgaatatggcgcaggtcgtcaaggcttcttgtctatgcgtgaaattgcgaacagctattttcaggcagacccacgtcaaacttcaaacattcgtgaacttattactgaaggcacagagcttttagttcaggttgaaaaggaagaacgtggtaataagggtgcagcactttctacgtttatttcccttgcaggccgttatttagttcttatgccaaataacccgaaaggtggtggtattagccgtcaaatttcaggttcagtacgtgaagaattaaaagaaattttagcttctttaaatgtacctcgtggtatgagcgtgattgttcgtactgccggtattgggcgtactcaagaagaattacagctcgatttacaacacttacttgacctttgggcacaaatccaaggtacagcgagctcaggcccttctccgatgcttgttcatcaagaagcgggtgtagtaacacgtgcaattcgtgattacttacgtgatgacgttgctgaaatcttaattgatagcgaacaagcttataacgaagcatataactttgttaaagcagtgatgcctcgtcaattagacaaattaaaaacttatactttaaacgagccattgtttgctcattttggtattgaaagccaaattcaaactgcttatgaacgtgaagtaaaacttccttcgggcggttcaatcgtcattgaccagactgaagctttagtttcaatcgatattaactctgcgaaatcaactcgcggtcatgatgttgaagaaactgcactgaatactaaccttgaagcagcagaagaaattgctcgccaacttcgtttacgtgacattggcggtttagttgttatcgacttcatcgatatgactaaagaacgcaatcaacgtatggttgaagcaaaacttcgtgaagcaacacaaagcgatcgtgcccgtatccagttcggtcaattgtctcgttttggcttaatggaaatgagccgtcaacgcttacgcccatcgcttgaagaagcaactggttatgtatgccctcgctgtcatggtacaggcatggttcgtgacttacgttcgctttctctttcaattatgcgtaaagttgaagagattgcacttcgtgaacgtcatggtgaagttcaggttgaagttccagttgaaattgcagccttcttgcttaatgaaaaacgccatagtctggtgtatttagagcaaacttctggtgtacgtgtgactgtattaccacacccgcacttagaaactccacattacgaaattgcatataacccagatggctttgctccatctagctatgaacgtacagaagcaacccgttctagcgagaaagagttaggttatgagtcttctgaatggcatttagaagaagcagatcatggccatgctcatgtaactgctacagcttcaactcatgctgcggctcagaaaaaagcaaatcatgcaactcaacctgtagcacaaccttctgctcaaaaagcagcaagcccatgtgcatggttagaaaacctgtttgttcaaaaacaagcgcaaacagttgatcaatctcgttcagcacaaaatgctgctgctgcgattgagcaaatggtgaatacaggcgcagtaagccgcggacagttcggtcaagtagccgtacctgctgttgcagaagttgcgccagttcaatcaaataacgcttatatttcacagtcacctgtgaaacaagacgttcgtgaacatgttgaaaaagatgataaatctcagcaacaacgtcagaacaacaaaaagcgtaaacataaagagcaacgtgaacaacatcaccaatcacatgaacagcaacatcaagttcatgaagaagtggttcaattgtcacgccaagaacaacgtgagttaaaacgtcagcaaaaacgtcaacagcagcaagatcaacaacatcaaaataatgatgtacaacacactgaaaatgctgtgccacgtcgtgaccgtaataatcaacaacgtccaaaccgtccaaatcgccaccgcgatccaagtgtattaaatgaaaatcaaaatataccggttgttgttgatgaaaaacaaattaaggttgatgtgattgatgcacctaagcatgatgtcatgaacactgctttaatcatcaatgttgatcaaggtcaaagtgagattgtcgcacttacgcctgagcgtcgtcacgttgagcgagttgaaacgacttctactgaagttgctcaagagccaactccagctcctgttgtagccgagaaagctgctgtagttgaaaccaaagaagaagctcagccaagccaagaagctgctcagccacaaatcaaacgtgctagcaatgaccctcgtatgcgtcgtcgtcagcaacgtgaggctaaacacgctaaggcagctgcgccatctattgcgccatcgcaaattccaactttggcacaacacacaatcggtagtttaatccgtcatgtgtatggtgaagattgcaccgtattgattgaacaatttggtctagtcccaacgtttaatcgtgctttgcagaaatttgcagaacagtacgcaagtacgttagtagttgaagttactgctgaaacagaagagaaaaagccggtaactcgtgatgcagaacttccaagccacaaaccggctgaagaagcagaacctgcaccagtacttccgcttactccgccgcaagcaccagctccacgtgttgcaaatgacccgcgtgagcgccgtcgtttagcaaaacttgctgcggaacaagcatttgagcaagtgaaacaacaacattctgctcaagaagaagttgccactcctgctcctgtagcagaagaaaccattgctgctccagctgctgaaacacaagcaacagttgaaccagcacagcaaccgcttgaacttaatcagtcaactgaagtcgtacaacctgaagctgctcctgcagaggaaaaagctacagaagaaacagtagctgaagctcctgcggcaaaggaacctgcgccatcaaaagcagcaagcaaagcgaaagcagcggctgaagaaacagtagctccgactgaagcaacaactgatgccgaatcagaagacgttaaggcagataaggacaaaccgagtcgccctcgtcgccctcgtggccgtccgccaaaaaaagctaatcctgtagctgagtaa

SEQ ID NO: 41362 - DNA, 933 bp, Acinetobacter baumannii
atgaattctacacagcaatggcaaagtgtcacttggtttgaggtggatgagcatcaagcaggacaacgaatcgataatttcctgttttcacgtttaaagggtgtgccaaagagtcgaatttatcgtttgattcgtgaaggtcaggttcgcgtgaataaaaaacgtattaaagccgagaccaaacttgcaattggggaccagattcgtgttgcacctattcgctatgaacaaaaagatgaaactgctgttcctgtaagcgatagtgtggctcaaggtttattaagtcgtgtggtctatgaggatgaaggactattagttgtaaataaaccatcgggtattgctgtacatggtggtagtggcgtggcttatggtttgattgaggcactacgcgcagcaacaggtaaaaaatatttagaactgattcaccgtattgaccgcgatacttctggcctagttatgattagtaagaagcgtagcactttaaaactgctacaagatatgttgcgtgaacacaaaattcgtaagacctatgcagcgattgtaaaaggtcaggtgagtcttgataaacagctcattgatgctcctttatttcgttatgagttagccaatggcgaacgtcgtgtacgtgtatctaaagaaggtaagccaagtaaaaccgaatgggtagttgcagagcgctttaaaaatgccactttagttcatgcatctcctttatcagggcgtacccatcaaattcgtgtacatggtttaagtattggacatccgttggtgggcgatgataaatatgggcacaacactgcatatacggggcctgaagcacgccgtttgtgtttacatgccatgcgtttggatattccgggttatccaacgattgaagctccgttgccagaagacatgacccagttattagaggctttgagagtagcaaaatga

SEQ ID NO: 41363 - DNA, 675 bp, Acinetobacter baumannii
atgagtctgaaaaccgaattagtgatttttgactgggatggtactttatataattctgttggtcagattgttgcaagtttacagcatgcggcagaagagcataagttaactctgactgatgaagccgcaaagagtattatcggtttaggtttgccggaagtgatgcagaccttatttccagaagtacctgatttgcatgattcgattttaaaagcatatggcgatcactatattgccaactcgacaaatgatgcatggtttgaaggtatttctgaactacttcatgacttaaaagctcaaggtttaaaacttgcagttgcgacgggtaaaaaccgacgtggattagaccgtgtgattgcaaaaacacagagtactcatctgtttgatgttactcgagcagccaatgaaacccgttcaaaaccagacccgctcatgttacaagaaatcttgactgtaactggagtaagtgtcgaacaggcagttatgattggtgatagtagttatgaccttgaaatggctcagcgtttaggtatgcctcgtattggggtgggctatggagtgcactcggtcgaagttctacaacagttccagcctttaaccattgctaaagatgtatctgagctgcacaactttttaagagagtatgcaaagttatctactgtagacgtagcgtaa

SEQ ID NO: 41364 - DNA, 696 bp, Acinetobacter baumannii
atgagccgctctattcgtctattaaatcttttacagcaactccgtgaatctcgttatcccgttactgctcaagtcttggctgaacgcttgggaattagtattcgcagcatttaccgtgatattgatagtttacgtgctcaaggtgtgagaatagatgcatcggcaggtttggggtttcagcttaaagaagacattttattaccaccggttacttttaatgagaatgaagccgaggctctatttttagctttagagtggttgaaagacgttccagatcaggcaatgaaatcggcagccgtttcaatctattccaaactttatgcggttttaccagagcaccggaaatatttgatcgatgatatgacgctaggtgttacacattactggcatccggttgatgaagctttagtagaacaagtacgtttagcgattcgtaaacaagtaaagatcaaagtcgattattgcgatgaacacaagcgtataagtcaacgttctctttggccttttgctttagggtatttacatgacaaagttgtacttgctgcttggtgtgaattacggcaggcatttcgccattttcggatagatcgtattcataacttgcaaatgagtgaggaaatatatcctgaatttaaaaaacatctgtttcaaagatggtggaaacaagaaatgcaaaggactactgacaaaaactga

SEQ ID NO: 41365 - DNA, 534 bp, Acinetobacter baumannii
atgagtcttaaactttatactaacaatgaatcgcgtggtgtcgttatagactggcttttggttgaacttggtgtggaatgtgaacgtattgaagtagcataccgaaccgagatgaaatcaccagaatatttaaagcttaacccgtttgggaaagtgcctgtattggtagatggcgatgtcgttatttatgaattaggtgcaatttgtgcatatctggcagacaaatttagtgacaaaggtttggcacctgctttagatgatccgaaacatggtttgtactatcgttggctctttatgatggcaggtccttgggaagctgctggtgtcaatcaagctttagttcaaggattgagtgaagcaaatccgtatgtatgtggtgaacaatttaccgccgcagatgtaagtgttggagccatgctattatggcaattaaaaatgaaaacgattgaatcgcacccagctattgcacgttatgttgaaacgatcaaacagcgcgaaggcctaaaacaaagcagtatgggccaactgttgtaa

SEQ ID NO: 41366 - DNA, 678 bp, Acinetobacter baumannii
atggttggactatttcagcatttaggacgtagtgtacaaaaccgcccacacttctttattgctttaatttttggagtggttgttgcaagtttattggcatggctcacttcatggaaatggtctaccattttattagcaagctggaatggctcaatcagtttatatttactccatgtctggaaactgatgagaagtgccgaccattcacaaatgcaacagcaagccaaaaaacaggacgaaagtaaatgggtcattatgctcattgttttattggctatcacaatgagtctagttgcgattttggtacaactttcccagctcccttctgggcattatgaaaagttaggacatgtagcgttagctttactcaccattatttcagcatggcttttcatgcatactgttttcgctttgcattatgcccatgacttttatatggctttatccagaaatgaagagaacggtgggttagacttcccgggtactgaacatccgacctatcctgacttcttatattttagctatattattggcacctcagcacaaaccgccgatgtttcaattaccaacaaacatatgcgtcttttaaacttatttcatgctgtattatcttttggcttcaacacgaccattttagcgatttgtattaacgttgctgctggctttcttaccaattaa

SEQ ID NO: 41367 - DNA, 900 bp, Acinetobacter baumannii
atggaattacgccatcttcgatatttcatcacagttgctgaagaattaaattttagtaaggccgctctcaaactctatactgctcaaccctcccttagccaacaaattaaagatttagaagaagatgtcggggtacgacttttaaaccgcacaaaacgtaaagttgagttaacagaagaaggtgaagtatttttagagcatgcccgtttaacgcttgctcaagctgataaagcagtagcgatggcccgccaagtctcgaaggctaaacaacaattattacgtatcggtttcgtccccatcgcagaaatgaaaatttttccatacgtacttccaaatctgcgcttacaacaccctgacctcaccattgaattatcaagtttaaataacgctgagcaactcaaagcattaaaaagaggtgaactcgacatcacgtttacccgtgataatactgaaaatgatgaaatccaaagccaatttgtcttaacagaacctttaatttttttattaccaagaaaccatccacttgcgaaatatgaccgtattccagtcaaagctttgcatggtattgattttattattccggcagctgaacaatctaatacactacacaatacaattttagagtttactaaaactcatggtattgacctcaatattgtacaaaaggccgatagcattttacttaatataaactctattggttcaggcttaggttgtactattttacctgcctatgttgcgcctttaggggtttctaacactgtagttcgccctctagatgtcgaattaccttctttagatttatttgttagttatcgtaaaaatacagagtcagtcggtgtaaaaagatttattgatcaactcaacaaagtatttcatcttgataaaaatctagattaa

SEQ ID NO: 41368 - DNA, 1053 bp, Acinetobacter baumannii
atgaaagacaagccgacattaacttatcaattgccgactcagtcctgttggacgcatacatggataaaaccgcctttttgtcatcctgaactgggccatgaaaatgacacccgtttttataatcagcagcctagatcgcctgcacgaggatcgaaagagttattgcgttggttagtcactcgtgagtcttatacttggaatgttgatattcagaatgaatatgatgttcgtattaatacaccaattgctttaccacaaaaccgtccacatgcggatttagatgattggcaagtttggtttgtagggcatgctacggtactcattcaaattggaccttataactttattaccgatccggtatggtgtgactacgcaagtcctttacatggtcgtggtccacgtcgtgtatgcccagcaggttttgctttagagcagttacctaccattcacggggtattgttgagccataaccattatgaccacatggatttagcaacgcttgagtggcttcataagaagtttgctatgccgatttatacagggcttggcaacggattttacttacctaaagaattccatgtaattgaaatggattggtggcaggaaattccttatcacgaattaagaattgtttatacacctgctcagcatggctcggggcggggtttacgtgaccaaaataaggcactttggggcggtttttcggttttggcgaaaacaggacattgtttttttgcgggtgataccggttatgcgggccacttcaaacaaattcatacgcgctatggcgcgccgcgtgtggccttacttccaatcggagcttatgaaccccgtaaattaatgagctatgttcatatgaatccgcaagatgcagttcatgcacatttagatttacaagcacatcggtctgtggcaattcactatcgaacttttcagttaacggatgaggggcgtgaagatcctgaacatgcattagctcaagccattaaagcttcatcaaagcttgctaatcctttttattgcattcgagaagggcataaattgactgtctaa

SEQ ID NO: 41369 - DNA, 2157 bp, Acinetobacter baumannii
atgtcaaacgaatcaaaatgtcctttttcaggtcataactcaaaaccgcaagtaacagtcggtggtggtacggctaatttacactggtggccaaatcaattacgtgttgacttactcaatcaacattcagaacgctctaatccactcggtaaagattttaattaccgtcaagaatttaaaaaactcgactactacgcacttaaagccgatatcaaaaatgtattaaccgattcccaagactggtggccagccgactggggaaattatacgggcttatttatccgtttagcgtggcatgctgccggtacatatcgtatgggcgatggccgtggtggtgccggtcgtggtcaacaacgttttgctccattaaatagttggcctgacaatgcaagtttagataaagcacgccgtttactatggccagttaaacaaaaatacggtcaaaaaatatcttgggccgatttatttattcttgccgggaacatcgcacttgagtcttctggtttccgtacctttggttttggtgccggtcgtgaagatgtttgggaaccagacaacgatgtaaactggggtgatgaaaaagaatggttagctcatcgtaactctgaagcattggcgggcagtaatcttgctgcaaccgaaatgggcctaatttatgtgaaccctgaaggaccacaagcgagtggtgacccacgatcagcagcaccgtttattcgtgccactttcggcaacatggcaatggatgatgaagaaattgttgccttgattgcaggcggtcatactttaggtaaaactcacggcgctgcctctgctgaccatgtacaagcagacccggaaggtgcaccaattgaacaaatgggctttggttgggcaaacagctatggcacaggtgtcggtaaagatgcgatcacttcaggtttagaagttatttggtcacaaacgccaacacaatggagcaattacttctttgaaaaccttttcaaatacgaatgggtacaagaacgttcacctgctggcgcaattcaatgggtagcagcagatgctgaagccattattccagatcctttcgacccatcaattaaacgtaagccaacgatgcttactacagatttgaccctacgttttgaccctgagttcgaaaagatctctcgtcgtttcctcaacgatccacaagcctttgccaatgcttttgctcgtgcttggtttaaattaactcaccgtgatatgggaccaaaagcacgttatttaggtccagaagttcctgctgaagatttaatttggcaagatccattacctgctgctagcgctacaccatcttctgcaagcattgctgatgcaaaagcaaaaatcgttgctctagggttatctgctggtgagttggtttcccttgcatgggcatctgcatcaacattccgtggtggagataaacgtggtggtgcaaacggtgcacgtattgctttatcaccacaacgtgagtgggaagtaaacaaaaaagctgttgagactttaactaaaattgaagagctcaaggcatcaacccaattgtcattggcggatttaatcgtgttagctggtaacgttggtgtagaacaagctgctcaagcagcaggtttcaatattaccgttccgtttgcccctggtcgtgttgacgcattacaaagtcaaaccgatgttgaatcattccaattactgctcggtcttgctgacggtttcagaaattggaaaaaacagggagtcaacacaccagctgaagtcttattaattgataaagcacaacaactgactttgactgcaccagagttaactgcattgattggtggtttacgtgtactaggcactaactgggatggttctcaacatggtgtcttcactcagcaagttggtgtactcagcacagacttcttcacaaacttactcgacatgtcgaatgtatgggcacctgttgattcaacaagtgaagtatttgaaggtaaagaccgtaaatcaggcacagtgaaatttaccgcaacacgtaatgatttagtctttggttcgaattctatcttacgtgcattagccgaagtttatgctcaggcggatggtaaagaaaaatttgttcaagactttgttgctgcatggactaaagtcatgaatcttgaccgttttgacttagcttaa

SEQ ID NO: 41370 - DNA, 2295 bp, Acinetobacter baumannii
atgtcaaacatgcaactcgacactctaagacgcattgtccaagagattaatgcgtccgtgagtttgcatgaatcgttagacattatggtcaatcaggttgctgaggccatgaaagtggatgtttgctctatttatttactcgatgaacgcaatcaacgttatgtattgatggcctcaaaaggcttaaatccagaatctgttgggcatgtttcattgcagttaggtgaaggcttggtgggtctggttgggcaacgtgaagaaattgttaaccttgacaatgcgccaaagcacgaacgctttttgtatttacctgaaacgggcgaagaaatttataactcattccttggcgtacccgtcatgtatcgccgtaaggttatgggtgttttagttgtccaaaatcggcttcctcaagattttagtgaagcggccgaatcatttttagtcaccttatgtgcacagctctcaggtgttattgcacatgcgcatgcggttggaaatattgacgtatttcgtaagccaagcaatgggcctgcctataagaccttccaaggcgtttccggtgcaggtggggtggctttaggtcgcgctattattttatatccgcctgccgacttaggttcagtacctgaccgtgaagcagaagatatcagcgatgaactccgcattttagatcaagctatttcatcggtacgttcagagattcgttctttagatgaaaaaatgcatgactcgctcatggcagaagaacgggctttgtttagcgtattcttaagaatgctagatgaaaatgccttacctgcagaaattaaagaactgatccgtgatgggcattgggcacaaggtgcggtgcgccgtgtaattgaaaaacacactgccctatttgcacaaatggaggacgattatcttcgtgaacgcgtttctgaccttaaagacttagggcgacgtattctagcgtgcttacaagaagaagattcgagccaccgtgaacttagcccagacagtattttaattggtgaagaaattagtaccgcagcgctagtagaattaccagtagataatatcgcagcgattgtgacgtcagaaggcgcagccaattcacatatggtgattgttgcccgagcattaggtattccaacggttgtcggcgtaaccgaactgcctgtaaatacacttgatgatgcagaaatgattgtggatgcctatcagggccgtgtttttgtaaaccctccacgtcgtttgcgtcaacgttataaagaaattcaaaaagaagacgagcaaatcgcaaaagatcttaaacaatatgagaccaaagaagcgattacaccagacggtgtctctgttcaactgtttgtgaacacaggcctcatgattgatgtagtccgcggtgtacaacgtggcgctcaaggtgtgggtttgtaccgtagtgaaattccattcatgttacgggaacgtttcccgggtgaagaagaacaacgtgccatctatcgccaacagttaagccactttgccaataagccagtggtcatgcgtaccctagatattggtgccgataaagacttaccttacttcagtattgaagaagagaactcggcattagggtggcgcggtattcgtttcacgctcgaccatccggagattttctcagcacaaatccgggcaatgcttaaagccagtattggtttaaataatttgcatatcctattgccaatggtaacgacagtaagtgaagtcgaagaagtactttatttacttgagcgtgactggattgcagtgcaagaagaagaacaagttaaaattaccaaaccaaaaatcgggattatggttgaggtaccgagtgtactgctacaaattgatgagttcgccgaacttgtcgatttcttctcggttggttcaaatgacttaactcaatacttacttgctgtggaccgtaataatccgcatgtcgcaaacgtctattcacacttccatccatctattttgcgggctttaactcgactcgtgaaggaatgccataaataccaaaaaccggtaagtatttgtggtgagatggcgggtgatccgttatcggcaatcttactgatggccatgggcttcaataccctttcgatgagttcaagtaacatcttgcgcgtccgaaaagcaatttgccatgtcccaatgtcagatgcccaaaagctgcttgatgatgtcatgaaaatgaataatccgcttattgtaaaaagctggcttgagtactactttaaaactcacggtctagccgatatggttaaatctaaccgccttgtaagcgtataa

SEQ ID NO: 41371 - DNA, 486 bp, Acinetobacter baumannii
atgatcgactcagaaggtttccgacccaatgtcgggatcattttggcaaacgatgatggacaggttttatgggcaaagcgcattggtcacaatgcttggcaatttccacaaggaggcatccagtttggagaaacccctgaacaggcactttttcgagaactgagagaagaaatcggcttattgcccgagcatgtccagattattgcgcaaaccaaaggatggctgcgttatcgtttgccacatcggtatattcggtcagactctgaccccgtatgtatcggacagaaacagaaatggtttttactgaagttaactgcgcctgcaaaaaacattcagttaaacctcgccgacccgcctgaattcgatgaatggcagtgggttagctattggtatcctcttggtcaagtggtgaacttcaaacgtgatgtttaccgtaaagccatggtggagttgtgtacacagttgccagtgcaacaattaccctaa

SEQ ID NO: 41372 - DNA, 651 bp, Acinetobacter baumannii
atgaaactggcgttgtttgatttagaccataccttgttaaataccgattcagaccactcgtggggtgaatttttagtcaatgaaggtttggttgatccgattcatcatcgtcagatgaatgataaattttatgaagactacaaagcagggcaactagatccatatgcttataatgagtttgttttcggctttctaacaaagcatgacaataactacttaactgagcttcatcagttgtttatggaaaaagtgattcgtcctcaaatgcgaccaaaaggttttgatgcaatcaaaaaacatcaagatttaggccataccattgtaggtattacagcaacaagtgattttattactgcgccgattttccgtgaatttggaattactgaaatcttagcaactaacgccgaggttgctgatggtaaatatacaggtaaagtggcgggtttagcgtgttatcaaaagggcaaacttgcacgtcttgaggcatggctggacggtcgtagcgtttctgagtcttgggcttattcagattcaattaatgaccgttttttacttgaatatgcaacgcatgcgattgcagttaaccctgatgatcgtcttgagaaactggctcaagagcacaactgggaaattcaggactggtcgatttaa

SEQ ID NO: 41373 - DNA, 861 bp, Acinetobacter baumannii
atgaatcttgcagcctttgaagcttttgtaaaagttatggaaacaggttcgatctctgtggctgcggatcaactatttattacccaacctgctgtcaccaaacgtattcatagcctagaagagtactttggcgtaaagttatttgaatcggcaggccgtggggttcaagcaactcatgctgcgcattcattattaccaaaagttaaaagctggttaaatgaacttcgagatattcaccacacgctaagtcatgagcaaacccaaatacaaggacgtttaaaaatcgggacgagtcatcacatcggtttgcatcacttgcctgctccgcttaaacactttgttcagcagtttcctcaagtcacgctagacgtacattttgttgattccgaacaagcacacgaacaggtacttgctggcgatttagagttagcttttttaacactcccgccctcaggtgatgagcgtcttaactatattacgatctggaatgatcctttagtttttgtagctgctccatttcatccattggctcaaaaaaagaatttaaccttacaagatttaattgaatatccaagtttgctgcctgccgcacagacttatacagctcaaatcaccttggctgagtttgaaaaacaaggccttaaaccgaaaattaccatgagcaataacccactagagtcaattcgtatgttggtctctattggtttaggttggtcagttttaccaaaaactctgctgaatcaagatatgcagcagcttgatttaaatgtcgagatgaaccgtcagctaggtatggtatggcatcctgcacgtactcaatctagagccatgcaggaactaattaaaatgatgcaggagtag

SEQ ID NO: 41374 - DNA, 255 bp, Acinetobacter baumannii
atggttatggctaatattcaaaaattcgttgttaataatcaacgtacattaaagaaaaccttaagttactacataatgcatattacggtagccatgttagttgcctactttgtaacgggtaatatttggatggctttaacattaagtatgttagaaccaacagtacaagcttttgcatttttctttcatgaaaaagtatgggcagcaaaagaccgccgtatatcagctttaagcgaaaacgagacgactgcttag

SEQ ID NO: 41375 - DNA, 1530 bp, Acinetobacter baumannii
atgattcctaaaagttttctaatttataaaaatgataaattagatttatgtaaaactctggctataatcgaagaaagattagaattacccagtccaatggagcaagacgacatggcaggcaaaactttatatgacaaattgtgggatgaccacgtagttactcagcgtgatgatggttcgtgcttactttatatcgaccgtcatttattgcatgaagtaacaagtccacaagcatttgaaggtttgcaacttgctggtcgtcaaccatggcgtttaagtgcaaacgtagctaccccagaccacaacgttccaacctctaaaaaagaacgtgatcagggcatcgctggtattgaagatgatacatctcgtattcaggttcagaccttagatgataactgtaaggcatttaatatcgttgaattcggtattaatgatattcgccaaggtattgtgcatgttgttggtcctgaacaaggcttaactttaccgggtatgactgtggtgtgtggtgactcacatacagcgactcacggtgctttcggttgcttggcacatggtattgggacatctgaggttgaacatgtattagcaacacaatgtttggttcagaaaaaatctaaaaacatgttagttcgcgtcgatggcgtattgggtaaaggtgtaacaccaaaagatgtagtgttagccattatcggtaaaattggtaccgctggcggtacgggctatgcaatcgaatttggtggtcaggtattccgtgatatgtcgattgaaggacgtatgacggtatgtaacatggcgattgaagcgggtgcgcgtgtaggtatggttgctgttgatgaaaaaaccattgaatacgtaaaaggccgtagctatgcaccaaaaggcgaacaatgggatcaagcagttgcttactggaacacattgcattcagacgatgatgctgtgtttgatgcagttgttgaattaaatggtgcagagattgaaccacaagtgtcttggggtacttcacctgagatggttattcctgtctcgaaagctgtaccaactttagaacaagcgaaagatgacgtacaacgcaatgactggacacgtgcttatcagtatatgggcttaaatgcaggtcaggcattagctgatattcaacttgatcgtgtctttatcggttcttgtacgaattcacgtattgaagatattcgtgctgctgctgaagtagttaaaggtcgtaaagtggcacctagcattaagcaagccatgattgttccgggttctggtttagttaaacaacaggcagaaaaagaaggtttggataaaattttcttggaagctggctttgagtggcgtgagccgggttgctcaatgtgcttggcaatgaatgcagacaagttacaaccaggtgagcattgtgcatcgacgtctaatcgtaactttgaaggccgtcagggtaatggcggtcgcactcacttggtcagtccggcaatggccgcagcggctgcgattgcaggtcattttgttgacgttcgttcattttaa

SEQ ID NO: 41376 - DNA, 648 bp, Acinetobacter baumannii
atgaaagcttatacagttgaacaaggtatcgttgcaccattagatcgtgccaatgttgatacagatttaattattccaaaacagtttttaaaatcgattaaacgtactgggtttggcgacaacttatttgacgaacttcgttatttagacgaaggctatccgggacaagacaattcagtacgtccaaaaaatccggatttcgttttaaatcagcctcgctatcaaggtgcaaccgttttaattgctcgtactaactttggttgtggttcaagccgtgagcatgcaccttgggcattaaacgaatatggtttccgtaccgttattgcgccaagctttgctgatattttctttaataactgttttaaaaacggaatgttgccagttattttgcctgaagacattgttgatcagttatttaaggaatgtgctgcgcaagaaggatatcaattaacaattgatttggctgcgcaagaagttcgtacaccaactggcgaagcatttaaattcgaagtggatccatttcgtaagcattgcttgttaaatggtttggatgatattggcttgacacttcaaaatgcggacgcaattcgcgcttatgaagaaaaaaccaaacaggttcgtccttgggtattccaagagataaattaa

SEQ ID NO: 41377 - DNA, 591 bp, Acinetobacter baumannii
atgaagaggaacgttactcatagctttttgttgagcctgtgcgcgataacactaagtgcttgtcagagcacttacaatgtagtggatactgttcgtattaagcaggctgaacaagaaaatttggggcagaatgcagcaatatattgttcgggcgcaaaaagttgcgaatttgaacggctaaatgatattactgttgttgatgcacagacacgtcgtattagtaatcaggcaattcatcaaggaattgtgagattaaatggttcggtgttaagtcaaagcaatagtttgtatctatctgtgcctgccaaacaatatgaagtggtgattcgttactatccgatttctccagatcgggctgaaacgattcatgttattcaccaattcaaagctaaccatcgctatatgtttaaaatgtaccgagacaaatctaaccgttcgggtagtttgctaaatgtttctgtaccagatccattatgtgttgacttagagcaggatgggcgggtaattcgccgtttttgtcgaccatttgatgtcaccacaggactaggtgaatttctcgaacagaaaaaactaacaccacggcagtcgtaa

SEQ ID NO: 41378 - DNA, 1080 bp, Acinetobacter baumannii
atgtctaaacagattttaattttggctggcgatgggattggtcctgaaattgttggggcagcagaaaaagtattaaataaagtaaatgaaaaatttaatttgtcgttgacttgggaacatggcttgttaggtggtgcagcgattgatgctcatggagaaccgtacccagcagtaacaagtgaacaagcaaaaaaagctgatgccattttattaggtgctgttggcggaccaaagtgggacactattgaacgttctatccgtcctgaacgcggtcttttaaaaattcgtagtgaacttaacttatttgctaatttgcgtccagcgatcttatatccacaattagctgatgcttctagcttaaaacctgagatagttgctggtttagatattttgatcgttcgtgaattgactggtggtatctattttggtcaaccacgtggtattcgtgaactcgaaaatggtgaaaaacagggctataacactgacgtttattctgaaagcgaaattaagcgtattgcaaaagttgcttttgaacttgcaggattacgtggcggtaaagtgtgttctgtagataaagccaatgttttagaagtaacagagctttggaagcaaaccgtcacagatttacagcaagccaactatccaaatattcagctttcacatatgtatgtggataatgctgccatgcagcttgtacgtgcgcctaaacagtttgacgtaatcgtgacaggtaacttgtttggcgatatcttgtctgatgaagcagcaatgcttaccggctcaattggtatgttgccatcggcttctttagatgaaaatggtaaaggcatgtatgaaccttgtcatggttcagcgcctgatattgcagggcaaaacgttgcaaacccgttggcaaccattctttcagttgcgatgatgcttcgttataccttccgtgaagaagctgctgctaaagcaattgaagatgcagtagggcaagtacttgatcaaggtttacgtacagccgatattatgtctgaaggcatgactaaagttggtacagccgagatgggtgaagcagttgttgctgctcttgcttaa

SEQ ID NO: 41379 - DNA, 408 bp, Acinetobacter baumannii
atgaatatatttaccttatgtcaaatgagtttgctttcattcatgctgttaaatattaatggctgtgcgagtcatccacgccaatctgtagatttgcaagaatatttaaaaaattttataggcaaatcatctacaacgattcagcaagatctcaacttacggagtcttggctttcaagtcgcccgcacaccacaaaaaacttctgatcaacttatttatacgattttaagacccttaagcatcccaattccaatggtgagtaatgtcgatatgagaggtggttctgttcccatacaatcaggtaatttgagcggcaactcttatgatattaactttaattgcaaggttatttttaagctcaaaaatgacattgccgaatctattcaatacgaaggtaaagcttgctaa

SEQ ID NO: 41380 - DNA, 369 bp, Acinetobacter baumannii
atgaaaaaaatagtttttgcctttttgtgtttcggaataaccacggtctatgctgataactgtgatagtgctcgtaatacttatgatgatatttactgtaccaataaaatctatgcgagtgctgatgcagacctgaataagaattatcaggcattaagagcgaaattaaatacagcacaaagaaatacgcttaagaagtcgcagcttgcttggatacgccaacgtgatgctgaatgtacagattctaatagaaatagcgtagacgtgcagtgtcgtttacagacaacgcaagaaagaaaccattggctgcaagaaagattgcgtgaatgccaaacggtgggatgtaaaaccagtcgattaagtgaataa

SEQ ID NO: 41381 - DNA, 222 bp, Acinetobacter baumannii
atggccaataaagaggaactcatagagttcgaaggcgttgtcaccgaaacgcttcctaatacgatgttccgtgtacgtcttgaaaacggtcacgaagttattgcacacatttctggtaaaatgcgtaaacactatattcgtattcttactggcgacagtgtgaaagtcgaaatgactccatatgacttaaccaaaggtcgtattacgtaccgtgctcgctaa

SEQ ID NO: 41382 - DNA, 1011 bp, Acinetobacter baumannii
gtgggtcagctaacagatgcatcagttgtattacgttttggctatcaagcaattcgtcgtgcaggattgccaacagaagaaatattaactaaagcgggagtcgctttaaatcaggtcgatacaaacgcacgtactccgttaagtgcgcagtatgccttttggactgctgctcaggaagtcagtaaagatccagacatcggtttgcatttaggtgagcatttacctttgtaccgtggtcaggtgattgaacatttatttattagtagtgaaacttttggtgaagggcttaagcgagctttggcttaccagcgactcattagtgatgcttttgatgcaaaactggtggttgaagatggacgctgctatttgaccaatggtgagcaggtaggggcagacaaccttgttaatcgtcatttttcagaatgtgcgatttcaggtgtgctcagattcttcaaatttattaccgaaggccagtttcatccgatcttcattgattttaatttcagtgaaggtgcttctgaagatgaatacttccgtgtctatggctgtccggtaagcttagggcagaaagaaacacggctatattttgaccctgccattttagattttcagctttggcaggcagagcctgaattacttcaattgcatgaacaattggcgattgaaaagttacaagaacttgcccgttatgatttagtgggtgaggttcgtcgtgcgattggttcgacacttgaaagtggagaaacgacgctagaaaccgtagcggcacaattaaatattacgccgcgtcgtttacggacgcagttaagtgaagcaaataccagcttccagcaaatactttctgactaccgttgtcgtttagctaaaaaacttttagctaacactaatgagagtgttgagcgtattgtgtatttaacaggtttttctgaaccgagtacattctaccgcgcgtttaagcgctggactaacgaaacaccggttgagtaccgtaagcgtaagcaacatcgttag

SEQ ID NO: 41383 - DNA, 798 bp, Acinetobacter baumannii
atgcaacgttatgcggtcggtattgaatttagtggtattcaatatcgaggttggcaaacacaacagccaggcgttgccagcgttcaggaaactatagagcgtgtactcagcaaaatcgcggatgaaccgatcacacttcacggtgcaggtcgaacagatgcaggagtacacgcaacaaatatggtggcccattttgacaccaatgcaattcgtccagagcgtggatggatcatgggagcaaatagccaacttcctaaggatatttcaattcagtggattaaacagatggatgaagagttccatgcacgttttaaagccactgctcgtcgctaccgctatgttgtatataacgctccacatcgccctgcacttttacataaacaagtcacgcatatttatcaaaaattagacgtgcaaaaaatgattaaagctgccagcaaatttgaaggtacgcataactttgaaaccttccgtgcagcagcctgccagtcaaatcaacctgtacgacatgtaaagcattgccgtttgtttgaacatggacgttatttggttttagatattcaagctgatggctttttacatcatatggttcgaaacattatgggttgcttacttgaaattgggcaaggcatgtatgaaatcgaccatattgatacaatgttcgcagccgaagatcgaaaggcagcaggaattaccgccccacctgatggtctctattttattcaatgttattatcccgagcagtttgacttaccacaaccaccgctcgggccacattggttaaacctacctgagtag

SEQ ID NO: 41384 - DNA, 948 bp, Acinetobacter baumannii
atgggtggtacttttggttgcattggtgaacctttagctcctatgccttatgaccaattcctacctcaacttgagaaagtgattcccccacacttaacagttgattgctttgctgcgcccaatattgtcgatagcagtgcatgtacagcacctgactggttacgcttaattcaacgcatacaacaactacaactagaaggctatcagcattttgttgtgattcatggtacagatacgctcagttatgcagctgcgactttagctcgctttttagggcaaagctgtcatattgtgattactggtagccaatacccgttactcaatattcaaggtgataacacccgtgaatttactgatgcaattgaaaacttatatcttgcattagagcaggtcattgcacttccggttggtgcttatctcgctttccaccatcaagtatttcacgcacaaactgcattaaaaacgcataccactgaacttgatgcattttcagggttaagtagtaacgttgagtttacgcctcagcaaaatgaattgatcgtacaagatgctcaaattgaaaaagctgcttcctttcagattttaaactggatgatgcaaccgattgcaacacagcatttagtacaacaattacgtcacttacttcctaccccaccacactttttagtgttgcaaggttttggcacaggtaatatcgccgtaaacgatgaattcttagcaacattagatgaactctatgctcgtggatgtgtaccaattttggcgacacaagtcacttttgggggtattgaccaacgttatgcaattagtgcttgggccaaaactgcaaaaattgccattaatgatgcccatagccatgcagatctctatgcaaaagcacttcaaatctatttaaaatacccaaccccagaacaatggttgaaccattggaatgaaaatctgtattaa

SEQ ID NO: 41385 - DNA, 1260 bp, Acinetobacter baumannii
atgttatatgtgattccgtttatcatattactcgtaatcgccgttattttaaaaaaacgcgagaatagtcaaaaacaagaggccacttccccaaaaaatataaatagaaaatccggcaaaaaagcgagtgctaaatcaagcaaaagttcgcgtgaaaaaaccaaagccaaggtcattgaggaaaatactcctgctatccctcaaagtaatcctgtaccggaagctttacgacacaatatccaacagctcattcaagaaaaacagttttcagcagctgaagctcaagtcaatcaggcgctaaaaaaagataatactcaacatgaactgtatttattacttcttgaaattcatattgctcagaaagatgaatttgcaattcaacagttgattagccatattcgtagcttgggtttaaatgaaatagcagctcaagcagaaattcgacaaaaagaatatgaatcatccagacaacctgatgctattgatttccctcaagctcaaacatatgaagaaccgaaaaacacagatacaacggctcagttcgatgaattaacaacaagttcttccgaggcttcttttgatgacctacagaaagactatacgccggtaaaacaagaacctgctgttgaaattgaacctttagagtttaacttttcattcgaacagactttggctacggaaaataccaaccaaccggcacaacaacctgagttatcatccactcaagaaacaaatgagctggccgatttagagttttcttttgacttggcacctctgcatggaactgaggaaaaatctcaaccagtagagataaaagcagaccaagaaaatagcatcaatgcattagattttaaccttgacttaaaaccttcaagttcggagacgaaatctgttgaacaagctccatcattagatgaaattaagctcatagaacaaaccccattagaagcgacttctatcgcacctcttgagttttcattagatgagcctgccttagttacagcgccagagattgaaattcaaaataatgaggtagtaaacgaaagggttactcaaacccaaatagaggatccgcttttagaagcttttccagaattaaaacaaataaatgaaaatgaactcgatttaaaattagctgaacaatacattaagtttggagcgaaccaagcagcgcgtaatttactacagagtgatgagcaaaaattcaacacagaacaacaacaacatgcgaaaaacctacttaatcgcatagcttcttag

SEQ ID NO: 41386 - DNA, 1365 bp, Acinetobacter baumannii
atgactgcatataacaaattaaaaattgccattttcaccattatgtcttcgccttctctttatgcgattacattagatcctattcaaattcaatctgcacctggggaattactttatgcagaaatgaattttcagcaagcagatcctaataccccattgcaagtcagtttggccactcaagatgatctcaatggtttgggagtaactcatcaacctccgggcaacctaaacttttatacacgccaaaatggtcagggttctggcgttattgtgattacctcatcgcgtcctattatcgatcctgaactgaatattgtcgtaaaagtcagtgaaggtaacgcaacccgtcttcaacatattaaaaccgttttaaagccatcgcctataaaaaaagccgccattaacgaaagtccactttcaccgcaatttatcgtaaatgaaaaagatatcgcactaaatttacctgaaagtactcagtacacacctactgaaaatacatcaaacgtggctgaaaccacaggtaatgaacataatctaaatattagcactggtactgctccagctttgaatagttctagccctgctcctgtggctccttttaccgaaaaaccttccactcaaacacctcagccaactatagctacaatgaataccgaatcatcggctgtagagaaacaaccctcgacttcactcaaatcaagtggtggcaatcaaacaactaccgtcaaaaaagcagcgcaatctaaaactgctcaacaaaaaaatgtattaagtaaaaatgcgtcgaaaaagcaaaaaattagcacttataaaggcccggcacctacaggtaaatatgtcgtacaacgtaacgagtctttatggagtattgccaatcgtattgcagcacagaccaaacaacctgtagctaaggtcatgcgagatatccaagctcaaaaccgacatgcgtttattcaaggtgatgtaaaccgtttacgtcagggaagttcgctaaacttaacaacaaatgcaactaaagcttcccatttaaaacctaaatcgagtgaagctcacttggcaaaaccctcttctggcagagctaaatatcgtttacaacaagctgaaatgagcattgtggcagagaacagcccaaattctgctcatggaagtgcaaaaaagagcacacaacaaagtcaaaacaatactgagttagcagtaaaagttatgacaacacgtaaaaaaaccgttacattacaaaggaatgtaaccaaactaaatcaaactttaagtttaaaagaccaacgtattcaactcttgaatgcgcgtttggcagagttacaacagcaattacaggcacagcaacaaactcacaagcaaaaacattaa

SEQ ID NO: 41387 - DNA, 1119 bp, Acinetobacter baumannii
atgaaagtaggtctggtcggttggcgcgggatggtcggttccgtccttatgcaacgtatggttgaagagaatgattttgctcatattgagccattctacttctctaccagtaatgcaggtggtgaagctccttcatttggtggtaagactgccccagcacttatggaagctacagacattaccagtctgaagcaaatggatgtcattattacctgtcaaggtggtgactacacgtctgaagttttcccaaagttaaaagcaactggttgggatggctactggattgatgcagcatctactttacgtatgactgatgatgcaatcatcgttcttgatccggttaaccttaatgtaattaaagacggcttagcgaaaggtactaaaactttcgtgggtggtaactgtacagtatcactcatgttgatgggtgtgggcgcacttttccaaaataatttggttgagtggatgactgcaatgacttatcaagcagcatcaggcgctggcgcacaaaacatgcgtgagttgttaacaggtatgggttatttatataacaataccaagactttgttagatgatcctaaatctgcaattcttgatattgaccgtcaagttgccgagttacaacgcggtgagggtttcccttctgcgaactttggtgtgccacttgctggttcattaattccttacattgataaacagcttgaaagcggtcagtcaaaagaagagtggaaaggacaagttgagaccaacaagatcttaggtaactctcaaatcgttcctatcgatggtcactgtgttcgtatcggtgcaatgcgttgccactctcaagcattaaccatcaaattgaaaaaagatgttccgcttgatgagatcgaagatatgattcgtaactcaaaccagtgggctaaagttgtaccaaatacacgtgaagcatcaatgactgatcttacacctgttgctgtaactggtaccctaactgtacctgtaggtcgtttacgtaaactcaatatgggtaaagagtacctcggcgcattcacagtaggcgatcagttactttggggtgctgctgagcctctacgtcgtatgttacgtattttagtagaatacaaaagctcataa

SEQ ID NO: 41388 - DNA, 1122 bp, Acinetobacter baumannii
atgatttatatcgaagtactggcagtagtggtgatttggttaagcttctggtcacttattcctcgtgatgagtggtggtttcgaggtgcagattttccaagattacaaattctgtttattggcttaattgctttaattggtatgttgttttggccgaccgaatgggacgtatggcgtgagcttttgcttgcggtactcatcgcagcgattgcctaccaacttaaaatggttttaccgtatacgctgttttggaaaaaacaggttaaaaaggtcaaacagcatcagctagatcctaaaaaacagatttcactgatagtttctaatgtgctcaccccgaatgataaatatcatttattacttgagcatgtacggacgttaaaacctgatttattgcttactttagagagcgatacaacttgggaaaatgctttaaaagagatcgagaaagattatccataccgtgtgcccgtaccattagataatttatatggcatgcatttatatagccggttaccgcttaaaaatactgaggttaaattcattttaagtaatgaaattccttctattcataccacggtaattttgcgatctggcatgcctgttcagctctactgtttacatcctaagccacctagcccaactgaagcaaaagattcaacactgcgtgacgctgagcttttaattgtcggagatcaaattaaagatcttgatgaaagttgtattgtgatgggggatttaaacgacgtagcgtggtcacgaacaacccgtttatttcaacgtattagtgggctactcgatccacgagtggggcggcattttattaatacttttcatgcggactatcctttattgcgctggtcacttgaccatatctttcatagtacagacttcggtttagtaaaaatgcagcgtttatctcatattggatcagaccattttcctgtctatgtcgttttacaaacaggtcgaatatttgaagaaattcacgaggaactagaacaaactcaagccgatgaagaagaagctcaagccgcgatacaagaaggtattgctaaagctgaaaaagaagaaaaaatcgtgactgatgaaattgcacagccttataaagagaaaaatatataa

SEQ ID NO: 41389 - DNA, 1287 bp, Acinetobacter baumannii
atgaagaattttaaatttagccttgcatggcaaattttaattgctttaatcctagggatagttgtcggggctgttttacataaccagcctgaaatcaaagatagtattgtaaataacgttcttactccattaggtaagatctttattagcctgattaaaatgattgtaatcccaatcgttttctctacattgattttaggtattgctggtgttggcagtacaaaaagtctagggcgtcttggttttaaaaccattctctatttcgaaattattactactattgctattttggttggcttgtttgcagcgaatatcttccatccaggttcaggcattgatatgtctcaactggtacaaactgatatttctcaatataagcatacaactgaagaagtacagtcacagtctcatggtattatccagacgatattatcgcttatcccaacgaacattattagttcaatggcgcatggcgaaatgttgccagtgattttctttgctgtgctatttggtattggtttatcttcattaccagcaacaacaaaagacccattattaaatgtatttcatgctgtatcggaaacaatgttccgtgtaacacacatcatcatgaaatatgcgccagtgggtgtatttggcttaatcgctgtaactgttgcaaacttcggttttgcttcgcttattccattgggtaaattggttgtattggtttatggtgcaatcttattctttgctttagtggttttaggtattactgcaaaaatgttcagcatcaatatctttactttgtttaagattttgaaagacgaattaattttggcgtattcgactgcaagttccgaaacagttttaccgcgtattatgcaaaaaatggaagcttatggtgcgccaaaagcgatttctagtttcgtaattccaactggttattcatttaaccttgacggttctacgctttaccaaagtatcgcagcaatctttattgcacagctttacggcattgaaatgtcaatcagccaacaagtgattttagttgtaacgttaatgattacttctaaaggtattgcaggtgttcctggggtatcatttgttgtgttattggcgacattaggtagtgttggtattcctgtagaaggcttagcatttattgctggtgttgaccgtatcatggatatggctcgtactgcgttgaacgttgtaggtaacgcgcttgctgtacttgtaatcagtaaatgggaaaaacaatacgactatgaaaaagctgctgcttatgaagcatctcttaagtaa

SEQ ID NO: 41390 - DNA, 1101 bp, Acinetobacter baumannii
atgaaagtgatgcaacttctcccagaactcaatagcggtggcgtagaacgcggcacactggaaattgcacgtgcactggttgcacaaggtcatcagtctctggttgtgtctaatggcggccgactagtatcccaacttgaagctgaaggttctactcatttaacgctgcctatccataaaaaatcattgtcaagcttgtggcaaatccgtccattacgtcagctgattgaagagcaccaaccagacattgtacatgtgcgctctcgcgtacctgcgtggctaacccacttcgctttaagaaaaataccagcgaataaacgccctcacctcattagcacggtacatggtttctattcagttaatcgttatagtgcgatcatgactcaggcagaaaaagtgatcgctgtttctgacagcgtagttaaatacatcacagaccattataaaaactgtccaccacaagatattgtccggatttatcgaggcattgaccctgctgcttttccgcataactaccacccctcagcacagtggtttaaccaagtttttaacgactttcccgaactcgaaaataaatttttactttgcctacctggccgtattactcgtttaaaaggacatgaaagtttaattgaactgatgcagcaacttcattcgcaatatcctcaactgcatgctgttgttgtgggtggggctgatgtaaaaaaacaagcctatttaagtgagttgcaaaacatcattcaaagcaaaggacttgcagataaaattacctttgtaggacatcgctcagatatacgcgaatggctcgcttttagcgatatagtgctctctctatccaatcaagcagaaacattcggtagaacagcattagaagccctttcggtaggcacgccggtcattggctggaaccgtggaggtgttgccgagattttatctcatgtgtacccgcaaggtcttgttgaagcagaaaatgaaaaagctttagtagaaacagtaaagaatcatattgaacaaccgcaaacagtcgctcctgtgacactgtttagtttaaaagatatgtgtgaccaaacccttgagctatatcaaagtgtattgaaataa

SEQ ID NO: 41391 - DNA, 936 bp, Acinetobacter baumannii
atgagccaaaagcagccttatacgcccggtgagtttcaatggtcctttttgttgcctaaatattggggtgtgtggattgcgattactttcctgatgcttttggctattttaccgtgggcaattcaatggcgcttagctcatggattggcaaaccttgcttggaaatatttaaagtctcgtcgtaaaaccacaattcgtaatttagaagtttgtttccctgaatggtcacctgaaaaagtacagcaacaagcaaaacaagtttttgtagatatgatgcttggtatttttgagaccttaaacgcatggtataaaccttactggtttaaaaaccgcgtcactattgaaggcttagaacacattaccaatgcacaagctcaaggcaaaggtgttttattgcttggtacacatagtactttactcgatgcaggtggttatgtatgcgcccaatatttcgagccggatgttgtgtatcgccctcaaaacaaccccctcctcgatatgctaatttatcgttgccgcggcacaatttataaagcacaaattgatcatgatgacatgcgtggtttgattcgtcatcttaaagagggtgatgcaatttggtatagtcccgatcaagactttgggcttaaacaaggtgttatggcaccattttttggagtgccagctgccactgtaaccgctcaccgtcgtttattaaaaatttccaaggcggttgctgtgcctttatatttttatcgtcatggcgatgtacagaaccctaaatatcatatcttgattgagccagcggttgacaatatgccaagtgaagatgaagtcgatgatgcaacgcgtgtgaataagattattgagaaccagcttcgtatcgcaccaactcaatatatgtggtttcaccgtcgctttaaaacacgtccagagggatatgaagagatttattaa

SEQ ID NO: 41392 - DNA, 633 bp, Acinetobacter baumannii
atgctagatctctctcaaattttggcgtttggattaatttgtctggcgatggtactcacccctggcccaaacatgatttatcttatctctcgttccattagtcagggcaaaatcgcaggatttatttctctcggtggcgttgccgttggttttgtattttacatgctctgcgcatctttcgggattacagcacttgttgttgcagtaccttatgcatatgacactattcgtattgccggtgcgatgtacttactttggttagcatggaaagctttacgccccaatgccgcacctatttttaatgttaaagatttagcggttgactcaccattaaagttatttttaatgggctttttgactaatttacttaatcctaaaattgcgattatgtatttatctttattacctcagtttattcacccacaacaaggcagtattttagcgcagtctatccaactcgggactatacaaatttttgtaagcgtttcagtaaatgcgctgattgtattttctgctggtagcattgctctttttctacaaaaaaaaccactttgggcaagcattcaacgctgggtcatgggtacagtattagccggccttgcggttcgtattcttctagaacaccgccgataa

SEQ ID NO: 41393 - DNA, 1911 bp, Acinetobacter baumannii
atggcctatattactttaagggatgtccaacttgcttttggcggacctgccctgctcgatggcgcgaacttcaacctagaacgtggcgaacgagtctgtttaattggtcgtaatggtgaaggtaagtctactttacttaaactcattgagggaagcctactaccggattctggtgaagtttctgtccaaaatggtttaactgtttctatgttagcccaagatgttccaatgtcatcgggcaaagttgcagatattgtagcagaaggtgcaggtgaagccgctgccgtacttaaagcctatcatgaagcaagtgatgcctgtgtacttggtgacatggaagcttgcgatcgtatgggatctttacagcataaacttgaccaacttgatggatgggcattagaaaataaggtcaacacgattttaggtaaaatggagttagatccgaatgcagatctagccgacctatcgggtggtcgtaaacgtcgtgttttacttgcccgcgccctactcacccaaccagatgtgttattactcgatgagccaactaaccacttagatgttgaaagtattgagtggcttgagaaattcctgcttgatcaaaataatttaaccttactctttatttcgcatgaccgttcttttgtagaccgccttgcaactcgtattgtggaattggatcgcggcatattacgcagctatgaaggaaactattctcgttacctagacctaaaagctcagcaacttgaagctgaagaaaaacaaaatgccttgtttgaaaagaaacttgccgaagaagaagcatggattcgtcaaggtattaaagcacgtcgtacacgtaatgaaggtcgtgttcgtgcccttaaagcattacgagaagagtcaaaagctcgccgtttccaacaaggcaaagtcaatatgggcgttcaagaagcacagcgctcaggcaaacttgtatttgatattgaacatctaagcgtaagctacgatggacaaaccctcattagagatttctctgccattgttatgcgcggtgaccgcattggtttggtcggtgataacggcgtaggaaagactactttaattaaagcgatcttaggcgaagttcagcacgaaggtgttgtcaaaacaggaactcagcttgaaattgcttacttcgaccaattacgtaatcagcttgatcttgaaaagtcggtttctgaaaacgtttctgaaggttcagatttcgttgatgtaaatggtcaacgtcgccatattctcagttacttacaagacttcctattctctccggaacgagctcgtacaccggtgaaagcactctctggtggtgagcgtaatcgtgtcctgttagcaaaactattgctcaagccatcgaacctgattgtaatggatgagccaacgaatgacttagatatggtcacacttgagctacttgaggagatgttgtctgaatataaaggtactttgcttctaattagccatgaccgtgcttttatggacaacgttgtaacatcaacttgggtatttgacggcaaaggcggtattgcagaatatatcggtggttatcaggactatttgattcagcgtccaaacgagagagtcgttgaccaaaaaggcgatgtaaaaaaagctcaggctaaagcagaagctgaaaaaaatgcagctcaaacgaacgtaaaaaaggtcaaattaagctacaaagatcaacgtgaacttgagcaattaccggcagaaattgaaaagttagaaaatgagcaagctgaactttctgataaacttgctgacggctcatggttcgtaacggatgccgatgcggcaaccaaagcaagccagcgtctagcagaaattgaagagttactccttgaaaagttagagcgctgggatgaacttgagcaaatgagtaaagggaattaa

SEQ ID NO: 41394 - DNA, 246 bp, Acinetobacter baumannii
atgactaaaccaccatatcatgatgatcaagcgtcattttccgcacccattgaagatttgcaagtgcgaattgcatttttagatgatttagttgaggaattaaatcagcaactcgcgattcaaactttagaaatagctgatttaaaaaaacaaatgcaattactttatcaacgtgtggaatctgcagatttatcagaaggtgttgcaccttttgatccattaacgaataaaccaccgcattactaa

SEQ ID NO: 41395 - DNA, 1011 bp, Acinetobacter baumannii
atgaaagctgtggcatatcaaaaagcggggcctattacattgccagaggcgctcgtagatattgaactcaacactccagtagctaaaggacatgatttacttgttcgtgttcaagctgtatcagtaaatccagtcgataccaaaatacgtaaaaatgtaagtgctgaacaatctggctggaaagttcttggatgggatgctgtaggcacggtagaagcgattggcgataaagttactcaatttaaaattggtgatgtggtttggtatgcaggtgctttaaatcgccaaggcagtaatagtgaattgcaattagttgatgaacgtattgtcggtcataaaccaaaaactttagaagtgactgaggctgcggccctccctttaacggcaatcacagcttgggaaatgttatttgatcgtctacaagttccaaagactgcgcctgctaatacgactattttagtgattggtggagctggcggtgtaggttcaattaccattcagcttcttaagcaattaactaacctcacgattattgctacagcttcacgccccgaaacaaaagaatgggtagaacaactaggtgctgactatgtattaaaccaccgtcagcctttagctgcacaaattaaacaattaggtttaagtgcacctttatatgtattctcaaccactgaaacagatcaacatttatcagatattgtagagttaattgctccacaaggtcattttggacttattgatgaccctgatcagttagatattaaaccgtttaaatctaagtctgtctcagtacactgggaatttatgtttacgcgctccatgttccagactgaagatatggaaaaacaaagtgagctactaaatgaagtcagtaaactggtggatgaaggtaaaatcaaaacaactgtgactcaggttttaagcccaattaatgctgaaaacttaacacgggttcatgagcaaattgaaagtggttcaaccaaagggaaaatcgttttacacggattttaa

SEQ ID NO: 41396 - DNA, 378 bp, Acinetobacter baumannii
atggcaaaagctcgacattcaagttttgactgctcaccaggttgttcagttgaggccgcaatcagtttgattgatggcaaatggaaatgtgtcattctttggcatttattaaatgaaggaactttacgatttaatgaaattcgtaaacgagttccaagcattacacaaagaatgctgaccaatcagcttcgggaattagaacaagatggcattattcatcgtgaggtttatcctcaagtgcctcctaaagtggaatattgtctaactgatttagggcgcgggcttgagcagatacttcttgctttaaaaacttggggagatgcgcatctggatcagtttggtaagttaactactcttgaaactgaaaagagcgcctaa

SEQ ID NO: 41397 - DNA, 450 bp, Acinetobacter baumannii
atggacaatatcggaatttgggttaccgttatcattgttcttttcgtgctaggctccatttttggtttaagagtgagtccacgtgaaaaggcgctgggaattatgcgagacaaagcccgcaaaatggggctacatccacgtgtaattgctgcacctgaatggacacatgtcccgatggcaactgaaaagcgtgccagcatggttgcttactatagtgtattgatccccgatgctcgtttaccgctcatgcgtgctcgcgttatagacggaaaattaaaagttgtgcaaggcgatgagaaatttaatgattctcccattgcattaaaagggatttatgctattgatatgcaggcaaactgtgtaggcctttattgggatgaggaatcggacctgaaagctacgcaattagatgagatgaaggcttatctgttggccttggctgaagcctga

SEQ ID NO: 41398 - DNA, 2637 bp, Acinetobacter baumannii
atggcgaatacctcgcgctctgcatctcaaagcacagcatcttctgcctctgctgcacataaacgtgccttagtgattgtggagtcgcctgccaaagcgaaaaccatcaacaaatatttaggttcgcagtacattgttaagtcttctgtaggtcacgtacgtgacttgccaacaggcggcagtaaagcaacagagaaaaagccggctgcccggaccaaactcactgaggctgaaaaagaacaaaaagcgaatcaggctttaatcaatcgtatgggcgtcgatccggaacatggatggcaagcgcattacgaagttctgcctggcaaagaaaatgttgttgctgaactcaagaaacttgctaaagatgcagatgcaatctatctcgcaacggacttggatagagaaggggaagcaatcgcttggcacttacgcgaagtgattggtggtgacgatagccgttatcatcgtgtggtatttaacgaaattactaaaaatgccattcaagaagcatttaaacagccaacacgtctcgacttaaaccgtgttaatgcacaacaagcacgtcgtttcttggaccgtgtagtaggcttcatggtttcgccattattatgggaaaagattgcccgtggtttatcggcaggtcgtgtacagtctgtagcggtaaagcttgttgttgaacgtgaacgtgaaattcgtgcttttattccagaagaatattggcaagtctttgcagacactaaagctaaaaaagatgacatacgtcttgaggctgttaaacaggcgggtaaaacgcttaaattaaaaaataaagctgaaacagatgccctgttagatgtattaaaaggtgctgaatataaagttgcccagcgtgaagataaaccaactaaggtgaatccaagcgccccatacatcacttcgactttgcaacaagctgcaagtacacgtttaggtttctctgtaaagaaaaccatgatgttggcgcagcgcttgtatgaagctggtttcattacttatatgcgtactgactcaacgtttttgagtgatgatgctgtaagtatggtacgtgcacatattgaaagccaatatggcgaaaaatatttaccagctaagccaaatcgctatggtaataaagcaggtgctcaagaagcccacgaagctattcgtccatcaaatgttgcgctgactggtgatcaacttgctggtgtagagcgcgatgctcagcgtttgtatgatttaatttggcgtcagttcgtagcttgccaaatgactccggcagaatatttatcttcaactttaacagttgaagctggcaatgtggagttaaaggcaaaaggccgtacgcttgtatttgatggctttactaaagttcgtggtgccaacaaatctgatgacgatatcattttacctgcaattaaagtgggtgaaattttaaagctagaaaagctagatccaagtcagcattttaccaaaccaccagctcgttttactgaagcatctttagtaaaagaacttgaaaaacgtggtattggtcgtccgtcgacttatgctgccattatttctacgattcaagaacgtggttacgttaagttagaaaatcgccgtctctttgccgagaaaatgggtgagatcgtaacagatcgtcttgatgaaagttttaataacctaatgaattatgcatttacagcagatttagaaggtcagttggaccgtgtagcaacgggtgagcgtaactggaaagaattgttagacacattctatggtgattttaaaaagcgtttgaccaatgctcaaggtgagcagggaatgcgtcgtaatcagccagttgaagtaccagcagtacattgccctgaatgttcacgtccaatgcagattcgtacgggaacaacaggtgtattcttagggtgttctggttataacttgccgcctaaagaacgctgtaaagggaccttgaacttaacgccagttgagtctttagcagcgttatctgatgacgatagtgctgaaacagcagacttgatgtcaaaacatcgttgtccgaaatgtggtacagcaatggacagctacgtcattgatggtggccgtaagttacatgtttgtggtaacaacccggattgcgatggctatgagcttgaagaaggtgagttcaagatcaaaggttatgatggcccaaccattccatgtgataaatgtgatggtgaaatgcagcttaagactggtcgcttcggcccgtattttgcttgtacaagctgtgacaatactcgtaaagtcttgaaaaatggtcaacctgcaccgccacgtgtagaaccaatcaagatggaacacttgcgttcaaccaaacatgatgattattttgtgttacgtgatggcgcggctggtctgttcttggctgcaagtaagttcccgaaaattcgtgaaacacgtgcaccaaaagttgctgagcttcgtagcgtagctgatcaacttgatccaaaataccagtttattttacaagctccagatgtagaccctgaaggtaacccaaccattgtgaagtttagtcgtaagaaccaatcacaatatgtgggttctgaaacaccagaaggtaaacaaaccaaatggagcctaatttatcaagacggtaaatggattgaagactaa

SEQ ID NO: 41399 - DNA, 759 bp, Acinetobacter baumannii
atgtggaaaaacattcggattttatgtctattaattgttttattaatcgttgcagttcaagcgtggcgtgaccaaaaccaagactggaatcagcctattgtggtggtattacacccaataaatgcagatggcttacaaaccacacaaacttatattcatcagttacaaaacactgatttccaggcgcttaaaagctatttaagtgaatggtcgcaacattatcggggccaatcagcaaactttgaaatacgcttggggcaacagttacaacagcgtccgcctgaggtgccacaaaatgccggtatttttcatgtggtttggtggagtttaaagtttcgtttttatgcatggcgacaacaacagcctgaagataatggagcatcgctcaaactttatttaaattattacgatcccaattatcaaaaagttttggtgcattcgactgctttagaaaagggccgtattggtagtgttaatttgtttgctacacgtgggcaagcatcacaaaatcaggttgtaatcgttcatgagctattgcatggctttggggcaaaagataaatatgatttaaaaacaggtcagcccatatatccattaggatatgcacaacctgaaaaagtacctctttatccacaaaagcgagcagaaatcatgggtggtcgaacaccattatctgagcagaccagcaaaatgccaagtgatttacaagaaaccgtcataggtttaccaacagctcaagaagtggggtggctgaaataa

SEQ ID NO: 41400 - DNA, 573 bp, Acinetobacter baumannii
atgaaaactgtaggtaatgatttggttcgtaatcagctacatgctgatcgtaaatggtatctaatattaggctttgtgctcattatttttggtttggtgttatttagctcactgccatttgccacattttcggttgtttttctgtttggtattttaatgatggtgggtggtgtattgcatttaattgctgccttaagtgtatttaaaggcggtagccggtggctgtgggcactttttggagtgctgtatttaatggcaggctattatgcattttctacgcctgttactacggctgtggttttaacaagcttattatcaattgctctgattattgcgggagtaatccgcactataaatgcatttttattaagaccaattgcagggtggggctggaccttattttcaggattattaacccttgctacaggtattttaattttagtgtctaaagattctccgttttgggtgttaggaatgtttttggcagtagatattttatttcagggcattaactttttaggactcgcttctgcgattaagcatttaccttctagctcaaaaacagtttcttaa

SEQ ID NO: 41401 - DNA, 1980 bp, Acinetobacter baumannii
atgagtcttgcaaagttaattaatgaattaaatgctcagcaaaaaaaagcagcaacgactacggctcaaaactgtctggttttggctggagcgggttgtggcaagacgaaaactattgttgctcgcgcagcttatttaattgatcaaggtttacctgcaaatcaaattcagattttaacgttcacccgccgagccgcgagtgaaattgttgcaagggttgaacagcatgttggggcacaagccaagggcctacgagcatcaacctttcacaccttttgcatgtatttattgcgtcgtaatccgcaagcgtttggtttaacccaatttagcattattgatcgtgatgatcagttactcatgtttcgcttattaagaggcaaagacaaagataatgttttgcctaaagcggcagagctgtgtgatttgtattcttatgcccgaaatacgcaatcgaagctttctgaagcgttactcaagcaattacctgaagcatatgaatataaatcacaaattgctgagttaatgaaaacctatgaacagcgtaaaagagagcgtaattttttagactatgatgacattttgtcgatcgtcgctgttcatttacaaaactcggaagcactgacgaactgggttgctggtttctgccaagctttgttggttgatgagatgcaagataccaaccctttacagtgggcacttttgcagccactgattggtaaggtgaaattattttgtgtgggagatgatgcccagtcaatttacggtttccgtggggccgattttgaaaacattcattcttttaaagaacgtattcctgatgctgttattcatactttagatctgaattatcgctcgactcaagaaatattagatttatcaaattggttactcgctcacagtccaatcgattaccaaaaacaattacaggcacatcgtggcaaaggacaaaagccacaactccatttgtttggtaatgaatttgaagaagccaactggattgcacaagacttaatagagcgacaccaacagggcgcaaattggtacgaccatatggtgttagtccgctctggttacagcgcacgctatttagaaggtgcatttattgccgctgaaattccgtatcgttttattggtggcgtaaagttacttgaatcagcgcatgtaaaggatgtgctcagtttattgcgtattgtgagtaacccgcaggatgacttggcttggatgcgctttttaaccttatgggatggaattggagatgtgggtgccagcaagttagcgcaagagttaatgagcattagtgaggtcgaagagcgttgtcagcgtttggagcgtcatggaaaagttcctttacaggccattttgattttgaaacagcttgatgtactacagcagcatgttgaggcaagcattggtctagcacttgatgcattaagtgaacagttagagcaaaactataaaactaaagactggtcacgtcgtgctagggatttcgacctagttaaacaacttgcgcgtaagcatgcatctcttggtgagtttcttgaagaatatgtgcttgaaccaatttcaatttctgaaattgaaaaagcgggtgatgatgatttagtgaccttaattacaattcactccgctaaaggtgcagaacagaaagtgtgttatgtgccacatgtctcaccaaaccaatatccctatgcgcgtgcacagggcgattttgatgaagtcgaagaagagcgcagagtattgtatgttgcattaacacgtgcggaaaatgaattgattttgacgaagcaaaatctcaatacatggtcacaagacacgtatgacgaacaaggccgcaaaatcgaaagctattttctaaatgatttacctgctcatctggttcaggccaaaattcatcgtcaggtgccacagccatttgccaaaaagcaatggaatacttcacgaacagtaaacttaggttttggtatcgatcttgactaa

SEQ ID NO: 41402 - DNA, 240 bp, Acinetobacter baumannii
atgaaaatattagttcgtaatttagatcgttcagtgactgaagctgaagttttagagctgtttaaagcttatggtaaagttgagtcttgtgtcgttgtaaccgataaagatacgggtaaatcaaagggctttggctttgtcgaaatgccgaatccgcgtgaagccattaaagcaatcaaaggactaaatacacttaaagtaaaaggttacggtattcgggttaaggcagctgaagagtaa

SEQ ID NO: 41403 - DNA, 168 bp, Acinetobacter baumannii
atgcaacaatttttagctctttctgtggttgctccaaatggaacacgtatagctcagggaataaaaatacttgaagttcgttcatgggtccctgcacagctgcctcttaaagatctattcattgttgagaaccaaaattttttaaagaatgatggtgatgagggataa

SEQ ID NO: 41404 - DNA, 504 bp, Acinetobacter baumannii
atgtcacgtgttgctcgttatcatgccgatcgtaccaatcaaaaactctattttgcacgcttagcgtgtcaacaagcagagcaaactgatcatgtacagcaggtacaagcgtatcgtgaagcagctgtatttcatttacatggtgcgatgttggcatttttgcaagaattggtacgttattaccgtttaaatgacttgcaaccgacattaaaatctattgaagagcatatggcggcaaaaggacaagtttctccggaagtttctgttttgcagcaattggcaaaagatggcttcgttgcagaattaaaacgtgcttaccgtatgtgccaatatgcaccggaaccaactgaaccgacaccggaagaagaaacttcctctaatttgatcattaaagtgactcagggaccacaatcatggttacctgatgtgaaaattttgcgtgaatggcatagagagttaagtcatttaattgatggttttcgtaacgaaatggtcgagttctaa

SEQ ID NO: 41405 - DNA, 279 bp, Acinetobacter baumannii
atgtctatacagcaattgaaagagttatttggaaatcaagaagcagtgttggaattggtccaactagaaggtggtgagctcgccttgcgtaatgctggttctgaaaaagagcccttggttaaaattcagtttagtgatgaactaaaagcaatattaggtgaacagacgcctatagttgcacaacatatgattcaagctgctttgtttggcctgttagaaaagcaggtcaatgaatggcaggctgaagttgtggatgagcagcctaaattcttaagttaa

SEQ ID NO: 41406 - DNA, 1710 bp, Acinetobacter baumannii
gtgccgcatgacgtagatttaattattttacttgctgttggtttcggcgttgccctgttttttggctatattgccgcccgactacgacttccccctcttattggctatctcattgccggaattattattagtcctaatactcctggtgttgaagcagatattcatcttgcaaaccaacttgctgaactcggtgtaatgttcctcatgtttggcgttggtatgcatttttccttaaatgatcttttacttgtccgccgcattgccttgccaggtgcaatcttacaaattgctgttgcaactttattgggtattggcgtttcaatgctatggggctggaactttggctccgcactcgtttttggcttaagcctgtcatgtgcaagtacggttgtattattaaaagctttaggagaccgaggtctgctagattctgtaaacggcaaaattgctgtgggctggctgttagttgaagatttagtcatggtacttgttttagtacttcttccagctacagctgttttacttggcggaaaagctccagcaggcgcagaaggtaacatttggctaactcttggaatcaccctattaaaggttattggctttattgcctttatgctgattgtcggtaagcgcgttgtgcctattattatgcagtttgttgcgcgtttaggttcaagagagctatttacgcttactgtagtcgctgctgctgtatcgattgcctatggttcttatgccatctttggggtttcaatggcattaggggcattttttgccggaatggtcgttaaagaatcagattttagccatcgcgcagaagaagaaacgctaccactccgtgaaattttctcgattttatttttcgtttcagtaggaatgttgtttgatccacatatccttattgaacgtccactacatatcttggctgttatcgcgattattatggtgggtaaaacacttgctgcaatggccttagttttattcttccgctatccaatcaatactgctttaacagtcggggccagccttgctcaaattggtgagttttcatttattttggctaccctgggtgtttctttaggtctattaacgttagaagctcaaaacctgattttagcaggcgctttattctcaattacactgaactctttcatcttctcggcaattgagccggtacaacgttggattcgtgaacgctctcatttagcacgacttcttgaacgtagtggcgacccattagctatgctgccagatgaagtcgatcaatcttatctacgcgatcaagtggtgattgtagggtatggtggcgttggacgacgtattactgaaaatttaattaatcaaaatattaaagtcgtaattgcagaagagaatcgtgaaatcgtagaaaaactacgtcaggcaaatattgcggctgtaagtggtgtagcaaccgaacctggcgttttaattcaagcacatatcatgcacgcacgactcttggtaatttcgcctatggatatcttagatattcatcggattgtagatattgcgaagcaattgaatcctcaaattcaggttttaatttgtgcagaaagtaaagaagaagccgcagtgattagagacgagcacattggtgaagtattctatgcgaaagaagaaatggctaagaatatgagccatcatattttaaatcaaattgaacttgcgcatcagtctacacatcattaa

SEQ ID NO: 41407 - DNA, 156 bp, Acinetobacter baumannii
atgcgtgataagattcgcctcgtttcttcagctggtacaggttacttctataccacgactaaaaacaaacgtactatgccggaaaaaatggaaatcaaaaaatttgatccaaaaatccgtcaacacgtgattttcaaagaagctaaaatcaaataa

SEQ ID NO: 41408 - DNA, 237 bp, Acinetobacter baumannii
atgtctaaggtttgccaagttaccggcaagcgtccagtcgttggtaacaacgtctcacacgccaacaacaaaaccaagcgccggttcgagccgaacctgcaccaccaccgtttctggttagaaagcgaaaaacgttttgtacgtcttcgtttaaccactaaaggtatgcgtattattgacaaattgggtatcgaaaaggttgttgcagaccttcgtgctcaaggtcaaaagatctaa

SEQ ID NO: 41409 - DNA, 1449 bp, Acinetobacter baumannii
atgaacagtcaaacaaaaacaaatccagagactcaggttccttatgatgttaagcatttacatgatttgcttgagcagcaaaagattgcctacttacgtcatccggtacccactgctaaagagcgtattgatcgtttagctcgtcttaaaagagtcttggtaaaatatcaagatcagattgccgaagcaattaaccttgattatggcaatcgtgccattatggaaaccaaaattggtgagttacttacctgtcttgaacaaatcaagtattacagtaagaacctgaccggatggatgaaaccatcaaaacgccatatcagtgtattacatcagccagcaaaaggttgggtacaatatcaaccaatgggtgttattggcattattacaccttggaactatccattactactttccgttggcccactcatctgtgctttggcagccggtaaccatgccatgatcaaaatttcgagtgcttctccaaattttggacaggttcttgaaaatgcactttctgaagcttttccgcaagaattggttgctgtggttaatggtggaggtgtgatatctgatgcgtttagtcacctgccttttgacaaaatgattttcacaggctcgacttctgtcggtaaaacagtcatggcggctgcagctcaaaaccttgtgccagtcattcttgagttgggtggtaaatcccctgcgcttgtacatgcttccgtagacatgaaagatgtcgcacagcgtattgctgtgggtaaattatggaatgcaggccaaacttgcgttgcgccagaccatattttcttgccgcgtggtaaaactgccgagttcattgaaaactttaaattgattgtggctggaatgtatcctcattttcgtaacaatcaagactacacttctattattaatgataagcagtacaaccgtattcagggctatctagaaaatgctcgtgctcagggtgctcgtattattgaaattaatcctcaaaatgaaattttagatgatgtccgcaaaattgcaccgactctggttactggtgtaacgactgcaatggatattatgcaaaatgaaatttttggtcctgttctaccaattttagaatatgaccaaatagaagaagtcatcgaatttattaatagtcgaccacgtcctttggcgatgtattattttgactatgatcaggcacgcgccgattatatctctcagcatactcattcagggcatttcggaattaacatggtgattacccatgtagcacaagatgatttaccttttggcggtattggtgcgtcaggtatgggtaaatatcacggaccggagggcttttttgggctttcacatgaacgttcggtcatgtcaaatccaaaactttatagcttgaaatatattcttccgccgttcaataaaccgattcatcgcttcatttcgaaaaccttgttgcgttaa

SEQ ID NO: 41410 - DNA, 693 bp, Acinetobacter baumannii
atgtctctacctaaagctctgaagacaaaagaccggattttacaaatcagtttgcagctttttaatgagcgtggcgaacggtctgtcactaccaatcatattgctgcagagttggggattagtcctggaaacttgtattatcactttcgaaacaagcatgaaatcattaaggaattaatgcaccaatatcaggtcgagactttagaaatgctctctttacctgaggacagaccattaacgaccaatgacaaaattaattattttcaggtgctcagtggtcagctatggaactatcgttttatccaccgcgatgtttatcacttagttgaaagtaacgaagactttaaaaagatctatcctcggtttgcagggcaggtcatgcagcaagggcaaagaatttatcaggcctttgttgatgccgggcttatgaaaatgacgccatcggaaattgaagcgctcattattaacctctggattgtcttaacgaactggaccaactttctatatatgtccggacacattagtgacaataaccaccttgaagaaaaatgggtttggcaagctttacgtcaaatggtttttttagaaggcccttatcttatgggtgaaagccgcgcgacttatgagcaattattggagtcacttggaccttcggatctttttgccagcttatcgtccctaaaagatgaatag

SEQ ID NO: 41411 - DNA, 864 bp, Acinetobacter baumannii
atgaatatgaccactgccaatacagcccgtttactgattacttgtgaagacaagcctgggatcgtacaggctgtatcgagctttttgtaccatcagggtgcaaacattaccgcgcttgatcagtatgcgacggaagctcaaggcggacgttatttcatgcgtgttgaatttgaacttgatcatttacagtctcgtaaagatgctttaattcagactttcgcagcaaatgtagcggaacgttatggcatgcaatggcgtcttgcttttgttaatgatattaaaaaggttggtattttagtttctaaagttgaccatgctttgcttgagctattgtggcgtcatgcacgtggttctttaccgtgtgaaattacccacgtaatttctaaccacgaagatttacgtgaagcggttgaaaactttggtattccatttacagtcattaaagtaaccaaagacaataaagcagaagcttatgctcaaattcatgaaatgatgcaaggcaatgacttgttagttcttgcgcgttacatgcagattttaagcgaagatttcgtttctaaatgggaaatgaaaattatcaatattcaccactcattcttacctgcgtttgtgggcgcaaacccatacaagcaagcatatgaaaaaggtgtaaagttgattggtgcaacagctcactatgtgactgctgacctagaccaaggcccaattattgagcaagacgttgaacgtgtgagccatgattataatgttgagcagttgcgtgagcttggcgaagatgttgaacgtaatgtattagctcgtgctgttaaatggcatttagaagaccgaattattgtagatggcaataagactgttgttttctaa

SEQ ID NO: 41412 - DNA, 756 bp, Acinetobacter baumannii
atgagtcaatcttccgcagccttaaactctcccaatccgatgaaaaagaaagtcatcacggcactaattgcggttgcaattggtcatatcggggtcttatgggcagtcagccacattaagcctgctgaactaaagccaattgaaaagaaacctttacaagtccgctttgtaaaaattcaagagcaaccaaaacctttaccaccaaaaccaaaagaaccgcctaaaaagccggaacctaaaaaagaagtgaaagaggttaaagttgtcgagaaacctgtaactccacctaaaaaagtggaaaaaattcagcaggttaaaaaggctgaaacacctaaagaaacagtaaaaacagaacctaaagttgaaccgaaaatagtaacgccaacgactactgtgactgaaaaagtcgttgaaaagccaaagccagtggttcaagaagcacctaaagctcaacctgctccagatccatcaccaaaacgcgtttcaattggtggttcgggtgtacagtggagccgctcaccacgtttgactgtttcaccaaaagatttacagggcgaagcacgctcggttgttgtacttattgaagccgatgagaaaggcaagattactaacgtgcgcgtaacccgtagcagcggtattccaagtctagatgacaaggtagtccgtgctgtacgtagtgcaaaatttaaaccttatatggaaaacggtgttgcttatccaattaaagcagagcaaccgtttgacttaaccccttaa

SEQ ID NO: 41413 - DNA, 621 bp, Acinetobacter baumannii
atgaacttttcaatctattggcaacatgcagatgcagtgagtaaaaccctgtatttcatcttattggcaatgtcgattgctacctggacagttttcatcttacgtttgatggggactcgccaactaaaacaacaagcttatgctcaactctctcaggctattacttcgctcaaagcaaagttacaacctttgagttttgaacaacgtaaagcagttgcagagcaagcattattgcgtcagatttctgctgagaaagccaatgctgataaaggtatttcagttttaggaacaattgcttcaattgcaccattcgtgggtttgtttggtacagtatggggtattttccacgcgttagttgctgttggtaagagcggacaggcaggtttagctcaagtggctacaccagtaggtgaagcacttattatgactggtcttggtctagcagttgcgattccagcggtattggcttataacatctgtgtacgtgcgaatcgtggccttgctcatgatttacaagatcaagcacacagtttgttaatcgacaccatgttgcagcaagactcaactgtaaagtctgatgttaaaactgcacagcaaagttatgttggaggtcaagcttaa

SEQ ID NO: 41414 - DNA, 405 bp, Acinetobacter baumannii
atggcttttcaattgggtgaagaccacgatagtggcatgaatgagatgaatctcattccgctaatcgacattatgttggtgttaatgatcatctttttggtcacagcaacagttgccaacccatcgattccattaacgcttcctaaaacaactgctgaaattattgatccaccaccaaaagcaattacgattagtatcaatgcaaatggtgaagtggcttgggatactcaagtaattagccttgatgagcttcaaaaacgtttccaagaagcaggtcaaggtgcggttaaaccgacagttcaacttcgcgctgataaagagtcgaagtacgatactgttgctcaggtaatgtctcgcgccagtgaagccggactgagcgatattgcctttgtaagtgaaaactaa

SEQ ID NO: 41415 - DNA, 522 bp, Acinetobacter baumannii
atgcaacaggcattatttggcggcggctgtttttggtgcgtcgaagccgtatttttacaaatacgtggtgtagaaaaagtaacaagtggttatgctggtgggcatacaactcatccaacttatgagcaagtatgtcaaggtgacactcagcatgctgaagtggtccttatcgactttgatgaacaacaagttacatattctcagttacttgatgtgttctttgcaacgcatgatccaacgactttaaaccgccaaggtaatgatattggtactcaataccgctctgttatttactattttaatgaagagcaaaagcaggcagcagaacacaccattcagacgttaaaagatgacgatcttgatattgtgactgaattatctcctgctcctacgttctatccagcagaagactatcatcaaaattactatgaaaagaacccttcacaaggttactgcaactttgcaattccacctaaactgttaaagttacatagtaaattccaacatctcatgaaaaattaa

SEQ ID NO: 41416 - DNA, 1056 bp, Acinetobacter baumannii
atgcacaatatcggaacacgtgaatttattatcgccctcctcttcggcgctttacatagtttattcacgttgtttattgtgctttccagcatttgggtatgcttagccctatgggtccaacaaccttttggctggttaggcagccgtattattattggcatatggattgcctttgctttaagtatggcgggcttatattttaatgggcatatcattagccgtcgtacagacgttttaatctacctgttagcttttgcctgctctttggtttggtacttttcgattactgcacgtcaagaccgtgactggaaccctgaagttgccaatatgctaagttacgaaaaacacggcgatgttattactttgcataatgtccgtaacttcaactggcatcctgatggaacctatgatgttcgctgggaaacccgtacttttgacctgaaccagttaaatggcataaatattattacttcttactggatggggccacaaattgcccatacgctagtcagtttcgaatttaaaaatcaacaacctttagttttttcgatcgaaattcgaaaagaaaagacggaagagttttcagcaattggcggcttctttagaaaatatgaactgagcttaattgcatctgatgaaaaagatattgtctacacgcgtagcaatatccgtaaagagcaagtttataatttcccggtcaatatgcctcgctctgagcaaaaagcgctctttttagaatatcttaaaaaagcagatgaactacgtacagaaccaaagtggtacaatacgctcacaagtaattgtacaactttaatttttgatatggttcaagccattaacccatatcagcttcctaaagattatcggttaattgcctctggttacttacctaattatttatatgatcttaaagcactcgatcaaaatattagcttgaaacagtggtaccaaattgcacacattaacccacgtactgaacattttgaacaatttgcagaccaaagcagtgagcatttttctcaaatcgttcgacagggtctacctaaagtaaaatga

SEQ ID NO: 41417 - DNA, 510 bp, Acinetobacter baumannii
atggcatggcaaaatgtagaagttgtccacgttgtcgcaatggacaaaaatcactgtattggtaaaggcaatgcgttgccatggcatatctctgccgatttaaaacattttaaagaaatcacacaaggtggtgtggtgatcatgggccgcaaaacgcttgagtctatgggccgtgctctaccgaaccgtgtgaactgggtgattacccgtgatattaactggcattttgacggcgtaaaaattgcgtattcaattgaagatgctttaaatgctgctttagaagatgccaaaaataccgaaaagcaagctttgtttattattggtggtggtgaaatctttaagcaaaccttgtcaattgcagaccgtcttgagctcactcatgttgacttagatgtacaaggtgatgcacattatccaacaataccgagtgaatttcacaaaactgcaagcgaacagcaagtagatgaaaaatcaggaacttcattcgaatttgccacttataaaaaataa

SEQ ID NO: 41418 - DNA, 843 bp, Acinetobacter baumannii
atgcgtgcatatttagaccttctacaacatatccttgataatggcggtgacaaaggcgaccgtacaggcacaggaacccgttctgtatttggtcatcaaatgcgttttgatctctctaagggttttcctttactcaccacaaaaaaagttcactttcgttctatcgtgattgagttactttggttcttaaaaggcgatactaacgttaagtacttacaagacaataaagtcaccatttgggatgaatgggcaacagcagaacaaactgcccgtttcggccgcccagaacatgagcttggcccagtttatggccatcaatggcgtaatttcggcgcaactaaaaatgccgatggtacttataaccaagatggttttgaccaaattaaatggttaattaatgaaattaaaaccaacccaaattcacgccgtttaattgtctctggctggaacccaaatgaggccggacaagttgctttaccgccttgccatacactcttccaattcttcgtacaagacaacaagttgtcatgccagctttatcaacgtagtgctgacgtattcttaggcgtgccatttaatattgccagctatgccttactcactcatatgattgctcaagtgtgtggcttaggtgttggtgattttgtttggacaggtggcgatacgcatctttatgccaaccattttgagcaggcaaaactacaattaacgcgtgaaccattaccactttgccaattaaaacttaatccagaagttaaagatattttcgacttcaaatttgaagacatcgagattgtaggttacgagtcacatccagcaattaaagcaccagttgcagtataa

SEQ ID NO: 41419 - DNA, 363 bp, Acinetobacter baumannii
atgttggcttattggtataacgcaccgcgtcacatcaaactcatcttcattattgtcgtttgtgttgcaatttatgcagccaatcaagtccagcctttatcgccgacttacactgttcttagtctcatgttaggttttgggcttcatttcgggcaatatttacaaacaaaaattccagagcacagttcatataaacttaagctccagtttctgcttagaatttaccctctcattattgttgctattataatgtggttattgccccctcaatacaattggatcgcaacaatacaagctttaggctttgtactggttggattttttcttgtttcgatttatcaaaatcgggccaaacgtttttaa

SEQ ID NO: 41420 - DNA, 360 bp, Acinetobacter baumannii
atgctggaattttggtttaatacgcaagtcccgacttttaaaaaattaatcattttaattattaccctcttaatctgtattgggttatatcaatatcaaccattgccattagataccattttaatgtttacaggtactggggttatttttttaatctgccgttactttaaattgcattttgctcaaagtaacccgactggtttactttaccgcctatttacgtgggttcctatcgctcttttatttgcacttatctttgtaaaaactatgcctaacttgctgatctggggcgttcaaggaatcgcatttatggcgcttgctgcttttattttttcacctcaatcgttatttaacaaatag

SEQ ID NO: 41421 - DNA, 819 bp, Acinetobacter baumannii
atgctgacctatcctaatatcgatccggtcgcaatacatctaggacctcttcaagtccattggtatggactcatgtatttattggcatttttatgtgcttgggggcttgcttcctaccgtgccaaacagcgtgatggctggacatcggacatggtttccgatctggtgttttacggcgccttaggtgttgtactcggcggacgtatcggctatgtgcttttctatgagtttgataaattccttgaaaacccaatctggttattccaagtctggacaggtggtatgagcttccacggcggcttcttaggcgtcatgatcgcaatgctattctggtgtaaaaaatatcaaaaaacatggttccagacactcgactttgttgccccatgtgtaccgacaggcttaatgttcggacgtattggtaactttattggcggagagttatatggccgtgcggtcacagatccgaattatccattcggaatgattttcccaaccgatccattacatctggttcgtcacccttctcaaatctaccaagcgctttgcgaagggctattactctttattattttgtggtggtttagctcaaaaccacgcccacgtatggctgtatctgccctatttttaatgggttatggtgttgcacgctttgtgatggaattcttccgtcagccggatgccgaccaaggtttcatcttgtttggctggatgacgaaaggacaaatcctcaccgttccaatgctactgataggcctttggatgatgtggtatgcctaccaaaagaaaatttatgactggggccctcaaaagaacagttaa

SEQ ID NO: 41422 - DNA, 780 bp, Acinetobacter baumannii
atgtgtattgtggctttagcatggcatgttctggatgatatgcccttgtgtctgatttcaaatcgtgatgaattttatcatcgaccaaccgcattgttgcatcaatgggaacatacgccaatcattgcagggcaagacttacagtcgggtggtacttggatgggtgttacgccgcagggccgatgggctgtgttaaccaatttccgtgatggacgtgataaaaaacaatatgagacctctcgtggtcatttagttcaggcttttttagagtctgatttgttaccgattcgctttgctcagcaattagaacaacagcaacagaactttgctggttttaacctgtttatgggaactgctgatcaggcggtctatatgagtaaccgcggtgaggctcctcaagtattagccaacggtgtatatgtggtttcgaatggtttaatgtccgaccactgggaaaaaaccagacatttacgcacacgttttacgcaagagttcttgcctatgcatcagcacaaaacagaagagttaagtttgcagcatgcagcgtgggatattttagaagatgagcgtaaggtcaccacagcattgttgccaaacacgggcattcagccggaaatggaagaattattgtcatcgacttttattcaaagccccgtatatggaacacggtgttcgaattttttaagaatgaccaataatgaatggatatggttggaaaagacccagcagggtgaacatagtggtcaaattgtgcagcaacaggtgcttttaaaccgttag

SEQ ID NO: 41423 - DNA, 2334 bp, Acinetobacter baumannii
atgacagagctgacgccatatcatgaagaccaagaattggataataatacttctgacaatatccactttcgtgacattttagaacaacacatcagtcgtcgtagtttaatcaccaaagcagcaagcggtgcagtagcactgactttagcttctactttaacaggctgtaatgataacgatgatgactctggctctaataatggtggaaccacacctgtagacccaaataaaaaaccggaaaaactcacatttacgcccgtagctaaaaatttaaatgatattgtgactgtaccggaaggttatgaagccaatgttatctacgctttaggtgactcaatcaatccaagagttggagattgggacgacaataatattccatctggcccaagcttccagtttcgctctggcgactgccatgacggcatgcattattttggcttaaacacatcaacaaaccgctttgacgagactgtgtcagcacaaggtttgttggtgatgaatcacgaatatattaatcagaccttccttcatcccaaaggtcctacaaaagtggatggacgtcgccctgaagatgaagtcattcgtgaaaccaatgcacatggggtttctgtagttcatattaaaaaagatccaaccactcaaaaagtagaaattgttaaaaattctatttttaatcgtcgtattacagcttctacagttatggagtttgcaggtgctgcagcgggttcaagcctgcttgcaactcgcttctcacctgctggacgtcaaacacgtggcactcataataactgcggtaacggttatacaccttggggcacttatttaaccactgaagaaaactttattggttatttccaacgttcgggtagcgatgaatatgcacgtacagatgcagaaaaaattgcattaaaacgttatggtttaggtgttaaaaaagatgaaccttatctgtatgagaaagatgaaaaaggtgcacctaaaaaagataaagatggcaagatcatttacttaaaagataaaaatggtgagttaatccctaacgttgatgaacaagggcgacaaatttatttaggcacaagttcgcgttacggctgggaaacagcaattggtcaagtagagtcacaagacttgtatgatcgctggaatgccgatgtaaaagcagctcaagctacccaagattaccgaaatgggccaaatacatttggctggatggttgagattgatccatttgatggacgccaaaatccggttaaacgtacttcattaggccgtttcgcacatgaagacagtgcttgccgtgccgtagtaggtcaaccattagcattttatatgggtgatgactctcgtggtgaatacatctataaattcgtttcaaccgctgtgtgggacaccaaagatataaacggtggttatacagctggcgacaaatacatgaatgcaggcaaattgtatgttgctaagtttaataacgatggttcaggtcaatggattgaacttgcttatggcaaaaatggcttaaatgaaagcaacaccacctacccgtttaagtcacaggcagacgttgttacatttgcacgcttagcagcagattctgtaggcgctacaaaaatggaccgcccagaatggtgtacggtcaatccattaaatggtgaaatttatgtcacactcaccaataactcaaatcgtggtaaagactatgcaactgatgcagctaacccacgtaactacacagacctatatgcaggcacaaaagaacaaaaaggaaacgtaaacggtcatattatccgttttaaagaaactgatgataaaacgactgctgaaaccttcaaatgggatatctatttatttggcgcagaagcagcaatggcttcaaacatcaacttatctggcttaacagataacaatgatttttcatctccggatggtatgtggtttgacccacgcggtgttctctggattgaaaccgatgacggcgcttacactgatgttactaactgtatgatgcttgcagctctgccgggtcaaatcggtgatggtggtacagcaacaacttcaaatggtcagcagaccataacaggtgccaaagttacagacgcaacattacgtcgtttcttagtcggaccaaagcaatgtgaaattactggtattgccatgactcctgactacaaagcaattttcattaatgttcagcaccctggtgaagattcaccaagttacgcgaaaccagaaagtaactggcctgccacacaaaaagacccaagcaataaaactgcgcgcccacgctcagcaactgttgtgattacccgtaaagatggcggcgttattgccggttaa

SEQ ID NO: 41424 - DNA, 2181 bp, Acinetobacter baumannii
atgaccactgcttctaaccacccaacacgtcgcgatattttaaaatggtttacggggatcccttttcttccattaggtgcgatggctacggcagcaacgttagcaggttgtaacgatagcgataacgactcatctattgtcactccgtcaaagccaattaactttaagaatgcaacgttcacttcaatgccagctccttcaacggtagcagatattgccacaacagcatgtgcatcaaaacttgctatttcatgggaagacggcagcaaaacagaataccaactcgcttacaaaccattcttcttaacaggtacagaagtgcctgatggtaaaggaggaaaagtcatcgcgggtggttattacgatattaataataagccaattattgataaatcagttgcaggtaaagaacgtcaattcttctctgactgcccagatggtagttctctcattagtttcaagcaagcaacaggcaaagatttcacagatgctgacaaaaaagcattaggtgtaaccggtaacccagtgttccatgtggtccaatttgaatatctatcaaaagaccaaaatggtggtgatacttacggtaaattatcatctccgattgctgtcttgactttagatcaagatccaaagacaggtcacttaactttaattaaataccataacgttgatacttcaagtgcacatggactatggattacttgtggtgcaagtttatctccatggggaactcatctttctagtgaagaatacgaaccagatgcttttgatcaaaaattaggtcaatcactttcaacacttaaagccttcagtaaaaatatatatggcgatgaaaacattgccaatccatataactatggccacttgccagaaattaccgtaaatgcagatggtactggtcgcgttacaaagcactattgtttaggccgtatttcacacgaacttgtacaggttttcccggataaccgcactgtgttaatgggtgatgactataccaacggcggactatttatgttcgttgcagataaggagaaagatttatctgcaggtacactctacgttgcaaaatatacaacagtacttagtgatacaacgactggtcagatttcttggatcagacttggtcatgcaacaagtaccgagattgaaaacctcatcaagagcggcattaaaggaactgatatttttgagtcagttctacaaatagctaaatatccaagcgacgcaacaacagcagagaaagaggctattgatgcaggcgacaaaggtactcctgaacaacaagctttagccaaagctgcaaaagagcgtttaaaactacaacaagctgcccaaaaagcagaattagaagctcaaggttttaaatttacttatttaagtaaaactggtgtatatctcaagcttaaagataatagcgacagaactaaacttgcagcggctttccttgaaacacaccgttatgctgcttacatgggtgcttcaatggcattgaccaaaaacgaaggcacaacagtaaatattgcagataaaaaagcttattcggctttagctaatattgtcgattcaatggttgaaggtggtagcggttatcttgctgagcacaacgttaaattcccgaaaatcactgctggtggtattttggagcacacattaactggtggccagaaagacagctcaaatgttgcaatcaatagtgagtgggtacctagccaatctaaccttctcattaaaggtaaagatattagctttgacagcttagggaacaccgctgacccagagcaaattgctagccctgataacttgaagttctcagaaaaacttcgcactttatttatcggcgaagactctggtaaccacttaaataacttcttatgggcttataacgttgataccaaacagctcatccgtattttatctacaccggcaggtgctgaatcgacgggtctacatgcagtcgacgaggtaaatggttggacttacatcatgagtaacttccagcatccaggtgacgaatggaaccgtttctacaaagaaaaagatggtgttcgtactggtattagcgcagatttactcgctcaaattgatactgcaattaatacaaattacagtaataaatttgcagcagcagttggctatatcactgccgacccaattgcaccatctgttgtgaagaaataa

SEQ ID NO: 41425 - DNA, 771 bp, Acinetobacter baumannii
atgaaccaactgccttcaaccgctgtaaatagtcaagaaaacctagaccaaatgccaatcatgaatcatttggtggttttaagacgtcatttatttaggattgtaggggtaacattattcttatttttttgtttactgccctttcgaaatcatacttatcaattattatctgagcctctaaggttacaacttcctgcctcatcttccatgattgcaacggatgttacagcaacctttatggccccatttaaacttaatttatttgttgcgctcatgttggcaatgccatttattctttatgaaatatggtcttttgttcgccctgcgctttatcaaaaagagcgtcatttagcgctgccgttactcattggtagtattattttattttatgcaggtgtcgcttttgcttattacattaccctgcctgccatattacatttctttattagcgtttcacctgaaacagtagcaccaatgaccgacattaatagttatttaagcttctgcttaaagctatttttggtgtttggtgtcacttttgaaattcctatcgcgaccttgctacttattttgattggtgtggtaaatacgcaaagccttgctgaaaaaagacgttttattattgtaggatgtttctttgtagcgatgtttattaccccacccgatgcgatttcgatggtgatgctagcaattccaatgtggctacttttcgaaataggtctacttttcggcaaaattcttgagaaaagaaaaactcattctgctgaataa

SEQ ID NO: 41426 - DNA, 438 bp, Acinetobacter baumannii
atgcttgatgtaggaatgacagagttactctgttttgcaattattgcaattttagttttaggtccagagaagcttccggaagctgcacgctttgcaggtcgctggtatgttcgactaaaacgctatattacgaatctgcaaaacgagattgatcaggagctacgtctgtctgagttccgcaaagaaatgcaagaggaacttaaccgcattgaagcattggaacgtaaagtacaacaacagcttgaagaaatacaaaaacagcagttttcagaatctttagaagcaactgaaacagctaaaaaaacacaaaagcctattcggaaatgtactcctatatcgggccattacaaagtgccgtatctgactaaagttacgcctttggctcctcaaactgatatttcagaaacatctcctgttgaattgaagattgccgtatga

SEQ ID NO: 41427 - DNA, 219 bp, Acinetobacter baumannii
atggctggtttatctatttggcatgtcgttattttcgcaattgtcgttattttattgttcggtacatctaagctaaaaaatatcggtaaagatgtaggcggtgcagtaagagattttaaaaagtcagttcgtgaagaagacgaagctgcatctttaaatagccctcgtacaattgatgcacaagttaaaacatctgaaagcacatcagtgaaaagctaa

SEQ ID NO: 41428 - DNA, 876 bp, Acinetobacter baumannii
gtggcattattactgcctgtattggcatttatcacaggacttctacttgctcagacctccatttcagaaaccgtaaaacctattctctcagcttggcttgcacgactcctgattccgattgtgattatttacaacatggtcttttatcaatcgggaagcttgagcttaatgctttttagttttggttcggcgttcattattttctttgcttatttggctttatttaaagaccgcttattggcgctttgcgtaagttataccaacatggggtggcttggttttcctttcgctatggctttattcggtcctgaagcaactgctccaattattgctttatatattggaatgtcgctttttggcaatgcttgggctgtgactgccgttactacggcaccgcaaagtaagctcaatatattaaaaaaggttttaacttctccgccttgtatatcgatattctgtgctgttgtgctcagacttttaggggcccagcatatcgaaagccctgctatacattgggtttatgaggttgctaaatttgcaatgacttttgcaggtatgtgtgtgcttggaatgtggctgcgccgtaccagagtttatacaaaagatttaatttacagtacaaaagctcaagcatttaaagtggcctgtggatttgtactttgtggattaagttatagatttttaccgattccaaatataaatcagcacatcggtgtaatgtttttaatgttttgcttgccaccggcagccaatattgtagctctggaaacccattatcaagggacggggagatctgcggcttatatcgcttcagggacgattgtgagttgtgtgtgtattgcgatttatgcgatgtttttacatgtagcattataa

SEQ ID NO: 41429 - DNA, 624 bp, Acinetobacter baumannii
atgtctaccccacattggtttgatcagggttctttagtccttgcaagtaacaacaaaggtaaagtcgcagagtttgaaaaactttttgaacagctcaagttgcctgtagaaattattcctcagggtcgcttaaatattcccgatgccattgaagacggcttaagctttattgaaaatgccattattaaagcgcgtcatgcctctaaaatttcagggaaacctgctatggctgatgactccggtatttgtgttccggttttagggggtgcacctggtatttattcagcacgttatgctggagaacatggtgacgatgcagcgaataatgccaaattattaaatgaccttttgccatttcgtaaaaatggtgaagcgattgaaggtatgtttgagtgcgtacttgctttagtgactcatgcggaagatccattgccacaaattttccaaggcatctggcatggtgaaattttagaagcgccacgtggtgaaaatggttttggttatgacccactgttctggttgcctgagctacaagtttctagcgctgagttgtctaaagaagaaaaaaataagattagtcatcgtggacaagcgatgcagttatttagagaaagtttagtataa

SEQ ID NO: 41430 - DNA, 588 bp, Acinetobacter baumannii
atgaaaaagacattatttagcacactaattgcaggactgctaagtatgcaggctcatgcagattatatcgcccagccacaatcggttgcgagccaagctgcgcgcttctccacaatggggattcatgaccttcaaaaagcggctcaagctggtcaagctggagcacagttttatcttggtacacgttatcaatacggcaaagatgtagcaaaagacgataaacaagcatttgcatggtttaaagctgctgctgatcaaggtctttcacctgcgcaattaaatgttggccgtatgtatgctgatggtattggcgttaagaaagacgaagctatggctcgtaaatatttcgaaaaagcggcaagtaacggcgataaccgtgcaagctataaccttgcgatgatggaagagcaaaagaaaaactacgtaggtgcttatcagtggtatgaactttcaactcgtgatggcatgctcgacaataaagtgattagcttatctgaaggtaaaaagacggctcttgctgcaaacttaactcaagagcaaatccgtatggcacgtgaccgcgcggataaatggattcaagcacaataa

SEQ ID NO: 41431 - DNA, 594 bp, Acinetobacter baumannii
atgcgtattgatcaacaactggcagaaaagtggattaaacccggttctagcgtactcgatttagggtgtggtgacggtgaattactcgctcatatgagccaaaagcatcaaattcgtgcttatggtttagaaattgatcaagaaaagattgcaattgccgtcagtcgcgggttaaatattattcaacaagatttgaatctcggtttaagccgttttgccgaccagtcttttgactatgtggttatggcacaggctttgcaagccgtagatgcacccgatgttttattaagagacatggtgcgtgtgggtaaacaggccattatcacttttccaaactttgcacactggaagactcgctcttttctagcattaaaagggatgatgcctgtatcggatgctctaccatatatgtggtataacacccccaacattcatttatgtacgtttaaagatttcgaagcactatgtgcggaaaatcaaatacaaattattaatcgactcgccgtcaatggaaaccagcagggaagcctgttaagcaaacatgttccgaatttgtttggtgaagtcgctatttatcgagtgagtgcactatga

SEQ ID NO: 41432 - DNA, 1161 bp, Acinetobacter baumannii
gtgtcttttccagctgactcagtggggttagtcactccgcaaaagttccaatttgaagaacccttacatcttgaatgtggccgtgttttaccacgctttgagttaatggttgaaacttacggcactttaaatgcagataaatcaaatgcgattttaatctgccatgccctttccggacatcatcatgcagcgggttatcaccatgaagatgataaaaaagctggatggtgggatagctgtattggccctggcaaggcaatcgacacaaataaattttttgtagttgcgcttaataatattggcggatgtagtggatcaaccggtccaacttcaccaaatcctgaaaatgacaatcgtccctatggtccagatttcccgttagtaacggtccgtgactgggtcaaaactcaagccatgctttctgaccgcttaggaataagtgtctggtatgcggtggtcggtggttctttgggtggcatgcaggcattacaatggtcggtagactaccctgaccgtttacaaaaatgtgtcgttattgccagtgcgccaaagctttcagcacaaaatattgcgtttaacgaagtggcacgtcagtccattctgtctgacccagacttccatcatggtcgttatttggaaaatgatagctatccgaagcgtggtctaattttggctcgtatggtcggccatattacctatctttctgaagaagccatgaaacaaaaatttggtcgtgatttaaaatccggcaagtttatgtacggttttgatgtcgagtttcaggtcgaaagttatctccgttaccaaggtgaacagtttagtcgtaactttgatgccaatacttatctcattatgaccaaagctttggattattttgatccatcgcgggagtacggtcactcgcttacagaagcgatgagtaaaaccaaatgccagtttctgattgtctcattcaccactgactggcgttttgcaccaagtcgctcacaagaaattgtagatgcactcattaccaatcataaaccggtaagttatcttgatattgatgctgaacaaggtcatgactcgttcttattcccgattccactgtatgtcaaaacactgcgcgctttcttaggcggtgaagaacatttaaaatcgacatcactggaggcaagctaa

SEQ ID NO: 41433 - DNA, 1698 bp, Acinetobacter baumannii
atgatgttggctgaccctagcaaaaaataccgccgtatgtaccagcgagtcgatttaccagatcgccaatggccaaataacgaaattacaaaagcgccaatctggatgagcacggatttacgtgatggtaaccaagcaatttttgaaccgatgaacatggaacaaaagttcaaaatgttcaaaatgcttgtaaaaatcggttttaaacatattgaaatcggcttcccttctgcgtctcaaattgacttcgattttactcgtatgttgatcgaagaaaatcatattcctgatgatgtatacattgaagtattggttcaggcacgtgaccatttaattgaacgtactttcgaagctttagcgggtgctaagcgtgcaattgtgcatatttataactctaactctccaaccttccgtcaaaaagtgttgaatgtagatgttaatggcgcaaaacagttggcggtgaatgcagctcagaaagtgaaagaatatgctgcgcaatatcctgaaactgactggattttccagtatagcccagaatgcttctctgcaactgaattagaagtagcaaaagaagtctgtgatgcggttacagaaatttgggatgcacgcccagatcataaagttattttgaacttacctgcgactgtcgaagtttccacaccaaatgtttatgcagaccaaatcgaatggatgcatcgtaatttggcacgtcgtgatggcgtgattatttccgttcactgtcacaatgaccgtggctgtggtattgctgcatcagaacttgccattatggcaggtgccgaccgtgtggaaggctgcgtatttggtaacggcgaacgtaccggtaacgttgacgttgctgcaattgcattgaacatgtacacccaaggtgtagcgccagaattagatttctctaatattaatgaagtcattgcaacggttgaagaatgtactggtttacctgtacaccctcgtcatccatatgcaggtgacttggtatttactgcattctctggttcgcatcaggacgcaatcaaaaaaggctttgaataccagaaaaacgaagaaatctgggatatgccttacttaccaatcgacccgaaagatttgggccgcgactatgatgctgtcattcgtgtgaatagtcagtctggtaaaggcggtatcgcttacttattagaatcaaactataacgttgtattgcctcgtcgtttacaaatcgaatttagtcaggttgttcaacaatatactgatgagaatggtacagagattagcgctaaacaaatctggaccttatttaaagacacgtatgttgaagtgaaaaaccaccattacacggtcaaaaactataagttatctgacattaatggtactcaaattattgaacttgagattgatgttgaaggtgaaactcaacaattacgtggcgaaggtaatggtccaatctctgcattcttaaatgcacttcaattaccaattgatgtattgaactacgaagaacgcagtattagttcaggtgcaaatgccaaagcattaaccttaattgaacttcaagtgaaaggtacaggcagaggctcatttggtgcaggtgttcacgacaacacagtcacttcatctattgaagctattattgcatgtaccaaccgtttgattgatcaaggtgttttaagtacagatcaggttgttgccgccgctgtttaa

SEQ ID NO: 41434 - DNA, 684 bp, Acinetobacter baumannii
gtgatccatcatattcccaatgtcttgagtaaagagcaggtccaatattttcgtaatgaaatggataaaattgaatgggtcaatggcaaagtaaccgctggtacactctctgcaactgtaaaacgcaatcagcagctacctgaagatcaccctcttactcaccatctcagcaatattattcttgaggcactaggcacacaccctttatttttatctgctgcaattccacttgatatcatccctcctctttttaatcgttatgagaatcaggagtcttttggtttccatgtagataattctatccgacgcatacgtggtacaaacgaacggcttagaactgatttgtcatgcactttatttttaagcgaacctgaagaatatgaaggtggtgatctggtcgtagaagacacttatggttatcacgaagtgaaactcccagcaggagatatgattttatatccatccaccagcttacatgaagtgactgcaattacttctggctgccgtattgcttcttttttctgggtgcaaagtatggtgcgtgatgacgccgagcgacatatgctttttaacttagatcaaacggtacaaaacctaagaatgcaactgggtgataatcatagtgaagtaattaaactgactaacctttaccataacctcatgcgtaaatgggcggaactgtaa

SEQ ID NO: 41435 - DNA, 2232 bp, Acinetobacter baumannii
atgtcattgattagaacacgtaaaaaaattgtttcctctgcaatcgcctcatctctctcgatgatagcaacaactgcgatggcgcaagaagtagtttcgcaattaccaactatccatactaaagcgactcaagaagaatctttaaaagtagatcagtccgcaaactctaaattcgtggctccccttctagatactcctaaatcagtttcagttatctcaaaacaacttattgaagatacaaaagtaacaactttagcagatgcattgcgtactgttcctggcattactttaggtgcaggtgaaggcggtaatccgaatggtgaccgacctttcatccgtggttatagttcggaaagctctatgtatattgatggtatccgcaactctacctcacaaaaccgtgaaatgtttgcggtcgagcaagtagaggtaaccaaaggttctgcatcagcaatgggtggtgcaggttcagttggtggcagcatcaatatgatttccaaggtagctaaaaagggtgattttctagaaggctcagtagccgctggtactgataactaccaacgtatcactttagatggtaataaagattttggaaatggcattgcagcacgtgtagctgttttgggacatcaaaatgaaaaggctggccaaagtaatggggctgaatataaacgtgttggtattgcaccaagtattacttttggcttagatacaccgacacgtgcaactttgagctactattatttacaaacggatgataaacctgattcaggtattccttattgggattcatctcttggaaaagctcaaggtaaaccggctgaagtcaaacaaggtacatattacggctggaaagatcgagattttcaaaagcaagaaaatcacatcggtacaattaaattagaacacgatcttaccgacaatataactattactaatacggccatgtatgccaaatcaaaaaatgattatgtctggacaaacccagatgactcaaaaggtaatgttggcaaaggtcttgtttggcatcgtttgaactcagctattacagatagtgagacatttaccgatcaattagcacttacaggtaaatttgatactggcttcttaaagcacagatttaatgtaggagcagagtacagcaaacaaaagactgataaaggcggctataacattattgatgccaaaggtaatgtttctagtactggcttctatagcgattgttcagacttatcaacaaattggtgtacctcgctcaatggtccaactcaaaagccatttgttgaccgtttacaagcacgcccagactttgatgcaactgtagaaagtacttctgtctacttactcgacaatattgaaatcacaccaaaatggttattagatcttggcctgcgttgggataagtttgaagctgaacaaaacttcttagctacttctagtgcagcggcctatacagcaaaaaatgattcagatttcgtgacctatcaagcgggtattacatttaaaccaacagagaatggctcaatctatacaagctatgcaacctcagctagtccagtcggcttaaatgcaggttggggggataatagcgaaacaattaatgccaataatcaaatgattgatcccgaagaggcacaaacatttgaaatcggtacgaaatgggatttcctagataaccacctaaatttaacagctgctattttccgtactgaaaaacaaaatacacgtgtacaaatcgacccaactacttatgcaaatgtaggtgaaagtaaagttgatggttttgaattaggcttaaatggtgaaattactgataaatggaacatttcagctggctatacttatttagacagtgaactaaccaaaaatggtaaatcttgccgtagcggaaaatgtactgaccaatccatttataatggcaaccaaatgccaaacgtacctaagcaagctgctacgttatggactacctataaagtacttccacaattgacggtaggcgctggcgctgtttactctgacaaagtatatggtgatgtagcaaatactaaatgggttccatcttacgtacgttacgatgcgatggcacgttacaacgtaaataaaaatgttgatcttcaattaaatatcaacaacctatctgataagcgctatttcactaaagcttacgcttctcactatgcaacagaagcagaaggccgtagtgcagttctagcagttaactttaaatactaa

SEQ ID NO: 41436 - DNA, 1335 bp, Acinetobacter baumannii
atgcaagtaacgactgaagcggtttcgggcgttgcccgtcgtttaaatgtttctgtaccgacgagccgtattaacgagcaatttgaagctcgtttgaagcgcactgccaaaactgtgaagatcaacggcttccgtccgggcaaagtacctgcaaacgttgttcgccgcgaatacggtgcaagtatttatcaagaagttgtgaatgacatcattcgtgacagcgtatttgaagcaattcaacaagaaaaaatcaatgcggtaggtatgccgaacattgagaaagttgaacataaagaagatgctttagtttttgaagcaactgtagaagtttatcctgaagttgaagtaaaagcatttgacggtttggaagttgaacgtaaaacagctgaaattaaagacgctgacgttgacactatgatcgaaaacttgcaaaagcaacgtcaaacttgggctgtaaccaagggtatggcgaaaaaagacatgcaagtgacttttgacttcgaaggttctatcgacggtgagaagttcgaaggcggttctgctgaagactttaaacttgtgttaggttcaggccgtatgattcctggcttcgaagacggcatcattggtatgaaagctggtgaagagaaagttattgatgtaactttccctgaagattaccaagctgaaaacttagcgggtaaagcagctcagttcaaaatcactgtgaagcaagttgaaaagcctaaacttccagagattgatgctgaattcttaaaaatcttcggtgtttctgaagaagaaggcattgaaaaattaaaagctgacgttcgtaaaaacatggaacgtgaagttcgcaatggtttacgtaaccaagttaaacaagctgcatttgatgctcttgttgctgctaacgaaattgaagttccagctgcaatggttgctcaagaaattgaccgtcaacgtcaacaaatggttcaacagttcactcaacaatttggtggtgcaggcgcgcaatcttttgacaagagcatgcttcctgacgaattgttcaaagaacaagcagaacgttctgttaagcttggcgtattggtaagcaaagtattagctgatgctaaacttgaagttgaccaagcacgtgttgatgcttacatcgacgacatggcttcttcttatgaagatccaactgaagtgattgaatacttcaaaaatgatgctcaacaacgcgctcaaattgaagctgttgtgttagaagatcaagttgttgatcacattttagcttctgctaaagtgactgacaaagcagtatcttatgaagatttattgaaagaacaacaagctcgccgtatgggctaa

SEQ ID NO: 41437 - DNA, 606 bp, Acinetobacter baumannii
atgtatgttccaacaattgaaaatgctttagttcctgttgtggttgaacaatcttctcgcggcgaacgttcttttgatatttattcacggcttttacgtgagcgcgtcatttttctaactggtgaagttgaagacaacatggcaaatttgattgttgcccaaatgttgttcttggaagctgaaaacccagataaagatatccatctttatattaactcgccaggtggttcggtcactgctggtatggcgatttatgacacgatgcaatttattaaacctgatgtagtgacatactgtatggggcaggctgcatctatgggcgcattcttattaaatgctggtgctaaaggtaaacgctattgccttgaaaatgcacgtgtaatgattcaccaaccattaggtggattccgtggtcaagcatcagatattgaaattcatgctcgtgaaattctatttattaaagagcgcttgaaccgtttgatggcagaacacagtggtcaagactatgacacgattgctcgtgataccgatcgtgataactttatgactgcacaagcagcaaaagaatatggcttggtcgatcaggtattaagtaagcgtccataa

SEQ ID NO: 41438 - DNA, 1314 bp, Acinetobacter baumannii
atgtccgaacatcctcaaggacaaaaacattgttcattttgcggtaaaacgcagtctgaagtcgggaaactgattgcgggcgaggacgcatatatttgtaatgagtgtgtagatgtctgcttagaccttgtacaaaccagccaacaggttgaagcaggtgactgggcgagcaaggcattgccaaaaccacatgaaatacgtgctgcgcttgatcaatatgtgattggtcaggatcttgccaaaaagacattatctgttgccgtttataaccattataagcgtttgaaagtcgggcaatctggtcatgtgtctaaagatgtggaaattgctaaaagtaacattctactgattgggcctaccggttcaggtaaaacattacttgctcaaacattggctcgtttgttagatgtgccgtttgcaatggcagatgcgactactttgactgaagcgggttatgttggcgaagacgttgaaaatatcgtacaaaagcttttgcaaaaagcagattacgatgtagaaaaagctcaaaagggcattatctacattgatgaaatcgacaagattacacgtaaatctgaaaatccgtcgattactcgtgacgtgtctggtgaaggtgtacaacaagctttgcttaagatgattgaaggtacggtagcctcaattccaccacaaggtggacgtaagcatccacagcaagagttcattcaaattgatacctcaaatattctatttatttgtggtggtgcgtttgctggactggaaaaaattgtacaacagcgtcaagagaaaggcggaattggctttacagctgatgttaaaaacaaagatgaaaccaaaaaacttgctgaattattccgtcaagttgagccaactgatttagttaaatttggtttaattccagaattcattggccgtttaccagtgattgcaacgcttgaagagcttgatgaagaagcgttaatgcaaattttgactgaaccgaaaaatgcattaactcgtcagtatcaatacctgttcaatatggaaaatgttgacctcgtatttgaagattcagctttacgtgcagtggctaagcgagcgcttgagcgtaataccggagctcgtggcctacgttcgattttggaaaatgttctacttgaaacgatgtatgacttgccaagccgtacagatgtaggaacagttttcattaatgaagcagttattaatggtgaagctgaacctgtctacaagtcagaacgtcagcctaaagaagctgtaacacatgaaagtgttgctaaggcagatttaaaagtaattgattcgaagtctgcttag

SEQ ID NO: 41439 - DNA, 717 bp, Acinetobacter baumannii
atgcgttatttaattattgctttaagttgtgccgcattacttgcaggttgccaaagttcatcacacttagaaaagaattcaggtgagctgactgccactttacctaaagttgatgttgataaagaacctggattattggatcaatatcgtttaggtggcttcactgtagggggatgggtaaatcaaaagttaggtcagacatttgcgccagttaaaccccaaaatgagcaggcagcagttgtctatctttaccggccagacacgaaatggaatcgtcaggaaattgcagccatcaatttatttgtaaatggaaaacgaattccaagtttattgcataaccattattactggattgaactgccagcaggaacttaccgtatttcagcgagccgtcctttgttggggattcattttcaagaacctaaatatatcgatattacggtagatgcaggcgcatcttattatttgaagtatgatgaagaaaataaaatggaccgtagtgagcacacgggtccatttatgttaatgcaagataatattggtcgtagagaaattgcatttaccgagcttaaatcttctagctacaattttgttgctgaagatgcttcaggaaaaatacgtcataagccccaagaattaaaacctgctaaatataatgaaaagtcagatgtacatctgataaaaccttttaaattgtggaaccccttaacgtggtaa

SEQ ID NO: 41440 - DNA, 555 bp, Acinetobacter baumannii
atgactattcgccctattcttaaaaatctttcaatcagtctctgtctaagctgtattaccacgagcttatttgcttctcctgccaagttaagttcagtaaaagaactcatgcaaatgagccaaattgattatctattgaaagaatcaatcaatgagttaacgccttactatgatcaacaagctgaacagatcattagcaatattacgggcatcaaaactttaggtccgaaagaaaaagaggcagcgaaaaagttaggcttacttttaaaagattcgagtaaccagctgattagtagccctaaaacgactcaagccttacaagatatttatttaaaaacttataccgaagaagaaatccaagcaaatttaaagtttttgaaaaccccagaaggccaatcaattacccgtaaaaatgtacagattatggggcaaatttcagaatatatgatggaattgggacagcaaacttttaatgaccctaaagcacgagatcatatgcaagaagaaatgctaaaaattattgcaccattaatgaaagataaagaaaagtcttaa

SEQ ID NO: 41441 - DNA, 1527 bp, Acinetobacter baumannii
atgacaacgattatcaaacaagatgacttgattacatcaatcaaggacgccctacagtttatttcgtactatcacccgcaagactttatccaagcgatgagccgtgcttatgatcgcgaagaaaacaaagctgcaaaggatgcaattgcacagattttaattaactctcgcatgtgtgcggaaggtcatcgtccaatttgccaagatactggtattgttaacgttttccttgaagtgggcttagatgttaaatttgatttaacaatgagcttagacgatgcagtaaatgaaggtgttcgccaaggttaccttgaaaacagcaacgttcttcgcgcatctgtacttgctgaccctgcatttggtcgtaaaaatacaaaagacaatacccctgccgttattcactacaaactcgtaccaggtaacaaagtagatattactgttgctgctaaaggtggcggttcagaaaacaaatctaaacttgcgatgcttaacccatctgactcgattgttgactgggttcttaaaaccgttccaactatgggtgcaggctggtgtcctcctggtatgctcggtatcggtattggtggtactgctgaaaaagccatgatgcttgcgaaagaagcactcatggaagaaatcaacatggacgaattacttcgccgtggaccagagaacaaaatcgaagaacttcgtatcgaaatctttgaaaaagtaaacgctcttggtattggtgcacaaggtcttggcggtttaaccactgttcttgacattaaaatcaaagactacccatgtcacgctgctggcaaaccagtaggtatgattcctaactgtgctgcgactcgtcacgctcacttccagcttgacggttcaggtgtagctcatattcaagcaccaaaacttgaagactacccatctgtaacttgggatgcttcacaatccaaacgtgtaaaccttgataccattactcaagaagaaatggactcttggaaaccaggtgacacattacttcttagcggaacaatgtacacaggtcgtgatgctgcacacaaacgtatggttgaaatgatcgacaacggtgaagaattaccggttgatcttaaaggcaagtttatttactacgttggtcctgttgatccggtacgtgatgaagtggttggtcctgctggtcctacaacggctacacgtatggacaaattcacacgtaaagtactcgagcatactggcctattcggtatgattggtaaagctgaccgtggtcctacagcaattgaagcaatcaaagacaacaaagcaacttacctcatggcagtgggcggtgcagcttacctcgtatctaaagctgttcgcgaagctgaagtggttgcatttgcagacttaggtatggaagcaatctacaaatttgtagtggaagatatgcctgtatctgttgcagttgatgtaaacggtacttcaattcacgcagtagctccaaaaatctggcaagcgaaaattggtaaaattccagtaatcgatgccgcagctggctaa

SEQ ID NO: 41442 - DNA, 2145 bp, Acinetobacter baumannii
atgaatacaattttattaattcctacaggtgaaggggttggtttaacctctgcctgcttaggtatgatttatgcacttgattgtaatgggattaaagcaggctttttaaaaccgttctctcaggtagatcaagaaaatttagaccgaactacctctttatttggtcatttatttcaaagcaaaactgttcaatccatttctcatgaaaagctaacccaacgcattgcggctggtgaagtcgatgagttacttgaagaagcagtaagtcttcatcgcagtatcgcagcagacaataatgtgattattgttgaaggcttattaccaaatgggcaagaccattttgccagtgaacttaatgcaagccttgctcaagcgcttgatgctgaagtggttttagtcagtacagcagatattcaaaacccacgtaaaacagcagagaaagttgaagctcacttacggcagtttggtggtgcaacctctaaccgaacagcgggcgtactctttatgcgtacacgtgggttgtctgaagaaacagctcaaataccggttgcatttgacccgtcgttacgtccaaccgaagacatcgcaaaatttacggcagaattgcaaaaatataaccgctactttggatcaagcgatttaccaattattggtctagttccgtttagtaataccttaagtgtacctagaacattagatatcgcgagcgtgattgatggccaatggataaatcaaggcgaagcaaaaacacgtcgtattttgcactcaagtttaattgcctcaagcattgaatatgaactgaataaattcattgctggcgaactgattattagcgcttctgaacgtaccgatgtattactggcaagtagtctcgccaccagtaatggtattccactggcaggcttggtgttgactgagcgtgaagctcctgctcccaagcttttagagttttgccaaagtgcaattaaacaagggttgccaattttacatacccatttaaatacactagaaactgcgcagcgcctatccgattttggtaatgaaattccaactgatgacactgaacgtgccgaacaagtgacccgatttgtttcaagtcacatagatgtcgaatggcttaaacagcatagtaataacggtgctacaccacgcctttccccttctgcattccgtcatgaactggtacaaaaatcgattgcagctaaaaaacggattgtccttccagaaggtgatgagccacgcactattgaagctgctactatatgtcaggctcgtggtattgcgcattgtattttgttagcaaaaccagaagctgtacatgacgtagcaaaagcacgtggtatcgagttaccggccgggttagaaattattgatccagatcagatccgtgaccaatatattgcaccaatggttgaactccgcaaaggcaaactcaacgacctacaagctaaagagcaattacaagatactgtagttctcggcaccatgatgctagctctagatcatgtggatggattagtttcaggggcagttcatacaaccgccaatacagtgcgtccagctttccaattgattaaaaccgctccagcatactcactggtttcatccattttctttatgcttttaccggatgaagtctatgtctacggtgactgtgcaattaacccagaccctacagccgaacagcttgccgaaattgcgattcagtctgctgactctgcaaaagcgtttggaattgacccacgtattgccatgatcagctactcaactggtacatctggaacgggtgctgatgttgagaaagtacagcaagcgactcaaattgcacagcaacgtcgccctgatttactgattgacggtccactacaatacgatgcggcttcagttgaaagtgtaggacgccaaaaggcgccagactcacgcgttgctggccgtgccaatgtgtttattttccctgacttaaatacgggtaacacgacttacaaagcagtacaacgtgcagcaaatgtagttagcgttgggccaatgctgcaaggcctaaataagccagtcaatgacttgtctcgtggtgctttagtagatgacatcgtctttactattgcattaacagccattcaggccgagcagcaagctgctgccaaataa

SEQ ID NO: 41443 - DNA, 1263 bp, Acinetobacter baumannii
atgccttttgatcaggaagttaggaaaactatttttatatcaggacttgggtatttcaacgtggctacatcagtattagttattaattgcggttcttcatctattaaatacgcactggtttcagagcgtcgtgaagatcgtatttacggtttagcagaaaacttaggggcagctgatgctcgtattaaagggattactgtcggtggagaaccgctagagctttcaattccttatgctgaccacgccaaagctttagaaactttacttgcacgtcttgcaaactataaacctcaagcaatcggtcaccgtgtcgtacatggtggaagccttaccaaagctgaattactcacccctgaaattgtagaacgtattcgtgcagccactccgcttgcaccgcttcataatcctgctcacttaatcgggattgaagcaacgatgcgccttttccctgaattacctcaagttgccgtatttgacaccgcatttcatcaaactatgcctgcacatgcataccgttatgcaatccctaagtttttgtatacagaacataatgttcgtcgctatggtttccacggtacaagccatgcttatgtgtctgaccgcggcagtgaactggcaggaaaattccaaaaaggcggttggttaacagcacacttgggcaatggtagctcgacttgtgcagtgtggaatggacaaagtgttgatacttctatgggccttactccacttgaaggtgttgtaatgggaacacgtagtggtgatgtcgatccaagcttacacagcttccttgctaaaaatcttggctgggacttagcaaaaatcgataaagttttaaataacgaaagtggattacttggcttatcacaactctctaacgatatgcgtacagtgattgaagctgctgaaaatggcaatgaggatgcttgcctcgcgattgaagtatttagctatcgccttgcaaaatcacttgctgccctaagctgtggtctaccaagtattgatggattgatctttacaggcggtattggtgagaactcagcttatatacgtgaaaaaactctagcttatttacctcatttcggtttacagctcgataaagaccagaacaacaatttaaaacgtggtacagaaggccgtattgatagcggcacaggtccacaaatctgggtgattccaaccgatgaagaaggccgtattgccaaagaaactcgtcaggttgtagaggtttcacaaaatacatctcctgaagttagccttgcttaa

SEQ ID NO: 41444 - DNA, 1854 bp, Acinetobacter baumannii
atggacttgccgaatccagtattggcaaaagttactgaacgtgtaattgcgcgtagccaaaaaactcgttctgcatatttacaacgtattgaacatgcccaaggcaaattcccagctcgtggtgcactctcatgtgccaacctggctcatggttttgctggcatggaagataatgaaaaattaattattaaagttggccgtgaaccaaatattggcattgtgtcttcatataatgaaatgctttcagcacatgccccatataaaacattccctgacattataaaaacagctgcacgtgaaaatggtggtgttgcacagtttgcgggcggtgtaccggcaatgtgtgatggtattactcaaggtaatgccggtatggaattatcactattttcacgtgaaaccattgcgatggggactgcgattgcactttcccataacatgtttgatgccgcattgtgtctcggggtatgcgataagattgttccgggcttgctgattggtgctttgcagtttggttatctaccaaccatttttgtacctgcggggccaatgagtagcggtttgtcgaatgatgataaagctaaaatccgccagcaattcgcgacaggtcaagtaggacgcgatgccctacttgaagctgaatcggctgcctatcatggtcaaggaacatgtacattctatggtactgcgaacagtaaccaaatgttgatggaagtgatgggcttacatttgccaagtgcggcatttgttcatcctcataccccattacgtgatgcgctcactgctgaagctgctaaacgtgtacttgacttaactgccgagcgaggcaactacacgccgattggccatgttattgatgaaaaagccattatcaatggcattgtggctctattggctacaggcggttcaaccaaccatacgttgcatcttattgcgattgcgcgtgcggctggcattttaattgactgggatgactttgatgagttgtctgctgttgttccattgctcgcaaaaatctatccaaatggtaaggccgatgtaaaccatttccaagctgcgggtggggtagcattccttattcgtaacttacttgaggctggtttgttacataacgatgtgacgaccgtcgctggtaaaggtttacagcattacaccaaagaaccgaaattgattgacggtaagcttacttgggttgacggggtagttcaaagccttgatgacaaagtactccgtagcattgatgcgccgtttcagccagatggcggcttgcgcttaatgcaaggtcgccttggccgtggtgttatcaagatttctgcggttgctccagagcaccgtaaagtgaaagcaccggcaattgtttttgactcgcaagaagcggtacaggcagcgtttgatcgtggtgaattgcaccgagactttattgcggttgttcgtttccaaggtgcgcgtgctaatggtatgcctgagttgcaccgcttgactcctgtgttgggtgttttacaggatcaaggcttccatgttgcattagtaaccgatggccgtatgtctggtgcttcaggcaaagtaccagcagtcattcatttgtctccagaagcgttattgaacggcccgattggcaaagttcaaaccggagatatgttaatcattgatgctgaagctggtgtactcgatattgagttagatgagcagacttggcagtcacgtcctgttgctcaaccagaacatcaggcagaaaacgaagttggttttggccgtgaattatttggtgtgttccgtgcggcagcagcgcctgctgaacatggcgcatctgtgtttggtgcacttgttggcgaagagccacaagggcagatttaa

SEQ ID NO: 41445 - DNA, 621 bp, Acinetobacter baumannii
atgagcaagattgaagatgttgtcaaattaggtccagtaattccagtgttggcttttgactctgccgaacaaggtgaacatgtatcacgtgcgttgcatgctggtggtgtaaaggtactggaaattactttacgtacagcagctgggcttgctgccattgaacgtgcatctcagttagcagatgacattgtggtaggtgtaggaacgattactaagcctgagcattgtgcccaagctaaaaaggctggtgctaaatttggggtatcacctggtttgaccaaagacttgcatttggctgcacaagatgcaggtttacctcttttaccaggcgtaatgacaccgagtgatctcattcaagcgattgagttgggctacgacattgtgaagtttttccctgctcaacaggcaggtggggttgagatgctaaaagcattttatggtccatttccaaacttacgtttctgcccaacaggtggaattacagcagagacagctccagattttttaaagcaacctaatgtggtgtgtgtaggtgggtcatggttaacgcctaaacctgttgtcgctgcacaagattgggctgaaattacccgtttagcccaaattgcaagtcagttgtga

SEQ ID NO: 41446 - DNA, 1359 bp, Acinetobacter baumannii
atggagacggttcagggtggcatgttgcttgtctatactttaattgcgatcattgctttgattgtcatgatcgcgaagtttagaatttacccctttttagttcttattattgtttctcttggtttagctcttgcagttggcatgccaatggacgggattgttaaatcatatgaagcaggtaccggtaaaacactaggtcaccttgcgattgtgattgcgttaggaaccatgcttggcaagatgatggccgagtcaggcggtgcagaacgaatagcaattactttaattaaatggtttggtgaaaaacatattcactgggcgatgatgttcattgcgttaattgtagggcttccggtattttttgaagttggttttgtacttcttattccaattgcattcaatattgccaaacgtacaggtaaatcattattaattgttggtttacctatggttgcgggtttatcggtcgtacatgggttgattccaccgcatccagccgccttgcttgcggtacaggcttaccatgccgacatcggtaaaaccattatgtacagtttattggttggcgtcccgacggcggttgttgcaggtccattgtatgcattatggatcaacaaatatgtcaaattgcctgaaaataatcctttagcaaagcagtttgttgaagcagatgctaacaatacacgtgaattgccgagctttgggattaccttatttacgatcatgctaccggttgcattgatgctagttggtagttgggcagatgttttctttgcaccaaaaacattcccaaatgagttattacgctttattggtacttctgatattgcattgcttattgctgttttggttagctttattacttttggcaccatgcagggttttaaccgtgaacaaattgaaaaattctgtggtggatgcctagcttcaattgcgggtattttgctgattgttggtgctggtggcggtttcggcggtattttaagagacagtggaatttctaatgaaatcgtctctactgctttaaaagcaaacctttcaccattgttattaggatggcttgttgctgctctcatacgtctggcaacaggttcggctactgttgcgatggccacggcttgtagcattgttgcacctattgcggcagcagcaggtgtagtcgttagacctgaacttttagtattagcaacaggttctggatcattaattttctcgcatgtaaacgatgctggtttctggctaatcaaagaatattttggaatgacagttgggcagacactgaagacttggtctgtactggaaacaattatttcggtacttggtttgtctttcacattgttgcttagtgctgttttgtaa

SEQ ID NO: 41447 - DNA, 513 bp, Acinetobacter baumannii
atgatagtgatagcaatgggtgtttgtggcacagggaaaacccttattggtgagttgttatcagagcgtttggcttgtgagtttcttgatggcgatacgcttcattcagctgcaaataaaagtaagatgagccaaggtatccctttaaccgatgaagaccgcttgccgtggttgcaagctattcgtcaggcaattgaagcaaaacaaagagatggtgaaacggctgtgtttacatgctcatctttaaagcggatgtatcgcgatattttaagagggcaggaccaaaatgttaagtttgtatatctaaaaggttcttatgaactattacagcaaagacttgcagaaagatctggtcatttttttgatccggcattgttacaaacccaactagatacattagaggaacctgatgtgaatgaagcaattgctattgatattgctctcacaccagaacagatcattgaacaagttatccagaagctaggggtaactgatagtgtgtgtcgggggtaa

SEQ ID NO: 41448 - DNA, 1629 bp, Acinetobacter baumannii
atgaatcagttaaataatttgcagcataaattcccagtagtggacggtattcctgaaagtgtacgtttgccatctcaaattcatcagcgtgtttcactcgtggatggtgagttgaagttatgggctggtgcaaccaagaaaacattatctccaatctggattcagcagcctgacggtagcctagagcaagttgaacttggtagttatccagtcatgggtgagaaagaaagcgatgaagcattagaagcagcggtacgagcttataacaatggtcgtggcgaatggccaatgatgaaggttagtgagcgtattgcatgtatgcaaaatttcattcagcgcatggtagagcaacgagatctgattattaagctgatcatgtgggaaattggcaagagcttggctgattcagagaaagagtttgatcgtactattacctacatgcgtcaaaccattgatgccctgaaagatctggataatgccaactcccgctttgtaattgctgaaggcaccattggtcaaattcgtcgtactccattaggtgttgtgttgtgtatgggaccatacaactacccgctaaacgaaaccttcgcgaccctgatcccagctatgctgatgggtaataccattatttttaaaccgcctcaatttggaactttactatttgaaccattgttagaggcatttcgtgattcatttccaaaaggggtgatcaataccatttatgcaccaggttctctagtggtgccgcatttgctggcatctgggcaaattaatgtactggcactgattggttctagtaaagtagctgatcacttgaaaaaacaacatcctaaatctcaccgtctgcgtgcgattttggggctggatgctaagaatgcagctatcattttgccagatgctgatttggacctgacagtgaaagagtgtctgttgggtgcattgtcattcaatggtcagcgttgtacagctttaaaaatgctgatggtgcaccgttcgatagccgatgagtttgttaaccgtttaacgactgagctggctaagttgaaagtaggtatgccgtgggaaaaaggtgtatctattacgccgctaccaggcatgcaccgtacagcctacatgactgaagtgattgaagatgcggtggcaaaaggagcaaaagtggttaatccggaaggtggtgaattctgcaaaaccatgttctatccagccgtagtttatccagtgactgaggggatgagactgtatcgcgaagaacagtttggtccagtggtaccagttgctgtttatgatgatattgaaactgtattggattatgtcactacttctgatcatggtcagcaggtgagtatttttggtagtgacccagcgcaaattggccatttagtcgacacactcgtacatcaagtttgtcgtgtaaacatcaactgtcagtgtcaacgtggtcctgatgtattcccatttggtggccgtaaagattctgcagaaggtacactttctgtgcatgatgcgcttcgtgcattctcgattcgctctatgattgcggctaaacagacggatgacagtaaaggtatgctggcttctatggtgtctgagcactattctaaatttgtgaataccgactttattttctaa

SEQ ID NO: 41449 - DNA, 1266 bp, Acinetobacter baumannii
atgcaagattcaattgaacaatatatgcaaaaagttgggcaacaagcacgtgatgcttcacgcgtcttaacaagtgcttctacctcacttaaaaatcatgcgctctctgccatttatactgctttggaaaacaaccaagcagctatcttggcggcgaatcaaatcgacatggaaaaaggccgtagcaaccagctcgacagcgccttacttgatcgtcttgagcttacgcccgcacgttttaaagggatgttgcaaggtttaaaagatgtgatcgcgcttgtcgatccaattggggaaattacggatcttgcatatcgccccacaggcattcaaattgggaaaatgcgtgtacctctaggtgtcgttggtatgatttacgaatcacgtccaaatgtcacacttgaagctgcatccttagcaattaaatcgggcaatgccattattttacgtggtggctcagaagcacttgagtcaaataaagcaatcgcagaagcggtgaagcatggcttaaaagttgctggtttacctgagcactcagtacaagtgattgaaacttctgaccgcgcagcggttggtcacctcattactatggctgaatatgttgatgtcattgttccacgtggtggtaaaagcttaattgagcgtgtaaccaacgaagctcgtattcctgtgattaagcatcttgatggtaactgtcatgtgtttgtagaagctcaagcagacttacaaaaagcgttaccaattaccttgaatgctaaaacacatcgttacggcgtttgtaatgcaatggaaactctgctcgttgatgaaaaaattgcagaagttttcttaccacatattgctgagctttatgctgaaaaacaagttgagctacgtggttgcccagaaacacgtcgtattttgggtactactgtcaaacctgcgacagaagaagattggtataccgaatatttagggccgattcttacagttaaagtggtgagcggtattgatgaagcaattgaccatatcaataaatatggttcgcatcataccgatgcaattgtgacagagaactatactttggcacgtcagttcctagctcgcgtagattcaagctccgtcgtagttaatgcatcaactcgttttgccgatggctttgaatatggtttaggtgctgaaattggtatctcaacagataagattcatgcacgcggccctgttggcttagaaggtttaacttctcaaaaatggattgtgttaggtgacggtcaaattcgtcaataa

SEQ ID NO: 41450 - DNA, 1314 bp, Acinetobacter baumannii
atgaattccattattcaaatggattcggagataaaccaagcttatgccggttttgggtttttcgatatctaccatagagatagttttaaacagccagctcgtaccacatggattgacggttggaaaattgaatacatggcgattgcagacccacaaacgattcacaaaacaccgattgtgattgtgggcggtgcttttcaaaattttaactcgtataaatattgtgttgaacaactatttgaaagtggcccggtcattctaattgacttgccatcaatgggtgcaaatcaacaaattaccaatcgagataccggaatttctgctggaacattagaactacctgatttgtcagaaatgttaggacgttggttagatatcgtcggaattcaaaaagtttctgtaatgggaatgtcattggggtcagttgttgcttcttgttttgcttatcatcgtccagatttgatggaccgcatgattttaatgggtgtcatgcaaaagacccgtaaaagctggcggatgatactggaagagtcgctcaaactcatgcaagaaaatcgtatggaagagtttgggcaagcggtaattttatatttggtgaatcatgccaaattagataaaacacgtatgtcgcctacagctaaaaaattattttttaggcaaatggcagaatttacgggtaccgaaagagaacgttatgaaattaactgtaatcgccttttgcgtttaacagatgtacctattccagaatgtaagacactggtcgcagcagggcagtacgatagttttactttgcctcatgaaaatgccaattttgctttgcaatgtccggatatggaatttgctctgattgctaacgccgaccatgtgccgcagctccagcgtcgtaaagaaactatgagtttgttcacttcatttttgaaaggtgaatctatccaaaatctggatggcattattccaataacgcgtgagcaaatgcaaaacatggaacgccgaggtgaagagcgtataccagttctccagcctaaaaccaaactgagccaccgtgaatgtgaaacagaggtgccagtgacgattgttgacgtgactttctttgggatgtatttgaagttagatgatgtaacacagcttgagtttgtaaatgaacacccacgtgatttggctttacatttagaagatgaagagggtgctttctcgattgagtgtttaatttttgaagctactgaacaaggagtccgtgccttatttaaacatggtagctttgagcttgctgaccgtttaagccgcttcattgctcgccagaaacaagcagcttaa

SEQ ID NO: 41451 - DNA, 843 bp, Acinetobacter baumannii
atgacacaacacctttcaaaacaccgccacatttcttttacagcccactatacgggttatatctggtatcaaatggggatctcacatgaagcacttgccaccagtaaaggcaaatcactggcatatttagttcacccattagagtcttgggcggagaaatatgtcggtggcagtatgcgcacgacgcttaaacagcgccataccatgcttgatcatgatttagagaagttaattcaagaaaatcctgatttacaggtgcttgaaattgcctgtggtttatcacctcgtggctggtggtttaggcagcattatccttccattagctatcgagagcttgatttgcccgatatggctcagacaaagcaaaatgcactacaacaaattgaaaaaaatgcacctaaggttttatcggtcgatttatttaccgaagcctttgctcaagcatttgaagtttttgactctaatcgcccactggttgtaattagtgaaggtttaattaactattttgataaagacttattaaagcaactgatccaatccattgcccactatggtgcttcctttaaaaagctttattatttaaccgacctgtatcctgaacccgttaaaaacaaacttgctagtattatctggaacagcagtaaattacttaaacttatgtctcgaagctcatttagttttcattttaagactccactagaagtgaaagacttttttaaagatgcaggctttagtcaagttaacgttgaacaaccgcaaatattctttggacaagtttctaaagacagcgatgaagagcatttaggcgacttagtctggactatccatgctcaattaaaataa

SEQ ID NO: 41452 - DNA, 1020 bp, Acinetobacter baumannii
atgattggcgcgttgatgctggacatagccggcacagaacttactcaagaagatattgaactattacaagctccgcaagtcggtggcatgattttatttgcacgaaatattgaatcaccacaacaagtccgtgctttaaccgaccatatgcgccaagttcgcccagatattttgattgctgtcgaccaagaaggtggtcgcgttcaacgtctaaaatctggctttacattattgccagccatgggccgttttggcgagctctatataactcaacctcaaaaagctcttgaactggctgaacagtgtggctggttaatggcgactgaagtgcttgcagtcggtatcgattttagttttgcaccggttctagacctcaatgcgattagtgatgtgattggtgaccgtggcttctctaaaaatatcgaagatatcgctccacttgctggtgcatttatgcgcggtatgaaaaaagccggcatggcaaataccggtaagcacttccctggtcacggttcggtaaaagccgattcacatgtcgcagctgcaatcgatagccgtagctatgacgaaatttataatcatgacatgcaaagctttattaagcttatgcctgagctagatgcgctcatgccggcacatgtgatttacgatcaggttgacccaaatccggcaggtttctcatctttctggattcaagaagtccttcgtaatcgcttgaagtttaatggcgtacttttctccgatgacttaagcatgcaagctgcttgtgtggctggtggtgcagatgcgcgtattcaagcggctctggcagcaggctgtgatatggggttagtgtgtaatgaccgtagtgcagcatgtacagcactcgatggtattacaaacttagagctaccaaatcaagagcgtttagaacgtatgcgtggtcgaattccacaaatccaagctggtgaaactttatcgcttggaaatgattggcaagctgtcaaaacagccattgaagagtttaagaattcgatttaa

SEQ ID NO: 41453 - DNA, 2184 bp, Acinetobacter baumannii
atgaaacttcaaactatagcttgtgcagtagcaatcgcgactggcggtttattcttctctcatacgatgaacgaagcaagagcagcaaccaatactgctgctgtttctcaatcgatccagccaacgcaagagcaagccttggtggctcgtcaactggcaactttagtagaccgccaacattatttaaatatgcgtctggatgcgaacacatctaaccgtattcttgatatgtacttagacagtcttgatccggaccactcattatttttagacgctgaagttcaaaactataaaaagctctatggttcaaattttggtgcttcattaaaagcggggaatttaactgggccatttgctattcaccagcaatatcgtgagcgcttaaagcagttttatgagttcatgcttgctgagttgaagaaaccacaaaacttaaaacagccaaatacttttattgaagtagatcgcgaaaaagcaccgtattttaaaacgtcagctgaacagcaaaatcactggcgtaaaatgctggtttctcagttaattaatttaacaattagccgtgaagaagagcaggcgaaacaaaaggcgttaaaagaaaacccttcacttgctgatggtcaagatttaacaggcccagaagatttaacaccagctcagactttgactaagcgttatacgcgtcagcttgaaagaattagtcgtgtgaaaagcgacgatgtgttggataaaacattaaatgcaatgttggcaacttatgatccgcacagtaactattatccgccaattgatgcgatagaactcaatcgccaaacaaccttacagcttgaaggtattggggtatcgattcgcccagaacgtggtaatgaagattacaccaagattgaaactattgtagaaggtggtcctgcaagtaagtctggtcaagtgaaatcaggagaccgaatcgttggtgtcgctcaagagggcggcaaaatgatcgatgtggtcggctggtcgagttcggaaattgttgggttgattcgtggtaagcgcggtacaaaagtaacgttgaagcttcttggtgctggtgcatcaatgagtcaggcacgcaatgtgactttggtacgtgatgttattcaagaagaagatgccggtgttcgttcacgtacagttgaagtgacacgtgatggtaaaaagcatctattaggtgtgattgaaattccatcgttctattttgactatcgttcacgtcgtgccggtcaacaatatcgctcagtttctgaagatacggcaaatgcttttgaggcattaaaagccaagaaagttgaaggtattattattgacttgcgtaatgacccgggtggttcattagaagaagttgcacgtatgcttggacaagtgattaagtcaggtccagttgtgcaaattcgtgatggtaatggcaacgtaagtgtatttgaagacaacgatggtggtcagcaaatttatacaggtccactcgctgtattggtgaacttagcctcagcatctgcaagtgaaatttactctgctgcaattcaagattatgagcgtggcattatcattggtagtacaaccacaggtaaaggtacagctcaggtccaactcgatactttggcatatggtcaagcaaccttaactcagcgtaaattctaccgtgtaactggtggtagtacgcaaaacaaaggtgtagtgccagatattaagcttgttgatatctataacgaagagtttggggagcgtaaatcgaaaaatgcgttgaagtgggatacgattccgactgcaccatttaagcgtgaaggttcagtgcagccatatgtcgcaaaactgtctcaactttcggaacaacgcgttgctgttgatccacagtttaagtatttaaataaacgtacagcaattgcgaaggttacgagtgaccagaaacaagttgtgcttgatattgataagcgccgtgcagagcttttgagtttagaaaagcaaactttagatgctgaaaatgaacgtcgtatagcaacaggtcaaaaacctttccctaactgggaaagctatcaggcttctctagatgctctagctgaatctcgtgccaaaatgaaggctaatcaacgtcctgcgttgccagaagaagaaacgttcgtaaatgaagctgcgaatgtattgatggattatgcgaaattgcagaaccgttaa

SEQ ID NO: 41454 - DNA, 1287 bp, Acinetobacter baumannii
atgcaaggctcatacgcgacagcactattaaaacaacagcaacttcctgaaagcttccaattctattttaaacaaaaacagcatttgtctaatactcaggaattgcaccaacttcacgagttggttcgtcctcgtttaaaaattgcgattgtgacagaaacatggccgcctgaaattaatggtgtagcactctctttgttgcagttatgccaaggtttacagaaacaagggcataaaattctacttgttcgacctgagcaaaaagccaaatgtcatgattttttgccagaacaagaatgtctggtcatgtcacaagcgattccaaaatatccaactttgcaatttggctggccccaatatttaaaagtttcaaaagcttttgaaaaatttgtgccagatgtcgtacatattgtgactgaaggaccgttaggtttaacagccatgcaagccgcaaaagccaaagatattccggtctctagtggttttcattcgccgtttcaagattttagcaggttcttcgatttggcctttttggtgaagccgattcaaaaatacctttgctggttccataacaatactcaagtgacctgtgttccaagtaaagatacggaagaggctttacgcggttttggcattacatgtcctctagtcgttgttgggcgaggagtggatactactcggttttcaccaaaacatcgctcagaaaacttacgccagcaatggggcgttgattccgatacacgtgtcatgttgtatgtaggtcgtttatcaccggaaaaagaagtccagctgatcgttgagagttatgcagctatgcaaaacattcagcaacagaaaactaaactggttgtggtgggagatggcccggatcttgctcgattaaaagcactacctgaagcgaaaaatgttatttttacgggtagtttgcgcgggcacgatttggcagtcgcatatgcaagtgccgatgtctttgtatttgcaagccaagttgaaacgtttggtaacgtagttttggaagcaatggcgagcggtttgccagttatcgcgtatgattatgcatgtgcacaccagtatttaatacatggcgtaaacggttggttaagcccacttgggcataagaaccattttatacaacaaatttatcagcttccttcaatacaacaacttagagaaatgggcatacaagcctgtcataaagtacagcaaagcggttggcaacttccggtacagcaattagaacaggcattttatcaggtagtgaaggaaccctcggcggacttcacctaa

SEQ ID NO: 41455 - DNA, 552 bp, Acinetobacter baumannii
atgaaatttaagaatgcaaaaataaaaatactcgatctcgatttacgaggctgcttatatctcaataatttctctcattcacagcgtgtggcattattcttcaaaattattagccgtgctggtgacggacctttttggtacctcatgttggcgattgtatggggaatgcagggcattacctatagcttgcaaattatctatttgctacttggtggttcggttggaacagcaatttataaattcttaaaacataaaaccacgcgtccacgtccttaccaagtacatcaggtgattgttctcggtgaaagaccactcgatcactttagttttccatcaggtcatacgttacatgctgtcatggtgacaattgtgttggggtatatccaacctgtgttgcttgcagcgatgttgccgttcatggtgcttgtggcattgtctcgtatggtacttggacttcactatccgagtgatgtgattgtaggcgcacttattggtgcagcagtagcaagtctgattatttttgtcgcgccattattgggcattgctttataa

SEQ ID NO: 41456 - DNA, 201 bp, Acinetobacter baumannii
atgggcttacgttggacagatacgattgatattgccattgaattgtcagaagcacatccagaagttgatccgcaatggattcgttttaccgatttacatgcatgggtttgtgcgttaccagacttcagtgatgacccaaataaatcaaccgaaggattgctagaagccatccagatggcttggttggatgaagttcgctaa

SEQ ID NO: 41457 - DNA, 432 bp, Acinetobacter baumannii
atggcaattgaacgtactttgtctatcgtaaagccagatgctgtgtctaaaaaccacatcggtgaaatttttgctcgtttcgaaaaagcgggtttaaaaattgttgcgactaaaatgaaacacctttctcaagctgatgctgaaggtttctatgcagagcacaaagaacgcggtttctttggtgacttagttgcattcatgacttctggtccagttgtagtatctgttcttgaaggtgaaaacgcagttcttgctcaccgtgaaatcttaggtgctacaaaccctaaagaagcggctcctggtactatccgtgctgatttcgctgtaagcatcgacgaaaatgctgctcacggttctgactcagttgcttctgcagagcgtgaaattgcttacttctttgctgacaacgagatctgcccacgcactcgttaa

SEQ ID NO: 41458 - DNA, 1233 bp, Acinetobacter baumannii
atgagttctgcagtggtcgtttcatctgaaaatcttgatggacagcagcaatcttcgtccacgccagcatcgcctgctgccgaaaaagtgaatttactcggcatgtcacgtgctgaattagaaaaattctttgaagatattggtgagaaaaagtttcgtgccggtcaggttatgaaatggattcatcaatactttgttactgattttgctgaaatgaccaatatttcaggtaaattacgtgcaaagcttgaacaaatttgtgaaattaaagcccctgaagtggtacaccgtcattattcaaaagacggaacacgtaaatgggtgtttcgcgtaggtgaaggttctggctctttagtagaaactgtattaattcctgccgaagataaaacaggttcacgcaaaaccttatgtatttcttcacaagtaggttgtgcattggactgctcattttgttcaacaggtaagcaaggttttcagcgcgatttaacgccagatgaaattattgggcaactttggatggcaaactattcctatatggaagaagtgcctgttgctgagcgcgagcgttcagtgactaatgtcgtgatgatggggatgggtgagccattgctcaactacgatgctgtattaagctcaatgcacattatgctcgatgactttgcttatggtatgtcaaaacgtcgtgtgactttgtcaacgtcaggtgttgtgccaaaaattgaccaacttgcaaaagatattgatgttgctttagcaatttccctacatgcgccaaatgatgaattgcgtaatgaacttgtgcctattaataaaaaatatccattggctcagttgattgcggcatgtcagcgttatattgcaaaagatggtaatgaaagcgcgcgtaaacatgtgaccattgaatatgtcatgttagaaggtgtgaacgaccaacctgaacatgcacagcagttgcttaaattacttaaaaacttaccaagtaaaattaacttgattccatttaatccgttccctcatgcgccatatggacgctcaagtcgaaatcgtatcatctctttccaaaaaactttgtctgatgcaggatttgtgtgtacgattcgtcaaacacgtggcgatgatattgatgccgcatgtggacaattggtcggccaagttgctgaccgtacgcgtcgtgctgagcagtggcaaaagaaagtggctcaacgacaagagattttacgtacacaaggataa

SEQ ID NO: 41459 - DNA, 801 bp, Acinetobacter baumannii
ttgagtactccgaagttgaagatcatgttatgtatgggggttgctgttgcacttttggcaagtggttgtcagacttcgcaaacggttaaaaaggacccggaaaaagcagtaaaagtgcgtacgcagcttgctgccgaatacattcgttctggtgacttggattctgcaaagcgttctcttgaccaagcgttaagtgtcgatagtcgtgatgcaacggcaaatatgatgatgggtattttattgcaacaagaaggcagtaaacccaatttagaaaaagcggaacattactttaaacgtgcaatttcatctgaaccagacaatgctcaggcacgtaataattatggtacgtatttgtaccaaatggagcgttataatgatgctattgagcaatttcgtattgctggtgcaacattaggctatgatcaacgttaccaggctttagaaaatctggggcgaatttatttaaaactaggcaatattgcgagtgctgaaaaaacattcaaacaagcacttcttgctaaccgcgactcttacatttcaatgttagagttagcagaaattttttatttgcagcagcagattccggctgctacacaaatgtatgaacaatatgttcgtacagtggggcagaaaaatcagggtgcacgcgcactttggattggtttaagagtggctcgagccaatgcggataaaatgggaatgcaagttttagtaaaccagttacgtgctttattcccggaaagtccagaatatcaacgttatttgcaattacagtatagtactgaggccgtatggaaataa

SEQ ID NO: 41460 - DNA, 792 bp, Acinetobacter baumannii
atggaaataaatcctaattcacagcagccaactggctcaagcttaccgacttctgctttaggaaatattcaacgtcctggtgagtatttacgtcaaattcgtgtttctcagaaaaaagaattagagcaagtatcttcagatttaaatatgccgctgaaaacgctcaatgcgttagagcaagacgactataaatctttgccagaagcgacttttatcaaaggctattatcgttcttatgcgaagtatttaaatactgatgcaactgcaattatccagcgttttgatgagatttatgcaaacgatactgggcttttgccaaatcatgctttaaacaactcaccaattaaaatcatgggtaaattaccgggttctaatagtgatcgtaacaaaaaatggttaaagcgcgcactgcttgcaattttgattattgctgtcgtgtcattaattgtgatgggtgtccaaaaatggacctcaaacaaagaagatgctgagctgccaaaagcaaatcagtctaatgttgaagttttacctatgaaagggaacacctctgcaacagtgggtgaccaattggtgttaacctttaaccgtccaacttctgttcatattgtagatgcaacagggaaggttttagcgacgggtcgtcaggcatcgactttaaccttaaatggtgagtctccattccagattcgtcttgatgatgcaacggctgtgtcattaagtctaaaccaagaacagatttcattgtctccatatacggtaaacggtaaagctgaattccgtttatcccgctaa

SEQ ID NO: 41461 - DNA, 1116 bp, Acinetobacter baumannii
atgatagagaacccaattaaacgtcgaccaacacgtaaaatccgtgttggttcggtctatgtcggtggcgatgcacctattagtgtgcaaagtatgacaaataccgaaacttgcgatgttgacgcaactgtggctcagattgagcgctgtgttgatgcaggtgcagatattatgcgtgtttcagtgccttctatggaagctgctgaagcctttggtgcaatccgtaagcgtgtttcagttccattagtagctgatatccattttgaccatagaattgctttggcagttgcagattatggtgcggactgcttgcgtattaacccgggcaatatcggttcagaccagaaagttcgtgaagttgtggctgcggcacgtcatcacggtatttctatgcgtattggcgtgaatgcgggttctctagaaaaagatttacagaaaaaatatggcgagcctacagggcaggcacttcttgagtcagctttacgtcatattgatattttagaccgtcttgacttccatgagtttaaagtcagtgtaaaagcatcaaatgtgtttttaaccatggatgcttatcgtttactctctcaacaaattgataatccattacaccttggagtgactgaagctggtatttaccgtacaggtactgtgaaatcagcgattgctcttggtgggttattaatggaaggcattggcgatacgatgcgtatttcgcttgctgctgaacctgaagatgaaatcaagatcggttttgatatcttaaaatcgcttggcctacgttctaacggtattaactttattgcttgtccaagttgttctcgccaagaatttaacgtgattcaggtgatgcaggctttagaagagcgtttagaagatatccgtacaccaatggacgtttcggttattggctgtaaggtaaatggcccaggtgaagcaaaagaagcagatatcggggtcgttggggctgcgcctcgttcattggtttatcgtaatggtgagaaaagccatttaattgataccaatcaattggttgatgaaatcgaaactatggttcgtcaacgtgttcaagagcttgaagaagctaaatctaaagaaattattcgtagttcatcatga

SEQ ID NO: 41462 - DNA, 1293 bp, Acinetobacter baumannii
atgagttcaattgtcgcaatcaaaggttttaatgacgttttaccaacgcaaacagcagcgtggagacgtctcgagcagcatttagcatctttaatggatgcttatggttaccaacaaattcgtttgccgatcgttgaacaaacgggactgtttaaacgtgctattggtgatgctaccgatatcgtagaaaaagaaatgtacacattcttcgataaaggaaacccacctgaatcactgactttacgtccggaaggaacagcgggttgtgttcgtgcgttggttgaacataacttgttgcgtggtgctacgccacgtgtgtggtatatgggacctatgttccgttatgaaaaaccacaaaaaggccgttaccgccagttccaccagtttggtgtggaaacttttggtgtagcgactcctgatatcgacgctgaattgattatgttgactgcccgtttgtggaagcgtatgggtgttgatcacatggttcaacttgagttgaatactttgggtgaaacagatgagcgtacggaatatcgtaatgctttggttgcgttcttaaatgaacataaagatgctttggatgaagattcacagcgccgtttaacaacaaacccattacgtattttagattctaaaattgagtcgactcagaaaattctggaaaatgcgccgaaattacatgacttcttaaaagaagacagtttaagccacttccaacaattacaagattatttgactgctgcaggcattaaatttgtaattaaccaaaaattggtacgtggtctagattattacaataaaactgtttttgaatggacaacaacagcattaggttcgcaaggtacagtatgtgcaggtggacgctatgatggtttggttggccagttaaaaggtaaggctgatcagtctgttccagcggtcggttttgcaatggggatggagcgtttattgcttctacttgagcaagtcgaacaagctgaaattgtacgtgactgtgaagctttcttagttgcggagcctgcttatcaatctaaagctttagttttggcagaacaattacgtgatcagttagaagctgcgaatagtaacatccgcattaaaactggttcacaaggcagcatgaagagtcagatgaaaaaagctgatcaggctggggctgtttacgccataattttgggtgaacgtgagtgggaagcacagcagcttactgtaaaagaattggcaacagctgagcaatcacaagttgcattggctgaactcgtaccattcttaattgaaaaatttacaaaataa

SEQ ID NO: 41463 - DNA, 699 bp, Acinetobacter baumannii
atgagcttaagtgatgaagaacaattcgacagcttaaagtcgttcgccaaaaaatatggttctgccatgattagcgggattctcattgcattgattgcctttttcgggtgggaatattggcaaaaaagaaaccttgcaacgagtcagacagaaactgcaaaggtacagcagttaatggatgaagcgaatgcaacagctgataacccaaatgctttagcttcaataacagcttcggcagataagattgtaaaagacgatattgattcagttcaggcgatacaaactcaatttgtattggcaaaacttgcatatgaaaaacaagattatgctgctgctgaaaaagctttgaaaaaagttgagaattcaaaagtaaaagatgaaggactgattcaggttgtaaaattgcgtttagcagatgcacaattggcgcaaaacaaatatgatgaagctctaaaaaccttgtctggtgatgtcgatccggcatttaaagcaacagtagaagagttacgcggtgatatctttgttgctaagaaagatattgattctgctaaaaaagcatatcaagctgcatgggattcgttactggaacgtaaacaagagcgacaaattttacaaattaaactcgaaagtgttggcgttttagttgaagatccacagattgagcgcccaattttggaaacacaggtggaagagtcttaa

SEQ ID NO: 41464 - DNA, 1146 bp, Acinetobacter baumannii
atgaatcagaaattcaaactgcctttggcaattgcaatcgcatcggctgtattggtcggatgttctagcaacaaagtaaaagaagcaaaaccaaatccactaccgaaattgactgagtcaaataagagtttggtgcccgtgttttcacgcagtgtttcttctacgaataaggcagatccattacgtttacaacttgacgctagcgaaggtgtcgtttttacccttgatcctaagggtgaagttgctgcatatcgtggtaaacaacgtctttgggagaaaaaagttagtaaattgggcttaagctctggtgttgaagcagctgaaggtattgttgttgttggtaacagtaaaggtcagttatttgctttagatcaggcaaccggtgaacaaaaatggactgcacaattatctggtgctttattaagtccttctttaattcagtctggccgcgtgattacaattgcaaatgacggtactgtatttgcacatgatgtatcatctggacaacaagtttgggcatataaattgccaaatgttcagttcagtttacgtggtcaaccatcgccagtgagtcttgaccctcgcactgttttaattgcttctgcaaatgcatatgtttatgcaattgatacgattagtggtattccgcgcttccaacgccgtgttgcagtaagtgaaggacgttctgatattcagcgtttaattgacattgatggtgatccggttgttgcgggtcaactcatggtaacaactagtttccaaggccaagtaactgttactgatcttgcttctcaacgtgtggtttggagtgaagattcaagtagcaccaagcgtccagaagtttatgataataaagtgtttgtttcgtcaactgacggcaagcttactgcttatgacttaacaacaggcgaacagctttggcaaaatgatagtctcttaaaccgtcatttaagtaatcctgtcgtcttgggatcggaccttattgttggtgatttggatggtgttttacacctaatcgacccgacaacaggtaagttgattggtcgttctaaaacaagtggtgaggtcaatacattacgtgtgattgagaatcagctctatgtttcgacccgaaaaggcgatttaagtatttggcagaatcgttaa

SEQ ID NO: 41465 - DNA, 1410 bp, Acinetobacter baumannii
atgaaacccgttattgcgctcattggtcgtccgaatgtcggaaaatcaacgttatttaaccagattaccaagagtcgtgatgcacttgtagccgacttcgcgggtttgactcgtgaccgtaaatatggtgatgcgacttatcaaaataagtctttcattgttgttgatactggcggtattggtgaaagtgaaggcggtatcgataactacatggccgagcagtcgaaaacagccatcaatgaagcagatattattatttttgtagttgatgcgcgtgccggattgttagcttccgatgagcaaattgcccgtgaattacgtactttaggcaagaaaatttatcttgttgccaataaggttgatggtgttcatgctgaagctgctttggttgagttctacaagcttggtatgggtgaaccattacaagttgcagcgagccatggccgtggcgtacaacaaatgcttgaggatgtacttcaagatattccggaagatgaaaatcctgaagagcatgacaaagataccggattgcgtctagcaattattggtcgtccgaacgtaggtaaatcaacgttagtaaatcgcttacttggtgaagaccgtgtggtagcgtttgaccaaccgggtacaactcgtgactctatttatattccgttcgagcgtgaaggtcgtaaatacactttaattgatacagcaggtgtacgccgtaaaggtaaagttgatgaaatgattgagaaattctcaattgtgaagactttacaagcgatgaaagatgcacatgtggtggtggttgtagttgacgcccgtgaaggtattgttgagcaagacttacatttaattggctatgcgctggaagctgggcgtgccatggtcattgcgatcaataaatgggacaacatgagtgaatacgaccgcaagcagtgtaagcttgatgttgagcgccgttttgactttattccttgggctcgaattcaccttatttctgctctacatggtactggggtgggtgagttatatccatcaattcaccgtgcttatgagtctgcaaacttaaaggtatctcctgcgaaattgacgcagattttgaatgatgcaactgatcagcatcagccgccgacagttcaaggtcgtcgtattaaaatgcgttatgcgcacatgggtgggcaaaatccaccgactattgtgattcacggtaacaaggtggataagactcctgcagattaccgccgttatttagagaatgtgttccgtaaggtttataagcttgaaggtacaccagttaaaattgaatttaagacttctgaaaacccgtttgaaggccgtaagagtcaggtcgatgagcgtacagctgcacgtcgtcgtcgttatattcagaaattcaaaaaagcagaaaagaaatttaaacgttaa

SEQ ID NO: 41466 - DNA, 657 bp, Acinetobacter baumannii
atgaatagtaaacatgtggacatttatataggaaaactcaatgattttttaaatcgaaaacaacacgactttcccgactttcgtacatttaatgagtataaaaaacaacaaataaagagtgtcagaaatagactgattgcagagaaactacgactcacttcaatggaattggagtttgccaagcatgaacatggcaaaccttatttattgaatcacactttgcattttaatcactcacatagccaacaatactacgctttagccatgagcgaaaatgttaaagatattggcgtagatgttgaggaactggatcgaaatgtacgcttagatgctttagcaaaacatgcatttcatcctgatgaatatgcaacgtggcaaagtctagaacaagatagagaatattggtttaaagtctggacgactaaagaagctgttttaaaagcatcgggccttggtatacgtttagatttaaataccttaaacaccctggcacatcctacaaatcatggcggattatgttcgcatgagcttattgggacatttgcctaccaaaactttgtgttaggtaatatgatcttaacagtcgcatggcgttcagagcaatcatgccgtggattccagtttccttctattcagattcattcacttgaccgttaa

SEQ ID NO: 41467 - DNA, 459 bp, Acinetobacter baumannii
atgagcgaagaacaacaagttcaaccacaattagctttagagcgtatttatacaaaagatatttcttttgaggttccaggggcacaagttttcactaaacaatggcaacctgaacttaacatcaatctttcttcagctgctgaaaagattgacccaactcactttgaagtatctttaaaagttgtggttcaagccaataacgacaatgaaacagcgttcatcgtagatgtaactcaatctggtattttcttaatcgataatatcgaaaaagaccgtttaccttacattttaggtgcatattgcccgaacattttgttcccgttcttacgtgaagcagtaaacgacttagtaacaaaaggtagcttcccacagttacttcttactccaatcaactttgatgcagagttcgaagcaaacatgcaacgtgctcaagctgctgctgttgaaggtcaagcttaa

SEQ ID NO: 41468 - DNA, 258 bp, Acinetobacter baumannii
atggcagcaaatgtcattgtttactcaacttctgtatgcccgtactgcgttcgcgctaaacaattacttgagcgtaaaggtgttgcttataaagaagtaaatctttctgttgaagcgccagaagtacgtgctgaattaatgcaacgtacaaatcatcgcactgttccacaaatttttattaatgatcagtttatcggtggttttgaccaactttatgctttagagcgtgaaggtaaactcgacgaattattggcttaa

SEQ ID NO: 41469 - DNA, 417 bp, Acinetobacter baumannii
gtggaacgctggttagagtttatggggaatcaccccattttgtttggtacactcggagtcttgatcgtattgttcttcatttttgaaggtcaacgtaacggtcgtaaaatttctccacagtcgcttggtattttagtgaaagcgaaaaatgcccttttgattgacttacgcgatagcaaagacttccgcgaaggtcacattagtggtagccgcaatattccttatagccaaattgcaagtcatgctgatgaattaaaagcaagtgaccgtccattggtatttatttgcaacctagggcaagttgctggtagcgctttacagaaagtcgctcaccatgacagctatcgccttgatggtggtatcagtaactggaaagctcaaggtttacctctcgttaaaagcaaaccaaaagcttaa

SEQ ID NO: 41470 - DNA, 1059 bp, Acinetobacter baumannii
atggctctaattcgtaagcgtcgtttaactgagcaacagcaacgtcgtattgaaaaacagcataaaactcgccaagaagaagtcgatacttcacaagatctagatgggctggttgtacagcactatggacgtcaacttgaagtacaggcactttctgtacccgatcatcacccagaaaaaccgcaagtcgctgaaggcgaaccagaaccgttttggaaaccgattgaattaaatagcgtttggcgctgtcacacccgtacaaaccttgaattactggtcactggtgaccgagtgaagtggcaagctgaccctaatacaggtttagggattattaccgcaattcatccacgtacatctttacttacacgcccggatcgctatcacaaagtaaaacctgtagctgcgaatatcagcttaatcgttattgtttttgccccactgccagaaccggcacctactttgattgaccgctacttagtggcatgtgcagatgcgaatattccagctcttttagtgcttaataaatcagatttactcactgaaaatgatccgattctcgacatgctcaaagagtatgaaaatttaggctatgaagtcatgatttgtcattctaaaggtgacatctcagcattgtcccagcgtcttgatggcgagacagtagcttttgtaggtcagtcaggggttgggaaaagctcacttattaatgtgctcattccagatgctgaacaaaaaaccaatatcatttctgaaaactcagcacttggacagcacaccacgacttctactcgtttaatcaactttggtagaaatggcgccttgattgattcaccgggaattcgcgagtttgggctttggcatctcgatttagataaaattcgtatgggcttccctgaaatcgaagcacatttaggttcgtgtcagttccgtaattgcactcatactcatgaaaagaactgtggcttaaaacaagctgttgaagcaggtgaaattttaccacgccgcctagacagctttttacgtttaatcgatgagattcaagaagcgcagcaaaaaaactaa

SEQ ID NO: 41471 - DNA, 567 bp, Acinetobacter baumannii
atgagcagtactttaaatacacgattaatttggattgatctggaaatgacaggtttagataccgacaacgaccagattattgaaattgcaacaattattacagatgatcatttaaatgtacttgccgaaggtccggttttggctattcatcaacctgatcgtattttaaatgcaatggatgagtggaatacgcgtcagcacggccagtcaggtttaattgaacgagttcgtcgtagtaaattgaccgctcgtgatgctgagttacagactttagaattcctaaaaaaatgggtaaatccaaaagtttcaccaatgtgtggtaactcgatttgtcaggatcgccgtttcttacatcgtcttatgcctgaactagagcagtatttccactatcgtaatcttgacgtatctacagtaaaggaactctcaaaacgctggcgtcctgaaattatgagtggtctgaaaaaaaatgcatcacatttggcgatggatgacattcgtgattccatttctgagcttaagtattaccgcgaatacttcttcattatgaatactgacggtaaagattga

SEQ ID NO: 41472 - DNA, 732 bp, Acinetobacter baumannii
atgcaaagtaataacccgatactgacacgcgttgaaacggtcagtgactatagtcaaccgatgaccgtgcaaggtgcgattcaaaaatctgttatgttgaccatcattgctgctgcagtgggtgtcgctttatttttctatgcagcctttactgcaaatgttggtattgcttatgcggcttcaattgtgggtgcaattggcggcttggttttagctttaattacgacttttaaaccaacgactgcaccaactttagcaattccttatgctttatttgaaggggcttttttaggtggtatttcttttactttccagttgaaatatccgggcgttcctcttcaagctttattggcaactttcgtcacgactttggtgatgtttggtctatataagtttcaaatcatacgcgcaactgaaaagttcaaatcagttgtgatctctgcatctttggcgatctttattgtatttatcgtgcagatggtgatgcgtttagcgtttggctcaagcattccttatatttttgaaagcaactggttaggtattggttttgctgcttttgttgcagtgattgcttcactgaacctaattttagattttgatttgatcgaaaccaatgcagcatatcgtgcaccaaagttcatggaatggttgtgtggtgttgccttacttgcgactttagtatggatgtatatctcgttcttacgtttgcttggcttattgtctgacgactaa

SEQ ID NO: 41473 - DNA, 804 bp, Acinetobacter baumannii
atgacacaaggacttttagcaggtaaacgctttttgattgcaggcgttgctagtaaattatcaattgcttatggtattgcacaagcattacaccgtgaaggtgctgagcttgcatttacttatccaaacgaaaaattaaaaaaacgtgtagatgagtttgctgagcaattcggttctaagcttgtgtttccatgtgatgttgccgttgatgctgaaattgataatgcatttgcggaacttgcaaaacattgggacggcgtagacggtgttgtgcactcaatcggctttgcacctgcgcacacgcttgatggtgacttcactgacgtgactgaccgtgacggttttaaaattgctcatgacattagcgcatacagctttgttgcaatggcacgtgctgcaaaacctttattgcaagctcgccaaggttgtttattaactttgacttaccaaggttctgagcgcgttatgcctaactacaacgtaatgggtatggcaaaagcatctttagaagctggcgttcgttacttggcatcaagtttgggtgttgacggtatccgtgtaaacgcaatttctgcgggtccaattcgtactttagctgcttctggtattaaatctttccgtaaaatgctagatgctaacgaaaaagttgcgccattaaaacgtaacgtaaccattgaagaagtgggtaatgcagcgttattcctatgctcaccttgggcttcaggtattactggtgaaatcctatatgtagatgctggtttcaatactgtaggtatgagccaatctatgatggatgatgaataa

SEQ ID NO: 41474 - DNA, 1407 bp, Acinetobacter baumannii
atgtctttttctatgactaaacttagcgcagcacttctcctcactagttctcttgtgggatgtgccgctgtagtaaaaacaccttaccaagcaccagctgtacaagttccgggcagttttcagtacgataaggctaaagctaaaacagcatcggttgagcaatattctgaccattggtggacattgtttggagatgcacagctcaaccaactcgtaactaatgtattagagcgcaatagtgatttggctgttgcgggaatcacacttaagcaagcacgcttgcaagctgatttaaccgcgaataaacaaggcttacggaccagctctagtgtttctacaggacattctttcgacttaaattcgggagatgacagcgcgaaaggtttatcaatgagtgctggggtgagctatgaacttgatttgtttggcaagcttgctcgtcaaactgaagcaagtaaatgggaagccttagcaaccgaacaagatcttcaagctactggtcaaagtctgattgccactactgcgaaactctactggcaactcggctatttaaatgaacgttatgcaactgcgcagcaaagcttagccacttcacaaaagctttatcaattggttcaaactcagtataaagcaggtgcagtttcaggattagaccttacgcaagccgagcagtctgttcaaagccaaaaagcaagtttaagccagattgagcaacagcttgttgaaacgcgtacagccattgctgtgttattgcatgagccagtacagcaactcaatattcaagagccacagcgtttaccacgtacagcgctgcctgctattggtgcgggtttaccagcggatattttgtcacgtcgcccagacttgcaagcagctgagtttcgtttaagaaaggcattggcaactaaagatgcaactaaagcaagctactacccgtcaattagcttaaccagtagtttaggttcaagcagtacatctctaacggagttattacgtaaccctgcccttacgcttggagcgagtttaagcttaccgtttttgcaatataacgatatgaaaaaagatatcgcgattagcaacctagattatgaaaaagcgattattcaatatcgccaaacgctttatcaggcttttgctgatgtagaaaacgcgttatcaagccgcacagaactcgacaaacaagtagcgttacaagagcgtaatgtcgaacttgcagaaaaaactgaacgtttaactgaagtccgctaccgttatggcgctgttgcgttaaaaacacttcttgatgcacagcaaactacacgtactgcgcgcttgagtcttgttgaaaccaaacaaagccaatacaacgcttatgtcacccttatgcaggcattaggcggttcacctgtaaaagaactgccgcaataa

SEQ ID NO: 41475 - DNA, 1995 bp, Acinetobacter baumannii
atgacaaaacaagctttgcttgaagtcagcaatctggtccgggaattccctgctggcgaaagcacgattcaaattttaaaaggcattgacctgaccatttatgagggtgagctggttgctattgtcggccagtccggctctgggaaatcaacactcatgaatattttgggctgtctggaccgcccaacaagtggtagttataaggttaatggtcaagaaaccggtaagctagagcccgaccagttagcgcagttacgccgtgaatattttggctttattttccagcgctatcatttactgggtgacttatcagctgaaggtaacgttgaggttccagctgtttatgctggtgttactccagcagaccgtaaacagcgagctactgccctgctcacggagttaggtttaggtactaaaacgcaaaaccgaccaagtcagctttcaggtggtcaacagcaacgtgtgtcgattgcacgtgccttaatgaatggcggcgatgtgatcttggccgacgaaccaacaggggcactcgattcacatagcggcgttgaagtgatgcgaattttgcgtgaactcaacgcggctggccatacgattattttggtaacgcacgatatgcaagttgcaaagaatgcaacgcgtattatcgaaattagtgatggggaaattattagtgaccgccctaatgttccagaccagtctttagaagaagttaaatctgatccagatgcagcacctgctttacaaaataagcagaaaaaaggcaaaagtatttcagcttggcgttcaaccctagatcgcttatccgaagcctttcaaatggctttactgtccatgaatgcccaccgcatgcgtactttcttaaccatgttggggatcattattggtattgcttcggtcgtaacggtagttgcgctaggtaatggctctcaacaacagattttgagcaacattagcagtttaggtaccaacacaattacggtattccaaggtcgtggttttggtgataactccaagacagccaattttaaaacgctggttcctgccgatgccgatgcattaatgacacagccttatgtcagtgcagtcagcccgatggtcagtacatccaagaccatgcgttatcaacaaaatgaagcaaacgcgactattaacggcgtaagtaacgattattttgatgtaaaaggtctagtttttaaagacggccaaacctttgatcaacgaagtgtccgcgaccgttcacaagatgtagtcattgataccaatacgcaaaaacaattctttagcgatggtactaacccaatcgggcaagtcgtgttactgggtagcgtaccagctcgtattatcggcattgtagaacctcagaccagcggaatgggttcggatgacacgctgaatgtatatatgccttataccacggtcatgagccgtatgttagggcaagcccatgtccgtaatattgtcgtacgtattaatgataaatactcgaccagtgctgctgaaaacgccatcgttaacttattaacccagcgccacggtgcccaagatattttcaccatgaacagtgacagtatccgacaaaccattgagaaaaccacaagtactatgactctcttagtatcagcaattgctgtaatttctctggtagttggtggtatcggggtaatgaatattatgctggtttcggtgactgaacgtacgcaagaaattggtgtacgtatggctgtgggtgctcgacaaagtgatattttgcagcagttcctgattgaagcaattttagtatgtttgattggtggtgtacttggcgtactgctatcacttggcttaggacaactgattaataagtttgccggtggcaactttgctgtcgcctattcaaccacatcaattgttgctgcgtttgtgtgttcaacattgattggtgtcgtattcggcttcttacctgccaagaatgcagcaaaacttgaccctgttgcagcactatcacgagaataa

SEQ ID NO: 41476 - DNA, 1338 bp, Acinetobacter baumannii
atgccaaaaataaagccaattaaactcgtaattattgtcgtctgtatcgccattattgctgtcttagcttgggaattcttaaagcctaaacaacagcagcctcaatatattacagcagaggtaactcgcggggatattgagaataatgtacttgcaaccggtacacttgatgcaaccaagctcattagtgtgggtgctcaggtatctggtcaggtcaaaaagatgtatgtacagcttggtgatcaagtaaaacaaggtcaacttattgcacaaattgactcgaccacccaagaaaacagtttaaaaacatctgatgccaatattaaaaatctagaagcacagcgtcttcagcaaatcgcttctttaaacgagaaacaactcgaatatcgtcgtcaacaacaaatgtatgctcaagatgcaacacctcgtgcagatttagagtcggctgaagctgcttataaaacagctcaggcacaagttaaagcattagatgcacaaattgagtctgcaaaaataacgcgttcaacagcacaaaccaatattggctatacacgtattgttgcgccaactgatggtacggttgttgcgattgtgactgaagaaggtcaaacggtaaacgcaaaccaaagtgctccaactatcgtcaaaattgcaaaacttcaaaatatgacgattaaagcacaggtgagtgaagccgatattatgaaagtggaaaaaggtcagcaggtctatttcacgaccttaggtgatgaaaccaagcgatatgcaaccttacgtcaaattgaacctgctccagattcaatctctagtgaatcaaacagcaccacaagttcaacaaccagctcagctgtttactacaacgctttatttgatgttccaaatacggacggcaaattgcgtattgatatgactgcacaagtttatatcgtattaaattcagcaaaaaatgccttattggttccatcttctgcgttaagtagcaaacaattttctggccaaagaaaacagggtcaatcagcagataaagcaagttctactccaagtgcagaacgcaagcatcaaggtaacggcgcccgtttagaacgcttaaatttaactcctgaacaaaaacaacttattgaacaaggcaaagcaactctgagtgtagttcgcgttttacaagcagatggtacgactaaaccaacacaaattttggtaggtattaataaccgtgtaaatgcgcaagtacttgccggattaaaacaaggtgaccaagttgtaattgccgatagttcagaaaactctgcagcttctgcaaacagtggtaataaccgccgccgtggcccaatgggaatgtaa

SEQ ID NO: 41477 - DNA, 990 bp, Acinetobacter baumannii
atgaaacttgactatttacaagccctcaaacgcattccggaagctcggggtgcgtggatcctgcatggacaggaacctttattagaacaaaatttactcgatactttccgcaaaagctggcagcaacaagacattgaaagacagcgctacgatattagtagtgtaagtgactggaaaaatgtctttaatgcactgaacagcttatctttattttctcagcaacttgcgattgaagttcacggcaatatcaagcccgatgccaatggtttaaaacagctaaaaagttatatccagcataatgaaactaacctactgttaattgttttacccaaacaagacagtagcagcttaaaatctgcttttttccaagttgttgaagcgaacggtgtggtggttgcccttactgctaactatccgcaagatcgtcaacgaatattagccgctgaggctgagaagttagaaattcaactcgacaatgatgcttggcagtggctcatgcagcatcatgagcataacctgctcgctgctaaaaatagcttgatgcgggtaagagatacttttccagaccagaaactaattcaaattgaacagttatatgcgtgtctacaagatcagtctcgttacaccacttacgatttaagcgatgcgttattagaaggtaatcttgctcagtccattaagatctttcaatatttaatcggttccggtgaaccggaaagcttgatcttatggacattaagtaaagaaatgcgtttattaatgcagttgtttgaacaaccacataatgcattacaactaggtatatggaaaacaaaagttagcttatatcaacaagcattaagaagactcaatccacagcaatttttgggatggtctgccctgcttttacaaattgatgccgcaatcaaaggcatgtcaaatgagaatgcccaacatttaatgcaacaagccattgccgagctgtgtggaaaaacattatttatacattag

SEQ ID NO: 41478 - DNA, 510 bp, Acinetobacter baumannii
atgcacttagcccaacgtttagccgctgttgttttaaccttaggccttagtgcaggcttagtcgggtgtggtttccatttaaaaggaactaacccgactgcgactccacttgtttataaaaaattaagccttgagttaccggcaaaaaccgatgaccttgaaacacaattaaaagtgtatttaacggcaaatggtgttcaactcagcaatgacaacgacgcctatgttcttcgtgttttagaatacacgcctcgtcgtcagcttctaaatggtaaacttacagaagtgttattacgcttgactgtaactttccaaatcgaagaccgtcaaggtaataaaattacagagccgcgtactttaaccgcagctcgtagttatcaatatgacttggcaacggtcaacactgagaaccagcaagagagttacttgcaacgtattgtaattgatgaccttgcacagcaaattactcgtcaaatttcagccaatcgcttaccaaaagctcaaccatag

SEQ ID NO: 41479 - DNA, 2625 bp, Acinetobacter baumannii
atgactatttctcacattgacccagaatatcaagcaaacacgattgaaccatcagtccaacaagattgggaaaatcgtaaagtctttaaagttgccgacactgtcgaaggtaaacatcgctacatcctgtcaatgttcccttacccaagtggcaaactgcacatgggtcatgtgcgtaactataccattggcgatgtaattagccgtttttaccgtttaaaaggtgaaaccgtattacaacctatgggttgggatgcatttggtttaccagcggaaaacgctgcaattgcccataaagttgctccggcaaaatggacatttgaaaacatcgcttacatgcgtgaccaattaaaaaaattaggtctatctgtagattgggatcgtgaatttgcaacgtgtacaccagagtactatcactgggaacaatggttgttcgttcagctttataaaaaaggtttaatctaccgtaaactttcaacagtaaactgggacccggttgaccaaacagttttggcaaacgaacaagttgaaaatggtcgtggctggcgttcaggtgcattggttgaaaaacgtgatattccgatgtactacttccgtattacggactatgcacaagaattattagacgacctagacactctacaagacggctggcctcaacaagtgttgaccatgcagcgtaactggattggtcgctctactggtatggaaattaccttcccatctgccaatactgaaatttatgctgacggcttaactgtttatacaacacgtgccgacacacttatgggtgtgacgtacgttgccgttgcagcagaacaccctcttgcgcttaaagctgctgaaaataaccctgaattggctgcatttattgaagaatgccgcatgggttcagttgcagaagctgacttggctacagccgagaagaaaggtatggcaacaggtttgtttgtaaaacaccctgtaactggcgaagagcttcctgtctggattgcgaactacgtattaatgtcttacggttctggcgcagtgatggctgtaccagcacatgacgaacgtgactttgaatttgctaacaagttcaacttgccaattaagcaagtgattgatgccaaaggtgctgacgatgcagactactctgctaccgagtggcaagaatggtacggttctaaagaaggtaaacttgttaactctggcgaatttgacggtctagaattccaagctgcattcgatgcattccttgcaaaattagaaccacaaggtttagcaaattctaaagttcaattccgtttacgtgactggggtgtttctcgtcaacgttactggggttgtccaattccaatgattaactgtgatacttgtggtcaagtcacagttcctgaagatcaacttccggttgtattgccaactgacgttgttccagatggttcaggtaacccactaaataaaatgcctgaattctatgaaactaaatgtccttgctgtggtggcgatgcacgccgtgaaacagacacattggacacattcgtagaatcatcttggtactacgcacgttatgcatctccagactttactggtggtatggtaaaacctgaagcagctaaaaactggcttcctgtaaaccaatatattggtggtgttgaacacgcgattcttcacttactttatgcacgcttcttccacaaattaatgcgtgatgaaggtgttgtacaaggtaatgagccattcaccaacttgttaactcaaggcatggtgcttgcagatactttctatcgtgaagcagaaaatggtaagaaaacttggttcaaccctgctgacatcgaattagaacgtgatgagaaaggccgcatcatttctgcaaaatattcaggtgatggtcaagaagtgattatcggcggacaagaaaaaatgtccaagtcgaaaaataacggtattgacccacaagccattattgatcaatacggcgcagatacagctcgtgtatttatgatgtttgctgcaccaccagatcaatctttagaatggtctgatgcaggtgttgaaggtgcaaaccgtttcttgaaacgtgtatggcgtctggtagcaagcttccttgaaaaaggaaactctgcaacagcaattgataaagcaaacttgtctaaagatgctcaagatttacgtcgtaagacacacgaaaccattcaaaaagtaagtgatgatattgagcgtcgtcatgcgttcaatactgcaattgctgcattgatggaattattaaatgcaagcaataagtttgaagcaaaagatgacaatgacgttgctgtagaacgtgaagcaatcaccacattgttaacgttacttgctccatttgctccgcatttaagccagactttattggctcagtttggtacggacttaacagaagcaactttccctgaagttgatgcttctgcattaacccgcaatactcaaacgattgttgtacaagtaaatggtaaacttcgcggtaaacttgaagtttctgttgatatttctaaagatgagttattagctcaagcgaaagcattaccagaagttcagcagttcttaacaggaccaaccaaaaaagagattgtggttccaaacaaattggttaacctcgtggtttaa

SEQ ID NO: 41480 - DNA, 336 bp, Acinetobacter baumannii
atgaatttatcttatttaaaaacaagcctgtatacagccgttacaacagcgattttactttgctcaagtcaaggtcaggcacagcaatattataaatggatggatcaaagtggctcgacacattacaccacgacgccaccacctcaaggagcgaaacatttgaacaaagtttcgacttacggcagtcaaccattgttgaaaaatccaacatcaaactcagaacaatcatctcaggataaagataaagtcgtacaagaagtaactaatgtaacagtagaaaaaggtgcacctgctgtcccggtcccacctgccccgtctgtatcggcaccaagataa

SEQ ID NO: 41481 - DNA, 1725 bp, Acinetobacter baumannii
ttggaacttttatctggtggtgaaatgctcgttcgcgctcttgcggacgaaggcgttgaacatgtttttggttatccaggcggcgcagtattacatatttatgatgcgctatttcaacaagacaaaatcaatcattacctcgtgcgccatgagcaagctgctggtcatatggcagatgcctactcgcgtgctacaggtaagacaggcgtagtactggtcacttctggtccaggcgcaaccaatacagtaactccaattgcaacagcttatatggactcaatcccaatggtggttttgtctggccaggttgcatcacatctgattggtgaagacgctttccaggaaactgacatggttggtatttcacgtcctatcgtgaaacacagctttcaggtccgccacgcaagtgaaatccctgcaattattaaaaaagcattctatatcgcatcaagtgggcgccctggtccagttgtagtcgatattcctaaagatgcgactaaccctgcagaaaagtttgcatacgaataccctgaaaaagtgaagatgcgttcatatcaaccaccttcacgcggccactctggtcaaattcgtaaagcaattgatgagttacttactgcaaaacgtcctgttatttatacaggcggtggtgttgtacaagggaatgcttctgcgttattaaccgaacttgcacatttacttggttatccggtaactaacacacttatggggttaggcggattcccgggcgatgacccacagtttattggcatgttaggtatgcacggtacatatgaagccaatatggcaatgcaccatgcagacgtaattttggcgattggtgcgcgttttgatgatcgcgtaacaaataacccagccaaattctgcccgaactcaaaagtgattcatgttgatatcgaccctgcaaccatttcaaaaacgattatggcgcatattccgatcgttggtgcagtagagccagttcttcaagaaatgttggcacagttaaaacaattaaatgtgtctaaaccaaatcctgaagcaattgcggcttggtggtctcaaatcaatgaatggcgcaaagttcatggtttgaaatatgaaaatccatctgatggcactatgaagccacagcaggttgttgaaactttatataaagtgaccaatggcgatgccattattacttctgacgtaggtcaacaccagatgtttggtgcactttattataagtacaaacgtcctcgccaatggatcaactcaggtggtcttggcaccatgggtgttggtttaccttatgcaatggctgcgaagcttgctttcccagaccaacaagttgtttgtattacgggtgaagcttcaattcagatgtgtattcaggaactttcaacctgtaaacaatatggcttgaacgtaaaaatcttgtgcttgaacaaccgtgcattaggtatggtgaaacaatggcaagatatgaactatgaaggtcgtcattcaagttcttatgttgagtcattacctgactttgccaagttaatggaagcttatggtcatgtaggcattcaaattaatcatgccgatgaacttgaatctaagcttgcagaagcaatggcaatcaatgataaatgcgtatttatcaacgttatggttgaccgtagcgaacacgtttatccaatgcaggttgcaggtcaatctatgcgtgatatgtggatttctaaaggggagcgcatttaa

SEQ ID NO: 41482 - DNA, 492 bp, Acinetobacter baumannii
atgagacacattatttctgtactcgttgaaaacgaagctggtgcgctttctcgtttggtgggcttattcagtcaacgtaactacaacattgaaacacttaatgttgcaccaaccgaagatccgacattatcgcgtttgacgttaacgacttatggcgatgaccataagatcgaacaaattacgaaacagctcaacaagcttgttgaggtggtaaaagtagttgatttatcagaaggttcacacattgagcgtgaactcatgctaatcaaagtaaaagcattaggtgcttcacgtgctgaaattaaacgcactgcggatattttccgtgcgcaaattgtagacgtgacaccaacgacctataccattcaaatagcagggacaactgaaaaattagatggttttatcgatgcgcttgcagaaaacaccattcttgaagtcgttcgttcaggtgtatcaggtatcgcccgtggcgaaaaagttttagccatttaa

SEQ ID NO: 41483 - DNA, 1017 bp, Acinetobacter baumannii
atgcaaattttttacgataaagactgtgacttatcaatcatccaaagcaagaaagttgcgattattggttacggttctcaaggtcatgctcatgcacttaaccttaaagactcaggtgtagacgtaactgtaggtttacgtgctggttcagcttcttggaagaaagctgaaaacgctggtcttaaagttgctgaagtcccagcagcagttaagcaagctgacctcgtaatgattttgactccagatgaattccaatcacaactttaccgtgacgtgattgagccaaacatcaaagaaggcgcgactttagcatttgctcatggtttctctgttctatataaccaagttgttccacgtaaagacttagacgtaatcatggttgcgcctaaagctcctggtcacactgtacgttcagaattccaacgtggttcaggtgttcctgacctaatcgcaattcaccaagacgcttctggtaatgcacgtaacgttgcgctttcttacgcttctggcgtaggtggtggccgtacaggtattatcgaaacttcattccgtgaagaaactgaaactgacttattcggtgagcaagcagttctttgtggtggtgcagttgaacttgtgaaaatgggcttcgaaactttggttgaagctggttatgcaccagaaatggcttacttcgaatgcttacacgaacttaagttaatcgttgacttgatgttcgaaggcggtatcgctgacatgaactactcagtttctaacaatgctgagtacggtgaatacgtaactggtcctgaagtaatcaatgaacagtctcgtgaagcaatgcgtaatgcattaaaacgtattcaatctggtgaatacgcgaagatgttcatccaagaaggtgcgttaaactacccatctatgacagctcgtcgtcgtcaaaatgctgcacacggtattgaacaaactggtgctaaattacgtgcaatgatgccttggattcaagcgaacaagatcgtagacaaagagaaaaactaa

SEQ ID NO: 41484 - DNA, 2055 bp, Acinetobacter baumannii
atgggtcatgttgattacgatagcacattgatcgtcggctcttttattgcggctggcgctatttgctatattgtgatttccatggagcagttaatatttaagcaaacttataaaaagattgagccgtttattttattactcaatggattattactcgcagcagcgattagtattgtccatattgtcggcatgcatgcttaccatttatttgaagcagcttcctcgaacgttcctttaattacactggcttttggcattagtgctgtactttcaagtgtcgcaatttggctgacttctcgttttacacttcctatatttagactcattttaagctcagtcattatgggaattggaatttctgcttcttattatgtgagtatgttaggctggaatattgatatttataagaaagactacacttcctttcttattttattttctgtcttaattgccatgagcgggtcgggactagctttcttgctggcctataaattaaaagaaagtgaacgtcaccgtataagtttaaaattagcctttgcagtgatgatgaccctaagtattatggggatgcactatacggcacttatttcgacaaatattaccgataagtttgtaagccaatatcaggctgaacatgacttgctgctatttacaattatcttggtgacgtgtctggtgctggtcgcgagttttattgttgccgtgctggaacaacgactgaaccagcgaaatctagaactgcgtaaagccaataaagaattagccaacctctctattcaagataacttaactaaattaccaaaccgactttatttagtggattacgccgaagttctcctttcagatcaccgttataaagaccaaaaaatagcttttctctatattgatttagaccgttttaaatcggtaaatgatgcgtttggacaccacattggtgatcaactgcttatacaaatggccaatcgtttacattggcaactcaatgaaaagtgtaaattacttagaattggtggggatgagtttttactcattgctgaaaacactgatactgaagaggcaatgcaacttgctgaaaaagtattacatcttattcaagacagttaccaaatttctggtaaagaaattaatatttcagcaagtctaggtatcgcactgttccctgaacatgggcaaaatgttcaagacctgctgatgaatgccgatgctgccatgctgatgtctaaggagcagggccgcaatacttataccgtctttagttattctacccatcaacaagaaacaagaagtcagtcaaaactgatcaatgatttatacaaagcagtcgaagaaaaacaatttgttctctactaccagccaaaatttaatactaatcttgagatttgtggggtagaagcactcattcgctggaaccatccatctttaggtatgctgacaccgcatatgtttattggtggcgcggaaaagacaggtttaattattccaatgggatattgggcgcttgagcaagcttgccaacaaattcaggaatgggaacgtagcaatacgcagttttatccaatcgcagtcaatttatcggccttgcagttcgaaaataaaaagctctttagtactctcgaaggtttgttaaaaaaataccaaattcagcctcatcacctcattattgaaattaccgaatcaaccgcaatgcggcatatcgacttaagcattcgggcttgtgagcgactgcgcgatatgggtattcgggtggcaattgatgactttgggacagggcactcaagcttcttatatttaaaagatttaccagttgatgaacttaaaattgaccgtggttttattgtcgatttaaaaccaggctcaaaagaagaagttattttagaaagtattattcatttggcgaaaaagttaggtttaaccgtaacagccgaaggggtggaaacacagcaacaagttgagattttaacgcgcttgggctgtcagcagttccaaggttatttgttgggtatgcctgtaaatgtagggcaactgattcagtcgcaaggtgctcattttgtttaa

SEQ ID NO: 41485 - DNA, 564 bp, Acinetobacter baumannii
atgccatattcagatctctcatttcgcgcgttaagcgtgctccataagtctcgatatctttttaataaacatggttttcataacgtaggagtagaccgcattgtgcgagaagcagaggtgccaaaagcttcgttttataactatttccattctaaagaacggcttattgaaatgtgcctacactttcaaaaagacgtcttaaaagaacaagtgcgctcaatcatttacatacaaaaagatttaatcttgcgtgaaaaactcaagaagattttctttttacataccagtctgaatggttattaccacttgctatttagggctatttttgaaattgagaaactctatcccgcagcctatcaagtggtcgtacagtatcggcattggttaactactgaagtttataaattgcttttaactgtgaagaaagatgccaagaaaagcgatagtgatatgtttttatttacgttagatggtgcgattattcagctgctagatgaaactaggggtgatacgagagaactgttatttacttatattttaaagggtatttttcttaaagattaa

SEQ ID NO: 41486 - DNA, 588 bp, Acinetobacter baumannii
atgacggggcaaccaatgtcaaaaagagaaacgattataacaacagcaatgaccctttttaatcagaaaagttatacctctattggggtagacaaaattattgctgaatctaaagttgcaaaaatgactttttataagtacttctcttctaaagaagttttaattgaagagtgtcttcgccgaagaattttagaagtccaaacttctttattagataaagttaatagtgcagatgacccattaaataaactgaaaagtatttttaattggtatatcgactggattaacactgaagattttagtggttgtttatttaaaaaagcaacaatagaagtcctgcagctctatccttctattaaaaaacaagtaaataaataccgtgaatggatttacagtttagttttatctatatttttagagttagaaattgaagatccaaaagtattaagcagtctttttcttaacattatagatgggcttattattgacgggactattaacaaaccagaaattaactctgaagaaacatggtcttatataaataaactcattgaacttgaaacaaaacaaaaatatgaagccgcttaa

SEQ ID NO: 41487 - DNA, 864 bp, Acinetobacter baumannii
atgtcaaaaaaatttgaagactttaataatccaagagaaaaagcattgcaggggatgaaagatagtatccccgcttcacaatgggaagaaaacttacagtttctcaaacaattaaggaataaaattgcgcaattaccagtaagtaaacaccctgcaattgaaatattaaataacggttatcttgataaacaaaccctgactcgtattcatttagaatatcgtcatgccattgttcagatttttaccgatgctttattaaaggcgcagtttctgacaaaacaattggagccaaagcttcactcgggcgctaaaatgtttccacgggtgttgttgagcttaaatatattagatgaatttggttttcgaccgggtttagataaagataattattatttaggcaaccctgaatatgcacattatccattatatgaagatttgctaaatgactatggtttgactgaggctgaccgccgtaattataaaccttcaaaaattgcagatcaggtgagaacatttttagaagcttcttacgatagttatattaatgtggtggcattattggcggtggcagaagaagaagttattctttttagcccgccattacgacaagcaaccaagtttgtaaatatcgatgttgagggtggtggttattaccatgtacatggcgtttcaacagatgaaacagctgaagctgctgatgatgaccatcaagatgacctttggtttgcgttggctcaagccattaccaaagatgactatgaaagcttgactcaactatgtcttgattattgtgcattgtggactgagttttgggatgcacaaattgccgatgtccaatttattgaagaaaagaaattggcataa

SEQ ID NO: 41488 - DNA, 1593 bp, Acinetobacter baumannii
atgagttttaaagatgagttagcggcacaggtcgctcaacgacgcacatttgctattatttcccaccccgatgccggtaaaaccaccatgacagaaaaactgttgttatggggtaaagcgattcaggttgcagggatggtaaaaagccgtaaatctgatcgtgcagctacatctgactggatggaaatggaaaaagaacgtggtatttcgatcaccacgtctgttatgcagttcccatataaaggtcacacgattaacttactcgatacaccggggcacgaagacttctcggaagatacttatcgtacccttactgctgttgactctgcactgatggtgattgatggtgcaaaaggtgtcgaagaacgtaccatcaaattgatggaagtgtgtcgtatgcgtgacacaccaattatttcattcgtcaacaaaatggaccgtgaaattcgcgagccacttgagttgttagatgaaattgaaaacgtcttaaacattcgctgtgtaccaattacatggccacttggtatgggccgtgactttgctggtgtatacaatattcttgaagataaattgtatgtctacaaagcaggttttggttcaaccattaccgatattgaagtacgtgatggctataatcacgctgatattcgtgaaaaagttggtgagttagcttgggcttcttttgaagagtcgcttgagcttgtacaaatggcaaatgagccattagaccgcgaactattcttacaaggtaaacaaactccggttttatttggtacagcattaggtaactttggtgttgatcacgttcttgatgcatttatgaactgggcacctgaacctaaagcacatccaacgcaagagcgtatggttgaagcaaaagaagaaggtttctctggttttgtatttaaaattcaagccaacatggaccctaaacaccgtgaccgtattgccttcatgcgtatttgttcaggtaaatacgagaaaggtctgaaaatgaatcacgtacgtattggtaaagaagttcgtattagtgatgcgttgactttccttgcaggcgagcgtgagcacttagaagaagcatggccgggcgatattattggtttacacaaccacggtacaatccagattggtgatactttcactagcggtgaaaacttgcactttacaggtattcctcacttcgcgccggaaatgttccgccgtgtacgtttgaaagacccattaaagtcaaaacagttgcaaaaaggtttgaaagagttgtctgaagaaggtgcaactcaggtatttatgccacaaattagcaatgatttgatcgtgggagctgtgggtgtacttcagttcgacgttgttgcttaccgcttgaaagaagaatataaagttgactgtgtttatgagccagtaagtgtaaatacggtacgctggattcattgtgatgatgaaaagattcttaacgagtttaagaaaaaggcacatgaccaactttctattgatggtggcggacacttaacgtatcttgcgccaagccgagtgaacttgcagattatgcaagagcgttggcctgatattgagttccgtagcacacgtgaacactaa

SEQ ID NO: 41489 - DNA, 843 bp, Acinetobacter baumannii
atgaacttgagtaaaaagacaattattgcgcttgtggttgcagccatagctctaattttggctatttgtgtatttgtctggaaaaagcctcagtcttcatcatcttctcaagaaaattcagcttctactcaagaccatccggttgagaaagcagaggttttaccttatttaaatttgaccgaaaccaaagcaagttatgcagtgccgttttgtgaaaagaaaaattgtattgatgtcgatattcaaaccataaaaacccaagatgcgtggttaaatagctggattgaaaaaaatcaggcgaaagttattcaagctcaaattaatttgaaaaaagatttaagccttcaacaagcgattaatgcttacgtgaaaaagtcggatgaatggcaagataagtattctaaaaatcgtgcttatgagttacacattcgtacacgcattgcctcgcagcgtaaccagtatgtgttattgcaattggctttagacagtaaacaagaagaaatcaccataaaagatcgttattattttttcgtggctgatcgtaaactgcataaaaacttaacgttgcttgatgtgcttaaaaaagaccagcaaccgacagtacatcaaattgttcaaaccgcgtatcaggactggttgaaaaagcaaactgccgatgtcaaaaaacaggccccaaaaactttatattggggacaagctgactggttctttgatggtgaaggggtaggtttgcactatcaggcaaatcagattacgaaagatgcgcctcaacttgatatttatttaacaacagaacaaacgaaaaaaatattgcaacctcaggtttatgaacaaatgttttaa

SEQ ID NO: 41490 - DNA, 945 bp, Acinetobacter baumannii
atgatgttaacttctaaggcttcgctacgtttaacgctacttgcttctgcgatatttttggtggcatgtcagcctaaaagtgatcctaaagagtcggaagatcagcaaaaaccggctgtggttgaacaaaagcctgtagaactgactttgaaaggggaaacagttccaagtaaagtgactttaccggattgtgatggtaaaacttgtcctgaatttacggtagaacgcctacaaagtaatttcccttttattgataagattattgatcaacaagttttaaaagcactcggtcagattcttgaaattgcagaacctgatgcaaaagcagcacaagctgataagaagacagaagcttcagcagctgccgctacagagcaacaagatagtttcgatgctcaggttcagcgctatgcaaattcatttattgatttggacaatgagttaaaggctctaagtagtaatcaccaaattaatctgttggtgaaacctaaaatcatacagtctcaaggtaaagtcgtaaccgttgttgtaaatagtagtaactatttaggcggggcacatggctcggcagcgcagcaatattataattttgacttaaagaaagaaaagcaggtcaaacttgaagacttgttacgtccagagaaaaaagcggctttagaaaaattagcacatgaagcgtttaaagcttgggtgacagactcaaaacttgcaaatagtgtgagtgaatatgagcaagcttggccgtttaaactcacagaaaattttctgttaggtgaccaaggcttgattcttcaatatggcgaatatgaaattggaccttatgtggtcgggctacctcgtttagttattccatatgaccaattacaagatgtattgaaagaagaatatctgccgcagcctaaagctaaaccagcttcgacacctgccataaaaagtaccagctaa

SEQ ID NO: 41491 - DNA, 813 bp, Acinetobacter baumannii
atgcatctgtttgatactcacacccattttgatgttgccgattttgatgaagatcggcagcaattagcacttgaagctaaaaaagtgggtgtggatgctttggtgttaattggctttttacagtcacgttttgatgagttggtacaaacccatcatcagctcaagcagtgggagaatgtacctgcttcttatttagcaccggggttgcatccgttttatattgagcagcacaaaccagagcatctttctcatcttgaacagattttgcagcaagaagactgcgtcgcagtaggagaaatcggcttagataccttcttaaaggaacacaagcagcccgatatatatgccaagcaaaaacaatattttgctgatcagttagatctggcaactcaataccaaaaaccggtgttgcttcatatacgaaaagcacatggggatgtgctcgctctattaaaagctcaaaaatttaaattgggtggcattgctcatgcctttagtggtggagtagaggaggcaaaaggcctgattaagcttggttttaaaattggtgtgacggggcaaatcacgaaccccaatgcgaaaaagcttcatacggttgtgcaggctataggtgccgagcatttagtgattgaaacagactgtcctgatatgacgccactttgctgccaaacttcaactgagcagcgtactcgaaatacgcctgtgaatttaccttatgtactaaaaagtttggctgtaaatttaaatatggcagagtcagaattagcagatttgctgtggaaaaactctttatctgctttgaaattatcgtaa

SEQ ID NO: 41492 - DNA, 2757 bp, Acinetobacter baumannii
atggctaagtatagcaatatcaatagttttaatgctttacagacgctaacagtaggttccagcaattatcagatttttagcttaacccaagccgagaaaaagctaggtgacattgccaaactgccgaaatcattaaaagtactgttggaaaacttattacggtttgaagatcagcacagtgttaaaacagaacacatttatgctttagctgagtggctaaaaacccgtacctcagatcaagaaattcaatatcgacctgcacgggttttaatgcaagattttaccggcgttccggcagtcgttgacttagccgcaatgcgtgctgcaatggctgaagcggggggcgaccctgaaaaaattaatccgttatcacctgtagatctggttattgaccactctgtgatggtagaccattttgccgatgatcaggcttttgaagaaaacgttcaaattgaaatgcagcgaaatggcgagcgatatcaatttttgcgttggggacaatctgcatttaataactttagtgttgtgccaccgggtaccggtatttgccatcaagtcaatttagagtatttggctcaagcagtgtggttaggtgaagacaacggacaaacctttgctttccctgacaccttagtgggtacagactcacataccaccatgattaatggtctaggggtattaggttggggtgttgggggtattgaagcagaagctgccatgttgggccaacctatctctatgcttattcctgaagtgattggttttaaactgactggcaaattacaagaagggattacggcaactgacttggtgctgaccattactcaaatgcttcgccaaaaaggtgtagtgggtaaatttgtagaattctatggcgatggcttagccgatttgccacttgctgaccgtgcgaccattgctaatatggcgcctgaatatggcgcaacttgtggtttcttcccaattgatgaagtgactttgggttatttgaaattaacaggtcgtcaaagtgaccgtattgcattggtggaagcatatagcaaggcgcaaggtttatggcgtaatgcgggtgatgaacctgtgtttacagatacgttaagtttagatatgagtacggttcaggcaagtttggcaggtccaaaacgccctcaagaccgtgtgcttttatcggaagtacctaaaacgtttaatgcgctcatggaattaacccttaagccagccaaagaagcgaaagaacgtttagaaaatgaaggcggtggcggtacggctgtagaagcgaccaaagccaatattcagcatgaaagcccatcttgtgtgattgaagggcaagaatatccgttgaatcatggtgatgtcgtcatctcagcaattacttcatgtaccaatacttctaacccaagtgtcatgttggcagccggtttacttgctaaaaaagccattgaaaaaggcttgcagcgtaaaccgtgggtaaaaagttcacttgcgcctggttctaaagtcgtgaccgactatttattggcggctgggcttacgccgtatttagatgagttgggctataacttggttggttatggttgtacaacgtgtattggtaactcaggtcctttacctgaaccaattgaagatgcaattcagtgtcatgatctaaatgtggcatctgtactttcgggtaaccgtaactttgaagggcgtgtgcatccattagttaaaaccaactggcttgcctcaccaccacttgtggttgcctatggtttagttgggaatatccgtaccgatttaacgactcaaccaatcgggcaaggtaaagatgggcaacctgtttacttaaaagatatctggccaagtcaggcagaaattgatgccgtcttacaaaaagtaaataccgacatgttccacaaagaatatgctgcggtgtttgatggtgatgaaagctggcaagcgattcagattccaaaaagtaaaacttacgaatgggctgatgactcgacttatattcgccatccgccgttctttgaaggtattggtgagccaccaaaaccaatcaagaatattgaacaggcacgtattttggcagtgcttggtgactcggtaacaaccgaccatatttcaccagcgggtaatatcaaaaaagacagtccggcaggtcgatatttacaagagcaaggtgttgagccaaaagacttcaactcttatggttcacgacgtggtaaccatgaagtcatgatgcgaggcacctttgccaacattcgtattaaaaacgaaatgctcggcggtgaagaaggcggtaataccatacatgtgccaagtggtgagaagcttgccatttatgatgcggcaatgcgttaccaacaagaacatacaccgcttgtgattattgctggtaaagaatacggaacaggttcttcacgtgactgggctgccaaaggaacgaacttgttaggtgtaaaagctgtcattgctgaaagttttgaacgtattcaccgttcaaacttggtgggtatgggcgtgttgccactccagtttgttgatggccaaaccagacagtccctcaacttaacgggtcatgaagtcatttcgattcgtggtttatcggatggtattcagcctcatgaaattcttgaggttgatgtgaaagggccaaatggagtagctagtcattttaatgtgttatgtcgaattgatacgttaaatgaggtggagtactttaaggcaggtggtattttgcattatgtacttcggaatttgattgcttcataa

SEQ ID NO: 41493 - DNA, 474 bp, Acinetobacter baumannii
atgggtagagatacagtatttttaaaagttgaatctcgattgggatatgatttttcaggggatataaaaataggaggtaaatatacctcattaattgaacacgctggacttgtatttattagtggtcaaattccaagagtgggagatacggtacagatttgtggaaaagttggattagatgttgatttatcagatgcacagcttgctgcaagtattagcaccatgagagctttagcaattttaaaacagcactatgggactttagatgttattggaaaagttttacaaatgaatgtatttgttcattcaacgtcatcttttatacagcaaagcgaagttgctgatggagcatctgaaatactttatgaaattttgggtttagatacgggacggcatacacgtacatcggtcagcgtgtaccaacttccaaaaaatgcatctgttgaaatcaacttcatttttgctttgaaataa

SEQ ID NO: 41494 - DNA, 765 bp, Acinetobacter baumannii
atgtccgatttaccacaaaatgatgaatatgaccgccgttttgcaggtgtagccaaaatttatggtgattcatcgttccagcactatgaacaaagtcatgtgatggtgattggtattggtggggtcggcagttgggcggtagaagctttagtgcgtacaggtattggtgagatcacattagtcgatatggatgtggttgcagcgtcaaatgtaaaccgtcagctacctgcaatgacctcaactctgggctgtgaaaaagttgagattatggcggagcgttgtcgccaaattaacccacgcattaaagtcaatattattgatgacttcttaacacctgaaaatgttgcagagcttttaaaccctgtaccggatattgttttggactgcattgatgacgttaaggcgaaactggctttaatgctccattgtcgttttaacaaaattcctttgattgtatccggtggggcaggtggtaaactcgatccacttaaaattcgcgtggccgacctatcaaaaacagaacaagacccaatgttagcgaagctacgtagtcagcttcgcgctcgcggcatttgtaaaaagccaaaagagaaatttggcattacctgtatttactcaatcgacaatccattttcaagcgcagatgtctgcccatcggcggggttgcgctgtggtggctatggttcagcggtggtggtgacttcaagctttgctatgattgctgtagccgaagttttgaaaaaactcgatttaaagaaagcctaa

SEQ ID NO: 41495 - DNA, 894 bp, Acinetobacter baumannii
atgctcacattaaaacaattccaatatttcataaaaattgttgaagaagggagttttactgctgcttccgaaaagctatttattgcccagtctgctttaagtcgacaaatgaaactattagaagaagaaattgattttcagttgtttgatcgtacggacaaaagagcaagactcacgccagcgggagaggtcttctataagaaaataaaagataacttgctttatttaaatgaaattattgacctgtctaaaagtgtttcggaagggaaaaatcgacagattaaaattgctcattccagcagtattgtcgtggataatacaaaggttcagatattaaaagaagttagcctaacgcagcagttgagctttgagattaataccttatcatccgagcagcaaatcttagcgttattaaatggtgaaattgatatcggtttgatccgcccaccagttcggcatactttagatggtataaatactcttaagttatatgaagagcctttaatggtggctgtgcatattgatcatgccaagttttctaaatcagaaaaggtttatttaaaagacttaaaagatgagtgttttgtatcaacacctcatgccgaaagaggaggcttaagttatttggtcgcaaatctgtgtttagccgcaggatttaccccacaaaaagcctccattcagtcgcgtaagatttcacagttacagctcgtggcggcaaatttaggggtaggtattgttcctgcggagtttcaacaaatcttacctgccaatgtaaaactaatacctttggaagattccctatctctttcggaagttttactggtctatagaaaaggccatgatgaaatcattcagcattgtgccgagcaaattcatcaaatgtttctatcttag

SEQ ID NO: 41496 - DNA, 510 bp, Acinetobacter baumannii
atgattatttatgacggacaagtagctgataactatatgtatcaggattcaaatcaggcagccattgttgtatcccacagcacaccaagcctcccttatccattcaccatgaaacccaataatcactccactgaaaccaacactcctccagccattgatgtagaaaaattcgtagctaaattagaaagtattacctctagacgcagtaaagcgcgttgtgcacgtagcatccgtattgcgcttgagtctgctggtgccgatgttgaaaatcatccgattgcagcatctgattggggcgataccctcaagaaaattggctataaagaaataaatccagcctttgatgagccacaagaaggcgacatttatatcattcacagaacccgcaaccatatttacggtcatatcgctggttacacaggaagcgaatgggtgtcggactttaaacaaagtagttatgacgtctataaagatgataacgtcacctatacttactatagattaggctaa

SEQ ID NO: 41497 - DNA, 1005 bp, Acinetobacter baumannii
atgcaatcacttcaatcgttacaacctcgtatttcagtagccccaatgatggactggactacaaaggactaccgattctttgcacggttgtttaacccaaacgttgtgctttatacagaaatggtgactacgggcgcgattctatttggcgatgcgaaacgccatttggactataacgctcaagaacacccaatcgtattgcagcttggcggctcaaacccacaagagcttgccacttgcacaaaaatggctgaagactggggttacgatgaagtcaacctgaatgtaggctgcccaagtgaccgtgtacagaacaataaaatcggtgcatgtttaatggcagagccagacttggtcgctgaatgtattcacagcatgcaaaaagctgtcaacattccggtaacggtaaaacaccgtatcggtattgatgacatgcagtcttacgaagaaatgctgcactttgtagatactgtcgctgcaacaggttgtactcactttgttgtacatgcccgtattgcgatattgaaaggtttgtctccgaaagaaaaccgagaagtaccaccgctacgctatgaagatgtttaccgtttaaagcaagaacgcccgcatctgactattgaaattaatggtggtattaaaacttttgccgaaactcaagctcatttacagcacgttgacggcgtcatgattggccgtgaagcctatcacaacccttacttacttgctgagctcggccaactttggaacctagaagcaccagatcgtttcgatattatggaacaaatgctaccgtatattgaacaacgtctagctgaaggtgcacccctctctatcattacacgtcatattttaggtctattccaaaatttaccgggcgctcgcaaatggcgacaagctctaagtggtggaaatgcaaaaactttaactgacgtcgagaatgcaattcataatatgcaagctgctattatccgtactgaagagtatttaaaggaacaccaattttaa

SEQ ID NO: 41498 - DNA, 1185 bp, Acinetobacter baumannii
atgtctacccctgaagatatcagtcaaaataaacctttactttggttgatggcagcagcatgtggcctatgtgcaggtgtgaattactattgccaaccccttattcactctattcagcaagattttgctgtaactcaagcacaagctgctttaacagtaacatttgctcaggtgtcttatgccttaggtttactctttattgtgccaatgggggatatcgtcaataaagccaaagctattccgtttttgatgatgctttgtgcagttggcctatttacctctgcttttgctgttaacttacctatgctctggatcggtacaattttagcgggtttgttttcagttgcagctcaagtgcttattcctcttgcaacaatgacggttaaacctgaaaaaactggtgagattattggcttcttaatgagtggcttattggtcgggattttactctctaccagtctggctggcttattttccaaccttttccactggaaagtcgtttatgccataagcggtatattaatgcttctgttggcctataccttaaaaagccgcctgccttatgtcatgcgtatgaaactgaactatggacaaatctttgtttccatggctcagcttttaaaagaggaaaagcgacttttattaagagcgcttacaggtgcattcgcctttgcgtcagtgagtattttgtattcaacaatcgcgttactactgacctcggcacatcatttacccgatctatttattggactggtacctttagttggtatctttggtgcgttatcaacacgttatatcggcaaatatgccgaccaaggctacacacgtttactcacttggatgggttgcgggctatttttagtaagctggatttgtttctatttcggacaaattctactttcagcttatgttattggttttgctttaattcaattggcacttgcccttgttcacactagcaaccaaagtattatcttccgtttacgtcctgatgctaaatctcgtattaatgctatttatatgactacttattttattggtggtgcagctggttcggcattagggatttttgcatggaatcgtggtggatggaccatgacttgccttgcaggtgtagggctcgttgtattttgtattttatttagcatgattgatgctttcttacaaaaaaagcaaatggcttag

SEQ ID NO: 41499 - DNA, 408 bp, Acinetobacter baumannii
atgaacaaagaaatttttaaaatcataaatccttctactttatatgacccaatacctaacgcttatagtcatgtcgctgtagtaagtaattttaacaatattattcatattgcaggtcaaggtggcgaagaccaacaaggtcaattaagttctcatttcagtgaacaagtcctacaagcatttgaaaatattaactatgcgttagtggctgccaatgcagagcttacggatatcgctgttttaagaattctagttgttgaccattcggtagaaaaacatgagattttgattaaaattatgaaggatttatggaaaaatcatccttttccagcctgcacactcattcctgtgccgcgacttgcactagaacatatgctcattgaagtcgaagcaacggcatacacttaa

SEQ ID NO: 41500 - DNA, 927 bp, Acinetobacter baumannii
atgaaaatttctttatcttcgtttcaacttgggtctttttttgcgctttgctctgcttttctattcagcacaaaagcgatttttattaaacaaacttatgccctttctccattagtagacggtacagtcctgatggctttacggatgttaagcgctttaccgttttttctattaatttgctggttcaataggcatcataatcagggcataaaaaagaaggattggctaattttaatttttgccggtctattaggctactactttgccagctggctcgatttcatgggcctcatgtttattagcgcttctttagagcgaatcatcctatttttatatcccacacttaccgtgatcgcttcaagtctgctctacaaacaaaaattagatgtaaaaagtttattcgccatttttcttagttatggtggaaccgtgttagtgatgctgcaagagcacaacaatgcaccaattcagggcaacttttggctcggaacaagttttgtatttgctagcgctgtagcttttgccggttatttactgctgactccaccattaattaaaaaatttggttcttggaatttcacaggtttagctttaacagttgcctgtataggtacattaacccattacactttaagtacttctcacccgtttcaactcctattacaacttccctcaagtgtaatttggtacgggattggcttaggttttttagtcactgtcttacctaccgttatgcttatgcaaagcattgagcgactcggagcatctcaatctgcgatgattgcttcgattggacccgttttaacgattttgcttgccgttgcttttttaaatgaacacctaaatatatggcaatgggtcggttgtttcctcaatatagtcggcgtaatgatgattactttaagaaagaaaagactaaaacactaa

SEQ ID NO: 41501 - DNA, 1128 bp, Acinetobacter baumannii
atgcagatcggaatcccaaccgaaactgtcgtcggtgaaaatcgtgtagctgctacgccagagacagtaaagaagttgattagcgctggtcatagcgttgtgattgaacgtggtgctggtgtaaaggctgcgtacattgacagtgcttatgaacaggtcggtgcaaccattacggatgatgcctatacaggtagtcaaattattttgaaagttcgtgcgccacaaggcggggaaattcaaaaacttgcagcaaatacaactgttgtagcaatgtttgatccttatcgtaataccgagctagaccaatttgcgaatcagcaagtgtctgcttttgctctggaattgcttcctcgtacgctttctcgtgcacaaaacatggatgtgttgtcttctcaagcaaacttagctggttataaatcagttttgcttgcagctgctgaatatcagcgcatgttcccaatgcttatgactgctgctggtactgtaaagcctgcacgtgttgtgattatgggtgttggggtggcaggccttcaagcgattgctactgcaaaacgtttgggtgcaattgttgaagcaacagatttacgtccaacggcaaaagatcaggttgagtctttaggcggtaagtggttagacgtaccaatgtctgaagaagaacagcaacgtgcagcagatgcagcaaaaaatggttatggctggatgccgggtgagcaatacatcaaagaccaagctgcgattgtagataaagctgtgtcgaatgccgatatcgtgattacaacagcattgttaccaggtcgtgatgcaccgcgtctgatcaaagctgaaactgttgccaaaatgaaaccaggctctgtcattttagatatggcagttgaaacaggcggtaacgttgaaggttctaaagttggcgaaactgttgtcactgaaaatggcgtaaaaattttgggtattccaaatattccggccactgttgcgacagaagcttctgcattatatgcacgtaacgtttttaatttcgtagagactttattcgacaaagacaaaaactttgcgattaatcaagaagacgaaatccaaaaagccctattggtcactcatggcggtcaagtgctgcttaagcgtggttaa

SEQ ID NO: 41502 - DNA, 315 bp, Acinetobacter baumannii
atggttgaaactattacaattttcgtccttgccatcttcgtaggttattacgttgtttggggtgttacaccagctttgcacacgccacttatggcagtaaccaacgcattgtcatcgattattgttgttggtgcgatgttacaaacagttggcctgcctgtacttggtgtagatgcaaatgttgcatttcaaagtgtgaatgttgtgagcgtacttggtgcgattgcagtatttttagcaagcattaatattttcggcggcttcgcagtaactgcacgcatgttggaaatgttcaagcctaagcaaaagaaataa

SEQ ID NO: 41503 - DNA, 1455 bp, Acinetobacter baumannii
atggaatttattcaagcaaatgcaaactggttgtaccttgtaggcgcaattctctttatcttgacgcttcgcggcctatctggtcctaaaacagcaattcaaggtaaccgttacggtatgatcgcaatggcgattgcagttgtaacaaccttctttgttgccaataacccggttatttggatgattggtggtgcaatggtgcttggcgcgattgtgggtattgcacgtgcacgtactgtaccaatgactcaaatgcctgaaactgttgcacttatgcactcattggtgggtttggctgcggttttaattgcggttgcagcaattttgcataacaaccagcttacagcattgtttgctcaaaatgaggcagcattaacagcggctggcgtgcaacatgcacacatgagcaaggttcacctatttgaattgtttgttggttgttttgttggtgctattacctttacagcatctgtgtttgcttacggtaaattggcagcgaaaaaatgggctaaaacaatctttggtggatgggttaaacctgttcaagcacttatctttgttgcgatgttggcttgtggtttttacttcttcacaactggcaatatgactgctttctgggcaatgactgcacttgcacttgcatttggctgggtatggattgcaccagtaggtggtggtgacatgcctgtagtggtatcgcttcttaactcattctctggttgggcagcagcaggtattggttttaccctagaaaacaacatgttgatcgttgcgggttcacttgtgggttcatctggtgcgattctgtcatacatcatgtgtaaagcaatgaaccgttcaatcatcaatgtattgtttggtggtgcaatgggtggtgcagcagtttctacagctgctaaaggtgaacaagttcaacgtaactaccgttcaggttctgctgatgatgctggcttcttaatgtcaaatgcagacagcgttgtgattgtaccgggttatggtatggcgcaaggtcgtgcacaaaatgctgtaaaagagttatgtgaaattctaaaagagcaaggtgttcgcgtccgtttcgcaattcacccggttgcaggtcgtatgcctggtcacatgaacgtattgcttgctgaagcagacgtagcatatgaagacatcttggaaatggatgagatcaactcggacttcccggcaactgacgtagtacttgttattggtgcaaacgacgttgtgaaccctgctgcaaaagatgacccaggttcaccaatttatggtatgccgattcttgaagcacataaagcacgtacaatcatggtgattaagcgttctatggcgacaggttatgctggtcttgataatgacttgttctataacgaaaaaacaatgatgatctttggtgatgctaagaaagttgttgaagatatgacaaaagcaattaatggtacaggccactaa

SEQ ID NO: 41504 - DNA, 822 bp, Acinetobacter baumannii
gtgaagatactcattacaggcgccaacacaggtattggttttgccacagcagaacaacttgtaaaacaaggacaacatgtcattttggcatgccgaaatcctcaaaaagcacaagaggcacaaaacaaactacgctcactcgaccaaggacaagtcgatgtcgtttctcttgatttaaacagccttgaattaactcaaaaagctgccgaagaaattacagataaatatggtagccttgatgtacttattaataatgccggtctattttcaaaaacaaagcaactcaccgtagatgggtttgaacagcaatttggcgttaactatttaggtcactttttgttaactcaaaaactacttcccgttttaaagcagtctcctcaagcacgcattattcatctagcgtctattgctcattgggttggttcaattaagcctaataaatttcgtgcggaaggtttttacaatcccctgttctattatggacaatccaagcttgcaaacttattgttcagcaatgcattagctgaacaactaacagacagttcaattaccagtaatgcattacaccctggtggtgttgcttccgatatttatcgcgatttaccaaaaccagtttatgcagccatgaaagtaggtttagttccaacatcggttcctgcaaagctcattacagaaatggcgactggtgacacatggcaaaaccgcaatggtgaatatgtcagtgcgcatatgcctgactggaaatcctctcatgccaaaaaccagcaattagcacgcgatctctatcagcaatctatgactctagtggaaaagttcctctaa

SEQ ID NO: 41505 - DNA, 402 bp, Acinetobacter baumannii
atgaatttagaaccatcgcccagcgtgtctaattctcacgatttcgcaatgaacacctcaaataaagacgtacaagcttgtcttaaagtcgtccatgacgctttagttgatgtaaaagcaaaagatattctacagttagatgttagttctattagcaatgttgctgatgctattgtcatcgcgagtggtacttctactcgtcacgtcaaagcacttgctgacaatgttgcagaagaagctcgaaaagctggtttccgcccgattggcgttgaaggcgaacgagatgccgaatggatcttaattgatcttggctttgttgtagtacatgtgatgctaccaactgcccgcaaattctatgatttagaaagcttatggcgtactgctccagagtcggtcgcataa

SEQ ID NO: 41506 - DNA, 795 bp, Acinetobacter baumannii
atgggtcgtcttgccgttaacttatccatgatttttaccgaagttcctttaattgaacgctttgcattagcccatgcagagggctttgaacatgtagaaattcaattcccatacgagcttgccatttctgatattcaagaccaacttgaacgttacaacctaaatttatgtttaattaacgttcctgctggtgaccttatgcaaggtggaaatggcttagcaggtataccgggtcaagaggcagcatttcgtgaagcattacagttagcgattcgctatgccacagcattaaaagtaccacgtgttaacattttggcaggcaagcaacctcaagactctgacttacttccttgccttaagacacttgcaagcaacttaaaattagcctgtgatttactgacagaacacgatattgaacctgtatttgaaatgattaatggcacagatatgccacgctttttggtacagaacattgcccaagcccaagaaatgctagaagcagtcaatcaccctgccttaaaaatgcaatatgactgttaccatatggcaatgatgggtgaagatgtacttgaaggtttacaagaaaatattcaccagattggccatattcagtttgcagattgtccgggacgccatgaacccgatacagctcaaataccgtatgagcaaattttttcatggattaagcaaagtgcttatgagggctatattgcggcagaatataaacccaaaaatggctcaaatcagtcatttacatggaaaaagaaatatttttccgatgatgtaaatatataa

SEQ ID NO: 41507 - DNA, 867 bp, Acinetobacter baumannii
atgaattttgatcgtaatactcctattgcttttttaggcataggacttatgggaagccgtatggcaagccgtcttatacaagccggctttcaggtcgcagtatggaatcgaacagcatctgcttgtgaagaacttattgatattggcgcgcatgcactcgatctttccaacatcggacattaccctctcattttgacttgcctagccgacgataaagctgtgcaagcagtatttgatcaaattcaaacaaacttaaaagcgggtcaggtcattgtcgacttctcaagtctctctgttgctgcgacaaaagcacttgctcaggctgctgcttcacaagatgtgatatggattgactcccctgtttcaggcggtacagctggggcagaacaaggcacgctagtcatttttgcaggtggcgatgctcaaactattgaagctttaagtcctgtttataatgttctttcccaacgtgtcacacgaatgggagatacaggcacaggacaagcaactaaaatttgcaatcaactcattgtggcagcaaacagcgccctgattgccgaagcagttgcactggcagaccgcgcgggcgtagataccactttactcgctcctgccctagctggcggatttgccgactcaaaaccttttcaaatactggcaccacgtatggcgactcatactttcgaacctgttcagtggaaagttcaaacgttatcgaaagaccttaacaacgcagtaacattggctaacaatgttaatttagacatccccgttgcacaaaaagctctattacagctacaaactcaccaaaaaaatggctttgctgagaaagatttagctactatgattcaagtagtagagcaataa

SEQ ID NO: 41508 - DNA, 789 bp, Acinetobacter baumannii
atggcactattacgtattgagaaaaataatggcattgcaacagtttatctaaaccgtcctgataaacgtaacgctatgagttttgctctactcaaagaactcgtaacaacggctaaagctatacaaaaagaccgagatatccgctgtgtaattttgacgggtgaagcacaagtgtttagtgctggtattgatttatctgacttaaacaatcctaagaactctgcatttgccatttgggaacttgttaaaccaggacaaagtcttttccaaaaagcctttcttatttggcaaaatttgcccgtccctgttattgccgctcttgaaggttattgttttggggcaggtatgcaacttgcactagctgccgatatccgcattgcccacccagacactaaaatgtcgattatggaaagccgctggggcttagtaccagatatgggtcttacccgttcgctcaaaggcttgattggagttgaccttgcaaaagagctgactttaactgcccgtgtttttgacggaaattatgcaaaagatattggacttgtgactcacttaagtgagaatccattagaaaaagcaaatgcgatcgcttcagaaatgttgcagcgctcacctgatgcattgactgctgcaaaacgtgtactagatgcaatggaacatcaaccagaaaaatcattacgcttagaaaaaatctggcaacttaaattattacttggtaaaaatagcaaacttgctcgtaaaaaagacaaacatccggaagttaaatttttaccacgccaatatagataa

SEQ ID NO: 41509 - DNA, 2808 bp, Acinetobacter baumannii
atgtctaatttcaataaaaccttatcgaaacgcttacgtctgaatcatgcatatgggcaattaattgctcttatttttgtgcccattatgattttaacgtgtgttggggcttttctggttttaactgaaacatcacgttctgcaaagcaacaacaattgcatcatgcctcagcgattttggcacgctacaatcaaattgctaaagatctctacacattagtagaactacaaccagacgaatatgatcatgctcaacatattatgcaaagtatgtttagcgagaaaaatctaaagcgtgctgctttaattgatagtaatggtcagacttatttaagtatcggttatcgagataatcgttactggcctaacttcacacaaaacaataacttttttggtccgatctcttataaccataataatatttatggagtccgtatcattgataccacaggaaagccccctgtctggctcttgattgaaatggataatcaaccacttgaattagcgcgttatcgcattttgattgctttagtcattaccggcctaatgactttattattacttttgctctgtcttaacttttattctcgccgctggattgcacccatgtatgaaatacgtatgcaattacagcgtctcaatgcagacactttagaccaacacatcgtgattaacagttccggtgagttaagattactccagcgcgatatcgcaaacgtggtgaaacgcttacactttagttttttagagttaaaagaacataccgagcaaacagaagaagacttacgcagaactttagatactttagaagttcaaaacattacttaccgtcaagcacgcgaccaagccatttcatctaatcaggcaaaatcggttttccttgccaatatcagtcatgaacttcgtacaccgcttaatagtattgatggctttattcatttattacttcgccaacaaaatttaagtaacgaacagaacctttatttacaaactattcgcaagtcctctgcccatttattagcattaattaatgatgtattagatttctcaaaaattgatgcaggtaaactggaacttgaaacagcaccttttgacttagaagaagctgtatttgatgtcatggatatgttgtcacctttggctgcacaaaagcatattgccatggctttttattatgcagataacattcctcaacaggtaattggtgatgctttacgctttaagcaaattttgactaatttgatttccaatgccatcaagttcacgccagatggtgaaattattgttcgtgtacgtatggaacatgatgacatcggtcagtgcttgcttcattttagtgttcaggacagtggtattggtttaagtggtacagaccgtaaaaaattatttgagtcgttttcgcaaggcgatgcatctgttacccgccaatttggtggtacaggcttaggtctggcaatttctaaacaattggttcatctcatgcatggccaaattggctttgaagataaccaagaacgtgctccaacagaaaaaggttcaacattctggtttactgcacagtttgctgtagatgaagaacatgagattgaacatcctcacttcgaacatttacaagtggtgtcttatttagctcaccctgcaacagcgagtgttttacgctactatcttgaaaattatcaagtaccacatattgaaactcaatctattctggacttgtttagccgcttaaaacatctcgaccagaaagacaatacatggctcattgttgatcatagtggtgatactgaagctctactcaaagaaattcgtagccgctatcaaggtaacttagcagtttacggctatcaaacgacgcttgagccaaacatgctcaccgaatatcgcgctcgcccactttatcaaccattaagccgcagtggcctcattcaattattaagtgaccaacctatctttgaagaggaacaacaagactttaatggacaggggttacatattttggcggttgatgaccatttacctaacttaattgttttagaagcattattaggtgagttaaatgtcaaaactactaaggccttaagtggacaagaagcgcttaatattattcaagaaagaattgatcagaaacttaaaccatttgatttggtatttatggacattcaaatgccggttatgtcgggcattgataccacacgtgcgatccgctctttagaatccactttagatggggaaatgcaacttccaattattgctctaacagcccacgcgcttgcagatgaaaagcaaaagcttcttaaagttggtatgaatgactatgtcaccaaaccaattcaaatggagcaaatcattcaaattttaacgcaatggacgaaaaacaactttactgcgcaaaatctagctaaagatcatcatgtggttgcagaagcattagatccagaaattttaaattggcagcaaagtttacaactggcagcaaacaaagaagatttagctcaagatcttctcaaaatgttggtagatagcttcccaaccgagctagaagaaatgcaacaactcattgagcttgaagactttcctcagcttgagcatgtactacaccgtctttatggtgctacacgctatgtaggcacaccaaaacttcaacaagtgacaggtgactttgaacaatttatttctacgctacgcaaagaacgccgtagagctgacgatggcttcattgaagaagtcatgagacgtttcgatgaattaggtctcgtcattaaagaagttgagagtgcagctcatcaaattttagtcataccagattaa

SEQ ID NO: 41510 - DNA, 915 bp, Acinetobacter baumannii
atgagtaatacacaacctgattttttagccgacgaatttttgttagatcactatgtaggtaaaacacctctggtccgtttgcagcgcttggcttgtcatacgcaggcaacggttttagcaaaattggaaggtaataatccagcaggttctgtaaaagatcgtcctgcatataacatgattatgcaggctgaaaagcgtggtcaaattaaaccaggtgatacattggttgaagctaccagtggtaataccggtattgctttagctatggttgcggcgatgcgcggctataaaatgaaacttattatgccagggaattcaagtcaggagcgtaaggacgccatgcgtgcttatggcgcagaattgattgaagcgccgaatatggaagctgcacgagatatggctttgcaaatgcaagctgaaggcctaggtttagtcctcaatcagtttggcaatccagataatgtggaagctcattaccttacgactggccctgaaatttggaaacaaacaggtggaaagattacccattttgtaagttcaatgggtacaaccggtaccattatgggtgtttctaagtatttaaaagaacaaaatccagatattcaaattattggtttacaaccttctgaaggttcaaatattgccggtattcgccgttggccacaagaatatttacctacaattttcgaaccaaagcgtgttgatcaaattatggatattccgcaaattgaagcggaaaaaacagctcgccgtttagcacgtgaagaaggaattagtgcaggtacatcttctgggggggcggtatgggcttcagtaaaaattgcagaagaaaatccggatgctgtgattgtttgcattatctgtgaccgtggtgatcgctacttgtctacaggcctgttctcagtacaggactga

SEQ ID NO: 41511 - DNA, 819 bp, Acinetobacter baumannii
atgcgttttcctactttagtttttgatattgaaactttaactgatttaaaagcgggagcgcatttatatcatcttgatttgccagaggcagatgttgaacaggcactcacaaaaatccgtcgccaagaatccggcatggattttcagcgtttgcctttacatgaaatcgtttgtatttctggtttgtggattgatgaatcaggtttcagattattttcttttagtcgggaacactattcggaagctgaaattttacagaaatttctatccatttttgataagcgccatccaactttagtgagctggaatggctcgcaatttgatttgcccgtcattttgttccgtgccatgtatcatggtctttcggcacccgggttatttgatcaaggcgagcttgatagtcagaagcgttttaataattaccaaaaccgttatcaccaccgtcatattgatttaatggatgttatggcaatgtttaatggccgtaatttccagaaactcgatgatgtagcctgtattttaggtttaccaggtaaacgtggtgagtcgggttatcatgtgcctgaatatgtacgtacagaacaatggttaaagttaaccagttattgtgaaggtgatgtgctcaatacatggtttatttatttgcgttggctattgctcaaaggccaaatgaatgtagatgagcataaccactggattagttcgagtattgagtatttacagactatgcctcagcaagccgattttcttgaggtgtggcaacgtacatcgaaacataccgaatttacgtcccactattttaatcctttaaatttttag

SEQ ID NO: 41512 - DNA, 1392 bp, Acinetobacter baumannii
ttgaaacagcaagccaaatctcgtaaacctcaacaacccgaatatatttttcaggttgaaactctttctcatgaggggcggggaattgcgcattatggttctcatccagaccatccggcagataagcatggtaaaaaagtgtttattcgttatgcgttgcctggagaaacagtaaaagcccaaattacgcatgaggctaagcggcttgaagaagctgaaatggtagagcttttagcggaaccttcagcaaatcgtgtagaggcagtttgtcctcattatggtatttgcggggggtgtagcatgcagcacatccaccctgatgagcagatccgtttaaagcaaaatgtccttcagtcacacttgcaacactttgctggtattcagcctgaacaatggttagaaccaattcgatctttacaaagcgattatcgtcgtcgtgctcgaataggcgtgcgctatttgccaaaacaggaccgtttgattctaggtttccgtgagcatcatagtaatcgtttaacatctatccatacttgtagcgttttggataaaaagttatcagatagactgccagaattgcgtaatttactccaaagtctaaaaggcaaagcgcatattggtcatgtagaattagcaaaaggtgatcatgaaacatctttattagttcgtcatatcgaaaaactaaacaatgctgatgtcaaccaattaagacaatttgcgttacacaaaggctggcagttgtatttgcaacctaaaggacccgaaagtcttcgtcgtattgatgaagaacaaggagttatgcgattacattatgctttaaatgcatttgatgtaaattttgctttttcgccattggattttacgcaggtcaatgccacagtaaatgaacaaatggtgcaattggcatgtgaattgcttcaattgcaacagggtgaaagagtactggatctgttttgtgggttaggtaatttttcgcttccacttgcacgatgtgttggtgcaaagggtcaggttgtaggtgtggaagcaagtgaagaaatggtgcagcgggcaacagataatgcaaagcgtaataatctggtgcaggcaagtttcttttcacaagatttaacaaaagatttttcgcatcattcttgggcaaatcaaggatttgatgcattattgattgatcctcctcgtgctggtgcatatgaaattatgcagtatgtgccgaactttggagcaaaaagaatcgtttatgtatcatgtaatccagcaacattagcaagggatgcaggtgttttggttcaacatggttaccagttaaaaaaagcagcggttatggacatgtttacgcacacagaacatgttgaatcgattgctttatttgagaaaattcaagagataaacgattaa

SEQ ID NO: 41513 - DNA, 2307 bp, Acinetobacter baumannii
atggtcacagtacgtgaacagttacctgaacaactaactgagttgtcagaggaaacgactgtagagcatgccgccgaaacacaagtcggtttagcctcatggttggatcgggttcgtgaaatattagatggggcagagcttaaacaactcgaagaggttgcgcatttaaccctacaaaaagagttagattcaacggttaatcatcgttccaatacatttgctactggtgttggaatggctgatattctggcgcatttacatgtagatgaagatactttatctgctgcaatgctttatcgtagtgttcgtgaggacattactgatatagaagaagtaaagcgaaagttcggtgagcaagtttataaccttgtcaaaggtactttggcaatgggtaagctttcagagcttattgaaaaaaataaacgactagaagaccattttaataacaaccaacgggaacatttaagcggcatttataaaatgctgatttcagtgaccgaagatgttcgtgtcgttttaattaagttagctgaacgtacttactctttacgtgagttggcaaactcatcacgtgaacgtcaagagcgtgtggcgcgtgaaattttaactatttattcgccattagcgcatcgccttggtattgcacagctgaagtgggaactcgaagacttagcgtttcgttatttggcgccagaccgttataaagagattgcttcattactcaatgaaaaacgtcttgagcgtgaacattatatccagttcgtgatagaccgtttaaaaagtgaattggcggcgcatggtattgaagctgaaattacaggtcgagcaaaacacatttattcgatttatcgaaaaatgaaaagcaaaaacctaagtttcgatcagctttatgatattcgtgctttacgtgtattggtgaatagcgtacctgagtgttatcactcattaggtattgttcatcagatttggcgtcatatcccacatcagttcgatgactatattaccaatccgaaagccaatggttatcgctcattacatactgctgttattgctgagaataaatccttagaggtacaaatccgtactcatgagatgcatgacgaagcagagttaggggtatgttcgcactttaactataaagaaggttcaaagaataccgaccactcttttaatcatcgtttgcattcgcttcgtgctgttttggaacattaccaagaacgtaatgaaacaacagtacatcaaaatgaagatgagacggaaggttttgatcagcttcaagactttgaaggttttgaaaagatttatgtctttagccgtgatggtgatattaaagaactaccacgtggctcaacagttttagactttgcttaccatgtgcatacagaggtaggaaacaagtgttatgcagcacgtgttaaccagcgctatgtaccattaacctatacgctaaaaacaggtgagcaggttgagattttaaccaagaaagatcgtgagcctaaccgtgactggttggtgaactctttaggttatatcaagacagctcgtgcccgtgacaaattacgtcattggttcagacagcaagaccgtagtaagaaccttgaagttggccgtgagttactcaacaaagaattgtctcgattggcgattcaccctaagagtatcgatctcaacgattactcgtcacattttaatgtgaaaacaggggatgatattttggttagtctggtcagcggcgatattagtttgcatgctctgattaatcagattaatcgtcaaatgcatctggatcaggatgaacctgaactggtacttaaaccaacattaaacccacgtgccagccatactctgtctgcgcatggcatcttaattgatggtttagacaatgttgagctacatattgcgcagtgttgccaaccagttcatggtgaatcaattgctggctatatcacgttgaatcgtggggtaagtattcataaagtcttgtgttctgattatcaacgcatgatcaagcaagagccagaacgtgctgttgaagccgattgggagatgcagccaactcgtggtcaaagtgttcaaattgtagttgaggcttatgatcgtcgtggcttactcaaagacttaactcaagtgattttctctgaccagattaatatccgtcaggtgaacacaatttctgaggcagatggtattgctaatatgaagttgctcattgaggtgaaaggcttggctcagctttcacgtttgttagctcgtttagagcaacaaccggggattattagcgcacgacgcatgattcaaggtgtttaa

SEQ ID NO: 41514 - DNA, 774 bp, Acinetobacter baumannii
atgaaacatagcattctgattagtggcgcagctcaaggtattggagcagaaattgcacgggtattttatcagcggggttataaagtcggcatttatgacattaatgagtcgtttgctcaaaatttagcgcaggaattaggaccaaatgcatgcgcaggctatctagatgtcagtgactacagtcagtggcaacatatattaaaagaatttaccgactgggctggcgagcttaatattttggtgaataacgcagggattttatattccggagcctttgaaaatatcgatatcaagtcacaccaaagaacaatcaatattaatgtaaacggcgtaatcaatggctgccatgctgcactcccttatttaaagcaagcttcttttgcacgagtcattaatctttcttcagcttctgcaatttacgggcaagctgacctcatttcttattcggccagtaaatttgcagtgagaggaattacggaaggtttagatgtggaatggaaaaaatacggtattcgtgttttagatgtgatgcctttatttgtacaaaccgcaatggtcaacaatatggatgcaggttctattcaaaacatgggagtcgatttaacgcctaatgatattgctcaacaggtgctttcacttgtagagaaaaaagctcatttctggacaccgactcacactccagttggtataaaaaccaaattgctttatcaactctcaacaataagcccccagtttttaaatcgtttaactaatatttatttatcaagaaagtag

SEQ ID NO: 41515 - DNA, 807 bp, Acinetobacter baumannii
atggataaattgcttaaaattatgcaagagctacgtgaaaaatgtccgtgggaccaagagcaaactccaatgtcactgactaaatatgcgattgaagaggcatatgaagtcgaggctgccattcgtcaaggtgacattaatgaaattcggaatgaattgggtgatctgttattacaagtggtatttcaatcgcaaatgtttagcgagcagggggcgttcaattttcaagatgtggttgaggcaattagcgaaaaattagtacgacgccatccgcacgtttttcaagcagaccaatttaacaacttaacaccagaacaagtaagtgagttatggaaacaaattaaacaacaagaaaagcaaggaaaaccacaatcaagattagatgaaattaaacatggaccagcactatctcaagcgcaggaaattcaaaaaaatgttgcaaaagttgggttcgattttgaaacggtagaagatgcttatacaaaattagaagaagaattagatgagtttaaacaggcacttaaaaatcaaaatagtgatgaaattcaagatgaatttggagactgcctgttttcattagtcaatgtaggacgtaaacttggcatttcaagtgaaagttcacttttatcaaccatacataaatttagaagtcgttttgcttttattgaagagcaagccataaaacagcaaagaacattggaagacatgaccttgtccgaaatggatgaattgtggaatcaggcaaaacgacaattaaaatcaggggaaaaaccacatgcaatacagcatgagattttggaaaaataa

SEQ ID NO: 41516 - DNA, 411 bp, Acinetobacter baumannii
atgcaatacagcatgagattttggaaaaataagtattttgttttaataatgttgtgcttggggggaatttcaccttcggtttacgctcaatcttttgacaaaaactttcaagaatggaaggctaaacagcagatgtatgaccaaaagttaaacatctctaagttttctcattctaatggttctaaaatttctcaaactaaaaattttaatgactctacagggcaaattcatttgaatcaggcgaatgtaaatgagtttcagcagttaaaaggtataggtgagaaaaaggctcaagcgattgtagaatacagacaaaagaacggtagctttaaaaatattgacgaaattaaaaacgttaaaggaattggaccagccatttttgaaaaaaataaatcacatttagccttataa

SEQ ID NO: 41517 - DNA, 1464 bp, Acinetobacter baumannii
ttgcaaaccttgcgagcgtcaaaatgtggtttgtccacagcccaacttccttcttcgattttagatgtgatcgatagcctgactaaagcaggctatgaagcttatattgttgggggtggtgtccgtgatttaatgctaggactcaatcctaaagatttcgatgcagtcaccaatgcaacaccttctcaaattaaagaagtttttggccgtcgatgccgaattattggccgtcgatttgaattggcacatgtctattcaggacgtgagctaatcgaagttgccactttccgtgctcctcctaaaaaagcggtgaccagtgcttcgggcatgattttacgtgacaacaactggggaaccatcgaacaggactttgctcgacgcgatttttctatcaatactctgtactaccagccgcgtaagggtattgtgctcgatttctgtaaagcaattgatgatgtcaaaagtaagactttacgtttattgggcgatcctgtgcaacgttttgaagaagatccggtgcgtatgcttcggacattacgttttgcagctaaactcaactttaaaattgatccggcaattctcgacatttttgatgttgagatgacgcaattacttcgtgatgtttcaccacaccgtttatacgatgagtctcaaaagcttttcacaatggggcatttggcacgcgtattaccaatgttgattgactttggcgtgtggaaacagctttttgctgatattcgtccggatctcactccatttattcaacgtgcagcaaaaaatactgatcaacgtattcaggtgggtaaaacgattaatccggcatttttctatgcggttttattgtggcagccatttttagagcgttgtgatttttatttatcaaaaggcgttgttccggccgaagcacgtgctcaagcaggtttggatgttttaaaacgtcaagcaacacgcacagttattcctcgttttgccgaaacttttattcgtgaagtttgggaaatgcaaacccgtttgcttaatccaaaaccacagcaaattgaagcattggcaagccatgctcgtttccgcgctgggtttgacttcttattacttcgtgaaaagtcaggtgatgacacaacacagggaatgggaagctggtgggaagcttaccaagaaatgtcaaacgacgaaaaagaagctgcgattagccaatataatcgtcagaaggcgaaaagtcgtcgtaaggttgctgctgagcctgttgaaagcaataaagttgatacggaaattgagcctttggttgatgttccagagcctcgaagccgtcgtggtaaaaaagagcgtgcacgacaagagcagtctattgaccgttttattgaaaaatcttccgcagcacaaacgaatgtgatgagtgatcatccaattttaaagcgcaagcgggtacaacgtgatttgagccaagttatttttgggccgacacaatga

SEQ ID NO: 41518 - DNA, 483 bp, Acinetobacter baumannii
atgacagtaaccacatatattggcttaggaagtaacctaggtgattcacgccagattctatctgaagcgataaccaaacttaaatctcttggtgaagtgaaagtatctaaactttaccaaagtccccctatgggtccccaagatcagccgaattatctaaatgcagtcgctcagctaaaaaccgaattacttccgctggacttacttgaccagttacagcgttttgagcaggaagctgggcgggtgagactccgtcattggggggagcgaactctagatcttgatctactaatttatggcaatgaaaaaatacaaaatgagcgcttaacggtgccgcatgtaggaatattacaacgagattttgttgtgattcctttattagatttagatgctggtctacatattaatgatcagccacttaaaaatttagaactcatacagcagccaacgctgactgtacttgctgatgagtcttgggcttaa

SEQ ID NO: 41519 - DNA, 810 bp, Acinetobacter baumannii
atgattagtctaagtgacttaagaaaatttaaagccgaaggacgtaagttctcttgcctaacttgttacgatgcaagtatggcaaaagcaatggaacttgctgaaattgatacgatcttaattggtgattctcttggaatggcaattcaggggcgtgactcaactttacctgtaactgttgaagacatggcctatcatacagcggcagtccgtcgcggtaatcagcatgctttaattatgactgacttaccatttatgagttatgccactttaaacgatgctttgcagaatgcgaaaacagttatgcaagctggtgcccaaatgatcaaaatcgaaggtggtgcatggctaagtgaaactgtccaagtgttaacacgtaatggtgtgcctgtatgtgtacatttaggtttaaccccgcagtctgtacatgtatttggtggctacaagttacaagctagaacgcgcgaagcagccgatcagcttattgccgattgtacagcggtggttgaagcgggcgcggcagttttattacttgaatgcgttccggcacaattaggtcaagaaattgccgaattgttcccaaatactcctgtgatcggtattggggcaggtaatgcgactgatggccaggtattggttgtacaagacatgttaggtctaacgtttggtcgagttgcgcgttttgtacgtaactttatgaaagaacaatctggtgaaacagcgattttagatgcttttaaagcttttcatgctgctgtacaagatcagtcgttcccagctaaagaacacactttccaagttgagctgtaa

SEQ ID NO: 41520 - DNA, 849 bp, Acinetobacter baumannii
atgaaaacagaaaccactatacaaggcttagctgcttctttaaatcctgctagagctgcacgtaaaatcattggttttgtcccaacgatgggaaatctacatgaaggccacctcactcttgttcgtgaagcgaaaaagttatgtgatgttgtggttgtgagtatcttcgtgaacccaacacagtttggtccgggtgaagattttgataattatccgcgtacgttagagcaggatagtcgtttacttgcagatgttggctgtgacattatttttgcaccatcagttgaacaaatgtacggtacacaacctcgcttaactaacattagcgtcagtcaaattacggatgatttatgtggaagctcacgtccggggcattttgatggcgtggcactggttgtcaccaaactctttaatattgtgcaaccgaattatgctttctttggtcaaaaagactaccagcaattagcagtgattcgccagtttgtacaggatttgaatattccgttagaagttattggcgtaccaattgttcgtgcagaagacggtttggcactgagttcaagaaatggttacttgactcctgaacagcgtcaggttgcaccagtcatttatcaaggtttaaaacaagccgaagagcaattacaccaaggtaaagatttacaacaagtcttggcagatttgaaaacactgttgacagacaatggttttgttgtggattatgtggaggctcgtcaacctaatttgttagctgcttctcaatttgatcgtgatattgtgttgtttgtcgcggcaaaattaggtggaacgcgcttaattgataatctacaagttgcctttacacctcaataa

SEQ ID NO: 41521 - DNA, 852 bp, Acinetobacter baumannii
atgaagcgtatacttatcgtgacaggacagtctggttcaggaaaatcttcagctcttcaagtattagaagatttgggctactactgtattgataatttacctttggcattgctgcctgaaattgtggcaaagctagatcatgaaaataatcttgagcagcttgctttaggggtggatgtacgaagtactcgggcagatatgcaagagttcgaccatgtttttgagcaattacaaaaacatggtacggttgatgtgatttatctgacgacacaagatcaagatttgattgcacgatttagtgcttcacgtcgtccacatccgttagcaaatcgtttcaaaagccttttacagtgtattcatgaagaaaagcagttgctgattccaattcagtttcgtgccactgttcacattgataccacagataaaagtgttcacgatttaaaacatatcttgctatcaaaactaggacagtcagataatctgattgttatattgcagtcatttggttataaacatggcattcctttagatgccgactatgtttttgacgtacggcatttaccaaatccgcattgggatttagaattacgccgcttttctggtttagacgagccagttaaacaatttttagaagcaagtccgcaagcaaatgaaatgtttgaggacattctccacttcttaaaaaaatggctgccggcatttgctgaagggcatcgtcactatatgacgatttcaataggttgcacaggcggccagcatcgttcagtttatatggtagatagactaaaacaagcacttgaggcagaatggtctgttcaggtcttacacagagaaatgaagcactggtcatga

SEQ ID NO: 41522 - DNA, 312 bp, Acinetobacter baumannii
atggtctgttcaggtcttacacagagaaatgaagcactggtcatgatagacacaactgttgatgtaattaataaactcggtttacatgcacgtgcatcaggaaaactgatagaggtcactacaaagtttcgttcgtcaattcaaattggtaagggcgatcatttagtagatgcaaagaatattatgtcgttactgatgttaggtgcaggtaaagggactactttacgtttagtcattgatggcactgacaaagaacaggcattaaatgaagtacaggcgttattcgccgcaaaattttatgaggcagattaa

SEQ ID NO: 41523 - DNA, 537 bp, Acinetobacter baumannii
gtggcacgtcgtcccaagcgttatactgaagaagattttgattctttagaaggacgtgcaagtaaaaccgaacagaaaaaagcagttcaacgtatggctgctttaggtgagcagttagcacaactttctatcaaacaaattcaaaaacttcctgttgatgagcgtttaattgatgctcttttggaagttcagaatattagttcgttcgaagcacgccgtcgccagtttcagcgtgttggtaaactcttgcgcaatgaagatgagacagtcattttatcttatttgacccctcagcaaggcgcgaagaaacaagctcaactcatgcgttgggtggatcgtatgatcgagcagggcgaccctgcaatcaatgagtttagcaaaatctataatgcatcagaacgacatactttacgtcagcatgtgttaagaattaatcgtgataaaacccagcaagttgcagaagcagatctggaagcaactaaaatgaaatttattaactatgtacaacaggttgctctattgtcagatcaaggttaa

SEQ ID NO: 41524 - DNA, 1629 bp, Acinetobacter baumannii
atggttagtgcctataacgaattaccacgcacacccgcaaactttgttgcgttatcccctctgcgctatttagagcgcgcagcttatatctacccagaccaagcttctattattcatggcaaccgtcagatttcatggaaacaaacttatcagcgctgccgtcaatttgcatctcagcttcaacaattaggcataactaaaaacgataccgtttcagttttattgccaaatgtaccagcaatgattgaagcccattttgctgtccctatggcaggtgccgttcttaatacactaaacacccgtttagatgctaaaaccatcgcttttatgctagagcatgctgagacgaaagtgcttttggttgaccccgagtttgttaatttagcccgagaagccctatcactcattccaaaccaacatatcattgtgattgatgtagctgatgaagaatatgaaggtgaaaatcaatttcttggttcgtttgaatatgaagaatggatagctcaaggcgatgctaatttcgaatggcatttaccgcaagatgagtgggatgcaattagtttaaattacacatcaggaacaacgggtaatcctaaaggagtggtttatcaccaccgaggtgcttatttaaatgcagctagtaatattttagcttgcggtatgaaacctcgagctgtttatttatggacacttcctctttttcactgcaatggttggtgctttgcgtggagtattgcagcaagtggcggaaccaatatttgtttacgcaaagttgaccccgaactggtgatgcagcttattgctaaacataaagttgattacttctgtggcgctccaatcgtcttatccatgattattaatctaccgaaagaaaagcagccaatcatagaacatcatgttgaagttatggtggcaggtgctgctccacctgtcgctgtcattgaaggtatgcgaaatattgggattaatgtcaaccatgtgtatggtttaaccgaaacctatggaccatctgcgctttgtgcttctcaagcaggatggagcgatctctcaattaccgagcaagcacaactgcattctcgtcagggcgtgccttatccacttcaagatagcatgcgagtactagaccctgaaacgatgcagccagttccaaatgacggtgaaaccatgggagaaatcatgttccgtggcaatattgtcatgaaaggatatttaaaaaatccaaaggcaactgaggaagcttttgcaggtggctggttccacacgggtgacctagctgtttgccatccagatggttatgcaaaaattactgatcgctctaaagatattattatttcaggtggagaaaatatttcatctttagaagtcgaagacgttttatataagcatccagcagttttaacagccgctgttgtggcaaaacctgacgaacgttggcaagaagtaccatgtgcattcattgaattaaaaactggggctagtgtcacgcctgaagaaattattgagcactgtcaaaaagaactggcgcgctttaaagttcctaaagatgtggtgattactgaaattccaaaaacttcaacaggtaaattgcaaaaattcatcttgcgtgaatgggcaaaagaacgtgcttaa

SEQ ID NO: 41525 - DNA, 1923 bp, Acinetobacter baumannii
atgccaattatcacattgccaaatggcgatcaaaagagttttgatcaccctgtatctgttatggaagtcgctcaaagtattgggcctggtttagcaaaaaataccgttgctggacgagtaaatgatcgcttagttgatgcatgtgacttaattaccgaagactcgaccttacaaattatcactccaaaagatgaagaaggtcttgagatcattcgccactcttgtgcacaccttgtagggcacgcagtaaaacagcttttccctgaagcaaaaatggtgattggtccggtcatcgaagaaggtttctattacgatatctggatgccacgtccttttacactagatgatatggctgcgattgaagagcgtatgaaaaagctcatcgatcaagattatgacgttatcaaaaaaatgacaccgcgtgatgaagtcatcaaagtattcactgaccgcggcgaagaatataaattacgtcttgtggaagacatgcctgaagaaaaagcaatgggcttgtactaccaccaagaatatgtagatatgtgtcgtggtccgcacgtaccgaacacaaaattcttaaaatcattcaagcttactaaaatctctggtgcttactggcgtggtgatgcgaagaatgaacagcttcaacgtatctatggtactgcttgggctgataaaaaacagttagcagcttatatcaagcgtattgaagaagctgaaaagcgtgatcaccgtaaaattggtaaagcattagacttgttccatatgcaagaagaagcaccgggtatggtgttctggcatgcaaatggctggactatttatcaagtactagaacagtacatgcgtaaagttcagcaagacaatggttaccaagaaatcaaaactccgcaaatcgtagattttacgctttgggagaaatctggtcatgcggcaaactatgcagaaaatatgtttacgactcattctgaaagtcgtaactatgctgtaaaaccaatgaactgtccttgtcacgttcaagtgtttaaccaaggattaaagtcttaccgtgatttaccaattcgtttagctgagtttggttcttgtcaccgtaatgagccgtctggttctttacacggtattatgcgtgttcgtggttttactcaagatgatgcgcatatcttctgtactaaagaacagatcggtaaagaagttgcagactttattaaactcactttagatgtttataaagactttggctttgaagaagttcaaatgaaattatctactcgcccagaaaagcgtgtaggggatgatgcactttgggatttagctgaaaaatctttggcagatgctttagatgcagctggtcttgaatgggaattgcagccgggtgaaggcgcattctatggtccaaagattgagttctctttaaaagactgtcttggtcgtgtatggcaatgtggtaccattcagtgtgacttcaacttgccagttcgtttagatgcttcttatgtaactgaagaaaacgagcgtgatcaacctgtcatgttgcaccgtgcaattcttggtagttttgagcgttttattggtatactaattgaacactacgctggttttatgccgccttggctatcacctgtacaagcatgtgtcatgaatatcactgattctcaagctgaagcaagtgagcaagttgtggcaaaactcaaggaaaatggtcttcgtgctatttctgacttgagaaatgaaaaaatcggatttaagattcgtgagcgtactctagagcgcattccttacctgttagttcttggtgatcgagaagttgaagaaggtacagtgaatgtacgtactcgctcaggaaaaaatttaggtactatgtcagtggatgctttcattgacttagtgaaatctgccgtcgccgaacgtggccggtatattgtggagtaa

SEQ ID NO: 41526 - DNA, 321 bp, Acinetobacter baumannii
ttgtttgacctgaaacagaagcaaaaagatgccaagaaaaaacagcatcaagtgcaagtgaaggaaatcaaactacgcccagcaactgatgtaggtgattatcaagttaagcttcgtgctattctgaagttccttgaagaaggcaacaaagttaagatcaccttacgtttccgtggtcgtgaaatggctcaccaacaacttggtttagctcaattgcaaaaaattgaagcagacgtagctgagttaggggttgtagagcaagcaccgaaaatggaaggtcgacaaatgggtatgttacttggaccgaaaaagaaaaagtaa

SEQ ID NO: 41527 - DNA, 621 bp, Acinetobacter baumannii
atgattgatctatattattggggcacacccaatggacataaaatcacaattgccttagaagaaatgggactggattacaccctttacccaattaatattttagaaaatgatcaatttcaaccagactttctgaaaatttctccgaataataaaattcctgccattgttgaccaagatggtccacgtggtgagccaatttcagtatttgaatcaggcgcgatcttacagtatttagggcgaaaaactggattgttctacccgatagacgagcaagagcgagttgaagtggaacaatggcttatgtggcaaatgggtggcttaggtcctatgttgggacaaaatcatcattttaaccgttttgcgccagagaaaattccctatgctatagaccgctatgtaaatgagactaagcgtttatatggtgtgttgaataaacagctcattggtcagaagtttgttgcaggggaatactcaattgctgatatggcaattttaccttggattttgcgttatgaatggcaggggatccaattagaggattacccgtatgtacaagaatacattgttcgcttaacagcacgccctgcagtacaaaaagcattatcaattaaagtcatctaa

SEQ ID NO: 41528 - DNA, 429 bp, Acinetobacter baumannii
atgctaagttactttttactttttctgagtgcttttggggcggctaccttattaccgctacaatcagaagctgtactcgctgctttattattaaaaaatcaacattcagcttttcttctcattttgattgctactttcggaaatgtattgggctcatgtataaactggtggttaggtttaaaaatagaacagtttaaacataaaaaatggtttccggtttctgaaaaacgtttagaacaagcccaacgcttttatcataaatatggcttttattcgctgcttttaagttggacacctgtgattggtgaccctattactttggttgctggcttattcaaagaaaatttttggcgctttttatttatggtccttatcgctaaggctgggcgttatattttcatttattgggtaattacaggttttatttaa

SEQ ID NO: 41529 - DNA, 1251 bp, Acinetobacter baumannii
atgcagaaacatgatgcattcgctgccctgcgctatagagatttctcaattgtcaccattaatcaattttgcttaacattagcaattttgattcaagaaattattgttgcctattcactttatcaaattaccaaagaccctttaactttaggtttaattggacttgcagaagccattccatttattgccctatcgctttggggtggttattttgctgataaatttaataaacaggtcatcatgaaaatctgtttatttttctcagtacctcttcctttagttttatggttactgttccatctgcatgggttgggtcatatcagtgtaaatttcctttcttggggtatttatgcagttatttttggtttgggcaccatacgtggtttttacaacccttctgctacatccctaaaaccatttttaattccacgtgagctttatgcaaatggtgcaacatggacaaccattggttggcagagtggtgtaattattgggcctatgctcggtgggttcatgctcgcttatttaggcagagaaaccagtctttttagtgttgccggtctccttagtatctgctttattctcattaatttattacataaacgtagctttcctaaaattgaaactgccaatgttatagaaagcttaggcgatggctttcgctttatttggaaaaccaaaatagttctttgggcgatttctttagaccttgcctctgttttatttggtggtgtaatcgctctactccctatttttgccgaagatattttaaaagtcggtcctgaaggcttgggttacttgcgtgcggctccttctattggtgcgctcattactatgattgctttaactcgttttccgccaactcagcacgcatggcgtaatatgctacttgcagttgcagggtttggtgtatttacaatccttttcgcgttctcgaacaacatgtggttatccctatttgcgttggcgatgacgggtgcttgcgacagtatttcggtggtagttagacaaaccattttgcaaatattcccaccagaaaatatgcgtggtcgcgtagcggctgtaaatggaatgtttgtctcatcaagtaatgagctgggtgcatttgaatcaggcttggctgccaaatatttgggaactattgcagcgactatttttggtggttgtatgactcttgcagtagtaaccttctgttggctaaaaaccaatgatctttttaaagtcgatattactaaaagctcagaagattag

SEQ ID NO: 41530 - DNA, 195 bp, Acinetobacter baumannii
atggctaagttaaaaactcgccgtggtgcagctaaacgcttcaaagcgactgcaaacggttttaagcgcaaacaagcattcaagcgccacattttgaccaaaaaatctgctaagcgtatccgtcaattgcgcggctgtgtaatggttcacgtaagtgacgttgcttcagttcgtcgtatgtgcccatacatctaa

SEQ ID NO: 41531 - DNA, 360 bp, Acinetobacter baumannii
atggctcgtgtaaaacgtggtgtagtggctcatcgccgtcacaaaaaaattcttgctcgcgctaaaggttactacggtgctcgttcacgcgtttaccgcgtagcgttccaagcggtaatcaaagctggtcaatacgcttaccgtgaccgtcgtcagaagaaacgtcaattccgtgctctatggattgcgcgtatcaacgctggtgctcgtcaaaacggtttgtcttacagccgtatgatcgatggcttgaaaaaagctcaagtgatcatcgaccgtcgcgtattagctgacatcgctatgcatgatgcagtagcatttgctgctttagctgaaaaagctaaaggcgcattagctgcataa

SEQ ID NO: 41532 - DNA, 189 bp, Acinetobacter baumannii
atgatagacgaaaaatttctaaatgacttaattcaaaaaatacagcaaggtcaccagttcaaatatttatatttctggggacatactcctaagaaagctaatcttattgataaaagctgttttagccagtggtttcctgcgcaatttaatgtagaagatattgaatactttacgctgagcactatatga

SEQ ID NO: 41533 - DNA, 369 bp, Acinetobacter baumannii
atgatggcgcaaaaagcaaaattatttaatgataaagaaatttttgcgcagttgcaggttaaacatccgaatgaagcgaagcaattaggccgtaaagtacgtaattatgatgaacagatatggcgagaaaaacgttttgacatagtggtgcaggcgaattttgctaaattctcgcagcatcctgagttaaaaaaattcttattagcaacgaaagaccgtattttggttgaagcatctccagtcgataaaatttggggtgttggtatggcgcaagaccatccacacattcaagatccatctctatggcaaggactaaatttgttgggttttgctttaatacatgttcgagagttacttttaactgagtag

SEQ ID NO: 41534 - DNA, 504 bp, Acinetobacter baumannii
ttgaaaccattaaatgacacagatattcgtatagcatcatttaaggatgcattgtctattgcagaagtacatgtacagagttggaaagaaacctatacaggtatgattaagcaagaaatattgaataagcttaacgtactagataaacaacagctatggaaagagataagcagaagtcctgatcataggttatttatctatactgaaaatggagtagtgaaaggctttctcgatggttatttaaatccagaaaataatattgctgaaattcgtgctttttatttattaggagaaattcaaagaaaaggagtagggcgtgcgttattccaaaagttctatcaatgcgctttaaatcaaggttatgcttttattcgtttagaagtttttaataaaaatccaagtcgcttcttctatgaaaaaatgggagccaaattaactggtgaagccgaactaccagagttcggccttggaataatagaactattttatgaatggcaactttaa

SEQ ID NO: 41535 - DNA, 1002 bp, Acinetobacter baumannii
atggcgcttaatcagatttggaaacaacaacttacacttgtgacctatggtaacgaatacctacgtcagaatttaagttttagccaatggcgacaacatcatatttttgaccaacatagttttcaatttcgtgacttaatttcacaacatttacttgctcaacatttccaagtttggttagaagcactcaaaaaacaagggacgactcaaatctctcttcacctatctactattttaaatgaagagcaaaacccgaatagtaatgtcgaacttttaccttatactcattttattgtaagtcatcaaaacaataagaaaatcgcatggatttttggacatgagcttgccgaatggtacagcagcgataacgagtttgagccgcctctgactcaacgcagcgatttacgcttagagactttctggcgttttgaattgaatgaaaaattatctaaaaaagttgaagctgacttaaaagcacctcaatgggatgaaattgcaaactttatggaaactgagttatttcgaagtaagtatgcagcaggttttgaagaaccagaatttcagaaaaaatattttgatgggtcaacacatcaaatttcggtagagcatcaaccaactcttgctcttattcctgaaagctacccagcagattgtgcacatcaactcctctaccgcactcaggctttatcagattatttagagcagaaaaaacgcaccgcaaatgatcctttaggggaagacttagaccaagaacaaattattaacttaagaaactttacccacaaaactgacgacctatttgcaaaacttattgtgaaagcagcaaatcattatcaaacagctcaattaaaacctgttgagaaaccttctccttttgatgcaacgaatgagtccgcagctcatttaaaagtacctcatcacaaagctggaggaacaggggtaatcaagcttattgttctgacaatcattatttgtgctttagcctattattttggtctttaa

SEQ ID NO: 41536 - DNA, 981 bp, Acinetobacter baumannii
atgtcactggaagccctgaccacagaagcgcttgctgccattgcagcagctcaagaccttgttgcacttgatcaggtgcgtgtgcaatttacagggaaaaaaagccagcttgcagaacaatcgaaagcattagggaaaatggaccctgaagaacgtaaagtacaaggtgctgcgattcatgctgttcgagaaacaattaataacgctttaactgaacgtcaaacagcattacaacaagctgcactggcgcaaaaattagcaagtgaaaccattgatattactttgccaggccgtggacagcgcgttggtacagttcatcctgttactcaagtgcaagaacgaatttgccagttctttactaaagctggctttacggttgctacaggaccagaagttgaagatgactatcataacttcgaagcattaaatattcctgggcaccatcctgcacgtgctatgcatgatacattctatttcgatgcaaaccatttgttgcgtacgcatacttctggtgtgcaaattcgtactatggaaacaagccagccgccaattcgtattgtatgtccgggccgtgtataccgctgcgactcagatcaaacgcattcgccaatgttccatcaaattgaaggtttgtacgttgctgagaacaccagctttgctgaattaaaaggtttattgattaacctactgaatgaattttttgagaaagatttaaaagtacgtttccgtccatcatatttcccattcacagagcctagtgcggaagtggatatcatggatgagcgtggacgttggttagaagtattaggctgtggcatggtacatccaaatgtattgcgtgctgcggggattgatcctgataaatacaaaggctttgcttttggtttaggggtagaacgttttgcaatgttgcgttatggcattaatgacttgcgtatgttctatcaaaatgatgtgcgtttcttacgccaatttgcctaa

SEQ ID NO: 41537 - DNA, 2382 bp, Acinetobacter baumannii
atgaagattagcgaaaattggttacgcacatgggttaatccagcaattgatagtgatacattatctgatcagttgactatgcttggtcttgaagtagatgagctggcacctgttgctaagccatttactggcgttgtagttggtgaagttctaacagttgaacagcaccctgatgcagaccgtctgcgtgtaacaacagtgaatattggttcaggtgagcctttacaaattgtatgtggtgctcctaacgttcgtgctggaatgaaagcacctgtggcaactattggtgcaatattaccgggtgattttaaaatcaaaaaaggtaagcttcgtggtgtcgagtcacaaggtatgttgtgcggtgcttctgaaattgaccttgaagataaaatcgatggtttacttgagttacctgccgatgctccagtaggggtaaatatccgtgaatacttaaaacttgatgataatgtcatcgatattagtattacaccaaaccgtggtgactgctttagtattcgtggtatcgcacgtgaagttgcagtgattaaccaactgcaaatgaatgagcctgaaatcaaatcagttgatgcgacaattactgatgagaaaaaagtagtcatcaacactgatggtgctccacgctacttaggacgtgtcattaaaaatgtaaatgttaaagctgcgaccccagagtggatggaacaagctttagcacgttcaggaattcgtactcatagtattttagttgatataacgaactatgtcctcatggaattgggtcagccaatgcatgctttcgatttagctaaaatcgaaggaactgtacacgttcgccaagctaagccgaaagaaaagttacagcttttgaatgatcaagaagttgaactacaagatgatgtgatggtgattgcagatgaccaaaaagcactagcaatcgctggtatcatgggggggctagcatcaagcgtaactgatgatacgactgatatcttcttggaaagtgcattttttgctccgcttgcgattgctggacgtgctcgtcgctttggtttacatacagattcttcacaacgttatgaacgcggtgtagattttgaattgccgttaattgcgatgaaccgtgcttctcagcttattcaagagttggcgggtggtgagttcggtccaattactgtagctgaaaaatctgatttacttccgaaacgtgaagcgattgaacttaagcaagctcaagtagaccagttgttgggttacaaagtagcggcagagttcattacagatgcattaactcgattaggttgtgaagtcactgttcaagcggatggtgaatggagcgtagttccaccatcacatcgctacgatatggcaatttatcaagatttgattgaagaagttgcacgtattgatggttatgacaatattcagatcagcttaccaagtatggatgttcaacttgctaagtaccaagaccgttttgaaatcgcgcagttacgtcaaacggtagtcactttagggtatcaagaagcgattagctttagctttgctgatgcaaaacttgaaaagcaattgaacccgcaagtaagtccgttaatgttggcaaatccaatctctagtgatttggctgcaatgcgcagcacattgctttcgagcttaattccttgtgtacaatataatttaaaccgtcagcaaagccgcgtacgtttctttgaactaggtttacgttttgattatcaaaatgctaattctattcaggatctgaagcaaattcctacattggctttagttgccgtaggttctcgtgaacctgaatcatggcatgctaagccacagccaatggatttcttcgattttaaaggtgaagtagaagagattttagctgctggacgtgtcaaagttgagtatgtacgttcagagcgtccatggttgcatccagggcaatctgctgaaatcttagttgatggccaatcaattggttacttgggccgcttgcatccatctttagaaaacgaactagatttgagcacaacttgggttgccgagcttgatcaggctgctgttttgcaatcttatgtatctaattttacagaattatcacgttttccttcggttagacgtgatattgcgcttttaatctctgataatataaatgttagagatattcagcagttaatcgaaaaaactggtggagagcttttagactctacttggttattcgatgtgtatacggggcagggtgtcgaagaaggtaaacgctcattagcgtttgcgttattatggcaacatccttcacgtacgcttgaagatgctgaaattaaatctggtatggacaatataatccaagtgttggaaaacacttatcaagcgacattgagggcctcatga

SEQ ID NO: 41538 - DNA, 297 bp, Acinetobacter baumannii
atgacagcactaactaaagcagacatggctgatcatttaagtgagttaaccagcttaaatcgccgtgaagcaaaacaaatggtcgagttgttctttgacgaaattagccaagcgcttattgcgggcgagcaggttaagctttctggtttcggtaatttcgagcttagagataaacgcgagcgtccaggacgtaatccgaaaactggcgaagaaattccgatttctgcacgccgtgtagttaccttcagagcgggtcagaaatttagacaacgcgttggaaatgagcagatcgattga

SEQ ID NO: 41539 - DNA, 252 bp, Acinetobacter baumannii
atgttattcaaaaaattcgctgttgctgctgctgttgctgctactttagctttcgttggttgttctaagaaagaagaagctcctgctgctgctgctgcatctgaagctgtagctgctgcttctgaagctactgctgctgcttctgaagctgctgtagctgttgacgctgctgcttctgaaactgctgctgctgcttctgaagctactactgctgcttctgaagctactgctgctgcttctgctgcacactaa

SEQ ID NO: 41540 - DNA, 1269 bp, Acinetobacter baumannii
atgaacttaactgaactcaagaaaaaaccaatcggcgaactaattaaaattgctgaatttatgggccttgaaggtatggctcgtaaccgaaagcaagatattatctttgccatcttgaaacgccatgcgatgaatggcgaagaaatttttggtgacggcgttcttgaaattctctctgatggttttggttttttgcgctctgccgcaggttcgtatttagctggtccggatgatatttatgtgagtccttcacaaatccgacgctttaacttgcgtacaggtgacaccatcacaggtaccattcgtccaccaaaagaaggtgagcgttattttgctttgctcaaagttaatcaaattaactatgacacaccagaaaattcacgtaataaaatcttatttgaaaacttaactccacttttcccgaccgaacaactggttatggaacttggtaatggtacaacagaagacttgaccgcgcgtgtagtcgatttagttgcaccaatcggtaaaggtcaacgttctattattgtcgctccgccaaaagcgggtaaaacaatgttacttcaaaacattgctcaatctattgtgagaaacaatccggaagttttccttattgttttattaattgatgaacgcccagaagaagtaactgagatggagcgtaccgtacgcggtgaagtcgttgcgtcaacatttgatgaagcaccagcacgtcacgtacaagttgcagaaatggtcattgaaaaagcaaaacgtcttgttgagcacaaaaaggacgtcgtgattttacttgactccattacacgtttagcccgtgcatacaacaccgtaattccttcatcaggtaaagtattaactggtggtgtggatgcacatgctttagaacgtccaaaacgtttcttcggtgctgctcgtaatatcgaagaaggtggttctttaacaatcatctctactgctcttattgagactggcagtaaaatggatgatgtaatttacgaagagtttaaaggtacaggtaaccaagaaattacacttgatcgccgtattgctgaaaaacgcgtcttccctgccatgaatattaagaaatctggcacacgtcgtgaagaacgtttaatggatgaagataaattacgtaaagtttggattctccgtaaacttcttcatcctatggatgagttggcggctatggagttcttacttgatcgtatgaaagaaaccaaaacaaatgatgatttctttgatcagatgaaacgtaaagcttcaacataa

SEQ ID NO: 41541 - DNA, 327 bp, Acinetobacter baumannii
atgtctgcgactattgtaaatacaactgatgataacttccaagcagatgttctagatgctgaaacacctgtacttgttgacttttgggcaggttggtgtgcaccttgtaaagcaattgcacctgttcttgaagatttatcaagtgaatatgcgggtaaagtaaaaatcgttaaagttgacgtgacttcttgtgaagagacggcagtgaaatacaatatccgtaatattcctgctctattacttttcaaaaatggtgaagtagtagctcagcaaatcggcgctgtgcctcgttctaaactcgttagctttattgacgaaaacgtttaa

SEQ ID NO: 41542 - DNA, 1521 bp, Acinetobacter baumannii
atgtctgactttctgattgatgaagaattacttgctgccatagatatggggtcgaacagttttcaccttgccattgcacgggtagatcacggtgaagttaaaaaagtggcttcaatgtcagaaaaagtacagcttgcagctggtcttgatgaaaataaaaacttaacagaagcagcacagcaacgtggtttagcctgtttggctcgttttgttgggcgtttaggctcagttcaacctaaccgtttaagaattgtggcgacgaacgctttgcgtcaggctaaaaatggccatgagtttattcaaaaagccgctgaaattttgcccaaacctattgagattattgcaggccgtgaagaagcacgcctgatttatcttggtgtatcacatacgatggccaatggtggacgccgcttagtggttgacattggtggtggatctaccgagtttattattggcgaagaatttgagccaatttatactgaatcattacaaatgggttgtgtagcctatacaaaagcctattttgccgatggtgaaatcacacaaaaagcatttgataaagcagttgttgctgcgcgtaaagagctttcagcaatcgccaccacttataagatggaagggtgggatactgttgtaggttcaagtgggaccattaaagcttgccgccagattatggtgaatatggggctaagtgacgagcaagaaaatatcacccgtgaaggtctccataaacttaaagataagttacttaagttcaaaaatatttctgaaattgattttgaaggacttcgagaagaccgacgagcagttttgccagccggattggcaattttgtacgctgtttttgaagttttagaaattgaacgtttggcatattctgatggtgcattacgtgaaggagtcatgtatgacctgttaggccgttttaagcatgaggatatccgcgaccgaagtgtacaagcgttaatgggacgttataacgccgatccgaaacaggcagaacgagttgtaaatacggctcaatacttatttgatagtgttgctaagtcacttaatttaacgagtgaagacagtgacttactgcgccgtgcagcatatttgcatgaaattggtttagcgattagtcatggtggctatcatcgtcatggtgcttatttattgcaacattccgatatcccaggtttctcacaaattgaccaaaatcatctttcacatttggttgctcatcaccgccgtaaattgcgaaatgatgtaaaaaatgaagttttaaaggctggcggtcataaattagtttatttaagtttgttacttcgcctagcagttttactcaaccatagccgcagtgatcagatgcttcctgccattgaattgaccatcataaatgatcaacaatggcaacttagtgtttctggtgatgccaaacaatggccattgttagttgccgacttgcatgatgagcaagagcagtttaagcattgggacattgaattgaatattcagtcggaaaaatttatcgattaa

SEQ ID NO: 41543 - DNA, 822 bp, Acinetobacter baumannii
atgaaaaaagctactcagtccaaagcgtggacaacggttcaaattgcacgtcatcctgaacgtccgcagtttctagattatgtcggtgaaatctttacagagtttgatgcattgcatggtgatcgtttgtttggtgacgatggtgcgatggtaggtggtcttgctcgttttgacggtcaacctgtgatggtcattggacaacaccgtggtcgtagtacccgtgaaaaattaaagcacaactttggtatgtgtaacccagaaggttaccgtaaatctcagcgtcttttagatatggctgagcgtttcaatctcccagttttcacctttattgatactatgggcgcatatccgggtgttggtgctgaagaacgtggtcaggcagaagcaattgcgactagccttgctcaactttcaagcctgaaagtgcctgtaatcgcaacagtacttggtgaaggcggttctggtggtgctttaggtattggtgttgctgacagagtgattatgttgtcacatagtatttattctgtgatttcgcctgaaggctgtgcatctattttgtggaaaactgctgagaaagcagctcaagcgagtgaagctttaggtttaacagcagataaactacaatcactaggtattgttgaatacgtagtagatgaaggtgaaggtgcgcatttagatcctgagcgtgtgatgcaaaacttaaaagtagttttaaagcaggctttggatgaattgctaccaatggatgcaaatgaacgatgcgaagcacgttatcaacgtttaatgaagtttggcagcgaaaatttaggcatggcgtcttaa

SEQ ID NO: 41544 - DNA, 1284 bp, Acinetobacter baumannii
atggattcaatgctactactacatttaatggctcaaattttccctcaaaagatccgagcaatttatattgatcatcaactgcaagatcaaagtgcagagtgggcggaagtggttgccacacaggcaacaatattaaatattccttatattattcaaaaagttcagatcgcaaacggcaatctggaagcacaagcacgtcaagcacgttatcaagcatatcagcaacatttacaagaaaatgaaattctgttgcttgctcatcatcaacaggatcaggcagaaacagttattttgcgattattgtcaggtgcgggagttgatgggcttgctgcgatgcaggctattgattaccgtaaagatatgacaatttggcgcccctttttggatttaacacgtgagcaaatcgctttatggaccgctcagcttgaagttaaatatattgatgatccaatgaactatgacacccattacgatagggtgtggtgccgtgaagcactgtggccatttttaacaagccgttttccaaaaatgcagcaagctttgagccgaaccagttatctgatgcaagatgcttctgaaattttagaagaagttcttaaagatgattggcaatattctggttcagctgactatttagatttaacgaaattatatgagttatcttttgcgcggcagcgccagttactttctgcgtggatgaaaggccaagggcaatatcgacctgcatttgaaatggtcgaacggctaagaacagaagttattgagtctaagtcagatgctcaagccgctttacattggaaccagttttactatgtccgttatcaaaatatactctataggttgagtagagaggtttatctcgctgaaactttaaatccggttgttgctgaactagagcattcatttaaattagaagaaagatggcagggcgcagctggactattccatgttgagtgtaaaaaaattggtttaagtcattctttattgaataaaaaattaaaaatcattcgacgtcaaggtggggaaaagattcacctatatggtcgtgttgggcaatggcctttaaaaaaagcaattcaagaagcacatattttgccttggcttcgtcatacaattcaaatattagtcttagataatgttatgcttggggtttttacaccgaaaggattttggttggctcagtctccatattgtgaggaaggagggtggcaaccagatttaatttctcattcttgtaatctggtaaatggcgaatatagttatggcaacagcagtgaattgtaa

SEQ ID NO: 41545 - DNA, 831 bp, Acinetobacter baumannii
atggcaacagcagtgaattgtaatatctgttttattggtggtggtaatatggcccaagcattaattggcgggctcatttcaagaggattaccaccaacacgtattaccgtttcagatcctgtcgaacaaattcgtcaactattgcaagaaaaagaagttcatgtaactcaagataatacggctgctatccagaatgccgatgtagttgtgcttgctgtaaaaccacaagttctggcaaatgttctacgtccgttaaaaggtttattatcggataaattggttatttcaattattgctggtgcggaaattaagacaatatcaaatctgattgatagtgaacgtattgtgcgagttatgccaaatacacctgcattagttcaaactggtgctcatggtatttacgcgactgatgtggttggtgcctcggaccgtgaattaacgagtcagattttagcagcaactggtttaacaatttgggtaaactccgaagctcaaattgatgcggtaacggcagtttcaggttcaggcccagcttatttcttctacctcatggaaagtatgattcgtgcaggtaaaaatttaggtttggatgaaaaagttgcaactgctttaactcttcaaacagcattaggtgcagctcaaatggcaattacgagttcaaatactccgtctgagctgcgtaaaaatgtgacgtcaccgaatggtacaacccaagctgcacttgaagtttttgatcgtgcacaaatctctcaaaatattcaatctgcattagctgctgcacagaaacgtagccaagaattggctcaagaactgagtgacagtgcaaaatag

SEQ ID NO: 41546 - DNA, 570 bp, Acinetobacter baumannii
atgggtgcaaattctgcgctaatttttggaattttaattaacgtcgcgattttattggtctttttccgttttttaatgcaattggcggcagtaagtccttataatcctgtggttttatcgacagtaaaggcgactaagattgttgatatttttggccgaatttttccaacagtcgcaaaaggccgattcaatctggcagcgttggttcttttaattattttatatttactgaaaattttcggtgtaatgtatctttcgggttccatgccaaatagtccagttcatttagtgattctgacttttgtgaccatgattcaggatttgattcgtttctgccgttacttaatttttgcaacaatcattttgagttgggtcgttatgtttactcaatctcgttcaccttatattgaggtgattcaagatttagctgaaccgttactcgccccattccgtcgtttattacctaatatggggatgattgacttatctccaattctggcatttttggcactctatattgccgagatcttaatgaatgaagtcgctaaagttttattaactggactttaa

SEQ ID NO: 41547 - DNA, 2772 bp, Acinetobacter baumannii
atgccaccatttgtcttggttgatgggtcctattttttatttcgtgcatatcatgcattaccaccattgacgacctctacagggttacataccaatgcaatacgtggagcaatttctgccattcaaaaattgatgcgtcgtatgcaaccgacacatatggccgttatttttgatacacctgagccaactttccgtcataagctttcacctatttataaaggtgatcgcccaactatgccggaagaattgtctcaacagattccatatttacatgcattgattaaggctcaagggattcctttatatagccttccgggtgcagaagccgatgacattatcgggactctcgctaaacgcgctgtaaaagaaggtcatcatgtgcttatctcaaccggagataaagacatggcccagctggttaatgactatgtaaaacttgaagatagctttaaagaccgagtattagacaccgacggcgtatttgaaaaatttggcgtttggccaaaccagattatcgattacttaacccttatgggtgatgcatctgacggcattatgggtgtacctggcgtaggcgcaaagacggctgccaaattactgaccgaatatgggacattggataatatcattgccaatgtagaccaacttaaaggcaaactgagccaaaatattaaagataatttagacaatattaagcttgatcaccagttggcaagcattgtctgtgatcttcctttagaactcgactggcatgaattaaaacttactgatccaaatgtagatgccttacgcaatctctatacggagcttgagtttagaaaccagttacagtctctcgatcatccaaacaatccaaatagctcaagctataagcagcaagcttcacaaactattgtccaaaatgaagtgaaacctgctcaaacaattgaaacagaagatcaagcaagcttgactagtcaagatgaccagcttggaactgcaaactatcacactgttttaacacaagaagcatgggatcagctctggcaacgcatgcagaatgccgatcattttgctattgatacagaaaccacaagtcttgattaccgtattgccgagatggttggtttttcaatcgcatttgatgcgaaagatgcctactatattcctttagcacataattacgaaaatgcgccacaacaactgaaccgtgaacaagttttagcgcaaatcaaacctgtacttgaaaatgaagcagttaaaaaaatcggtcatcatcttaaatatgatgcgcacatttttgctaatcacggtattgaacttaaaggttggtatttcgatagcatgctggcatcttatgtactgaatgcagcagctactcgtcatggcatggatgatgttgctcgtgtttacctaagccatttgaccactacttttgagcaaattgctggcaaaggtgcaaaacagaagacttttaatcaaattgagattgaagttgcagcacattatgcagcagaagatgcacatgtgacttatcgtttatatgaagtactttcaaataaacttaaagcacatcctgaattagaaaatattttatataacattgagatgccagttgctcgaatcttatcgggtatggaagaagatggaatccgtttagatcatgctttcttagataaattaagtgttgaatttgcgaaaactatggaagaccttgaaaatcaggccatggaaattgcaggtgaaacttttaatattgcttcgcctaaacaggtaggtgaaattctatttgataagttaggcattaaaggtggtaaaaaaactgcaactggacaatacagcaccagtgaaagtgttcttgaaaaaattgagcatcctttaacggaaattattttagaacaccgtggattagcaaaattaaagagcacctatactgaccgtttaattgagcagtcgcataatgacacccatcgtgtacataccagctatcatcaagcactaacggcaacaggtcgcctatcctcttctgatcctaacttacaaaacattccaattcgtagacagattggccgtcaaatccgtaaagcatttattgcaccggaaggacgagttttgttagcagccgattactcgcaaattgaacttcgtttaatggctcatttttctcaagatgatgccttagttcatgcattccaacatggtcaagatgtacaccgtagaacagcggcagaagtgttaggtattgcaattgaagatgtgaccaatgatcagcgccgtcaggctaaagctgtgaatttcggtctactttacggcatgtccgagtttggtttaattcgtcaacttggctttactcgtgaagaatcgcaaaactatatcaaacaatacttccaacgctatcctggcatttacgaatacatgcaacgtactcgccaagtagcatcggaacaagggtttgttgaaactattttaggtcgccgtctgtatacaccggatattgacgcccgaaatgtgatggtacgtaaagctgctgaacgtgctgcaattaatgcacctttacaaggtagtgctgctgatattattaagttagcaatgattgaagtagataaaatcctgccaaaagatcaagcaaaactattacttcaagttcacgatgaattggtgtttgaagttgattcaaacattgcagatgaactttcaaaacaaattgcggatgtcatgcagtctgttctggaaatttctgtaccgttagtcgtagaagtaggccaaggtaaaaactgggatgatgcccattaa

SEQ ID NO: 41548 - DNA, 2808 bp, Acinetobacter baumannii
atgtataaaaaagacaaacagggaatgatcatcgttttgatcgctttgactttgtttttagccatttcaattggttttaaatttcagagtgccgttgttgctttatctattgcgctcactgtcatactggttcagtcattatcaagtctgcatcaacgtttaactcatttagaacaacagttttctcaccagacaacgccactttattctattcatatgcaaagaacggtaatttataccgccgctttggttgcattaattgcttatatcaatcattggatgtggattgctggtggggcattattggttttactgttatgtttgattcaaaccatcagtgcatttcatactcgtttattgttcctcgagacagccaagcaaacagtaaatataaatgaatctatacatacagaagtgataacgcctgtattagaacaagttgatccaaacaatattaccgagccagctttacctgaaacaatagcattaaatcaaaaagaacaaacagttcgtacacagactatcgcatggtggcaaccagcagtagattggatgattcatggtaatccaattttaagggttgctgttgctgtgcttatggttggggtagtgctcttactgcgttttgcaagtgagcactggcagttgagcttaggtgtgaaacttggttttattgcgattgcaggaggtgtattaacagcatttggatatgccttgcaaaagaaaaaccagctatttgctgtggcattgcaaggtgtagggttagctgttgtctttctaacgcttgtgttctcacatcattttggtgtaatcaccagcctaactacagcaagtattctatttacgattttattagcaattacagtattcctgagtttaaaacaacaagctatttatttggcaatactcgcactgggtatggcttatgcggctcctttagttattccgcaatatcgccctgatgtaaccttcctatttagctactacttagtaattaacttagcagtcgctgcggttaattttattcagccttggaaaatcctaaatcagatcgctttctttgccacaatgtttattggcggtagtgcaatcgcattttatgcagagccagcaaaatttgacacattagactggattttatggctccatatagcgctatttatttggttaagtgttcgttatagccaaaatatatctcgggtttcagaacatgaaaaacaagaggggatccgtttacctccgcttttagatgttggtcttatttttagtgtacctgtactaggctttacgcttcatgcctatttagttcatgagtcgacccaagctttaacaattggtgctgctgttttagcaggcacctatgcggtgttaacgttctggattaaaaaaactcatccccagctttcagtccttgcaaaaagttttttcattctcgcggttgctttttttgccttaatttttccactcgcaaaaggggcgcactggactgctattggctgggttgcacaaggaacggctttaatcgtttggggagtaactgaacgctaccgtttaagccgatatattggtgtgattttagttttactcagctcacttgcactgttttatcaggtttgggcaaatgaagagtttccaacgctaagcactagcatttatgcaattgcccaattcatttcggccttttatttattgcaatacaacagcaaagaacaacgctattttagcgcaagcatgtttagcggtattttcttatgtttaggcatgtatgcgggcgccgtagcaggtgtagaaataatggcatggcatcatcatgctttaagtccgtatttgatcttcgccgtagccctaatcgcaatatttagtgcgattgttcactataaacttcgtgtgcaatggcaaagtttgcagttaattttaattagcctgttactgttattagttttgggtgaggcttttatgagtcaggtcttcactttgtttaaatgggtagactcattacaacaaactactttcttagtcgctaccattattcttggcagcttatttattatggctcaaccgcagtcggatgagtccggatacttaaaagtctgggctggtttaagctggttggcgttagcgatagttggcgtgactattttcccacaaatgccagttgttgctttggcttttgttcctgtgatttattcgctttgggcttataaaattcataaaacgacactattgcatcaaattccggtgtggtgtttaagcctcatttggttgcttgtagtgagtgttgatgttcattctgctgaatacctttactttgttcctttaattaacttaactgacttcttttcaattttggtattcgctggcctactctttattatttatcagcatgcttttgatcaagataaatcgctggaatggacttttaaaattacaacaattttagtgggcttactggtatttagtagtgtagttgttagaggcttgcaccattactgggcaacaccgctatggagtgcttcaatttggacaaatggtgtagtacagctaagtttgacgttactttgggttatattggcatttattttgactacatactctagtcgaaaaatgattcgtcaactctggtttgtaggcgctgcacttttagggattgttgtattaaaactaattttgcttgatctatcacaaagtgcgacattaactcgggtcatttcttttattggagcaggtggggtaatgttgattattgcttatcttgcgccattaccaccgtcatcctctgtacagaagaatcaagagcctaagctttag

SEQ ID NO: 41549 - DNA, 918 bp, Acinetobacter baumannii
atggccgattcaagtattccaaaagatatcgctgatagcctcaaaagcatatttaccaatatcaataccgaacgaattagtgaaattttagtcggtgttgtgctttgttttattggttttgtccttgcccgtattatttcaaatacatttattagaaccgttggctcacgttttaatgctcaccagcgtctggtatggcgccgcggtattttctattttattttcttactcttcattatgacgagtttaaaagaagccgggttcaaacttagtgtatttctgggggcagcggggatcttaacagtagcactcggtttcgcatcacaaacatctgccagtaacttgattagtggtttatttttgattggtgaaggttcatttgaggtcggtgatacgattcaaattacacttattcgcgggaatacaatcgaaggtgaagttatctcaattgatttgctttcggtaaagttacttacactcgacaacgtctatattcgtttaccaaacgaacaactcattcgtgctcctgtacacaacttatcaaaatatccaatacggcgtattccaattactttggcaattaactttcatgaagacattattaaagttcgtgaggttctacttaacgtcgcagcgaattatccactcgtgttagatgatccaaaacctgctgttacagttactgccttcagggagtcatcgattgagcttttatttgcaatgtggtgtcgtcaagaaaactctttaaaagttcgagatgaaatgcaagaacgtatccgaaatggttttttagataaccaaattgaaattcctgttccgaaaatgggcttaattgatcgaccatctactgcttttgctgaagatgatatcgatcaatacagcaatcaaaaagagttaaaacgagagcctaaagcttag

SEQ ID NO: 41550 - DNA, 822 bp, Acinetobacter baumannii
ttgtttgaaaataatgaatatcagcctcacccccagaattctttaaaatggtggggtgaacagcactttgaaattaaccagtccaaagcatggcaattcggttcaatgctctttcgtttaacacgcggcataaaagaatggcgtatcgaatattatcgcccgactctccaagatgataatgagcaagattggcacatcataacggatgcaaattttggttttccacattctgtgcaagtcgaacgttatatgtttcggaaaactaatccgaagtttctacttatgccacgtttggcggaccgatcagtggtaattaaaccagttgatccaatctacattccagcgggtcaacgtgggacactttatattagtacccctctatggattgcaggtttagttgaaagtcagcatgaacctttatttgagattcctgtgattcaacccaaagatacatggtttggtcctaatgcccagcaaggtgaaatttgttatgcaacctctgttgatggtcgtaccgatttaaatctattaaccccacgtgcttttcgtgcagttacgccgattgatttccataataccagtaatcatcaattacgctttgaccgtatgaatgtaccggttactgccctaccgctattttatagtgaaagtacaggacgcttatggacatcacaaatcaaagtctactatgaaggctctgaccgcccagcccgtattcgtattgaaaaccgtactccccctctggcaggtgaagtgacttatgttcacccaccacgttcaccgggtggtgcgctatttaatatgtttgattcattcttttaa

SEQ ID NO: 41551 - DNA, 1491 bp, Acinetobacter baumannii
atgcaaatattgaaacaaatacaagttccatatagttttgccaagcgtcatggtgttttatttcgttatgacggtgatcaagtttttattgttagacgtcaaaatacagaaaaaattgcattgcaggaagcaagacgaattttggggaaacctgcacactatcaattatgcactgaacaagaatttaatagtctattaagtaccagttatgcaggtgatacaggtgaatctcaacaagtagctgcaggcttagaagaccatccggatttattaagccttgcagatcaggtgcctgaaacagaagacttaatggatcaagaggatgacgcgcctattgttcgtctaatcaatgcacttctctctgaggcaattcgtgttggagcttcagatatccatattgaagcctttgagaaaaagctatcagttcgtttacgggtagatggtcaattacgtgaaattgtgcagccacgccgtgaactagccccgttacttgtttcgcgtattaaagttatggcgaaactcgatattgctgaaaagcgtgtaccgcaagatggacgtatttctttacgtcttgctggtcgtgaagtcgatgtccgtgtttcaactttgccatcgtcacatggtgaaagggtggtcatgcgtttactcgataaacaagcgggtcgccttaatatgactcacctaggtttaatggcaaatgactatgaacgtttaactcagttagtacatcgtccgcacggtattattttggtcacagggcctactggttcggggaaaacgacgactttatatgctgccttatctgatctaaatgacaatacccgtaacatcttaaccgccgaagatccaattgagtatcagcttgaaggtattggccaaactcaagtgaataccaaagtggatatgacatttgctcgtgctttaaaggcaatgttacgtcaagatccagatgtggtcatggtgggggagattcgtgatctggaaactgctgaaattgcggtgcaggcatccttaacaggtcatttggttttatcgacgctacataccaacaccgctattggtgcagtgactcgacttaaagatatggggattgaacctttcctgctttcaagttctttaattggggtggttgcgcagcgtttggttcgtactttatgtccacattgtatgacatggcgtgaagccgatacttttgagaagcaagtttttcagcatatttctcatgaaccaagtttaaagttaccagaggctcaagggtgtgatcagtgttctcatttagggtttaatggccgtacagcgatttatgaaattgtacctattgatgaacctatgcgccgtctcattcatggtaatgcagctgaatttgaattagaaaaccatgctcgtcagtattctggttctattcgcgatgatggtttacgtaaggtgctctcaggtaaaactacacttgaagaagtgcttcgtgtaaccaatgaagcaagtgaagcataa

SEQ ID NO: 41552 - DNA, 432 bp, Acinetobacter baumannii
atgtcattagaaaaagttgtgtatcgtgcaaaagccaaagcaacaggtggccgtgatggtcgtgcaacttcatcagacggtgtattagacgtacaacttggtgtacctaaagaaatgggcggcgctggtggtgctgtaactaacccagaacaattatttgcagctggttattcagcatgctttttaggtgctttaaaatttgttgcaaatcgcgataaattcaatattagcaaagatgcgtatgttgaaggtgaagtcggtattggtccaattccaacaggttttagtattgaagttactttaaatgtttatttaatcggtatggaccgtgaagaagctgaaaagttagttgcagcagctcatatcgtttgtccatattcaaatgcaactcgtaacaatattgatgtgacgtttaatattgtgactgaataa

SEQ ID NO: 41553 - DNA, 438 bp, Acinetobacter baumannii
atggaccaagactgtcaaaatctaaagcttgagaatcaattatgtttcctcatttattcaacaaatttagcccttaatcaactttatcgcaaacttttaactccattagggattacttatcctcaatatttggtgatgttggtgttgtgggaaaaagatgagattactgtttcagaaattggcagtaagttatttttagaatcttcaactttaactccaattttaaaaaagttagaagcattgcagcttcttaatcgtactcgttcaaaagaagatgaaagacaagtcattatcacgcttagcgaaaaggggaaaaaacttaaagaacaggccgtaaatattccaacgcatatcttagaggccagttcttgtgatacggctacccttctcggtctcaaagatcaattaacacaactccgtacaaatatagctaaataa

SEQ ID NO: 41554 - DNA, 378 bp, Acinetobacter baumannii
atgtggaaatacttatttagcattttttgcttaggggcaaatattcactgttatgcgactgatttcgggacaacgaataattttgtctctccaaatttgcagcttaaacaaaatgtactacctcctactccaaaaaatattcctctgcctgcttttggccagcggattattggttgggggacaggtgcagaaggtgccagacagcgtttagagaatattcagcctgccgatgtttctatgattaaaaaacaaggaacaactttagaaatgatcacggcctggcaagatttttatgaacaagagcaacaacgtaatgaaaataacccaactgcaaaatatcgtgctcgtttaatgaaaaaaattgccgacctttggtaa

SEQ ID NO: 41555 - DNA, 825 bp, Acinetobacter baumannii
atgactcttgtttcggttgttcaaatgaattctcaagatgacattgaaagcaactttcaagtgattgagtcattgattcagcaaagcaaggttcaaaatgccagcttaattgtttttcccgaaaactttgtttgttttgcggctggcaaacagcgtgaaacagcagagcaatttgagtcgattcaacaaagacttgagaaacttgcgcatcagtatcaaatctggattgttgcaggcactctaccgtgcccatttcgtccggatggttccatcatacaagatggtcgagtgcgcacagtgagtttatgcatcagtcctgaacgtaccgaagcacgttatgacaaaatacatttatttgatgtacaagttggcgatgctgtgggtggatatcaggaatctcgtttctttgaaccaggaacagacgttgtagtcacatctaccccttttggcaatattggcctaatggtatgttatgacttgcgttttcctgagttagctttaacccttagacagcaaggtgctcatctattaactgctcctgctgcatttacctatacaacaggtcagatgcattggcagcttttgctgcaagcacgtgcaatggatagccaatgctatgttttaggggctgcgcaacaaggttggcatggggaaaaacgccaaacttgggggcatgcaggagcaactgatagtcgtggtcaagttttaagtatgattggttatgaagggaacggtttaattacggtaccttttgatttagctgctcaagaacttgtgcgtacatcaatgcctttaatgatgcatcgtaaattaattcactattaa

SEQ ID NO: 41556 - DNA, 561 bp, Acinetobacter baumannii
gtgataatttttctatccttctctgaaaatggcatttatatgtcaacaggtcatgttgaatatgcaagtttaaatggaacgcatattttcaagcttattggtgaagtgcgagcccattcttgtataagtctagacaaacttttaaacagaattgaacagcaagaaaatgttgttggtgcaatcgttgatttaacccaaacaacatttattgatagtactgtattaggtatcctagctaagctaggtttaaaactgaaacagactcatcatattcaagctgtgatgctatctaccaatccagatatcacaaccttagccaacagcatggggctagggcaggtttttgtcatcctgaattattgtggcgatcctaacgtttgtactttaacgttaactgacgagcacattactcataatgcgatgctaagaaccgttctggacgcacataagacattgatgaaactcaatgcaaataatcagaacatgtttgagccgcttgttaagcaattgcaaaaagaacaagacacgcttgaacaagtatctgataagcaaaatgcctaa

SEQ ID NO: 41557 - DNA, 969 bp, Acinetobacter baumannii
atgtattttattaaaccgacacgctctatccctttcgtagagcaagctctggaagcattaccagacttacaagtcattcacatagatgatctcgatttatacgacccaacaattatcgcaattgctgatgtacaagatttcctaacttataaatggcgtttacctacaatcgtgattgcttttgagcatgaaggtagtgctttagctcaagcatgggaagctggtgctcttgcaggatgggtatggaaccagctacctaaagatctaaataaagctttaacaagaattgatgcacaatataaacgtaatcaggatagccgtgatttaccttcggcagcagaattacaaaaacgtttattgccaaatcctattgatttattaaattatgaggttgaaacttttttccaaccttctgcctatttatcaggcgactggtacgactactggaagctcaatgataaagaagttttattttatctcgccgatgtatcggggcatggtgtaacaagtagcttattaacttcttggatggcagcctttcatggtcgctccaaaacaccacgacagttaatcaaaaagttaaatgggatgctggttcaagagaatattgaaaaacatattacaattgtggtcggtattctaaatcttgaaactcatagtcttcgctggtctagtgcaggtcattaccctcctccaattatttttgaacctaatcaacctccaaaaattttaaccaccagcagctttcccttagggttaactgatgagttagaagttgaagaacatgtatgcacattaaatcgtcatgcacgtttcattatttgctcagatggagcactagaaccatttgatggcggcttgaatgatcagtttcaacaattagttcaacatttgcaaaatcaatcattccaagcccctgatcacgttgctgatgacattgccatctttagtctttgtcgaatgaattaa

SEQ ID NO: 41558 - DNA, 900 bp, Acinetobacter baumannii
atgaattattctaatttacttttgtcgagcttattaactgtaggtctttacacctcagcccatgctcaagaaaatcttactgaagaatctgccgctagttcggaagatgttacttcaacccagactcagcatagccgacctcacttacaaattattaaagatttgaaaggcataaaagttaaagatttaaagatcaacgcaaatgctgcccaaccggatacagtaaaagatccattacagtcactgaaccgtccaatttattcttttaacgatatgttagaccgccatgttttgcgtcccgttgctgttgaatatagagaaaagacgccagaagatgtacgtggttcttaccgacaatttcgtaaaaaccttggcgaaccatggaatgctgttaaccagctaattcaaggacgtcctggccgcgcagcaaaaactttaggtcgttttactattaatacgttaacaactttaggtttagccgatccagcgagccgcttaggcttacctcctgaagaggaaagctttggtgtaactctcggttactatggcgttccttctggaccatttcttatgctgcctttctttggaccaagtactttacgtgatggcgttggcttggctgtagatgctcaggcccgtccacaaaaatacattatggatgatcaagatggcctgtattggtcgactaatctattacaagccgttgatacacgcgctcaatatctagatttagaccaaacgatacaaggcgatcagtatgcgatgattcgtgatttatatctccaacgtaaagcattccagattgccgagaaaaaaggtgattcggcagatgtgtcttttattgatgatgacgaatctgaagatgtaccagaagataacactgataaaaccgaaaaataa

SEQ ID NO: 41559 - DNA, 504 bp, Acinetobacter baumannii
atgaaagtctatctttttgcacaggcattggataatgatagttcagatgactggtacgagtatactaacaattcccttaaagaaataatagaagaaagtgatcagtcgcagctaaataatttgatatttgagctaactaatgaaggtaaaaaagaaattacaaataatgtagaatgctattataagttaacctataataattttttaaattttattttgttaattgaaaataaacagaaagacaatataggaagagttgcaaaaacagcattaataatcaaggattataataatactgtattagattttgaaaaaatattaactttgttttggacacagactaatagaaacttggttacttcaatttctctaggtaagcaatgcgataagatttttgatatgatcaaaaaaaaaagggaaaaacaaagatggcttgtttcactagcattggtaagtttcagcataatattagtattattctttctaaagttcagacaaggataa

SEQ ID NO: 41560 - DNA, 693 bp, Acinetobacter baumannii
atggttgcacctttgtttttagcagcatggttgggcggtgcggccttaactggtattgctagttatttagcatatgaaaattgggatgctataaaaaagaaagtttctggaaagtctatagtaattttaggacatcgagctactggtaaaactacgttattaaattatttattaaagggtgaaattacttttaagaatgaagctacaattggtgtaaagaaagttaaaattagcaaaagaaaactgtcagatcttggctgggatgtgcgtcttaatagcattcaaaatgattatagtggtgttacttctaattatgaacaatggttgaaagcacttaaaaacgctgatatctttatttacttatttaaagctgatgaatggattctagatgaaggagctgtagagaaccagcttgaaaaagatatcaaaaatattcaaaaagagttaaagggtaagaatataccaatgtttattattggcacacatctagatctactcgaaggcattgagtttaatactcaaaaagaaaaaattaaattgatcgatgaactacaaaatgaagtattctttaaaaatattaaatctagactaaatgttagtaattcaaaagcttgtttgcattttggtagtctaaaagatgaagatggcttagatgaaattattcatttcataattggacaaatgggagaataa

SEQ ID NO: 41561 - DNA, 1059 bp, Acinetobacter baumannii
ttgaatttaattgagattccagaagagctttctggcttggctaaattaagtaaacaagagttggtagaagagttaggaacagaagttttccgagatgttttactcaatatttttttagggaaaaatgtaagaaattttacggaagcattgactagaaatagactattacaaagcaatattgccttatggaagtttttttgtgaacaaaaaaagctaggtatatcgcctttagatttaatcaatatagcaaaagaaaagctattaaatgctaagttatcaccaaaagatagagctgtatatgaatggcttgttgctatgacaaataaacaaacacaaaatgtattaaggaaaagccacgataaagaatttgaagatttgactcaagcgactttagaaatgcttgataaagaattactagaatgtcacagctatgtttctcagggcgtgaagctaggagaagagatatcttttacttttaaagaaatgtgttggatttctttggtactggggtcacaaactttaacgattcgtggttcagaaaaatcgttacatggtaaatattttgaaaaattaatactcggtagtatttttcaaatttttggtctgaaattattagagatagaagatatttcacaaaatggtttctggctatcctcgcagaaagaagatagacgagaagctgatggaacgatagtaaatgatgctgttgggataagagtagatattggctttattggaccgggaaactcagaaattactttagataaggtctctcggtttacaaaatttgatgaaatatctgggaaaaagtatgaaatgagtacaattgtaatcgttgataccttaggcgaaaaaagtaaagctagagaactcgcaaaagcaattgaaggagaaattatttgtatgtccgaccctaattgggtgtttacgctagcaaaacaaatatctgaaaaactatccataaaaaatcctcttaaagatatattaatagaagatttggaaaattacctatcagagaaattaaaattgatagatttagatcagttaattaactattaa

SEQ ID NO: 41562 - DNA, 1155 bp, Acinetobacter baumannii
atgagcaataattcccctaaagcacttgtttctgagagacggaaatacaaagttttaaatactcaacaagcaaaagggattgcggaaaatcatttaaaaagtattggattcaatgcaattgctattagctatggtctacctgagattgatgacagatatcatgtttggcgagtacctgttttaagagaaaaagggagaataggtgaggtagtaatagatgcatatactagtaatgtagatatttccaagagtactgatagacaagttttagaaacagctactccaattcatactaataaaaaacttaccaaaaaagaaattacactttctgaattagaaaatatggtaatagaaggtaattctattgaaagtttaaaatatttaccagaagatagtgtaaatctaattttcacctcccctccttattataatgctaaacctgaatattctgaatattcaacctatgaagaatatttagaacttatgcggcaggtaattaaaggttgccatagagtattaagtgaagggcgtttttttgtcctaaatatatccccagtattaattcggagagcttctcgaagtgaatcatctaagcgtatagcggtaccatttgattttcataaactatttatcgaggaaggttttgaatttattgatgatattcattgggtaaaacctgaaggagcaggttgggcttttggaagaggtcgtagatttgcggctgatagaaatcctttacaatataaaccggtacctgtcactgaatacattttagtttatagaaagaaaacagataggctcattgactggaatattagaaaacatccagatcagaaagctgttgaagaatcaaaagtcgaagatggatacgaaacaacaaacttatggcgaattaacccttcacgtagtaaggatcacccggctaccttcccagtagaattggcagagaaagttatcaaatattattcatttaaaaatgatgtagttttagacccttttggaggctcgggtacaacaggaatagctgccctaaatctaaatcgtagatttgtaatgatggagctagaaagtaaatatattcaagttatgaaaaagcgtttttcaagttttgatttatttacccctataagttttataaaaaataaagatttataa

SEQ ID NO: 41563 - DNA, 171 bp, Acinetobacter baumannii
atgtctaatctacctttaaacctttttcaatctttagtgatcatacttgcatgccttattatccttgtaagtaaaatgcctcagctaaaatttagaaaaaccatattatttttagctcttggcagtcttactttaatctgtgctttggcaatatttggcttctttaattaa

SEQ ID NO: 41564 - DNA, 423 bp, Acinetobacter baumannii
atgtcagttaaatatcaaggatcatgtttatgtggagctgtgagctatcaaagtgatgcagagccacgttatagttttaattgccattgtcgagattgccaaaaggcaacaggttcggcctatgcaccaatcgctttttttcatcaatctgaattgaaaataagtggcgaacttaaatattttgagactttaggttcatctggtcgccccattaaaagagctttttgcccgacttgtggttctcaactttttggcttacctgaacttgttcctgaaatgatttcaatacgcgcaggtactttggatgacccaagtctctatcatcctaaagcggaggtttttgtgagccagacctatgcttgggacatgctgaatccaaaccttaaacactttgaaaaaatgatagagaagagcaagaaataa

SEQ ID NO: 41565 - DNA, 855 bp, Acinetobacter baumannii
ttgcccctgaactcggttactaaaattgtgaaagcaaaagttcgagcagctctttctcgacttatccctcataaatatgcaattgatgcatcaagtttgggggatagtgaagagcttgcttggacaaacttgggtttttggaaaaatacccaaacctaccgtgaagcttgtcgccaattggctgatcatttggcacaagctgtcaatttaaattcaaaagatcatctcttagatttaggttgtgggcagggtgcaagtttattgcactggttacagcactatcaccccaaaagccttagtgctgttgaactacaagcctcatgtgttaataaaattcaaaaatttattcctgaaataagtcagattttctgtggttcatttttaaatttaaaacaatttgaatttaaacaacgcttcgatgtggtgctctgtatcgatgcggcttatcacagtcatttaaattcatttctggattcggttacgccagttttaaattcaaaaggacgattaggttttcattacttgatgcgtgccgactcatgtcacaacatgaccatgctacaagaacaaaagcatcgttatttacttaaagcagccgatgtcacttggaataccttactcacggaagagatactgagaactaccttggaacaacaaggttttacagatattcaaatcgaagatttatcagaacaggtattattaggtttttcacagtatattcaaaatcaacaagcacaaagccataaccgagggttggcaaattttaaaatccaaatgactgcaaagttatgccaacaactctatcaaaatgggtatgtacgttatattcaaataacagcaataaaaaaatag

SEQ ID NO: 41566 - DNA, 1338 bp, Acinetobacter baumannii
gtgataatcaaaaaaattctcgaaaaatgggacatcattttggatatcgcaattattggtagtggaatggcaggacttgcagcagcaagaattctgaaagatgcaggacatacaatcacgatatttgaagcacttcctggccggggaatggacagtcatagcattgagttcgatggtgggattattgatgcaccattgcgtgttatgaacccgcatctatggaaaaatacactcagccttgctgcacatttaggcattaaaacttttccggttcgtacctatatgtcttgtagctggttatttgaagatcgtactgaaacatggttaaccacatctcgtagccgtattggtaatttcccaattatcaataaccgtaaaggtatccagcaatatggctggcgtctggtaaaagggatgctgcaattaaaaactgcgattcaccagttctttaaatctaaaaatcaagatattactctcgctgaatttattaatcagaacgatattgaagaagtattctggcatggtgtagttatgccggtgctttatacgatttgtacatgtaacccaaaaacaattggtgattggcctgcgaaaaaccttcttgagtttttgcgtcatttaactgatggtgacatgttgttgcgtatgaaaggcggtacacctgcatttgtagatagcttaattaaaggcattgatatccatagcggttcggcaattaaaaaagttgagctacaaggtgaaaaagtactggtcgaaaatgaaaaaggtgaccaaggtacatttgaccgcgttattgtggcgacaccgacatctaaacttgaagagttcttaaaccctgaacagtttgcagaagatatgaatctgcttaaacagttccgctttgaacaaggcgacttggttattcatacagatgcaacagtaatgccaccacgccgtaaagactggtcagtgctgagctatatgatggaccgtaagtttactcgtcagcagtttacagtttggatgaatgccgttgagccatcactagtaggtaaaaatcctgtattccaaacttggcgtccagtagttgatattgaccctaaaaaagtcatttcaaaagtgaccttaacgcgtgcagttgtagactcgcaaactattgctttaaacaaagagctacaacaacgtcacttagaaccaaaccgtaaagtattctactgtggttcatggtcatgtgatggtttgccaattttagagtcagcagtgacttctgcaatgcatattgctgaaatcttgggtgcacctttaccattcgtgggattaaagcctaaggtcgaagttgcccctgaactcggttactaa

SEQ ID NO: 41567 - DNA, 873 bp, Acinetobacter baumannii
atgaagaaatttcttggtgcatatcaaaataaccacatgcattgggttggtgatggtttccctgtatataacctgttctcttatgaccgtttaggccaaaccctaagcccatttttgttactggattatgcagcgccttataacttctcaccaaccaccgaacaacaaggtgtaggttcacatcctcaccgtggctttgaaacagttactattgcctatcaaggtgaagtgactcataaagactcaagtggtggtggcggaaccattaaaaccggtgacgtgcaatggatgactgcgggtgcaggggtgttacatgaagagttccattctcctgaatttgcagagcatggcggtctttttgaaatggtgcaattgtgggtaaatttaccttcgcattcaaaaatgacccctggaaaatatcaagccattgaagctaaagatattccggacattgcactagacgagcaaggtagtcatttgcgtgtgatcgcaggtgaatatgcagatgcaaaaggtgcagcaactacatttagtccattaaatgtatgggacggtaaattggtaaaaggccaaaaacataccctatatgtacctgaagggcatactacccttgttgttgtgttagaaggtgcggttgtggtcaatgatacaaaccgtcttaaaggcaaaaccgttgcgattttatctcgtgagggcgttgagtttagcttaaatgctgaagaagacactaaattcttagtgttgactggccaaccactaaatgagccaatcgaaggttatggtccatttgtcatgaataccaaagccgagattatggaagcgattaatgattttaatcgtggaaaattcggttcaatcatgcaagaaggataa

SEQ ID NO: 41568 - DNA, 627 bp, Acinetobacter baumannii
atggctcaagattatgtacgcttagacaaggataatgctgcggttcttttagttgaccatcaagcaggtttactttctttagttcgagatatcgatccggataaatttaaaaacaacgtacttgctgttgcaaatgcagcaaaatacttcaatcttccaacaattttaacaaccagttttgaaactggtccaaacggtcctttagttcctgagttaaaagaaattcacccagatgcaccttttattccacgtccaggccaaatcaatgcgtgggacaatgaagatttcgtaaaagcggttaaagcaaccggtaaaaaacaactgattattgcaggtgttgtaactgaagtgtgtgtagcattccctgcactatctgctttggcagaaggctttgaagtattcgtgattactgatgcttctggtactttcaacgaattaacacgtgatgcagcttgggaccgtatgtctaaagcaggtgctcagctgatgacttggttcggtatggcgtgtgaattacaccgtgactggcgtaatgatattgaaggtttgggtacattgttctcaaatcatatccctgactaccgtaacctgatttcaagttacaatcacaacactagccaaaaataa

SEQ ID NO: 41569 - DNA, 975 bp, Acinetobacter baumannii
atgcttaagcattctaatcttgaatttaaatgggttgaacggacattgataagctcttttgatgatttttattatttctatttggtcgtgaaacacggcggctttagtgcggccagtgaggccgaaaatattagtaaatccaagctcagccgacgcattattgaccttgaaaataaatttaatgtcaacctgattcaaagaacaacccgccattttaaagtgaccgatttaggtcaagagttttacgaggaatgctgcaaagtcattgctcaagttgaatgtgcagagaacgtgttattaaagcaaaaaagtgagcctcaaggtttggtaaaagtaagctgcccgcctttaatgatgcattttcaaattagaaaaattttaaatcagtttttaaaaacctaccctaaagttgaaatatctcttgagctaaccagccgtcgagtagatatcttgcatgatgacatcgaccttgcgattcgaaccaattttgaaccgaatgaagattcaaatttaattgttcgtgatgtgattaaaaccgatcactgtctggtggcttcgcctgaattactgcaaggtcgcaccattaagcattattccgaattacaggactttccaagtattagcttaggcacacaaaagcaaaattatatttggcatttatgcaatattcgtaacggcgaatcggttgatgttccttatcaaccacgaattaaaagtaatgacttggcaggtgtttactatgccgtgatggacggtttaggtattgctgaccttccatttttaaccgttgaatcggaaattcgtaaaggaacactggttcatattcttcctgactggaagtcgaatatcggcatgctacaactggtttatgtgtcccgaaaagggcaacgtctggtggtcgaaaaacttattgaaaccctgattgatgagcttcgtcgtttacccgaaagccatgaaggatatttgccgacttaa

SEQ ID NO: 41570 - DNA, 1449 bp, Acinetobacter baumannii
atgattcaaaataatttgcagtatttattaaaacatcctgatatttcattagaagcacctgcatcaaatgactatatcgaggtgaatgatgctgctacgggtgaaactttggcatgggtgaaaacctatgaccgtgcaggggttgaagccgcaattaaccgttcggcaaaagcgcaagctgcttggaaaaagcaaactgccttggcgcgtgctgatgtgttattggcatggtacaacctcatgctagagcacaaagaaaatctggcacagattttaacggctgaacaaggtaaaccattagcagaagcacgtggtgaaattggttatgcagcatcattcattcgctggtttgccgagcaagcgcgtcgtattgatggtgaagtcttaacacctacgttgccaaaccaacgtctgctcgtgattaaacaagcgattggtgttacagctgcaattacgccgtggaactttccggctgccatgattacgcgtaaagcaggtccagccattgctgcaggttgttcaatgttggttaaaccggcagagcaaacgccgttaaccgcctatgcgcttgaagttttggcgttacaggcaggcttaccagcagatgttttgattaacattagtggtgatgctgttgaagtcggtaaaaccctttgcgaaagcgatattgttcgtaagttaagctttactggttcaacgcaagttggccgtatcttgatgcaacaatgtgcgccaaccattaaaaagctttcacttgaacttggtggtaatgcaccagttgtggtatttgacgacgctaatcttgaacaagcagttcagggtattatggcaagtaaatatcgtaacagcggtcaaacctgtgtctgtgctaaccgtatttatgttcaagacggtatttacgatgcattggcagaccgtttggttgaagccgtgtctaaattgaaagttggtgatggccgtcaagaaggttcaactcaagggcctttaattgatgaagatgcgattgctaaagtgcagtctcatattgctgatgcaactgagaaaggcgcgacagttcgtattggtggtcaacgctcggcacttggcggcacattctttgagccaacagttttaactggcgtaacgcaagacatgaaagtgtctaaagaagaaacttttggtccacttgccccattgttccgctttaaaactgaagatgaagcagtggcaatggcgaacgataccgagtttggtttagctgcttatttatttactcaaagtacagcgcgtcaatggcgtgtgggtgaagcacttgagtacggaatggtcggcattaacacaggcgcaatttcaaatgaagttgctccgtttggtggcgtaaaacagtcaggtctaggccgtgaaggttcaaaattcggcatcgaagaatatgtcgaaatgaaatacctctgcgtagacttatctgagtaa

SEQ ID NO: 41571 - DNA, 1293 bp, Acinetobacter baumannii
atggatactcaacattctgcacttaacgcacgtaaacagcaagcaactccacgtggtgtaggcgtgatgtgtcagtggtatgcggaaaaagctgaaaatgccacgatttgggacaaggaaggcaaccaatttatcgatttcgctggtggtattgcggttttaaatacaggccatcgccaccctaaagtcattgcagcggtgactgaacaacttactaaatttactcacactgcttatcaagttacgccttatgaaagctatgtggctttagctgaacgtattaatgaacgcgcaccaattgctggtcctgcgaaggcagcttttttcacaacaggtgcagaagctgttgaaaatgcagtaaagattgctcgttgttacacaggtcgtcacggtattatcacgtttggtaacggtttccacggtcgttcatttatgaccatggcaatgacaggtaaaactgcgccttacaaacgtgatttcggtgtaatgccagcgggtgtgttccacgcacgttacccagtacctgcaaaaggtatttcagtagatgcggcaattgaaagcgttgaagatattttcagtgaagatattgcaccacatgacgtagcagcaattgtacttgagccagtacaaggcgaaggcggtttcaatgtggtgccagccgagttcttaaaacgtttacgcgcaatttgtgataagcacggtattttacttatcgctgatgaagttcaatctggttttgctcgtactggtaagttatttgcgatgaaccattatgaaactaaagcagacctcatcacgatggcgaaaagcttgggcggcggtttccctatttcgggtgttgtgggccgtgcagaagtgatggatgcaccaaacccgggtggtctaggcggtacttatgcaggtagcccgattgcagttgcagctgcgcatgccgtgattgacgcgattgaagaagaaaacctatgcgaccgtgcaaatgaattaggcgctgagttagttgctacgcttaaagatattcagcaagcaacaggtgacgtggtcactgatattcgtgcattgggttcaatggttgcagtagaacttgagactgctgaacaagcaaaagttgtacaaaactatgcaatggaaaacgggttgttacttcttacttgtggtaaatacggtaatgtaattcgtttcttatatccattaaccattcctgctgagcagttccgtcaaggtcttgatatcttgaaacaaggttttgcgacactaaaagcaggtagtgcaaaagcaatggagcaatctgcatga

SEQ ID NO: 41572 - DNA, 1545 bp, Acinetobacter baumannii
atggcaactgacgagagccactttttaactgtaggagagagccaattgcgtagtttacttggagatcatttgctgcaacgactccaacaggacactgaagggaaactacatcaacgccttttccgttgcctgcgtggtgccattattgatggagtgatccagccgaagactcgtctacctgcatcacgcgatttagccagtgaaattcatgtttcgagaaataccgttcttagtgcctacgaacaactacaggccgaaggctatttagaagcacggacaggacatggcacatgggttgccgaaaagttgccagagagttttttaaatacacaaaacaagaaaaaagtagtttctagcccaaatattcaaagttcttacgccctctcacagcgtggctcaaacttattgggctatgccgcagcctcgccacatcaatggggagcctttgttccgggagcacccgatgttaccgagtttccacatcatatttttagtcgtattcaagcacgcttaagccgcgaaccggacattaaccgtctaatttatagcaatgcaggtggatgcatagagcttcgaagtgcattggcagattacttacgtgttgcgcgttcagtccagtgcgatgcggaccagattattattaccgaaggcattcatcaagccattgatttagtctcacgtgcactgagtgatatgggagataaagtctggattgaagatcccgcttattggggaatgcgtaatacgttacggattaatggcctcgatattcagccgatgcctgtcgatgctgaaggcattattcctgaagaaaatccggcagtaccgcctaaactcatttttgtcacaccatcacatcaatatccgcttggctcacatttaagccttgatcgtcgcagacaattgattcagattgcacgtcagcacaatagctggattgtagaagatgactatgacagtgagttccgtttctcgggccagccttatccatctttgcaaggcttagaaaataatgcacctgttttatatatgggcacgtttagtaaaactatttacccatctttaagaattggctatttggtcgtccctaagccgttattttcaccgctacgtattgttgcggccgaactttatcgtggtgggcacttgcttgagcaaaaagccctcgctgaatttattcgtgaaggccattatgaagcgcatattcgccgtatgcgcctgctctatggtaaacgccgcgattacttggtgagcttaattcaacgctatcttggccccgaatttattcatgaatatgatgaagcagcagggttacatctggttttaaaactaccgaactcttgcgatgatgtcgccattgcagccacagcacttgaacgtggcgtcaaagttcgcccactttcacaatactacatgcaatcacatgcacatgcagagcgcggactgctgatgggctttgcctgtgtaaatgaaaaagacatggtgatggcttttggtgtcttgctccagtgcttacgtgaagcaggtgtacccacactgaattga

SEQ ID NO: 41573 - DNA, 1443 bp, Acinetobacter baumannii
atggcagctcatcaaaatggttctgaagccaatcactcccaaagtttaaaacatggacttaaatcacgccacttaaccatgatctcgattgcaggggttattggtggttctctctttgttggctcaggcagtattatctacaacaccggccctgtagtttttctaacttatgctttaggtggccttctagtttggttcatcatgcgtatgttaggcgagatggccgttttaaatcccgacagtggctctttttcaacttatgcagaccgtgcgattggccgttgggcagggttttcaattggttggttgtactggtgtacgctggcgatgctcatgggctgggaagcttatgtagcaggaaaaattttaaacaactggttcccgtttattccgatctgggtttatatgaccgtcgtcattgttgcactggttgttgtcaatttacaaaacgtcaagaactatggtgaattcgagttctggtttgcgctcatcaaagtcatcgcgattgttgttttccttgtgattggtagtttagccattatgcatttgtggccttggggcaatccggctgtatctggtataagtaacttaacctctcaaggctttatgccaaatggcggttcgtcagtgattacagctttgcttggggtgatgttcgcctatattggtgctgaaattgttaccgtagcagcagcagagtctgcaaatccatctaaagaaattcgtaaggcatcaaactcggtggtttggcgtattattttattctacgttggttcaatgttcgttgctgtatgtcttattcctcacaacaatgaacttttaaaagattcgacttggggtacttatagtgtaactctgtctgcacttggtattccgggcgcgcgccatatcgtaaattttgtagttctaacatcggtatgtagttgctttaactcagcgctttacacgtgttcacggatgctattctcgttatctaaacgtggtgatgcaccaaaaagttttggttctgtaaacagtaaaagcagtccttgggtgggggtgattgtgtcatgcttcttctctgtaattgcggtaattttaactgcaacagagagtatgaatgtttatgacttcttcatgctaacaacaggtgcagcaacactatatgtgtacctgaccattgcttattctcagcttcgtatgcgtaaaaaattagaagctgaaggcgtgaagattgactttaaaatgtggatgttcccttacctaacctatgtggtgatctttgcaattattggtgcaattcttaccatgttgattgaaggtacttattttaaagaagtgatttacactacagcattgttcggcattattgtgttcttcgggttattgtctgaaaagctaggttggggtaaagagcgtagggcgactcatttaactcatagccatgaagaaaagttagtttaa

SEQ ID NO: 41574 - DNA, 549 bp, Acinetobacter baumannii
atgtctcagccaatcgaaattattgccaaaggtttaacgcgtgaacgccaaagagcagggctttcattggcagaggttgcgcgccgtgcaggtgttgccaaatctacactttctcaattagaggcagggcaaggtaatccaagtattgaaaccttgtgggcactttgtgttgcactcaatattccatttgcacgtttgatggaagaaccgagcaatcaagtgcaagtcattcgctgtggcgatgggccaacggtgagttcggagattgccaattacaaagcaattttgttggcgacctgtccaccccatgcgcgccgagatgtttatttattgattgttgagccgggcgaagatcgactttcagaaccacatccagttggttcggtagaacatattattgtagtggaagggcgagctttggtgggtttaattgatgaagcggttgagctgggtgttggagactatatttgttatccagccgatcaaaaacatatatttagagctttggaaacaggcacaaaagcgttgttaatctctgaacaaaactaa

SEQ ID NO: 41575 - DNA, 696 bp, Acinetobacter baumannii
atggaaaatcgttcgttatatcatgccatgactacatacgctcttattagaaaacttagtaaagatactactcgctcgattttctttgtgtgcttagcaacgagtgtcgttggtatgtccttaggttcactcgccgcaagttatggcttagcactttggatcccactttgcctatccatatttgtgctcgcgggaactgctgaatttatttttattggattcttggcggtaggcggtagcccgattgcagctgcaattgcaggactactcgtcaatttaagacatctgccttttggcattgcggtcaatgaactgattcgaggcaaattttctcaatattttggatctcatatcatgaacgatgaaagcgttttgtttggtatggcacagcctgatttcgaaaccaaaaaggctgcttactggctatgtggtataggcatcatgctcagttggccgctcggcgtcactgcaggttattttattgggagtgctattccagaccctaaaacatttggcttagatgcgatttttccagctattttaattgctcttactttttctgctttaaagaataaggtgactcgaaaagctgcatttgccggatcaactttagcgttgataaccacaccctttttagccgcaggacttccaattctgatttcgctttttggcttgatatggagtagaagaaaatga

SEQ ID NO: 41576 - DNA, 324 bp, Acinetobacter baumannii
atgagtcaacagttactgattattgtaggaatagctctactcgcactgggtacgtacagtatccgttttgctggtttccacttaggtgccaagttttcattttctgaaaaataccaagttttactatcaaatggcgcaactgttttactttgtgccattgcggtgaccactacattttttgaaggtcaccatttcgcaggtttcgcacgtatatttggggtgggtttggcacttttcttagtttggaaaaaagccccgcttttattggtgatttgtctggcagcggctggcacagcactggtacgtttacttggaattgaataa

SEQ ID NO: 41577 - DNA, 582 bp, Acinetobacter baumannii
atgcgtggtgtaaataaggttattttggttggtactttgggtcgtgatcctgaaacaaaaacttttccaaatgggggttcgttgacccagttttctatcgcaacaagtgaagtttggaccgataaaaatacaggtgaacgtaaagaacaaacagaatggcaccgtattgttttgcataaccgtttaggggaaattgctcagcagtttttacgtaaaggttctaaggtttatatcgaaggttcattacgtacacgtcagtggacagaccaaaatggtcaagaacgttacactacagaaatccgtggcgaccagatgcaaatgttagatgctcgtcaacaaggtgaacaaggttttgctggcggtaatgattttaaccaaccacgttttaacgcgcctcaacaaggtggcggctatcaaaataacaaccaaggtggtggctacggccaaaacaatggtggttatggtggccaaggtggtttcggtaatggtggcaatagcccgcaaggtggtggtttcgctcctaaagcgccacaacaaccagcatctgcaccagctgatttagacgacgatttaccgttctaa

SEQ ID NO: 41578 - DNA, 1365 bp, Acinetobacter baumannii
atgatgaatgctttggaacgtcgctcaacttttgccttaagtagtatttttgcgctacgcatgttgggcttgttcatgattattcctgtcttttctgtagttgggcagtcatatcaatatgcgactccagcactcattggtttggctgtaggtatttatggtttaagtcaggccattttacaaattccatttagcttacttgctgatcgttttagccgtaaaccgcttgtggtctttggtctattgctttttgctattggcggtgcaattgccggactatctgacactatttatggcgtgattattggccgtgctatcgctggggcgggtgcagtttcggcagtagtcatggcgcttttagccgatgtgacgcgtgaagagcagcgtactaaagccatggctgccatgggcatgagtattggtctatcttttgtagtcgcttttagtcttggaccttggctcacaagccttgtaggtatttctggtttgttctttgtgacaaccatcatgggtttgattgcgattgcgatgttattgctggtgcctaaagtcactcgtcaccatcgtaattatcagcaaggctacatggcacagcttaaacaagtcattcaaatgggtgatttaaaccgtttacacgtttcggtttttgcattgcatttattgctgaccgccatgtttatttatgtgccatcacagcttattgagtttgcgcatattcctttggcgagccacggtttggtgtatttgccacttttggtcattagtctgttttttgcatttcctagcattatcatcgctgaaaaatatcgcaaaatgcgcggcattttcttaacagccattacaggcattatcgcaggtttactattactgatatttggttatcagtctaaatatgtcttgcttgcaggcttaggtattttctttattgcctttaatgtcatggaggctttattaccttcttggctgtcaaaatcagctccaatccagtcgaaagctaccgctatgggggtaaatgccagtagccagttcttaggtgctttttttggtggcacactaggcggtcaattattgatgttacataatactgcgattggatggagtgtcttagcagggattgctataatatggctgctaattagttttggtttagctcagccgcggtatttgtcatctattgtgctgccattgccgcaagtgcaacaggtgaatgagtggaccacacaactattggcaattcgtggtatcgaagaagttgtggtgatgcctgaccagcaagttgcttatattaaagtcgataaacagtctcttgatgacgcttcgcgacgtgatttaacgcagttgttcggtaaagaggtagccatttaa

SEQ ID NO: 41579 - DNA, 1083 bp, Acinetobacter baumannii
atgaagcatttccgattttcgatattttttacggtggtgtgtttagcactatccgcttactggggttttacccatggacctgaagcgggcgtgtcaaccatgcttaaagctttaactattaccgcgattttagctgtgatggaagtttctttatcttttgacaatgcggtcgtgaatgcatcggttctccgtaattgggacccgttctggaaaatgatctttttaacggtaggtattttaatcgccgtttttggtatgcgtctgattttcccagtcgtgattgttgcagtgactgctgatatgggtgttgttgaagtagccaaaatggcacttaatgatccgaaaacctactctgaacgtttaatggcacatcacgctgaaatttcggcttttggtggaacattcctattactggtgttcttaaattttttctttgatgacgaaaaagaaacgcattggtttagatggcttgaatctaaacttgcaagcttggcaagcgtaccggcaatgtctgtatttcttgctttgattgccttaattgtgatggcaggttatgtcgatgaccatcaacgtttagctgtaactatggccggtatttggggcattgtggtttatattggcgttgaagtgctcagtcatttgttaggtggtgagcctgaaattgatgaaaatggtaatgctgtattacaagatggatcaggcgccgcttctggtgttgtaaaagccggtttaggtggtttcttatatcttgaagtgttagatgcatcatttagttttgatggcgtaattggcgcatttgccattactagcgacgttgtcgtgattatgctcggtcttgcaattggtgctattttcgtccgttcaatgacagtttatcttgtagaaaaaggcacactagatgcctacgtgttcttggaacatggcgcgcattatgcgattggtgctttagcattcattatgattgcaagtggtactggcgtacatgtacctgaagttgtcacaggtttaattggtgtagcgttcattgtttgggcggttatcgcttcaattcaatattcgaaacgcgagcaacagtcgccttaa

SEQ ID NO: 41580 - DNA, 675 bp, Acinetobacter baumannii
atgcttttttctcaagaactctggcaacgtaatttaaatttatatcaaaaaattctcgacctgccttttaatcaggaacttgctaacggtactttagataaagaagctttttgtcattatgtcattcaagatgctcaatacttagtagcctatggtcgcgtactggctgttgcagcagcaaaagcttttgatgctgacgatattatgcagttttcagatgcagctaaaattgcaattgtggtcgagcgcagtttgcatgacgactttatgaaaaactttggtgtcaccaaagaagaatttaaaaataccccattgaccttggcaggccatcattacacttcatttttgacagcgactgcttggtctgaaagctaccctgttgtacttgctgcacttttaccttgcttctggatttatgccgaagtcggtaaagacatcgtgagtaagtctgtcccgaacaatccttatcaggcatggattgatacctacgcaggtgaagaattccataccgccgttcgtaatgtgattgcgacggtagataaagttgccgcacgttgtgatgcagatactttagagaaaatgcatgccgcttacaccatgggtgcaaaacttgaatggctattttgggatagtgcctaccatcaaagacaatggttaggtttagatcagatctaa

SEQ ID NO: 41581 - DNA, 342 bp, Acinetobacter baumannii
atgtgggcgttatttttaaagtgtatgttgggggctggggttgtcctcattatttcgattttatcgaaaagtaaggcattttatattgcgggtttagtcccgctttttcctaccttcgctttaattgctcatgtgattgtctatcagcaaaaaggagccgaagcattacagaaaacggctttatttggtctatggtcactgattccttatgccatttatttagctgctgtttatgtgctggcaacgcgtatgtcgatgtggtcttgcctaggagtcgcaacgctatgctgggttgtggctgcggcaggtttgatttacggctggcaattgtttcaaagttaa

SEQ ID NO: 41582 - DNA, 354 bp, Acinetobacter baumannii
atgatcggacaaatattgattgcgcttattgcgatattacatgtttatattttagtgttagagatgtttttgtgggacaaaccttatggcatgaaagcctttggaaataatgccgaaaaagcaaaactcaccaaagtcatggcacagaaccaaggtctttataatggctttttagcagcgggtttattttggtctttattggctgatgcaccatttgcaacatcaattgccaacttctttttaggctgtgtactgattgctggtatttatggtggtctaactgccagtaaaaagattatttatattcaggcggttccggcattgattactttagccgctgttaattttctttaa

SEQ ID NO: 41583 - DNA, 978 bp, Acinetobacter baumannii
atgcgaagtattatccatcgtaattttggcgaacctgtagacgttttagagcaggcggatatgccaaagcctgaaccaaaagcaggcgaagtgcgtattaaaaccatcatgtctccgatccataatcatgatgtatggacagtacgcggaagctatggctataaaccaaccttacctgcgattggtggcagtgaggcagttggtattgtagatgcgttgggtgaaggtattgaacatgtacaggtagggcaacgtattgctgttgcggctgtgcatggcagttgggctgaatactttattgcgcctgctcaagggattattccactcaataatgaaattgatgatgaaacagcagcacaactgattggtatgccaattagtgccttgatgcttttagattttgttaatgttcaaccaggtcaatggctcattcaaaacacggcgaatggtgcagtcggtaaaacagttgccatgattgcacaggcacgtggcttacctgtgattaatctggttcgtcgtactgatgcaattgccgagatgcaagcattaggtattcaacatgttgtggcaactgatcagccgaactggaaagagcaagttaaacagattcacggtgaccaacctcttattgccggtgtggactcgattggtggaagtgcaagtggtgaaatgctgaatttactcagtgaaaatagcctgctcgtttcgttcggtagtatgactggcgaaaccatgcagatttcatcgggtgatctaattttcaaacaagcgacagtaaaaggtttctgggcgagtgtagttaataaagaaatgccagcagctcgtaaaaaggaactgatcgttgagctgctaacattagcgactcagaaaaaattaatccttcctgtagaaggtgtatttagttttgatgagattaaaactgcggctcaaagagcaacgcaaggcgctcgtcaaggcaaagtattattaaagccgtaa

SEQ ID NO: 41584 - DNA, 603 bp, Acinetobacter baumannii
atgaaacgattaaataaaagcgaaaccacacgacaacacattttagataccagttttgaactggtattacataaaggttttgtcggtgttggtttacaagaaattttaaaggcttgtgacgtacctaaaggttcgttctatcactactttgcttcaaaagaggcgtttggctgtgcgttgctcgagcaatacatggccaattataaagtccgtatggaacagctttggcagcacagtgagcaaagtgcccatgcccgtttaatggctttatggcaggcgtggattgatgatccggtccatggtagctgggctgaaaactgcttgattgtgaaattggcagccgaagtttcggacttatcagaagatatgcgtcaaattctaaatgacggtgtgcacaaattaacgcagcgtctagctttgctactcaaagaagggcaacaagaaggatcaattccaaaacatattgaacctttgaaaactgcgcaagtcatgtatcagctatggttaggtgctgctttacttacaaaattgtcgcaagacaaagcacatctacatctagccttagaaaccactcaacaactcttaaaaccgatagaggaataa

SEQ ID NO: 41585 - DNA, 2835 bp, Acinetobacter baumannii
atgagccaaagtcatatccgtattcgaggcgcacgcacccataacttaaaaaatgtgtcactcgatattccacgcgacaaatttgtggtaattacggggctatcaggttcaggaaaatcttctcttgcctttgataccttgtatgccgaaggacagcgccgttacgtcgaatcactttcggcctatgcccgtcagtttttatcgcaaatggaaaaacctgaagttgactcgattgaaggtttatcaccagccattgcgattgagcaaaagtctactagccataacccacgttcaacggttggtacgattaccgaaatttatgactatttgcgtctgctttatgcacgtgtcggtacgccttattgccctgaacacgacttacctatggttgcgcaaactgtttctgaaatggtcgatgcggtaaaaaaccttgaggaaggtacagcacttatgttgcttgcccctgttgttcgtgagcgtaaaggtgaatacagcaacttgttcgaacaactgcaaggtcaaggtttcgttcgtgcccgtgttgatggtgaaatcattgatattgatacaccaccggaactcgacaaaaagaaaaaacataccattgaagtcgttgttgaccgctttaaagtacgtgatgacttaggcaaccgtattgctgaatcatttgaaactgcactgcgtttaggtggcgatattgcagttttatcgtggatgaatggcgaacacccagatcgcgttttttctgcaaaacactcatgccctgaatgtgatcgcgcagtcgcagagcttgagccacgtttattttcatttaataacccgttcggtgcgtgccctgtctgtgatggcttaggtacacgtagccattttagccctgaaaaactcattcctaaccctgagcttgcaattagtgaaggtgctattcgtggttgggatcgtcaacgtccttattactattcaatgctgcaaaaagttgccgaccatttcggttttcaacttgatacaccatggaatcagttagataaagacacgcaaaagaaattcttacaaggtactggcaaagaaaaaatcgatttaagttatatcgatgaacgtggccgtaaacatacacgcgtgcaaccttttgaaggaattttgccacaccttgaacgtcgctatcgtgaaactgaaagtaactatgtacgtgatgatttagcacaatatttgtctaatgcagcttgtgatgcatgtggcggttcacgtctcaatgaaatttcacgtcatgttcgtgtgaaagacaaaaccattgctgacattacccgcatgtcgattggagatgccgaaagttactatcaaggtataaaccttgaaggtgccaaaggtgaaattgcagataaaatctttaaagagattcgtgagcgtttacatttcttggtgagtgttggcctgaactatttaagtctggctcgttctgccgaaacactatcgggtggtgaagcccagcgtatccgtctagcttcgcaaattggtgcaggtttgatgggtgtcatgtacgtccttgatgaaccatcaattggtctccatcaacgtgataatgatcgtttattacaaacgctaattcgcttacgtgatttgggcaatacggtattagttgttgaacatgatgaagatgcaatccgtgcagctgaccatattattgatatcggccctggtgctggcgtgcatggtggtgttgtcattgctgaaggtacgtatgatgagctggctaaacatgccgactcgctcacaggtcaatatctttcaggcaaactcaaaattgaagtgccaaaacagcgaactcaaccacctaaacctgaagaaaaaattaaactttcaggtgcagcgggtcataacttaaaaaatgtcgatttaaccatcccacttggcattatgacttgtgttacgggtgtttcaggttcaggtaaatcaacactgattaaccgtacgttacttccactggctgcaacacagctcaacggtgcaacgactttaacagctgaaaaatttgactcgattgatggtctacaacatctggataaagtcgttgatattgaccaaagcccaattggccgtacaccgcgctctaatccagcgacttatacgggtctatttacgccaattcgtgaattatttgctcaaacaccagaagcgaaagcccgtggttatagcgcgggtcgtttctcatttaacgtaaaaggcggacgctgcgaagcgtgtgaaggcgacggtatgattaaagtcgcaatgcatttcttaccagacatgtatgtaccttgcgatgcttgtcatggtaagcgctataaccgtgaaacacttgaagtcggttataaaggcaaaaacatttctgacgttttagaaatgacggttgaagatgctgctgagttctttagtgctattccagttattcaccgtcgtttagaaaccttaactcaggtaggtctaggctatattcgtttaggtcaagctgcgactacactctctggtggtgaagcacagcgtgtcaaactggctcgtgagttagcgaaacgtgatacgggtaaaacgctttatatcttggatgaaccaacaacaggtctgcatttccatgatattgccaagttactcgatattttgcatgagctacgcaacaagggtaataccattgtggtgattgaacataaccttgatgtcattaaaacagcagactgggtggtcgacttaggtccagaaggtggttcgggcggtggtatgatcattgctgaagggacacctgaacaagtagccgaggtcgagatttcccatactggccgcttcttgaaaccgatgttgaaacaataa

SEQ ID NO: 41586 - DNA, 1707 bp, Acinetobacter baumannii
atgtcaggattacgttcagaacatatcagtaatcgactgtttttcttcatgttggtcattattttgtccttactgtttatggcggttccgcttattgtcagcagttatcaagaatatttaaaaactaaacaagctttggttgaaattaaaagcttaagatcaattgctgaagttgcaaataaagtctctaaagaacgtgcgcccgcaaataaattaatgtcgagtaacgctgccgactttttaaaaaatcaaaaaaacttaaaagaatatcgcctttctgttgatcgccaacttaatgaaactattcatattttaaaagaagaaggttataccgatttagcaaatactttagatactaaatttagagatgatttaaaacaggcgcgtgctgtagttgactattatgttgcaactcctgaacaagcgagaagctctatacaattcgataatgcaattttggctatgtttggagcttgggatagctgccgagaagttttacaaaatttgatgctacagttaaaaagtaaagatagccaaattaacaattattttactttgattgtggttttgactgatatgagggatcaagctggtcgtaccgcatctaatgttattgcgcctgtgacttttaaagaaaccatacctaatgataatcgggcgcggtctttgcagactcagcagcaagcacgctacttatgggcacttgtggacacactacagtcagagcaagctaaaactccggaatatcatcgcctttactcaagggttaaaactgaatttttagataaaggtgtacctattgtgggtcagcttttagatgaaagccaaaagcaccaagcctatcatttaaacggaacagaactgacagaccaaatcgttgataaatttaccacggttattgatttgcaaaagtttttacttaataaaagcgtcttgattgcatctcaagaaaactatttggcaaaaaagaagttttttcttactttgctcatttcaagcatatctttagcagctgctttacttacactaatttatgcaaagagaagggtgtttgagcctcttattcaggcccgtaccttaattcttgatttatctcatagcacagattacccaatagatgagttgaaacctaaaaaaggcgaatttatttcgttgttcgaagctattgatcgtttacaaaggatgctcaaacagcgagatgcttttgaattccagcttaaaaatattgctaatacagatccattaacgggtgtatccaatcgtttggctttatctgagtatttaaaaattgttgagagttaccctcaaaaattttctcaaacttgtttgatgattattgatattgatcgctttaaacacgtgaatgatcaatatggtcatattgtgggtgaccaagtgattcggcgtattgcagatcaattaaaagcaaatgtacgggcttctgatttaattgttcgttatggtggtgatgagtttttaattttgttagaacaagtgcagtttttagatgcacgtctcttggccgaaaaaattcgtattgcgatttctttagaggaaattgatctatctggtacgcaagaaaaattgcatgtatcggtcagtattgggtttgcgattggagcgacaagctggatggagttattagagaacgctgatcgttcactattaagagctaaagctcggggacgaaatgtagtagagggataa

SEQ ID NO: 41587 - DNA, 900 bp, Acinetobacter baumannii
atgaaaaaacttggtttagccactgctgtattattagccatgaccggtgctcatgcttatcaatttgaagttcaaggtcaatctgaatatgttgacacaactgcaaatgataaaaacttcactggtgacgttgctggtacattctatttgaaaaatgttgatacagctaagggtcctttagctgaagcagctttcttaaaccaagcttctagcgtgtctttaggttatagctatcaacaatatgaccaaaacaacgtaaactaccacattggtacatacggtgttaaaggtgaggcatacgttccaactccttaccttcctgtatatgctagcgcaacttacaaccacactgatgttgatggtaaaaacaacttctctaaagatgacaacggtgaccgttatgcattagaagttggtgctatgttgttacctaacttcttaatgactgttggttatacaagtgttgctaaccaattcgctttagataacttcggtatcatcggtaacggtatctactctgctgttaaccaaactgctgctatccaaaacgaccaagatgctgttacagcacgtgctaaatatgttggtccaatcgatggaactaacatggcaatcggttttgaagctgctggtgcattcggtcaagaaaaccaatacggtttaaaaactgacctttacttaactcctaagttaagtgttggcgctactttcgttggtaacgatggcgaagctgacatcaaaggtaatgaccttggtgaattccgccaagcttggggtggtaacgtaaactacttcatcactcctgctttagcagttggtgcatcttacatgaaagctgacgttaaaaagtctagctacgatacacaaactatcggcttaaatgctaaattccgtttctaa

SEQ ID NO: 41588 - DNA, 1968 bp, Acinetobacter baumannii
atgccttccaaacaagcgagttggttcgcaaatgttaatcccaatgtctttttgggtacggtcattattattgctttgttcttagcagttgttgtgatcgctccgagttcttttgaacttctcacgcaacagttaaagcagtggatcactgattcttttagttggttctatgtcttatcggttgccttctttcttatcctactcatttatattgcctgttctgcgattggacgtattaaattaggtcctgaccatagccagcccgaatatagtaacggatcatggtttgccatgttgtttactgcgggtatgggtattggcttaatgttctttggtgtggctgaacctgtcatgcactatgtcaacccaccaagtggtgaaccacagacaattgaggcagcacaacaagctttacgtgtaacctttttccactggggcttacatgcatgggcaatttacgccgtggtcggtttagcattagcttattttgcttatcggcataatttaccgctaaaaacccgttcagcactgtatccactgattggtaaaaagatttatggaccgtggggcgacagtatcgatatatttgcgaccattggtacggtatttggtgtagcgacttctctcggatttggtgttacccaaattaactccggtttacattatctatttggtattgagcaaagcaccactactcaggttttactcattatttttgtgagtattctcgcttcattatctgtgttcttaggactagataaaggggtcaaacgtttatcagagctaaacttagtattagctttaatattattagtattcgtttttatcgctggccctagtatttacttacttcagaccactattcaaaacactgggcagtatatctctaacctttttaccatgacattcaatttatatgcttatcagccgaatggatggattgggggatggacgattttatattgggcttggtggatttcttggtcgccatttgtaggtatgtttatcgcaagggtttcacgtggtcgtaccattcgagaatttattgttggggtactcctcattccaacaggctttaccattatctggatgggctttttaggaaatgctgcgttatttagcattatccatgaacatcaaaccactttgattcaggctgttcagcaagactcgtcagttgctctatttgagtttttaggacacttgccatggtcaggtgtcatgaatattctggcgactattttggtggttttattctttgtgacttctgctgactcaggggcattggttactgactacttaacagcaaaaacagaaaattcacctacttggcagcgcctgttctggacagtgcttatggcggtgttggctattattttactcttggtgggcggtcttgcggcgcttcagtcttcaatcattatgagtgcgttgccttttaccgtagtcatgctgctaatgagttggggcttaataaaagccttgcatcttgatgtcactaaaatgatagcaattcaagaagctcgcattacaccacgcgccattcataaccctagaagctggcagcagcgtcttggtttaatcatgcattatcctcatagtgaagaagaggtgaagcaatatattgaaaagcaggtttcacgtgcttttgaaaatattcagcatgagtttagacgccgtcatcttgaggtgtcgattagtgaagtggaagatggtatgcagcttcgagtcgatcatcatcatgaaattaattttatttataaagttgtttcacgtgaaacagtacctccaagttttttaattggtcgtacagaagcagaagacggtcagtattttcaagctgaggtatttttgagagaaggcggacaaaactatgatgtaatggactggactcaggaagatttgattcaggatattattgatcagtacgaacgtcatttacatttcttaaatatcgtacgcagttaa

SEQ ID NO: 41589 - DNA, 693 bp, Acinetobacter baumannii
atgcgatctatcattgaattctggtcgagctttcgattgttgccttctgcatggctgctgttggtgcaattcattttacttattctggctatgctgacttttgataatgaggcttacaggaccttaacttgggcgctaggggtacttgcattactcattattgctaaagttattcgccaaacacccatgttcacttttctcggtctcgcatttgtcagtggggcaattatagcttcggcctttattttattaggctatagcaatttaaccatccagatttttgcccatagctgtgaagccttagcttacttttcggctgcttatggtttatttcgctatatgtttgctgaccgatatttaacccgcgatgagttgtttgcagctgccgcagtttttaccttgctggcttggggatttgcatttttatataacatttgtcagttactcattcctaatagctttcaaaatccaaaccacatccatcacttacaaacttggttagatttactgtttttaagctttagtttgcagtcagctacgggactgtctgacttaataccccttagtccaccagcacgtgttttagcgatgttacagatgttttgtggtgtgatgtatttggccctaatagttacgcgtttaatcgctttacaatatatcaagcacacgcctaaaaagaattctgataaataa

SEQ ID NO: 41590 - DNA, 1716 bp, Acinetobacter baumannii
atgaaatggaattcattcaaagcgaaagccttattggcagcagcatcgctatattcaactgttgctatggcaagcccggacttaggtgaagcagaacagcaagctaccaactggcatgccattatcatgtttatcatctttgttggctttaccttatttattaccaaatgggcggctaaacaaactcaatcggcgcaagacttctatactgctggtggtgggatcagtggtttccaaaacggtttggcgattgcgggtgactatatgtcagcagcgtcattccttggtatttctgcaatggtgtttagctcaggttttgacggcttgctctattcactcgggttcatggtcggttggccaatcgttttattcttggtggcagaacgcttacgtaaccttggtaaatataacctttcagacgtagtgtcattccgtcttgaagaaaaaccagttcgtactttagctgctttcagctcgcttgttgtagtcgcgttctatttgattgcacaaatggtaggggcaggtcagctcatcaaactattatttggtttgaactataacattgcagttgtgattgtcggcttgctcatgatggcatacgttattttcggcggaatgctagcaaccacatgggtccaaatcattaaagcagtgatgttattaagtggtgcaacgttcatggcctttatggtgatgaaagcggttggtttcagctttagtaatatgttcacccaatcaattgaagtgttcagtaaagttcatgatgtaagctttgaagatgctgcaaaaattatgggaccaggtaaacttgccgcaaacccgattgatgccttatctcttggcttagcactcatgtttggtacagcaggtcttccacacattcttatgcgtttcttcacggtaaaagacgcaaaagaagcgcgtaaatcggttgtcgttgcaacaggttttattggttacttctatcttttaactttcattattggtttcggtgcgatccttttcgtatcaaacaacccgcaattccttgatgttgcgaaaatggcaatgactggcaaacttgagcttgttggtggtaacaatatggcagccgtgcatttaagtgacgctttaggcggtgacttattcatgggcttcatttcagcagtagcgttcgcaacgattcttgcagttgttgctggtttaacactttcaggtgcatctgcgatctcacacgatttatacgctaacgtatttaaaaaaggtcaaaccacgccagcttcagagcttcgcatgtcaaaaatcgcgacgcttggtttagcaatctttgccatgattttaggtattttgtttgaaaagcaaaacgtagcattcatggtaggtttagcattctctgtagcgtgttgtgcaaacttcccaattcttgttctttcaatgttctggaaaggtttaacaactcgtggtgcggtcattggtggcgtagttggtcttgtaacagcggttgtactcattattctgtctaaagcagtatgggtagatactttaaaaatctctgataccccaattaacccgttcaatggccctgcattatttgcaatgcctttgtcgttcctttgctgctggttcttctcggtaactgacagctcagcacgtgcgaaaaaagaacgcgcttctttcgatgctcaatatgttcgttcaatgacaggtattggtgcttctggtgcatcagaccactaa

SEQ ID NO: 41591 - DNA, 333 bp, Acinetobacter baumannii
atggatcaaagccaagtagaacagattctacgtaatccaaagtttcaaaaaatggtcaagaaaaaaagtgcattaagctggacgctcacaatcatcatgttagtgctttatgtgggctttatgctacttgtgggctacaacaaagaatttttgatgagttcctttagtggtggtgtaacgacatgggggatcccgctaggtttaggaattattgttttatctttcctactttgtggtgtgtattcctatatcgcaaataatacccttgaccaattgagtgaagaagcgttgaaggaagttgaagccatcacgcatgagaaaggactacactaa

SEQ ID NO: 41592 - DNA, 3498 bp, Acinetobacter baumannii
atgaacagctggctgattattggggtgctcactctttatattgcgcttttattcgtctgtgctttttttggtgagaagcatgccagtcgtcttagcacgcgtggccgtatgtttttatttagcttaactttaggtgtctattgttcctcttggacattctatggggcaactggggctgccgtacgtgaaggtgtcatcttcttacctatttatttaggtccactgttatttgtctggtttggttatgatatctggcggcgtctaggtcgagttcgtcagcatcatgcgatttcgtcaatcgctgactttgtcgcggcacgctatggtaaaagtggtgtactcgcatcgttggtgactattcttgccgttattgcaattatcccctacctcgcgttacagctgcgtgcgattgctttaagtacctcggtcattatggagcaaagctcgcatattcatacgacgaccaacagcgtgttattgctcaccagtgtgcttgcaattttagccatgatttttggtacaaggcagattgcaaacacggagcaacacggcggcctcatgcttgcggttgcatttgagtcatttgtgaagttatttgccttactttgtgtcgctttattttttatttttgaatcaccggccaacctgagccaaatgacctctgatgtaaaccagacttttcaggaagttcagctttttggtgtacctgaaactttctggattcaaacattattggcgggcttagccattatttgcttaccacgtcagttccacgtggcggtggtcgagctacgcgatgagaaacatattcgaggtgcccgtaaatggttcgcggtttatctcattttaactattcttgccattattccgatcgcaagctgggctttgcatgccgcaccaaagtttctgaccgtgcctgatgtagctgtgctgtcattgcctttaagttataaccaagagtggctggcattactggcctttttaggcggattctctgcatcaacaggcatgttactggtgtcatcagtagcattgtctattatgctcagtaacgacttgattatgcctgctctatggcgatttaagttgctgtcacgtcacgataagcatttacctaaagttcttaaatttagccgccgtatcagtattgttgcggtgatgctacttggctttttattcttccatttctttaatgacattaaccaactttcagttttcggcttattggcctttagtgctgtagcacagtttgcacctgccctgattggtggtttgtattggcgtggcggaagtcgtcaaggtgtctatgcaggacttattattggatttttaatgtggagttatacattactatttccaactattttgcgtagcttgcctgaagcctatcaggaaactgctcaaagtattttacttttcggtcctttcggcattaatgccctacgcccggaatctttatttggttttgagtcatttgcacctttaactcatggtgttatttggtcactcggtttaaatattgttttatatatctggatttcaaaaatttatcggccaagcgtcgctgagcaaattcaggcagaaagcttcttttattatgaaacaaagcctttaccatcaccgcacacatctactgatttaacctatcttcctcatgatgcggcccgcttaaaagtgggtgatttatttgccctagccaaaagaattacgggtgagcaacccactacgcaagcgttcgaaaatttttgtgagcaaaatcacctcaccctcaacccaaatagtattgccaatggcatgtggtggcgttttaccgagcaatatctggccggtattatcggtgccgcttctgcacgtacgttgctcacaacagcaatgattaataacggtctcgctttagggcaagtggctaatattttagaccaagcatcgcagtggcaacgttttaatcagaaccttcttatgaccatgattgaccacatgacccaaggggtaagcgtggttgataaaaatatgtgtttggtcgcttggaacaaccaatatttaaaactgtttggttatccaaaagacctcgtttatgtgggctgcccaattgccgacctcattcgttataacgccgagcgcggtgaatgtggccccggttcagttgaagaacatgtgcgtaaacgtcttcactggatgaaagtgggaagtgctcacgaatttgaacgtattcgtaaagatggccgtgtaattcaaatgcgaggaaatccgattgcaggtggaggctttgtaacgacatttgccgatattacggccttccgtgcgaacgaagccgtgcttgaagcccgcgtaaaagatagaactcaacagcttgccgatgccttaactgagcaacagcttgcacgtgaacaagctgatatggccaatatgtcaaagagtcgatttattgccgcggcaagtcacgatctattacagcctatgcatgctgctcgtctgtttagtaccgttcttgagcaaagtatttcgaccgaagaagaccgccagaccctacaacaacttgaccgagcactctatggagcagaaagtatgctctctgccctactcgatattgcgcgtttggaaggcggcaccatacagccaaaaagacaaccttatccgttgcatgatttactcagtgatcttgagttgcagtttaaatcgatcgctgctcagcgaaatatctcactgaaagtccacgatgtgtctttctggattgataccgacccgcagtggattcgtcgtattatccaaaactttgtcagtaatgctttgcgttataccgccaaaggtcgagtggtggtgggtgtactccgctctgcgcagcagtctggacatattcgaattggggtttgggatactggacctggtattgccgaagaacaacggattaagctattccaagagtttgagcgctgtgggcatttatcaccttggggtgaacaaggtttagggctaggacttgccatcgtacaacgtatgacaggtttgctaaactaccctgttcatgtttactcagagttgggcaaaggctcatgctttatgattgaagtacctattgtcgagccaccaaaagttgcaacaccagctgtacaagccgtacctttaaaaactaaagcctaccgcattttgtgcctagacaatgatgaaactattcttgaaggaatgagtagtttattaggacgatggggttatcaagttttcaaagcgactgaacctgaacaggcactagaaattattcaaaaagagaatatacaggtttggctcattgaccagcacttaaaccacaatcaacttggcgttgattttattactcaaaatcgtcaagaagatgtgcctgttgctttaattacagcggactcgcaccctgaattaccgcagcaattaaaagaactgaatattgttttactcaaaaaaccgttaaaacctgcttcattaagagcatggttatctgggcttaaaattgccagcacgacagactaa

SEQ ID NO: 41593 - DNA, 768 bp, Acinetobacter baumannii
atgaatatttctgataacaccccacaagggcaactctcgtctcaacaattttatcgtcaatacagcgccaatgccctacttcctgagttagattggcaaagtatttttccgcatagcaagcttagcgaagcacatatcaaagcactcaatactatttatcagtgtgctgtacctctcgcacttaatgtatttcatgatctaaattttgatgtatttgcgcctgctgcctatcatccgcaaggcttaggtttatttgataaattagcccaacaagaagagaacttcttaaaagttcttactgctgaaagtgaaaatcttgatcatgaaacacgtcatcaaatctggagcatgcttctacgcggtggtgctgttctggttttcaaggcttggcttggtcatgtcaaactcggagaaaaccagttagatatgactcagttcgatgagctttctgacttactgtttattaagacacctccacatcaacttgctgaacgtttgcatgtagatgaaaaagcaaaacttgaccatatcttcttaatgtatggcaatgatattttccttgatcggttcaatagcctagaaaccgcagctctctttgttgatttaggtgtttatgatgcggctttcttaagcttgcgtgatgaccgcgtggctgaatatttaaaaagcaaaggctatgtgacccaagaacaaattgatgatttgcaatgtgcgcttaacccactgtactgcgacagcctaacacctaagcaagattgccttgcctaa

SEQ ID NO: 41594 - DNA, 651 bp, Acinetobacter baumannii
atgaatattttaatcgttgatgatcatcctttgtttcgtcatgctttgattcaagcagtacgttatagcctgccgcaggcacaaattcatgaaacagcttcggttgatgagttttatgagcgtttggaaaatggggcagaacctgatctggtattacttgatttaaacttaccgggtgcttcaggcttttcggctctggtctatgtaagagcacaatatccatctattcctattattgtggtttctgcacacgaagaagcgtcaattattcaacgtgcaattgcgcatggtgcaatgggttatattcctaaatcggctcatccaagtcatattggtgaagcaatccgtcaagtgttagatggggaaatttggttaccgccaaacttgccatcaaatattaatcttgacccgagagcggcagatgaaactgctttggctgaacgtattcagtcgttaacgcctcagcaattccgagttttgatgatggttgcagaaggtttattaaataaacaaattgcttatgaactcgatgtttcagaggctaccattaaagcgcatgtaacggctatttttagaaaactaggcgtacaaaatcgtacacaggctgtattggcaattagtgcattaaatattgaagataaaaaaatctaa

SEQ ID NO: 41595 - DNA, 738 bp, Acinetobacter baumannii
atgactggtatcgcatcatcaaaacccttaaatattgttgctgtttctggtggtttgaatacgccatctaaaaccgaaagtctggttcaggccattcttgatgagttatctgaagcaattgatattaaagttcactttattaaattgagtgaaatcgggcccttattaggcggcgcattttatcgcaaccagcttccacagcgcgtacaagatgaccttgcagcggttgaagcagcagatgccttaattgttggtacgcctgtttaccgtgcttcttttacaggccttttcaaacacttttttgacttcgttgaacaaactgcattagtagatgtacctgtacttttagctgcatcaggcggtagtgatcgtcatgcactcgtacttgagcatcagcttcgcccattgtttagcttctttcaggcgcaaactttaccaattggcgtatacgcaacagatcgcgactttactcctgaatatacggtgaaaagtgaacagttatctgaccgtattacgctagccgtagcgcgtgcattgccaattttagaatgggcgccagcgaaaggtaaacgtgctgaagtggttaaacctaaatctcagcaagcgaatcaagagctcggtattaacaagcaaattgagcaagaagaagtattgccttcagcagctgtaccaaatctcgatgcagcagaatctcgtttgcatcataaggccggtaaatcattaacgcatgttgcctaa

SEQ ID NO: 41596 - DNA, 1113 bp, Acinetobacter baumannii
atgacgcaattacaacaaccaattaaatttgcttattgggtaccaaatgtaagcggtggccttgtcgtaagtaacatcgaacagcgtacagactggagttatgactacaatgttcgacttgcacaggcagccgaaaacaatggttttgaatatgcgctcacccaaattcgttttacggcgggctatggggcagaaaaccagcatgaatctgtgagtttcagtcatgcattacttgcaaaaactgagaaacttaaagtgattgcggctattctgcccggcccttggaaaccagcacttgcagctaaacaactcgcgacgattgattatctaactcaaggccgtattgccattaatgtggtaagtggctggttcagaggtgagtttgatgctattggcgaagaatggcccgagcatgatgagcgttatgttcgctctgaagaatttattcgcacgttaaaaggaatctggaccacagataactatagtttcgatggtaagtattaccaattccagaactacacacttaagccaaaacctctgcaaaaaccacatattgaagtctttcaaggtggtagttcacgtgccgcacgtgacatggcctctcgagtgtctgactggtatttcaccaatggtaatactgtagaagaaattcaaaaacagatcgaagatattcgtactaaagcaaaagccaataaccatcaagttaaaattggggtgaacgctttcattattgctcgagataccgaagaagaagctaaagcagtacttcaagaaattattgataaagccaacactgaagcagtcaacgcgtttggcgatgcaactcgtgaagcgggtgctgcttcaccagaacaagaaggcaactgggcaaaatcaacttttgaagatttagttcaatataacgatggttttaaaaccaatctaattggtacacctcagcaaattgcagagcggattgtggcgcttaaaaatgtaggtgtcgacttggttctttcaggtttcttacactttattgaagaggtggaatactttggtgaaaaagttctgccactcgttcgtcagttagaactacaacaggaaaaggaggtagaaattcaagctaaatcagcctaa

SEQ ID NO: 41597 - DNA, 414 bp, Acinetobacter baumannii
atgaatattgaattagaccctattgatctaaaaattattgcattgcttaagcaagattctcgcttaacaaataaagaaattgggcagcgtgtccatcggacaggacaggcagtaggtgctcgaattgctcagttaatggatgcaggtgttattaaaaattacaccattgccgtgcaatacaggcataaacaatttattcatttgcatttaaatgaactgcgctcctttgaagaaattgaaaatttagtaaagcaatatgaacaaatcgatgagtgctttaaggttatgggtaatgcgtgttatatgatcgttagtcatttcgaaccagcagaactcaatgcttttattgaagtcctctcaaaatggtgtcgttactcagttgaaactgttattcgagaagtagagaaagcttaa

SEQ ID NO: 41598 - DNA, 543 bp, Acinetobacter baumannii
atgaaacaagcactattagttatcgatgtacaaaatgattattttaaaaatggcaaaatggaattggttggaccagatcaagcgctcgataaaataaaacagctcgagcaatattttaatgaaaaagatttaccaattatttatgtgcaacatattaacccgccacaagccagcttctttcaagaaaatactgaaggtgtgttacttcatccaaaactcagtgctggcagtgattcattaatcgtgacaaagcattatccaaacagttttttagaaaccaatttaaaagaacttttaaaagcacatcaaattgaacaactcgtgatcacaggcatgatgacacatatttgtattgattctggcacacgtgcagccaaagagttaggttatcaacccatcttaattggagatgccactgcgacccgtgatttaaaccataacggaaaaactgttaaagccgaagatgtacaaactgcttttttagctgctcttggtatgtttgcaagcgtacaaaatactgctgactttctagcaaaatcttaa

SEQ ID NO: 41599 - DNA, 1950 bp, Acinetobacter baumannii
atgaatgagatctatccagtaccagaggaatttaaaaaaactgctcgtactgttgaagcagactactttaaacgttatcaacactctatcgagaacccagatgaattctgggcagagcaagctaaaattgtcgattggataaagccatttacccaagttaaaaataccagttttgacaaagacaatttcaagattgaatggtttgctgatggtgagttgaacgtatcagcaaactgcttggacaggcatcttaaagaacaccctcacaaacctgcaattatttgggaaggtgatcatccttctcgtcataaaatcgtttcttataaagaattacacgacgaagtctgccgtttcgccaacgttttaaagaaatatggcattggtaaaggtgaccgcgttgtgctgtatatgccaatggtgactgaggctgcaattgccatgttagcctgtgcccgtattggtgcggtgcactgcgtggtatttggtggtttctcaccagactcgttggcgagtcgtattgaagatagccaagctaaacttgtgattacggctgactcaagcctacgtgccggtaagttgttaccacttaaagaaaatgttgatttggctctagcattgccgggcacagagtgcgttgaaaacgtgattgtggtttaccgtaatgcaaacccaatcgagatgaagccgggtcgtgatttgtggtatcaccttattattatggaggtggatgcaaactgtcctccagaaccaatgaaggccgaagaccctttatttattctttatacctctggctcgacgggtaaacctaaaggagtattgcatactacaggtggttatctggtgtatgtggcgagtacctttaaagaagtttttgatttaaaacaagatgatgtgtactggtgtaccgctgatgtcggctggattacaggccatagttatctaatctatgggccactggcaaatggtacgacgaccttaatgttcgaaggtgtgcctcagtatccaacatgggcacgtcttggtcatgtggtcgataaacataaagtctctattttatatacagcgccaaccgcgattcgtgccatgatgcgagaaggtgattcgtatgtacgcgaaagtaaccgtagtagtttgcgtttgttaggttcagtgggtgaacctattaacccagaggcttggaactggtattacaacgttgttggtgaaggccgctgtccaattgttgatacatggtggcaaaccgaaacaggtggtattttgattgcaccattaccgggggcaacagctttaaaaccaggttcggcaacgcgtcctttatttggtatccaaccagctattgtagatggtgaaggcaatgaactagaaggcgctgccgaaggtaaccttgtgattaaagattcatggccgggccagatgcgtaccatttggggtgacccagatcgctttattgaagcttacttctcgacctttaaaaatacttattttacaggtgatggcgcccgccgtgatgaagatggctattactggatcacaggccgtgttgacgatgtcttaaacgtttcaggccatcgtctaggtacggctgaaattgaaagtgctcttgtatcgcatgaatcggtggcagaggctgctgttgtaggtatgccgcatgatattaaagggcagggtatttgtacttttgtgaccttgcatgcgggagttcccgagtcggaagaactgcgaaaagagttaattagttgggtacgtaaagtacttggaccagtggcttcaccagatgcattgcactgggcacctgcattacctaaaacccgttcgggtaaaatcatgcgccgtattttaagaaaaattgcagcgaatgaactggatagtttgggcgatacctcaaccctagctgaaccggcagtggtggatcaactgattgcgacagtttatcctgatagacaaaaataa

SEQ ID NO: 41600 - DNA, 576 bp, Acinetobacter baumannii
atgtttgccgaaactccctcttcacgtccacctcaactcccgtttaaagacagccctttttcaattcatggccgctttaaccgaatgagttatttaggtggatatggcctgatttatttagtcacaatcgtgggctattttatactggcttcgtttcttggaagttttcagctttcaagtgatctatttaattttgagttttacagctctctctccggtataagtgctttaatggtctgggctttctggctatttctgatctatctcaacattattttggtcgttcgacgcctacatgatttaaataaaagtggctggatgggactactgttatttattccagtcgttcagttcttttttatgctttatttactgcttgcttctggtacagcgggcactaatcaatatggtcccgttcggccttcaacgtttatagaaaaactgatggcttggcttattttaatcgctattttaattagccttatttctacagcaggctttttttactacttctctggtaccgatactattcaaaccccgacacaaatcttacaaaaaggaacggaatacttttaa

SEQ ID NO: 41601 - DNA, 981 bp, Acinetobacter baumannii
gtggctgatgaacaaaaatccttaacggatgttgcaaaaaatacaggcgaacttttgcaagaagcaggtactaaaaccactcaaacagttttagcgcataccgagaaataccatgatgcctataccactatcgacaaaatcgtagatagtttttgggaacgtgtaccttatatctgcattgcaattgttgtttttcttattttttggctactgaccaaattatttaagttctttgttcgtaagactttagaaaatcgctcttatactcgtcaaaatctagttttagttttaaaccgtgtcggtagtacagcgatcttgttctttggtttcttaatagcccttgtcattatgattccagggttcacaccaggccagctcatgagtgcgctaggtatcggttcggtcgccattggttttgcatttaaagatatttttcaaaacctgctttcaggtattttgattttattgagcgagccattccgtattggcgattcaattgtggtgaattcacttgaaggaactgtagaagacatccagatccgtgcaaccttcctacgctcaccggatggtcgccgtattgttattccaaatgcaacggtttatacaagtgccttaactgttaatactgcttatcaacaacgacgctgcgagtttgtagtcggaattggctatgacgatgatgagcaaaaagcaaaacagattattttagatattctcaacaatgaccgaaatgtactgagtcagcctgcgttttcggttaatgtcacagctttagcagatttctcggttaacctgactgtacgctggtgggttgataccactgaaactgatatttcttcatctattagtaatattcaagctcaagtaaaacaagctttcaatgaaaatgatattgatattccttacccaattcaggaattaaaaatggtatctaatccaccagctttaaaccctgaaacatcagctaaacaaacgacctaa

SEQ ID NO: 41602 - DNA, 708 bp, Acinetobacter baumannii
atgaatattgttttactagagtctgaagatgttcaatcggatacatggtctatccattcaaaacgtcaattacaacatttgcatgaacatcttgatattacagtcggccagaacctgaaagttggtattcgcaacggcgcccgttatatcactgaaattgtttcaatgaatgagcatgaagtccgtatacggcctattcgtgaagaaccactaccagcaaaacttccggttcatttaattgtagctttaccaagacctaaagttttacgccgtctaattatggacagtgtgactttaggtgttgagaagataagcctgattcatagttatcgtgttgataaaagctattggcaaacaccttttttacagcaagtagacaactacgttacgctgggacttgagcaagcaggcgatacaattgttcctgaaattcaactctataaacgctttaaaccttttgttgaagacatcttgccaaacttaattacgcaggaaacacctgcctatgtggctcatccttatgctgagcaacgtatgccaattaatattagccatgcttgtagtgtagtggtcgggccggaagggggatttattccttacgaagtagatttgctcataaaaaacggctgccaagctatgagcttaggcaaccgtattttaagaaccgaaacgtctatttcttatattttaggtcgtttgtttagctga

SEQ ID NO: 41603 - DNA, 1293 bp, Acinetobacter baumannii
ttggcgaccccattttggtacaacaccgcacttcatttattaaaaccgttttatcgttggcggataaaaagacgtgcacaaagtctagaattatatcagcaggaatgtctggaaagatttgggccgtttgaagcaccgaagaatgtaaaagcgatctggtttcatgctgtttcagtcggggaaaccaatgctgcacagcctttaattgagtattatctaaaacttgggcagccagtcttagtgaccaataccacgaaaacaggtcaggctcgtgccaagtcactttttctaaaagaaccttatttagatttatttcaagccgtttatttgcctatagaccagaagcctcttttaaaaaaattttttgagttatatcagccaaagcttttagcgctggttgaaactgaactctggccaaatttaatcgatcaagccaagttacagcatgtaccttgtttgctgcttaatgctcggttgtcagaaaaatctgcaaaaggatatggtaaagtctcgggtttaaccgcaggtatgttaaaacagctggactgggtgttagcgcaagatagtgcaactcgtcagcgttatgttgagcttggtttagacgaacacaaaagtcaggtcgttggtaatattaaatttgatatccatgcaccagaggcttttattaaacaagctgcccaattgcatcagcagtggtatctggaaaatcggcaggttgtgacgattgccagtacacatgcacccgaagaacaacaaattttggaagcactcgcaccttatttaaattcagatcgtaagttggtgtgtattgtggtgcctcgtcatcctgagcgtttcgatgaagtatttgaaatttgccaaaatttaaatttaattacgcatcgtagaagtatgggccaaagtattcatgccagcacgcaagtttatctcgctgacagtatgggtgagctctggttatggtatgccttaagtcaggtgtgttttgtaggcggttctttaaatgagccgggtggtgggcataatattttagaacctatggttttaaatgtacctactgtagttggaccgcgttattttaactttcaaacgattgtcgatgagttcattgatgaaaatgctgtgcttattgctcaagatgcacagcaggtcgttgatatctggttagcatgtctggcagaacctgaggcgactgaacagttagtggcacaggcgcataaagtgttgcaacgtaatcaaggttccttacaaaaacatatcggggtgattaatcgctatctggccgaaaaatcatga

SEQ ID NO: 41604 - DNA, 1059 bp, Acinetobacter baumannii
atggctgaactcaatactcccttaacagttggtgattttgaaattaaaaatcgactggtaatggccccattaacacgtgcgcgtagtggcgaaagccgtgttccaaacgatttaatggtgaaatattatcagcaacgtgcaaatgccggtctcattctcactgaagcaacagtgattggttcaaaaaccgtaggttatgcagatactccgggactatggtcacaagagcaagcacaagcatggaataagattattgaagcagttcatgctcaaggttcaaaaattgtagttcaactgtggcatgtgggtcgtatttcacatccagagcttttagatggtgatattcctgttgcaccgagtgcgattcaacctgcgggtgaagtaagtttattacgccctaaacgtccatatgtaacgccacgtgcgctttcaattgaagaaattcaggaaattgttgctcaatataagcattcagctgaattggctaaagcagcaggttttgatggcgttgagttacatgcagcaaatggttatttaattgaccagttccttcaaagtaatactaaccagcgtgatgatgaatatggtggtccggttgaaaaccgagctcgtttgttattagaagtagttgatgcctttattgaagtgtggggagctggccgagtaggtgtgcatattgcaccgcgtggcgactcgcatgatatgggtgatgaaaacccgctagcgacatttggttatgtggttgaacaactcagccaacgtaatgtggctttcattttctctcgtgaatatgaagcagctgatagtattagcccacaattacgtaaaaaatttaatggtgtatggattgccaatgaaaatctgacaccagagtcagcaaaacgtatcttgcgtgaaggtcaagcagatgctgtatcttttggtaaagcatatatcgctaatccagatcttttacagcgtttagaacaaggcttaccattaaatgaacttcaaccaacgactttatatgctaaaggcgctgaaggatatacagactatccggctttagaagcttcataa

SEQ ID NO: 41605 - DNA, 303 bp, Acinetobacter baumannii
atggatattgatgcaattagcaaagccctagccaatcctctgcgtcggcagattctgcaatggttaaaagagccggagcattatttaccagtagaagagtgtggtggtagttttgaaaaaggggtttgcgcaggtcatattgaacgtttgggtaaagtagctcagtctacgatgtccaatcatttgtctgtattacagcaggcgggtctcattcaggtccaaaaatatggacaatggtcttatttttcacgtaacgaagctttgattcagcaatatatcgaacatttaaaacaaacactttaa

SEQ ID NO: 41606 - DNA, 933 bp, Acinetobacter baumannii
atggcgaaagaaaagggcgaactagaaaacgttattaatgtattagatggcttatctacacagcttgaagatgcaaaagcaatgttggatttggctgtagaagctgatgatgaaagcttgcttgaagatgttcagtctgaactgagtactgctgaagaagaattagcaaaacttgaattccgccgtatgtttagcaatccaatggacccgaatccttgctatgtcgagattcaggcgggttcaggtggtacagaagcacaagattgggcttcaatgctattacgtatgtatatgcgctggattgaacgtcatggttttaaagcagaacttatggaagtgtctgacggtgatgtggctggtatcaaatctgcaacgattcgtgttgaaggtgaatatgcgtatggttggttacgtacagaatctggtgtacaccgtttagtacgtaaatcaccatttgacagtggtaaccgtcgtcatacttctttctctgcggtatttatttctccagaagtcgatgacaatatcgaaattgatattaatccttcagatgttcgtactgatacttaccgtgcatctggtgcaggtggtcagcacattaacaaaaccgattcggcagtacgtttgacgcatattccgactggtattgtagtggcatgtcagaaccagcgttcacagcatgcgaaccgtgatcatgcatggaaacagttacgtgcaaaattgtatgaattagaaatgcaaaaacgtaatgaagccgctcaagcacttgaagactcgaagtctgatattggttggggtagccaaattcgttcttatgtacttgatgactctcgaatcaaggatttacgtacgggtgttgaaaattcaaatactggtgcggttcttgatggtgaccttgatcgttttattgaagcgagtttaaaacaggggttataa

SEQ ID NO: 41607 - DNA, 858 bp, Acinetobacter baumannii
atgaaaaaatcaaaatttttgtttgcaatattcacagctgtatctgctttcaatgcaaatgcctatcaaactgaagttggtactatgtatgaatttacagatatggatgggggagaagttaatagctttggaattaatggcaaatattattttaatccagttgaaaccaaaaattatcctttagctgaagcagcatttttaaataaagcctccaatattggtgctggttatacgtatagtaaagtagaagatgatcaagactatgcaaaacttgaatataattctgtaggaatagttggagaatattttgtcccaaatactccactctacttatctggagcatttaaccgaacaaaaagagaagttactgtagatgatcttggatcagtcaatgataacggtaatggttatgctgtagaagtcggttttctaccaacagatggcttattattggctgctggcgtaactgatttatctgaaagttttgatccagtacaagcatctaaatatggctttattacttctttcgcaaatgctacgaccgtaactggtgaggatgatgatacagctgtaactctacgcgctaagtacattactcaaatttctggcttttatactaattttgaaggacaaacttatattggtgatgaaacgacttatcgtttgggcgcagatctctatcttgatcctactttaagtattggagcatctttcgcagattcaacggcagaagattcagatacgatctttagtcttcgcgcacaaaaattctttacacctcaagtagcagtaggcctaacttatacaactgttgatgatgctaactcttttggtattaacggaacattccgcttctaa

SEQ ID NO: 41608 - DNA, 768 bp, Acinetobacter baumannii
atgaaaaaactagcaattgcatcagctcttttatctgctcttgcagtaagtggcgcagcaaacgcttaccaagctgaagttggtggttcttacaattatcttgatccagataacggcagcagcgtaagcaaattcggtgttgatgggacttattatttcaaccctgttcaaacacgtaatgcaccgcttgcagaagcagcattcttaaaccgtgcaagtaacgttaacgcacatgttaactatggcgataacagcggcacaaaagacactcaatatggcgtaggcgttgagtacttcgttcctaactctgacttttaccttagcggtgatgtaggcagaaacgaacgtgaaatcgacaacactaatatcgacagtaaagtgactacttatgctgcagaagtaggttatttaccagctcctggtttattacttgctctaggtgttaaaggttacgacgagaaagacggtaaagacggtgcagatcctaccgttcgtgctaagtatgtaactcaagttggtcaacatgacgtaaaccttgaagcttatggtgcgtttggtgaccttgacgaatataaagttcgcggtgactactacatcgataaaactttaagtttaggtgtggactactacaataacgacttaactgataaagatgaatttggtatcaatgctaaaaaattcttaaatcagcaagtaagtgttgaaggtcgtgttggattcggtgataacgacaacacttatggtgttcgtgcagcataccgcttctaa

SEQ ID NO: 41609 - DNA, 1701 bp, Acinetobacter baumannii
atgacaaaaatacaaattaaacaaagacctttattgacacgccctgaacagtttcagggcgtgcctccgtttattgccgaaattttggcaagacggggcgtacaatccgagcaagaactagagttaaagcttaagaatttattggctcctgaactcaaggggttggacgctgctgtagcattaatggatcaagccatcgatgagcagaaaaaaatagttattgtgggggactatgatgctgatggcgcaaccagcactgctttaatgatgctcgtgcttcgcgatatgggagcacaagtcgactatttggtaccggatcgtttcaaatatggctatggtcttactcctgccattgctgagcttgctcatcacacctatcaacccgatctattaattacagtagataatggaatttctagccatgctggtgttgatgcagcacatgctctaggcatgcaagtgattattactgatcatcacttaacgaccaaagaaaccccacttgctgaggcggtggtaaacccaaaccaattaggatgtgagtttccaagtaaggcacttgccggtgttggcgttgctttttatgtacttgccaatttggcgagtctacgcaatagacagggtaaaagcacaagtaaagtgactcaatatttagatttagtcgctttgggaacttatgccgatgttgctgttttggattataacaaccgtattttgattgatgccggtgtaaaacgtattcagcaacatcagtgtcgagtgggaatcttagccttactcgatatcgctggtcgggaagttacttcaatacgtgctcaagatttaggttttgtgctcggaccgcgcattaatgctgctggacgtatggagagtatgcgtattgggatcgagtgtttattagctgatacgatggaaactgcataccccattgctcagcaattaaatcagttaaatatcgatcgccgtcaaattgaaggggagatgaagcaacaagctttatctgctttagacagtttacaactctcacaacaagatattcccgcggcgcttgttctgtttgaagaaaactggcaccaaggtgtcatcgggattgtcgcgggacgtttaaaagaacagtttcatcgcccaacgattgtgtttgctccagatgaagatggtattcatattaaaggctcagcacgttccattgatggggtgcatattcgagataccattgaacaagttgccgaacaacatcctgagctggtgagtcattttggtggacatgcggcagcggcaggcttaacgattcgtaaagaaaactttgaagcttttaaaaccgtatttaatgattgtgtagctgctatggatgaatcaatctttcaagcgacattatggaccgatggtgagctacctgtctctgctttgcaattagataccttaaactggattgagcaattaggtccgtggggacaaaaatttccactgcctcaatttgaaggatattttaaagttatcgattttcgttggctcaaagagacacatttaaagcttagattagcgatagaccaatatagtttcgatgctattgcttttaatgcagcaggtcgcttcgagtttgatccgatgcgtgaccatgtgcatttggtttatgaaatagaccgtaatgtctttaatggtaatgtgagcttacagctacgcattgtgcatttaaatcaataa

SEQ ID NO: 41610 - DNA, 657 bp, Acinetobacter baumannii
atgagtgatgtcattaaagacttaagtgaattgcgcttaagctatgaacaaggcgagttgtacgagactcaagttgctagcaatccccacgaacaatttctaggttggtttaatcatgccttagcagctaacttgcatgaaccgtatgcaatgtcattagcaactgcgagtgctagtggtcgtccgcatgtcagaactgtgttgttacgcggtgcgacagaagcgggctatgatttctataccaactatgacagccagaaaggtatagatttggcagaaaatccatatgctgaattgttattttattggccaagtctagagcgtcaggtacgagtaggtgggcatgttgtaaaaattcctgaacaggaatctacagactactatcataaacgtccacgtgatagccagatcgcagctcatatcagtaccccccaaagtggcaaaattgaaagtcgcgagttgttacaacagcgttttcaagacttgcaacaacaagttcaaagccgtgaagtactcgataagccggagttctggggcggataccgtctacagccggattattatgagttctggcaagggcgaccaaatcgtttacatgaccgcttgagttatgaaaaaatcgacggtcaatggacgttgcaccgactgatgccttaa

SEQ ID NO: 41611 - DNA, 1338 bp, Acinetobacter baumannii
atgagttattttggaacggatggtattcgtggaaaatttgggcaaatgccgattacgccagagtttgctttaaaactcggttttgctgcagggaaggtattaaaacgaacgagtccgaaaaataaaccacttgttgtattaggaaaagatactcgtttatccggttatattttagagtctgctttgcaggcgggattaaatgctgctggtgtatatgttcacttacttggaccattaccgacaccggcaattgcacatcttacccgtgccttacatgcacatgcagggattgttatttctgcatcacataacccatattttgataacgggattaagttcttctcaagtgaaggtaaaaaattaccagattcattgcaggaagaaattaataaagaattagaaaaagatttatttatcgaagatactgcaaacttaggtaaaagtgttcgtgtgaccgatgcaaatggtcgttatattgaattttgtaaatctacattcccatatcattttgatttaaataatttaaaaattgttgtggattgtgctcacggcgctgcttacagcgttggcccttcggttttccgtgaactcggcgctaaagttgtcgctttatacaatgagccagatggtttaaatattaatgaaaactgtggttcaactcatccagagaacttacaaaaagcggttgtggaacatggggctgacttaggtattgcctttgatggtgatgctgaccgtgtagtgatggttgataagttcggtaacttaattgacggtgaccacatcttatatattttagcgactcaggcaaaaaacaagccagcaggtgttgttggtacagtaatgagtaacatggcacttgaagttgcgcttgaaaaagcaaatgttggctttgtccgtgcaaaagtcggtgaccgttatgtgttacaagccctagaagaaaacggatgggtaacaggtggtgagccttctggtcatattctgactttagacaagagcacaacaggtgatgcgattattgcagcattacaagtgttaaccgtgatggttgagcagaacaaagcgctgcacgaattggttaacggctttaaactgtacccacaagttcttgtaaatgtacgtttggaacaaatgcttgatccatattctattcctgcattagttgctgagtttaataaagctgaagagcagctcaaaggacgtggacgtattttaattcgtaagtctggaactgagccagtcattcgtgtcatggttgaaggtgataacgagcaagaagtgaaaactttagctgaacatttagcaaatgcagttcgttcacaggcacaagtcgcataa

SEQ ID NO: 41612 - DNA, 1467 bp, Acinetobacter baumannii
atgctgaccatcgttcaagaagcgctaaccttcgatgatgtcttattacttcctgcctactctactgttctcccaaaagatgtctctctaaagacacgtttaactcgcggcatttatttaaatatcccattagtttcagctgcaatggatacagtgactgagtcacgtatggcgattgcaatggcgcaaaatggtggtatcgggattttgcacaaaaacatggatattgctgctcaagctgcagaagtacgccgtgtgaaaaaattcgaagcgggtatggtgaaagaccctatcactgtaagccctgaaactacagtacgtgaactgattgcaattacctctgctaataacattagtggtgtacctgttgttaaagacggcaaggttgttggtattgtgacaggccgtgatacgcgttttgaaaccaatttagaacaacctgttagcaacatcatgacaggccaagatcgtttagtcactgtacgtgaaggcgagtctaaagaaaatattcaagcattattgcaaaaacaccgtattgaaaaagtcttggtcgttggcgagagcaacgaacttaaaggcttaattacagtgactgacttccgcaaagctgagagttatccaaacagttgtaaagatgatcttggtcgtttacgtgttggtgctgcggtaggtacaggtgctgatacaccaagtcgtgtggaagcattggttgaagctggtgttgacgtcattgttgttgatacagcacatggccactctgctggtgtaattgaacgtgtacgttgggtgaaacaaaacttccctcaagtacaagtgattggtggcaacattgcaactggtgatgctgcattagcattattagatgcaggtgcagatgctgtaaaagtaggtattggtcctggttctatctgtacaacacgtattgtggctggtatcggtatgccacaaatttctgcaattgacagcgttgctagtgcactaaaagatcaaattcctttaattgcagatggcggtatccgcttctctggcgatatggcaaaagcgatcggtgcgggtgcaagtacgatcatggttggttcattacttgcaggtactgaagaagcgccgggcgaagttgagtttttccaaggtcgttactacaaagcatatcgtggtatgggttcattaggtgcaatggcgggagcaactggttctgctgaccgttatttccaagattcaaaagcgggtgctgagaagttagtaccagaaggaatcgaaggccgcgttccatataaaggcccaatgggtaacatcgttcatcaaatgatgggtggtttacgttcatcgatgggttacacaggttcagctgtgattgaagatcttcgccaaaatgcgaaatttgtgaaaattacttcagcaggcatgtctgagtcacatgttcatgatgtaacgattactaaagaagctccgaactatcgtgttggttag

SEQ ID NO: 41613 - DNA, 270 bp, Acinetobacter baumannii
atggaagaacatctagttgaacctttgacacctgtctattcatgtatgcgtggaactaatcagcttgagccccgatgtcaggctttgacgggtgaaattggtaaagaggtgggttgttccatctatgcagtgcgtagttctacctgtagagaagtgcagattgctgatgagcagtgtaataaagctcgtttagcgcaccagcttattcctcttattcaagttagcccggcagattcagagaatgatcacgactatgatcaggtgagttaa

SEQ ID NO: 41614 - DNA, 798 bp, Acinetobacter baumannii
atggggtttgaaaaaacaacatcacagatattatttgataatggcgtacacaaatgtattagttttaccagtttggtcaaaggggaaggcatacaagccaatcaatttttaattattgatcatgagcgtgctgccgtgatcgacccaggtggtgatttgacctatgttccgctgacaatggaacttaataaatatacgcgccttaaaaatcttgattatgtgatggcttcgcatcaggatccagacattatcacctcaatgccccgctggttggtttataccgatgctaaagtggtggcctcaaaattatgggcacggtttttacctcacttaaattcatcatttatgagtgagcgtatgaaagggaattgggaagaccgtttgattgagctgcctgatcgtggtcaagtgattcaattaggtgaatcgaaacttgtaattattccagcgcatttcctacattcggtggggaattttcagttttatgatcccgttgctaaaattttgttttcgggcgatatgggagcatccatcgtagatgatgcaagtcagcctctaaaagattttgatagccatgtgatgaaaatgaaagcttttcatcaacgttatatgtgttcaaataaagtcattcgcttatgggtcaacatgattcgtcagatggatattgaaatgattgtccctcagcacggtagtccatttattggtaaagagatgattaatcagtttttagactggattgaaacattgccatgcggtgtggatttaatgacagaacaaatttttagctgtccaacataa

SEQ ID NO: 41615 - DNA, 2157 bp, Acinetobacter baumannii
atgactcaacgctttgctttttcaacttcaaaaactttgttagcagttgctatttttacttcaatgacaacaagtcatgctgaagaactggcagaacagcaaaattcaaccaatgtgttacccactatttctattcaagcacaaaaagaaaatccctcttcttatgtcgcaacaaaagcaaattcagctttaaaatcagatgcacctctatttaaaactgctcaatcagtttctgtcgtcacccgtgaacaacttgaccaaaaacaagcaagaactcttacggatgcgcttgaaggtgttgcaggcgtagaagctgggaaacttggtcgtcgtggttgggacgactttattattcgaggccaaacttcttctgactcggtgtatgtcgatggtttaaggataggccaaaatacttatgttgccaccgaactatctggtatggatcaggtacaaattttaaaaggtcctgcttctattaatttcggtttagttgctccgggtggtatggtcaatttagtgactaaaagaccagaagcagaaagctttgcacgtgctagcatgacttatggtagttacagccttaaagaaggaacattcgatttaaactacagcccaaacaatagtgaaaaaggtgctttccgtttaaatggacgtatctctgatcaagatgatccaaccgattatgtttattttaaaaatttttatatctcgccttcttataattttgacctcggtgataacactgacctctctgtaatcgcaagctatcaacaccgtgaatatattcgtcagcaaggtttacctgtaattggtacattaaaaggcaaccctaacggacctatagatcgtagtttatatattggcgatcctaatttcggtaaatatgaggcagatgtttatcgcactggttatacgtttaaacatacttttgataatggctggaactttaaccagaattttgccgtacaaaaaactgaaatggatggcaaagcagtctttgctcgtacaggtagtaacttttgggcaaaagataaacaaggtgaaattgattacacgactatcagccgtaaaaataacagccgacaccaagttattgataacttaagcttcgccatcgataaccgtttaaataaacaatttgatctatatggcatgcagcatgacgttaatattggagtcgatgcttttcaagaaaaaagtgactacaccaatgataaatatgatattggtgatttaaatatctataaccctatctatggtcagaacgtgacattgaagcaaaatgtacgtgatatcaaccgtctcaaatatctagggctctatttacgcgaccgtattcagcttaatgatcaattacttttaagcttatcaggacgtcaagattgggcacaaaccaaaactacaagtttagtaactggcaatgcgagtaaacaatcagataatacatttacgggcagtgcttctgtcatgtataccctcaatgacattgtggcaccttatgtgagctacgctacatcatttactccaaataatggtactgacgtaaatagcaacccatttaagccagaaaaaggaaagcaggttgaggtcgggatgaaattacaaagtctcgatcaacgaattcaaggtgctatcgcttggtatgatctaaaacgtcagaatgttttggttactgatactgcgaatagtggctataaagtacaacgtggtgaacagttaactcgcggtattgaaactgaacttagtgcagaaattttagaaggtttaaaattaacggctgcatatacctacacaattgatgcagaaattagtaaagatgcaaatgcaagcaatgtagggaaagcgctcgacaatattcctgaacacgcttatagcttgtcagctcgttacaaatttgatccatcatcaaaacttggttggtatgtaggtggtggtttccgaggtgaaacttataaaaccgttgatggtttagatgtgcatgttccaggctatacagtattcgataccgaagcgggttatgatgctgagcgttggggtgcccaacttgcgatccgtaatctatttgataaagattactatgcgggagctctcaacgaaaatttggtaacactcggcaacccacgccaaattaactttaccgtgaaatttaattattaa

SEQ ID NO: 41616 - DNA, 576 bp, Acinetobacter baumannii
atgcaagaatttctgatttctacctcgattgttgccctcgctgaaatgggcgataaaactcaattgttggcacttttattatctgctcgttttcgtaagccaatccctattttaatcgcgattcttttagcaactttaattaaccatggtatttctgctgtgcttgggcagtggattacaacagttttaagcactgaaattttagtctgggtacttgcagttggtttcattggtatggcgttctggatgcttattccagatgagcttgatgatgaaacagcgagtattaataaatggcaaaagtttggcgtttttggcgcaacctttattttatttttcttggcggaaattggcgataagactcaaattgcaacagtcgctttagctgcacgttatgacagcattttctgggtaatgttaggcacaactttaggaatgatgattgccaacgcacctgctgtatttattggcaataagttggctgaacgtttgtctattgcgctcattcataaaattggtgctgctattttcttcattgtaggtgtttctacgctcgtacagcattacttcttttaa

SEQ ID NO: 41617 - DNA, 273 bp, Acinetobacter baumannii
atgttgggttttctgaaaattatgttgcccttgttgttggttgtatttttattgatgggaatatgggtcagtattttgcacttcccttgggagtggatgacttatgttgtcatggggattgaagtgtttgtcgctactctgattttaccccttgaatatcaaactggaacaagtagcagccatattggttttatcagtataagtgcttgtcttgcagtactgttaggaatagcccgtttattcgtgtggacatgggtaaaattttttgcctga

SEQ ID NO: 41618 - DNA, 1983 bp, Acinetobacter baumannii
atgcaaattaagacccctgatattggtgtagataaagcaaatgtcgctgaaattttagtaaaagttggcgaccgtgttgaagttgacgacagtatcgttgtgcttgagtctgataaagcaactgttgaagtgcctagcacttcagcaggtgtcgtaaaaagtatcttgattaatcaaggtgatgatgtgactgaaggtgttgctttgattgagatcgaagcagaaggtgcggcacaaccagcaccggaaccaacaccagctcctgcggctgaaaagccagctgctccagcacctgcgcaacaaactcaagcttcagctcaacctgctgtcgctacatcaagtgcaactgttgaagtgactgtacctgacatcggtgttgaaaaagcattggttggtgaaatcctcgttaaagtgggtgaccagatcgatgttgaacaaagtattgtggttgtagagtcggataaagcaactgtagaagttccaagtagtgttgctggtactgtagaaagtattcaagtgaaagaaggcgataccgttaaagaaggtgttgttcttattcaagtgaaaacagcagctgcatctaatgcgcaagcagaagctcctgctactacaccagctccagctgcggtagcagaaccggttgctgcaaagcaagaaactgtggcagcggctccagctcagtctggttcagttgatatcaatgttcctgatttgggtgtagataaagctgttgttgctgaaatcttggttcaagttggtgataaagttgatgtagaccaaagccttgttgttgttgagtcagataaagcaactgtagaagttccaagtaccgttgctggtgttgtaaaagcaattcacttgcaagcaggccaacaagtttcacaaggtatattgcttgcaacaattgaagctgaaggccaagcacctgctgctgcaccagcggcaaaagcagaagcagccccagctccacaggcagcagcacctaaagcagccgctcctgttgcaactcagtctgcacctgcggcgtctacatctggtactgataagttaacgaaagagcaagaagcagaaaacgctaaagtgtatgctggtcctgctgttcgtaagctggctcgtgaacttggtgtgatcttgtcacaagttaaaacttctggtgagcatggccgtgttgttaaagaagatatctttgcttatgtgaagagtcgtttaactgcaccgcaagctgcaccagtagctcaagctactgctgctccggctggattgccgtcattacctgactttactgcttttggtggcggtgaagtaaaaccaatgacgcgtttacagcaagtttctgtaccacagttgtctttaaacaactacattccacaagtaactcagtttgaccttgcggatattactgagctagaagcttggcgtggtgagttgaaagacggctttaagaaacaaggtgttagcctaacaattttggcatttattgcaaaagcagtagcacacttgttgaaagaagagccttatttcgcgggtcacttagcagatgatcagaaatctgtattgctccgtaatgaaatccatatgggtattgcggttgcgactccagatggtttgacagtgcctgtattacgtaatcctgaccaaaaatcaattaagcaaattgctgttgaattaggtgagttgagtaaaaaagcgcgtgataagaaattaacaccgaaagatttacaaggtgctaacttcacgatcacaagcttgggctcaattggcggtacagcatttacgccactagttaactggccacaagttgcaattttgggtatttcacctgcaacgatgcagcctgtatggaatggtaaagactttgatccacgcttaatgttgccgttatcattgtcttatgaccaccgtgtaattaatggtgcggatgcagcgcgctttacaaataaacttacgaaacttcttaaagatattcgtactttattaatctaa

SEQ ID NO: 41619 - DNA, 2718 bp, Acinetobacter baumannii
atggcgttttacggtgactccgacgcacaagaaacccaagaatggcaagatgcattcgattcagttttacaacacatgggaactgagcgagcggcattcttgttggaaaaactttaccaacaagcaattgctaagcatgttccagttcaacgtctcaatacaccttacttaaatacaatttctgttgaagagcaacctgcaatgccaggcgaccaagatatggaacgccgtattcgtgcattgattcgttggaatgccttagcaatggtacttcgcgcgaataaaacaggtgatgatttaggtggtcacttggcgagcttcgcatcaagtgcaacattatatgacgtaggttttaaccatttcttccgcgctaacagtgataactttggcggagacatgatttattaccaaggacactgtgctcctggtatttatgcacgttcattccttgaaggacgtttaactgaagaacagttaagtaatttccgccgtgaagttggcggtaacggtttaccaagctatccacatccatatttaatgccagactattggcaattcccaactgtatcaatgggtcttggtccaatcatgtcgatttatcaagcgcacattcaaaaatatttgatgaaccgtggcttgatcaaagaagaagatcgtaaagtttgggcatatctcggtgatggcgagatggatgagccagaaagcttaggtgcgatctcacttgctggtcgtgagaagcttgataacttaatttgggtagttaactgtaacttacagcgtctagatggtcctgtacgtggtaacggtaaaattattcaagaacttgaatcaatcttccgtggcgcaggctggcgtgtcattaaagtagtatggggtcgtcattgggatccattactagctaaagacacaagcggcgcattaaaagcacgtatggaagaagctgttgatggtgactatcagcgttaccaagtaaaaggcggcgcatatacacgcgaaaaattctttggtaagtaccctgaagctgcggaacttgtaaaagatttaagcgatgaagatatcgataatcttaaccgtggtggtcatgacccttacaaagtttttgctgcatatgcagaagcgatgaaagcaaaaggtcaaccaacagtaatcttggcgaaaaccattaaaggttacggtttgtctgaagaaattgaagcggtgaacaaaactcaccaaatcaaaaaaatgcaaatcgactctttaagatatgtacgtgaccgtttcaatcttccattcacagatgagcaattagaagagcttccattctatcgcccaagtgaaaactctccagaaatgaaatatatgaaagcgcgtcgtgaagcgttaggtggttacttaccagcacgtcgtcgtgagagtgaatctttagcgattcctgatttatctgtatttgatgcagtgttgaaaggttcgggtggcaaagagcaatcaaccactatggtgatggttcgtttaattgctgctttacttaaagaaaaagcaattaaagaccgcgtagtgccaatcgttccagatgaagcacgtacttttggtttagaaggtatgttccgtcagcttggtatttatgccgctcatggtcaaaaatatacaccggaagaccaagaacagttaatgcattaccgtgaagcaaaagacggtcacatgttacaagaagggattaacgaagcaggtgcgatgagtgcatgggctgcgttagcgacaagttattcaaccaataacttgccaatgattccaatgtacatgtactactcaatgtttggtttccaacgtattggtgatattgcatgggctgcgggtgacgcacaagctcaaggtttcttgttaggtgcgactgcgggtcgtacaacattgaacggtgaaggcttacagcaccaagacggtcattctcacatcttggcgaacacgattccaaactgcgtatcttatgacccatgttttggttatgagttggctgtcatcgtgcatgacggtttacaacgtatgtatgtgaaccaagagcgtgtgttctattacttaactgtaatgaatgaaaactacgagcatcctgcaatgccagaaggcgttgaagaaggcattaaacgtggtatgtatttattcgagaaagatgaaaaagcaactgttcagttacttggttcaggtgtaatccttcgcgaagtgattaaagctgcgaaaatcttacgtgatgaataccaaatccattcaaacgtttggagtgtaacaagcttcaatgaattggcacgtgatggtatggcatgtgaagaatacaaccgcctacacccacttgctgaagaagttaaagaatcttgggtatctaaacaattacgtggtacggaaggtatcgtagtttctgctaccgaccatatgcgtgcttacagtgaacaaatccgtgcttatcttccagatggtcgcccatttgttgcattgggtacagatggttacggccgttcagatacacgtgcgaacttacgtagtttctttggtgttgatgctgcgcacatcgttgttgctaccttgaaaaaattagctgacgaaggtgaagtagacgcacgtttagtgaaagatgcaatttctaactttgagctagatactgaccgtccggttgcatgggcgccgcaagcacatccggaagttcagccagttgctgaatacaatgaaacgcaaacaggtgaggggaactaa

SEQ ID NO: 41620 - DNA, 693 bp, Acinetobacter baumannii
atgcacacgcgtcgtattttattagcgttttcacttgccgcttcggcagcatcggttgcttttgcagattatcaaaatattaaccaatctactgattcagatcgattggaacagttatcaaaaacactatctcaaggctcatatactcatcctgatgatttagatcttccggcgagtgcaaaagtttcagtgactttacgtgagaaaacagttgaactcaacaatgattcactggcaaagaaatacggcactacgacagctaaaaattcatttaaaacctcttcttcaaatccttattcttggttagtttctcatcctcttcctgatacagtacgtgtttcttctaactttggtggtcgtaccatgggtggtcgtgcagagcatcacggtggtttagatatggctgcaccaagtggtacaccaatctatgcgactggcccgggtattgtgactaaatcaggctggggcacaggttatggccaatatgttgaaattaaccatggtaatggttatttaacacgttacgcacatgcttcacgcttaatggttcgagtaggtgatcaggtttctgctggtgaccatattgctaatgttggttgtacaggccgctgtactggtccacatttacattatgaagtagttaaagatggtcaacgtaagaatccatcaacttacttagcaatgttgccttaa

SEQ ID NO: 41621 - DNA, 441 bp, Acinetobacter baumannii
atgtctaaacccgataacgtttttcaacaaaccggaaaacacataaaaacaggaaaccttacgtttctaacaacgcaagtcgcgcaatggcaaagacttacgaaaataatccaacccttattgccccaaccggaacaatggcaagtcgtgtgttatcaaaatggctctttaattattactggtgaaaatcaggcaatgattagtcaactcagctatttacagagccaatatgtatctaaattatctcaacttgaaggattaaaagacttacaaagaattcaagttcgcttaagaaataaaactattcctgtaacgacctcatctgagccttctaaatccatccccccggaaacacaagaaatgttacgtagtgccgccgacttcgtgagcgaccctaagcttagccaagctttactacgtttggcaagcaataaaaaatga

SEQ ID NO: 41622 - DNA, 903 bp, Acinetobacter baumannii
atggtgaaacagcgtactctcaatcgtgtggtaaaagcgagtggaataggtcttcatagcggtcaaaaagtgatgatcaatttcattccacataccgtggatggaggtattgtatttcgccgtatcgatttggatccacctgtcgatatacctgctaatgcattgctgattcaagaagcatttatgtgttcaaatcttgtcactggcgatattaaagtcgggacaatcgaacatgtgatgagtgcgattgccggtttaggaatcgataacttaattgtagaagtgtctgcttctgaagttccaattatggatggtagtgctggtccatttatttatttgctcatgcaaggtggcttgcgtgaacaagatgctcctaagaaatttataaaaatattaaagccagttgaggctttaattgatgataaaaaagcaatattcagcccgcataatggctttcagcttaactttacgattgattttgatcatcctgcatttgccaaagaatatcagtctgcaaccatcgatttttctactgaaacgtttgtgtatgaggtcagtgaggcacgaacttttggttttatgaaagacttggattatctcaaagcaaataatttagctttaggagcaagtctagataatgcaattggcgtagatgatacgggtgttgtgaacgaagaaggattacgatttgccgatgagtttgttcgtcataaaattttagatgcagttggtgatttgtatttacttggtcatcaaattattgccaagtttgatggctataaatcaggacatgccttaaataatcagctattacgcaatgttcaaagtgatccgagtaattatgaaattgtaacatttgatgacgagaaagactgtccaattccatacgtgagtgtgacataa

SEQ ID NO: 41623 - DNA, 1176 bp, Acinetobacter baumannii
atggcctcatttgaatttatagaagatgaactaaacgatggcaacggtcaagcccgtttcactgtatttggtgtaggtggcggtggcggtaatgccgttcagcacatggtacagtctgatattcagggtgttaaattcgtttgtgctaatacagataaacaagcacttgactgtatgaatgcccctttcaaaattcagttaggtgagcaaagtacacgcggtctaggtgcaggtgctaaccctgaagtaggccaggtagcagcagaagaaagccgtgaaattattcgtcagcaccttgaagggactgacatggtgtttgtaaccgctggtatgggtggtggtacaggtactggtgcagctccggttgttgccgaagttgctaaagaaatggggattttgactgttggtgttgtaacaactccatttaactttgaaggccgtcgccgtcaaaagtctgctgagcgtggtattgaagcgctggaagctcatgttgattcattgattattattcctaaccaacgtttattaagcgtttatggtgatatttcaatgaaagatgcctataaaaaggcagatgacgtattgttaaacgctgtacgcagtatctttgatcttgtagttaaccgtggtcacattaaccttgacttcgcggacttgaaaactgcaatgagtactcgtggttacgcaatgatgggtgctggtttgggtcgtggtgaagaccgtgcgcgtcaagcagctgaacaagctatccgtagcccattgcttgataatgtaaatattattaatgcgaaaggtgtgttaattaacattactggtggcgatgacatcacattacgtgaaacagaaatcattactgacgttgttaaccagattgttgacctcgatgaaggtgaaatcttctacggtacagtatttgatccagacgcacgtgatgaattacgcgtaactgtgattgcaactggtttaacacgtaatgcagctgatgcagagccaagaaagcgtaatacagttagccatacatcaactcaatctgctcaatctgtagatgaagatgatgttcctgcaattaataaacgccaaaatgctgaaaatgacgtgaataatgcgccaagttcaactccgcgttcttcgccaatgagtatccaagattacttgaaaaatcagcaacgtaagtaa

SEQ ID NO: 41624 - DNA, 1263 bp, Acinetobacter baumannii
atgagtgaagctgttccctcagttgttgcgattgacattgggacgcataaagtttcagttttgattggaaaaattcatgcgccggataacattcaggttatcggtatggcaactgctcgcaatcgaggcatgaacaaaggaaaaattgtaagtctcgataaagtcattgctgcgattaaaaacgctgttgctgaagcggaaaatatggccgaatgtcgcattcatagtgcgtgggtatctattccgagtaccgagctacaaagtttctatgcttctggacgcacacctgttgctaacccggcacatgtgattacaaccaatgaagttgtacgtgcattagagttggcaaaagcaagccatgtgacttctgactattatctagcgagtgcagtcccattaggatttgaattaggcgactcatctgaatgggttcaaaacccaatcaatatgaccgctcacagcatgactggtcattatcagcttatgatgatgccgattgccactatgcaaaaccttgatcgtgccatgaaaggcgcgaacattggagttgagaaaatggtggtttcttgcttggctacggctgaggcaagtttgcttaaagatgaaaaagaatatggtgtctgtcttgtcgatattggtgcaggtattaccaatctggcagtttatttagatggccgtttggctttagcacgcaccttgcagcgtggtggtgagcatgtaacacgtgatattgctgccgtgttacaaacaaccactgaagaagctgaacgtattaagattctgcatggctgcgttgatctaagtgctgttaagcctgaccatatgattcaagtacagggtattgatggtccgcaaacgattagccgaattgagttagcggaaattattattgctcgttatgaagagattttcagccagattcgcgaagaactcgaacaaagcggtgcaatccatggtctatatcatggtgttgtattgactggtgatgcttgccagattgaaggtatggtaagtttggcgcgtcgtatgttaggtgtgtctgcccatctaggtaatccgccattacaggtgtatgctgatgatcagcatcaagctgcattacgccgctcaatgtatgcaacagcagctggtttacttatgtttagccaaagtgaattacaggaagctgttgaggagcctgaagagggaaatgaccgttcggtatgggaacgaatggtgaatggctggaatgcttttaatagcaaacttaaagccattttttag

SEQ ID NO: 41625 - DNA, 855 bp, Acinetobacter baumannii
atggcacaacttccggcatccatgcgccgtaaacgtgcggcaattacctccattcatgaaaaaccgcctacgcgcaagcaaaaacttgccaatgccggcggatgggtgttgctggttattgcctttttagtcttggcggtcggaatttacggactatataaagttattactgatgcaactgttgcaaaacttgaagttgtaggttcaacaactccagttgagactcagcaagtgatgcgatatgtgcagccgattgtaaaagataactactttacatctgatttagagcagattcgtgataaagcattagaaatttcatgggtagaccgagtcgtcgtatctcgtgcttggcccaatggtattcgcgttcgtgttatgcctcgacatgctatcgcccgttggggaacaggtcgcttattgagcgatggtggcgatgtatttagtgaagcagagccgagacttcatcctgagcttccgttactacacggtccggtaagtcagtctaaaatgatgatgcgacgctataatgaaattaatcagttattccatcctgttaatttgcgtttaaaagagttatatctaacagagcgaatgacttggtttatgcagtttgactctggtttacgaattattgttgaccaagatcaaacaatgaataaattgcaacgtttaagtcacttggcacaatctgacctaaaacctgtgtggacgaaaatctcagccattgatttgcgatatcgtaatggattatctattcaatggaagaatgcaaccccacctaaaatcgtgaatggtcagtttgttgtaacgagtgatgacacaagcattgcaggtggtacaaaagcaaagccataa

SEQ ID NO: 41626 - DNA, 927 bp, Acinetobacter baumannii
gtgtcaaatgctacaaaattcggcaaagttgccgtgttacttggtgggaaatcggctgagcgtgctgtgtctttagatagtggtcaggcagttttggacgctttgttacgttcaggtgttcaggctgaggcatttgatccgcaagaccgtagcgtaactgaacttgtaaactatgaccgtgcatttattgtattgcatggtcgtggtggcgaagacggtcaaatccaaggtgtgcttgagtggttgaacatcccttatacaggaacgggtgtacaaggttctgccattggtatggataaagtcaaaaccaagcaaatctggcaaggtagtgatttaccaaccgcaccgtatcgcattattactaaagaaactgacttggattcagtgattgctgaattggggttgcctgtcattatcaagcctgtacatgaaggttcaagtgtaggcatgagtaaggttgagaaagctgaagattttgcggcagcaattgaaaaggcaactcagcacgatgctgtagttatggcagaaaaatggattacaggacgcgaatttacgatttcattcttaaatggtcagcctttaccagttattcgtttgcagccaccagcagatgttgctttctatgactacgaagcaaaatatcaacgtaatgatgttgagtatggcattccttgtggtcttagcgaaactgaagagaaaaaactacaagctctatgtttacgcgctttccaagccgtaggtgcagaaggctggggacgtattgatgcaatgcaggatgagcaaggtaatttctggcttttagaagtaaatactgtgccaggcatgaccagccattcgcttgtaccaaaggctgctaaagcggtaggttatagctttgatgaattgtgtgttgcaattcttgagcaaacattggaaggtacggcttaa

SEQ ID NO: 41627 - DNA, 1449 bp, Acinetobacter baumannii
atgtctccaacaacagctgcgaaccaagcaaaaaaactgattaaagtgcctgaaatgcgccgtatcaaacacattcattttgtgggaattggcggtgcaggtatgtgtggtattgctgaggtgttagctaaccaaggatataaaatttccggttcagatattaaggcatcaaaaaccacacaacaattagaagaaaatggcattaaggtctatatcggacacgaagcagaaaatattaaaaatgcaaatgtgcttgtcgtgtcaacagcaattgacccggaaaatccggaagttaaagctgccattgaacaacgtattccgattgtacgtcgtgcagaaatgctcggtgaacttatgcgttaccgtcatggtattgctgtggcaggtacacatggtaaaactacaaccacaagtcttttgacgacaatgttggcggaagaaaacctcgacccaacttatgtgatcggtggtttacttaacagtacaggtgtaaatgcagcgcttggtgaaagccgctttattgttgctgaagctgacgaatcggacgcatctttcctttatttacaaccaatggcagcgattgtaacaaacattgatgctgaccatatggatacttatgaaggcagtttcgataaattaaaagataccttcgtacagttccttcataacttaccattctacggcttggctgtggtttgtggcgatgatgcgaacatccgcgagattttgccacgtgtaggccgtccggttattacttatggttttaatgaagataatgacatccgtgcgattgatgtagagcaagatggtatgcgttcgcactttactgtattacgtaaaggacgtgagccgttacgtctaaccattaatcaaccgggtttacataacgttttaaatgctttggctgcaattggtgttgcaactgatgaaggcgtttcggatgaagcaattagccgtgcattaaaaggttttagtggtgttggacgtcgcttccaagtacaaggtgaatttgagcttggtgaagggaatgtaaaattagtcgatgactatgggcatcatcctaaagaagtggaagctacgattaaagctgctcgtcagagccatcctgatcgtcgtttagttatgcttttccaaccacaccgttactctcgtacacgtgattgttttgatgactttattgaagttttatctcaagtcgaccaattattattactagaagtttatccggctggggaaaaaccaattgttggcgcagatagccgtactttggcgcgtagtattcgcttgcgtggtcaggttgaaccgattttgattgatccggttgaaggtaatttgcaaaacatcatgcaaaatgtgttacaaccaaatgacttgttattaacgcaaggtgcaggtaacgtgggagcaatttcagtagaacttgcacagcaccatttgtatgtgaaataa

SEQ ID NO: 41628 - DNA, 1098 bp, Acinetobacter baumannii
gtgaccgattcacagcaaagcaaacctaaacatgtcatgatgatggctgccggtactggtggacatgtttttccagccctcgccgtagccaaacaacttcaacaacaaggttgtcaagtttcatggttagccacgccaacaggtatggaaaatcgtttattaaaagatcaaaatattccaatttatcaaattgatattcaaggtgtgcgtggaaacggagtgatccgtaaacttgctgcaccttttaaaattttaaaagcaacttttagtgcaatgcgctatatgaaacagcttaaagtggatgctgttgcaggctttgggggatatgtggcaggcccgggtgggctagcagcgcgtttattaggtattcctgttctcatccatgagcaaaatgcggttgcaggatttaccaatgcacagttatcccgtgttgctaaagtggtatgtgaagcttttccaaatacatttcctgctagcgaaaaagtagtgacaaccggaaatccggtacgtcgtgaaatcactgatatcttaagcccaaagtggcgctatgatgaacgcgagcaagcgggtaagccgttaaatattttaattgtgggcggatctttaggtgcaaaagcactgaatgaacgcttacctccggcattaaaacaacttcaggttccactgaatattttccatcaatgtggtcagcaacaggttgaagcaactcaagctttgtacgcagacgcaccagcaaatttgaccgtacaggttttgccgtttattgaagatatggcgaaagcttatagcgaagcagacctgattatttgccgtgctggtgctttaactgtgacagaagtagcaacagctggtgttgcagcagtttttgtaccgcttcctattgcagtggatgaccatcaaactgcaaatgccaaatttctggccgatgtcggtgctgcaaaaatttgccagcaatcgactatgacaccagaagttttaaatcaattgtttactacgctgatgaatcgccaattacttacagaaatggcagtgaaagcgcgtcaacatgcccaaccaaatgcaactcagcatgtggttgatcttatccaaaaaatgtaa

SEQ ID NO: 41629 - DNA, 945 bp, Acinetobacter baumannii
atgcgtgtacttgtcgtcatggatccgattgaaaccgtaaatctgaaaaaggattcaaccatggcaatgttgtgggcggcgagccgtcgtggacatgagttaggttatgcattacaacaagatttatatatcgatcaaggtaaggcttacggtctcatctctccgttaaaagttttcgaagattacaaccattattatgagttaggcgaaaagaaaaaagaatcaatcgcggcttatgatgttgtcctcatgcgtaaagatccgccttttgacatgaactttgtctacacaacttacgtgcttgaacaagctgaacgtgaaggttcatggattattaataagccccaatcactgcgtgactgcaatgaaaaattgtttgctacgcaatttcctgaattacaagtgccaacacttgtaacatcgcagcagagtttgattcgcgaatttattaccgagcacggtgatgtgatcgttaagccacttgatggtatgggtggtatgggtattttccgtttataccaagacggtgtaaatattggttctaccttagaaatgcttacagaattaggcacccgtccaattatggctcagcgttatattcctgaaattgtagaaggggataaacgaattttaatggtaaatggcgagcctattccttactgtctggcacgtattccgcaaaatggtgaagtacgcggtaacttggcagctggtggcttaggtcaagcgcgtccactcacagaaaatgacaaactcattgctgctaaagttggccctttcttacgtgaaaaaggtttggtatttgtaggtcttgatgtaattggtaattatgtcactgaaattaatgtgacaagtccaacctgtattcgtgaaattgatgcgcaatttggtacatcaattgccgatgacctatttgatgtattagaagccggtcgtccagcataa

SEQ ID NO: 41630 - DNA, 213 bp, Acinetobacter baumannii
atgaaactttatcgctatttaaccggacctgatgactctgctttttgtgcacgagtgactaaagcacttaatcatggttgggagctctatgaagcacctactatgacttttaatggctctcaagtcattgtaggccaagcgatttgcaaaacaattgatgaaaattatgatccagaaatggatattttagatgttctcaaaaataatgcgtga

SEQ ID NO: 41631 - DNA, 2190 bp, Acinetobacter baumannii
atgttaagaatatctatatcatctccccaaattaagggttcattcccgctcagcttactcagtttaatgattttaaatattcaaggtgctaacgccgaggaattgattgaattctcatcaaaagccgcagccaccatgccaaccataaaaatcgaggccatgagtgagctcgacccgattaaaagctatatcgattatgacaaagccaatgtcactcgtaatggtttagataaaaaagatatccctcaaaccgttgataccattgatgttcagaaatataaaatttatggatcgaatgacttaagcgtcatgctgcaaggtacaccaggggtatcaaccagttacgatatgcgtggtgatgggatcacgattcgtggttttggtgctgatacaggtgatatttaccgtgatggcatacgtgaaagcggacaagtacgccgcagtacagccaatatcgaacgtatagaaattttaaaaggccctgcttcggttttatatggccgtagtgctggcggcggggttgtaaatatggtgagtaaattcgccaattttgactctaaaagttcagttggcgcatatgcgggttcatacgataactacggaacaaccgctgacatcaaccaagtacttaatgacaatttagcagtgcgtttgactggagaatatggtgaggcaggtagcttccgctctggtattgaaaataagattgagatgttttccccaagctttacctataaaaatgacgatggaaaactgacttggaccacacaatatacctatgacaaattaaatcgtgtacctgaccgtgggccaacacgtgacaacttgcctgcgggaacttcaattaaaatgggatttgcccaagacggtgattatgttgatgatattttgcaagtcgttcgtaccgatgtgaattatgaatatgcacctgattggaacttccactgggcggcaagttaccgacaagcagaacagaactttgaccacttttattttggaaattattgtggtttagatggaaaaaactcaaagaatgaggcttgtacaaaaaaaggttacatcgaccaaatttactactggcaacaaaccagcaacaagaccacaaccaatacattcgatattaaaggaaagttcaagacaggccagcttgaacaccaaattatggtcggtacagactggacttatgaacaacgagaaccacgtctagccaataaaactcaaaatggatcggccatttatggttacgttaatccaatcactggtgaacgagagtacagtcgtggcaatggcccattaaagattagtcagcataactataatgaaggcacaacttacggcgtatttattcaagatttaattggtctaaatgaccaacttaaacttatgatgggactccgctacgattacttcgatttttcaaccactaacaaaattaagaatgaacatcgtaatgtaaaagacagtacttttagcccaaatgttggcttggtatggcaaccagttcctgaacatagcttttatacgtcttactctaaaagcttcgcaccatttggtggacaaatgggtgtcaaccaagttactggaagtaccgatgtcgcgaaaatggataaagagcctcaatataacgagcaatatgaagttggggtaaaaagtgaatggttcgataatcgtttaaatactcaattttctgtctttgatattcgtaaaaataatattcgctataaaccgaaccctgacagtgaaccagaggtatgggcaactgctgggcaacatcaatctcgtggtctcgaatttagttttattggccgtgtacttgataatgtctttgttcgcggtgggtatggctataccgatgccaaagttaaagaagacaatcaaaaccctgagcgagaaggcaattatttagccaacacttctaaaaatacaggtaatttatttgttcgctatttaccaactgaacagtggtataccgaagtgggcgtgacctatgtgggttcttattatccaaatattaataatcaagtaaaaatggaaggcttcaatcgtgtcgatgcagcaattggctacagtgccaacccttggaatgtcacacttgcggtgaacaatttaaccaataaagagtactggcgttcggacagcatgccaggcacaccacgtaatgtgttattgcgtttgaattatcagttttaa

SEQ ID NO: 41632 - DNA, 651 bp, Acinetobacter baumannii
atgacaacgcctgtgtcatttcacccgcaagcatttatcgaactcgcattatcacgcggtgtgcttaaatttggtgagtttactttaaaatctggacgcgtgagtccttatttttttaatgcaggcctactcaacgatggtgaagctttatctcttttagcacaaggctatgccgataaattaacacaatgtgaaaatgttgatgtgatttttggaccagcttacaaaggtattccatttgtagctgcgactgctgttgctttatcgcaaacacataacaagagcgtgccatggggctttaaccgtaaagaagcaaaagatcacggtgaaggcggtgttttagtcggtgctgcggttgaaggtaaaaaagtctggatcattgatgacgtgattaccgcaggcacagcgattcgcgaagtggtaacgattttgaaaaatgccggtgcaactattgcgggtgtgttggttgcgctagatcgtcaagaacgtgggcaaggtgaactttctgcaattcaagaagttcaaaaagaattagaaattcctgtgcatgcactgattaccatgaaagatttaatggattatttagaggcgaaaggcgaaaaagaagcgctagctaacatgcaagcttatcgtgaaaaatatggtatctaa

SEQ ID NO: 41633 - DNA, 825 bp, Acinetobacter baumannii
atgataccaaaggatcagtatccaagtgatgtaaaaattcttcgagtcgtttccattaacgtaaatggcttacgttcttcagtgacgaaaggcttacttgaatggttagaacaatcagatgccgatgtcgtatgcatgcaggaaagccgcattacccatgaacaatggactgagaaatttagacccgagggatggcatacccatctctttccagcagagcgtgcaggctacgcaggtactgcaatttatagccgcttaccctttgtctctattaaagatggtttagggtttgaattggccgatagtcaaggccgcttcatttctgccgaattcgatttaggtttgtcacatcccgtacatattgcatcattatacttaccttcaggctcaagtggtgaagaagcgcaagcacgtaaagatttatttttaggtgaatacgccaaaatcttgaaacaatggcgtgatgagaataagtccatcattatttgtggtgattacaacatcgttcataaacgaattgatattaaaaactggtctggcaaccaaaagtcgtctggctgtttaccacatgagcgtgcatggcttgaccatatttatgatgaacttggttatgtagatactttccgtgttgtaagaacagaagccgaattatattcatggtggtcaaatcgcggacaagcgcgtgcgaaaaatgtaggttggcgtattgactaccacgcatgttcaccagactggaaagcgcgcactgtaaatgcatgggtctataaagatcaatggtttagtgaccatgctccagttattatcgactataaaattcaagaataa

SEQ ID NO: 41634 - DNA, 351 bp, Acinetobacter baumannii
atgttaaaaatttatggtattaaaaactgtaactcgatgaaaaaagcatttgatgctttacaagcaaaaggtttgagctacgaatttcacgattataaaaaacaagggatcgatgctgatactctaaaaatctggctaaaagaaattggacaagatacggtgctcaacaagaaaggtactacgtggaaaaaactatctgaagaagaacaaacgcgtgctttaagcagtgaagatcatcttattgaggcgctaattgctcagccaagcttaatcaagcgaccagttctacaaacctctaaagggtttcttgtgggctttgatgaaacggcctatcaaaacttaagcgcataa

SEQ ID NO: 41635 - DNA, 438 bp, Acinetobacter baumannii
atgaaaaagattgctttagctttaggacttgttggtatggctgcatttgccaatgcggctgacccactaaacggaacggtatggaaaacgattgatgaccaaaccaataagcccaaagccgtagtaaagtttacggaacagaaggatggaaccttaactgcaaccattcaaaacattttgacaccaggtgaagaaaatgcttgtacaaaatgtgaaggtccgtataaaaacaaaccgcttaaaggtgtgaccattgtacataatctaaaaaatgtaggtggtaacagttatgaaaacggtacaattttagacccgaaatctggcaaaacttacaaattaaaaggtgagttggctgagggcggtaagaagcttaaattacgtggttatattggcgtttcagcattgggccgtaaccaaacttggattcgtgcgaactaa

SEQ ID NO: 41636 - DNA, 912 bp, Acinetobacter baumannii
atgaatatacctaatgttttaaaatattatttcacagaaacatttcttaaaacagcaattcgcaaaccaagtcagttgaatttacctccaactgctctgcgccctatgcttgaacaactttgccaagcatttccaaaacaaaaaagtgtaactgttcgaccaatccgacttgctggcattaagggtgaggaaattaaagctcaagattcagcgacccagcttatttttcatattcacggcggcgccttttttttaggaagtttaaaaacacatcatgcgttcatgacagatttggctgctcgtacccaaatgcaaattattcatgtggactatccacttgcacccgagcatccatatcctgaggcaactgaggccttatatgacgtctatcaatcattattagttcaaggtatccagcctaaagatattattttatctggtgactcttgtggagctaatttggctttggcactttgcttacgtttaaaagaacaacccgaacttatgccaagtggcctgattttattgtcaccttttctagatttaaccctaaccagtgagtctttaagatttaaccaaaaacatgatgccctactttctcttgaagctcttcagatcggtattcaacattatattggcaatcatattgcggcagatgacccgcgtgtttcacctattttcgataacttagaaggtttaccgccaacattagttcaggtcggttcaaaagaaattttattagacgatgccaaacgttttagagagaaagctgaagaagcaggtgtcaaagtacattttaaactttacacaggcatgtggcataacttccaaatgtttaatgcttggttcgaagaagcaaaacaagctatggcggatattgctgagtttgctcatgaacttgataagacgtaa

SEQ ID NO: 41637 - DNA, 1194 bp, Acinetobacter baumannii
atgaaaattcgtttaatcactcgtcctataaataaaataaaacaggtgattctcgatttcatccatcacaatcacattattaactggaccccattacaaaaaagcgcactaatgcttaccctcgcctgcgcaatgaatttcagttggattttatggaaaggctatattttaattactcctagtgtttggcaatgggcaaacctatctttagttgaatcacaaatctggctgaatttactgaccttatttttattagctgtactcattattccttgttatcgctacaaagaccaagcttgggcgcaaaaaattgtgcctttaattagtgtacaagcctttatgctgatgttgtgccacgatggatatttaattggtagtatcagccctgccacaatggtgggttacgtaggcactattggcgtaggtttggttttatttgaaagaaaaattgtttatagcgcttttatacctgcaactattattctagcgatatgtacatatttaagtatgacgggggttatctcatatgcgcccctatttaattttacagcgatgcgtcatgcccaaaccaatccattttggctaggaagtatgctgttttttattatgcctattttagtggcgtgttttattttatttgaaatattgctgacccaatggcgtcaacgagaaacctatattcaacgtttaagccaaatcgacccgttaactaatgtcttaaatagacgaagcttaaacactcatcttgaagcacttcatgagcaacaatttgattatgccgtgatacttcttgatatcgatcattttaaaaaaattaatgatatatacggacatcaccaaggtgatcaggttttgattgaaattgctcggtgtctttctgaaaacttacgtaatgaagacatcattggtcgttttggtggagaagaatttattttattacttcctcataccgatattattcaagcagaaaaaattgctgaacgttgccggcaagctttacaagaattgactatcttcaataatcaaaatatccaaattcatgtaagtgccagctttggcatcagcagttccgcatttgcaaatgacccctatcttgtgattagacaagccgatcaagcgctctatgctgtaaaggcctctgggcgtaatcaagtacgcacttttcaccgactacctcagatcaaatcaatttga

SEQ ID NO: 41638 - DNA, 1815 bp, Acinetobacter baumannii
atgaaaaagcttatttctcaggcaattatttattttctagtagccgctacttttgtattgagtcagtttgtctttgcagaagataagttattgtcacccgaacaggctttttcattttcggttgaatcgccacaatcgcataccgcaaagttatcgtggcagattcagccgaattattatttatatctgcataaatttaccgtacaacagggcaatcagcctttaactttaaatttgcctaaagcagtttctcaatatgatgagaactatggccaaagccaagtttattaccatcaagtcaacttccagattaaaaccaagccttcagagcactacactgtaacttggcaaggctgtgccaaagaccgtatttgttatcctccacaaactattgagtttcaaactgacgcagatggtctggtcggtctgcaaaatcaggctggtgcagcaacaaaacgcttattagatttggcaaatacccaagcatcaagctctacggagtctttagaaaatcagagttcagctactcaagctgaaggagctgctccagagattgcccaagatcaggtttggtcagctaagttaattgaacactcgctttggtatggtgttttattatttttaggtttaggcatgctgcttgcatttacgccatgttctttaccaatgctgccgattttaacttcattaattatccgagatcacaaaggtttaaaagcttggacgattgcacttacttttgtgtgtagtatggcattggtctatgcaggtctaggcttgattgcttcttcagcgggtttaaatttccaacgctggctacaacagcctgctactcttattgcgtttagtttgttgtttgtggtttttgcactaaatctgtttgggctttttgagcttcggttaccgcaaacttggttaaatcgacttgatcgtattcagtctatgcaacaaggtggcactttagtgggtgctggagtcatgggggtggtttctgcgctcttggttggcccatgcatgactgcgcctttggctggaactttattatttatttctcaaacccagaaccaatggcaaggtgctttgcttttattctgtctcggttttggcatgggaatacctttactcatcgcgagtgttttaggtgcaaagttcttacctaaagcgggcgactggatgcatcagattaaagtgatttttgcttttctgatgttggggttaagcctttatttcatccgccctttattaccagattgggggatgcaagcatttagttttgtacttgggttggcttttattatctatgcgctgtatcagttcttttggaaaaaaggacagttacagtggctttatgcgctcctacttttattggtaacgccatttgtggtttataaccagtatcaacatattcaaaatcgtagcttacaaaattctgagcatatggctgagtggcatgtggcgaccacggcagcagactttcaaaagattttagcagcagctcctgctgatcgggctattgttgttgatgtctatgctgattggtgcgtggcttgtcagcctattgaacatcgtattttaaaatcacctgaggttcagacggctcttgtgccttactatctcattaaacttgatttgagccattatgaccagtcacatgaagcattgctcaaacaatggaatattcttgggccacctacgtatctctttttaaacaagcaacagcaagaaattcgttctttacgtttaacaggcgcatttagtcagcaagagcttttacaacagctaggaagcttatcaaaagctaaagattcaaattga

SEQ ID NO: 41639 - DNA, 768 bp, Acinetobacter baumannii
atgagaacatttcaaattttaacttttgctctgaccgccgttgctgcaggaagtacttttgccgcagagttctcgtttgatcgtccgggttcaggctttggaacaggcattacgccagttggtaaattagcatgggaacaaggtttaccaagtgcaacctatacagagacaactgttgatggcgttaaagaaaaaacagttactgtaaatgaggatatgttattccgtacaggtttagctgatggtttggaattgcaattaggctggcaaggtccggcatggactcaaactaaacgtgctggtaaaaaaacggataactcaggttttggcgatgtaagcatcggcttaaaaaaagcgattgatttaaatgatgaaaatttaacaatggctgtattggctgaagctgttatcgcaacaggtaatgatgagtttactgcccatgacgatatatatagtttaagttcagcagtagcttataaatataatgatttgttggatacttctattaccatgcgttatgaagtacaaaacagtaactgggcagtgactgcaattccaaccatcaattataagattgcgggcaaactttcaggatattctgaatttgtttatcgtaaagctgaaagccaagactaccaatatggtttaggaacaggtttagtttacgcagtaaataaccgcactcaacttgatgcaaatattggtgtggacttagaaggtcaagataagagctacaaaggtggcttaggcatggcattcttattctga

SEQ ID NO: 41640 - DNA, 546 bp, Acinetobacter baumannii
atgttaaccacccaacagcaggctttaattaaagccatagaagaattagaactcgcgcaagtacaaaaattacttgctgagggtcttgatccgaatttcattgatccggaacaaggaccgccagtgtccattatttgtgatggaatttttaaatggtgggaagacgtctctgaagcgtatgaagcggggactccattatcacaagaagaaaaacagcaagccctgcaagtttatctcgatattcttgaagccctcattcaggcaaaggcaaatgttcatctttgggatgcagaagagttttatggtccactatgggatgcagcaagttcggcatgtgcaccagcagttcagcgcttgctagatgaaaaagttgatccaaacacacgtgatgaagaaggactcaccattttatcttcaatcagtcagttgttctttgattgtgattttgatgaaatagagtggtcagaagcgcttcaagaagagcgtgaaacactagagttattgcgccgtcatggagcaaaaatgtcaaaagaattaactacttga

SEQ ID NO: 41641 - DNA, 351 bp, Acinetobacter baumannii
atgaatattgaaatccgcacagataaaaacatccataatagtgaacgtttaattacttatgtacgtgcagaacttactcaagaattccaacgtcatagcgaacgtattacacatttctcggttcattttagtgatgaaaatggggacaaaggtggagacaaagatatccactgtatgatcgaagcacgtccttctggcttaaaaccagttgcagtgcaccataaagcaggaaatattgacgcttcaattcatggcgcgattgaaaagctaaaacgtagccttgaacatacctttgagaaaaaagaacacccgagaggtggtcaaccagaattcattgatgatgaagtttaa

SEQ ID NO: 41642 - DNA, 966 bp, Acinetobacter baumannii
gtgtccgaatcttatctatctggagcagaacttattgagcagattcaaaagtctccttattcacgtgatttaatcggttatcacggacagcctccagaggtgaaatggcctaataatgctaaggttgccgtgcaatttgtgctgaattatgaagaaggtggcgaaaaacatattgaacacggcgacgaaggttcagagcagtttttatccgagattattggcgctgcaagttacccagccaaacatatgtcgatggactctatgtacgaatatggttcacgtgctggtttttggcgcattcataatgagtttcaacggcgcaagctccccatgaccatttttggagtagcaatggcgcttgttcgcaacccttatattgtagaggcaattaaacaggccgattacgatgtggtttctcatggctaccgctggcttcattatcaagagacagatcttgaagtcgaaaaacagcatatggagcaagccttatctgttttagaaaacttgtttggcaataaaactataggttggtacaccggacgtgacagccccaatacacgtcggttactcgcagagtttccacaattacaatatgactctgattattatggtgatgacctgcctttttggacgacacttaccgatacggcgggtgtgtcacgacctcatctgattattccttatactttggaatgtaacgacatgaagttctgctccccaggtggatttaatagctcagaacagttttttcaatatttaaaagatagttttgatgtgttgtatgccgagggagaaactgcaccaaaaatgatgtctattggaatgcactgccgtattttagggcgtccgggtcgttttaaagcattacaaagattcctagactatattgaaatgcatgatcgtgtttgggtatgtcgccgtcaggatattgcagaatattggtataaaaatcacataaatcaataa

SEQ ID NO: 41643 - DNA, 504 bp, Acinetobacter baumannii
gtgtttttagccgagtttaatcaagccccacccgaccaactcaagactctgttaaacaactgcgtccatattcctgtatgggccgaaaaaattatttcagaacgtccctactcatcaacttcagttcttttagggtatgcagaacaattaagccacacatggtcatggcaagagattcaggccgcattagccacccatccaaaaattggtgaaagacaagcaaaaaagcagctcaatgcaaaagagcaaaatttttcagcccaagaacaagctggcatttccttagatgaacaaacacaacaagccctgctgcaaggtaatatcgagtatgagcagaagtttggttttatttttctaattaaagccgcaggcctcagtagcgacgagattttaaaaaaactccatcaacgtcttcaaaacaacttagctatagaaaaagtcattgtacatgagcaactcgctgcaattgctctattacgtttatctcaggaagtaccagcatga

SEQ ID NO: 41644 - DNA, 324 bp, Acinetobacter baumannii
atgatcagcactcatattttagatacgaatttaggtaaaccggctgcacaggtcgaagtgaagttgtttcatgcagccactcatgaactgatagcgactgcaattaccaaccaagatgggcgagtgagtgattttggaataaaaaacttaggtaaaggtgcttatcaacttgaatttgaagttgccccttatttttcatcacagcaaatcaaaaccttttttccccgtgtttgtattcaatttttcatagaagacaccaatcagcattaccacattccattactgatcagcccgtttgcttattccacttatcgcggcagctaa

SEQ ID NO: 41645 - DNA, 1368 bp, Acinetobacter baumannii
atgaatcatcagcaaaagaatgcgatttctccagagcatgaatatttaggaatttccaaaagttttgcttacggcttacagcatgtgctcaccatgtatgggggcattgtagccccgccactgattattggaacggcagctggcttaagcgcagcacaagtcggaatgctcattgcagcggccctatttgtaggcgggttggcaactctaatacaaaccatcggaaccaaatatctaggggcaaaattacctctagtgcaaggtgtgtcttttgctggtgtggcaaccatggttgctattatcactacaggcggtggtttacctgctgtctacggcgcggttattgccgcatctttaattggactatgccttgcgccttacttttcaaaaattattcatttttttccacctgttgtgacgggatgtgtcatcacgattattgggttatctctgttacccgttgcgattcgctggatgatgggtggtaacaacaaagcacctgattggggtagcgttgagaatatctctttagctttgctgaccttaggcattgtgattattctaaatatactgccacaagcaagtatacgccgtttatcaattttgttggctattgttgctggtactacccttgcctactttatgggttttggagattttagtcaggtgagctcaggcgcatggctgcaatttccacacttatttgcatttggtttaccaaccttcgagctaagtgcaattttatcgatgctaatcgttactttggtgattatgacggaaaccacagccgatattattgctgtcggagatattgtaggaaccgaagttgattcaaaacgtatcgccaacggtgtacgtgcagatatgttttcaagcgctattgctcctatctttggttcattcatgcaaagtgcttttgcccaaaatgttggactggtggcaattacaggtatcaaaagccgctttgtcgtggcagcaggcggagtcattctgattattttaggtctattacctgttatgggccgccttattgcggcaattcctatgccagtacttggtggtgcgggtttggtcttatttgggtcggttgcagcaagtggaattcgcactttggcaaaaattgattataacgatcagaaaaatttgattattgtagcaactgctttatcagctgggatgattccaattattaaccatgaattttatgctcatttcccagtttgggtacaaactttgttccattcgggtattagttcgacttgtatctttgctatcttattgaatttgttatttaatcacttaccttcatttcgcagctcgcgtacccctcatttacgccaaacaataaacacacgaaatacacattaa

SEQ ID NO: 41646 - DNA, 726 bp, Acinetobacter baumannii
atgcaattaaagcaacttgcggcgacttgtgccttgttatctgcaactgccatggttcaggcaaaaccaatctggcaagattttagcgtgactggactttatggtgaaaactatgaagttgtagatgacaaagaaaccaccattactttggaatatgcagcaaaagttaaatatgctgatgtatttttctttatggaccgcatgcgtggcgaaaatgaccataagagtacttattttgagttatcaccacgtttaagcttaggcgaagtgtctggcaaaaaactggcgtacggcccaattaaagatgtactcattagtaccacttgggaaagtaatagcgaaaacggcaataactttgacaacttcttgtatggttttgcagttgatttagatatcccatatttccagtatgcgaatttaaacttctaccgtgcgaataatgagaacactgacgacgattatcaaatgacattcgtttatggcattccatttaaaatcgcatctgaagatttcttggtagatggtttcctagactggtcaaccgctgaaggcgaccatgcgagcgagttgaactggaccactcaatggaaatggaatgtaggtaaacacatttctcctgatacacgtctatacctcggtattgagcactctgtgtggaataataaatttggccttcaaggtcgagacgaaaataacgtcagtgctttggttaaataccacttctaa

SEQ ID NO: 41647 - DNA, 1158 bp, Acinetobacter baumannii
atgaatgtggtgattattggtgcgggaatgggaggtctaaccacaggcattgcattaaagaaatttggtcaccaagttcgtatttttgagcaaactgaaaagattcttccggtcggcgccgcaatttcgctgtggtcgaatggtgtgaaatgtctaaattatctgggattaaccgagaaaatcgccaaacttggtgggcaaatggatgacttggcctatgtagatggtttaactggagatgtgatgacacaattcagtttacggccattaattgaagaagtaggacaacgtccttatccggttgcacgtgccgatttacaaaatatgttaatggatgagtttggtcgagatcagatttatttaggcaaaaaaatggtaggccttgaagataaagctgattttgtagaggttcattttgcagatggtagctcaacacaggctgatttactcataggggcagatggtacgcattcaatgactcgggcctatgtgttaggtcagcaggtacaacgtcgctatgcaggttatgtgaactggaatggtctggttgaaatatccgaagatttagcaccagctcagcaatggacgacttatgtaggagagggcaagcgcgcgtctctgatgccagttgcggatggacgtttttatttctttttagatgtacctttaccagcagggttagagaataatcgggatgaatataaaaaacttttaaaacaatattttgttgattggtgtcagccagtgcagcagcttattgaacgcttagacccgcaaaaaaccaatcgggtagaaatccatgatattgaaccgttcacacagttttataaaggtcgtgtggtgattttaggtgatgctgcacatagcacgacacctgatattgggcaaggcggttgccaagctatggaagacgcgatttatttagcgcggtctttgcaaattaacactttgggtctagaagatgctttacgccgctatcaaaacaagcgtaatgaacgtgccaatgaattggtacttcgtgcgcgcaaacgttgtgacgtaacgcatatgaaagatgaaacggtcacgcaggcatggtatgcagaactacgccgtgaacaaggcggacatattatgcaggggattattagcaatattgtgggtaatccactcgattaa

SEQ ID NO: 41648 - DNA, 1011 bp, Acinetobacter baumannii
atggcaacattgcacgctccagcttttgaacttcctgaaattttgaatactaaaacgaatttggcagatgcccgaattggtgcacaagtgattgagtgttcagatgatttctttgcagaagcaaagcgtatgctgcaatttgaagcacctatttttgttgaagataaatttgatgatcatggcaaatggatggacggttgggaaacccgccgtaagcgtcatgcaggctatgactggtgtattgtgaaactaggtgtgagtggaaaaatcagtgcacttgatatcgacaccacgttttttacaggaaattatcctgcttctgcctcattagaggcatgttatgcaccaaatggtgaccttactggggcaaagtggcagagtattttagaaaataccgagctagggccgagtcaacatcatatttttatggtcaataatgatgcaattttcacgcatatacgcctcaatattttcccagatggtggtgttgcccgtttacgcgtttatggtgacgttcatattcaggtgaccgaccacgagcagactctcgatttattggccttagaaaatggcggtcgtgtaattgcttatagcgatgcgcactttggacatccacgtaatttgattaacccaggccgtggcgtcaacatgggagatgggtgggaaaccaaacgccgccgcgcaccaggttatgactggtgtattcttgcattcggtaaaagcggaaaaattgaaaaaattgaaattgatacggcgcattttaaaggtaactttcctgctgaagtttctattcaggcggtctaccttgaaaatgcaaccgatgcacaactgattccacaaagtatgttttggtcttacttacttgaagcccaacctatgcaaatggaccatattcatgaatatgtgaatgagattttaaagcatgaaaaaatctctcatatccgtattaacatgattccggatggtggtattagccgtgtccgtttatggggaaaaattgccaagtcatga

SEQ ID NO: 41649 - DNA, 504 bp, Acinetobacter baumannii
atgatcatgaagaatattcaaattcagcctttaaccattgagaactttcagcccttcggagaagtcatttgttgtgacgggcatgatttttttcatattaatgatgcacacaccgagcgctaccatgcgctcgttgaaactgaaattgaaggggaagcaaaggcaggaattagtattttccgtaatattaaggccagtgtgttgcctctagaaatttcaatgctagagcgccatccgaaaggctctcaagcattcattccattacagcaacaaaaatttttaattattgtggcccctggtttagacgaaaatactcctgatatttcaaaactatgtgcttttgtttcggatggcaagcaaagtatcaattatcgggcaggtacttggcatcatcctttgcttacctttgaagcgccgagtgattttgcagtagtggatcgaattggaggcggtgcaaattgcgatatttttcaatttccccatccgataaaaattactgtctaa

SEQ ID NO: 41650 - DNA, 795 bp, Acinetobacter baumannii
atggatctccaactgaaaggtaaaacagctattgtaactgcggcaacagcaggcatcggtctagcaattgcgaaaactctggctaaagaaggaactgatgtcatcattacgggccggacccaagacaaattggcggcggcggtagccgagatagaagcaaatgctcccttgggcaaagtatgtggttttttagctgatcttagtacatcagagggagttgagacattaatttcacaacacccttacactgatattttagtaaataacttgggatattatgaagctaaaccatttactgagattacagacgaagactggtggcatatgcttaatgtgaatgttatgtcaggtgtacgcttatctcgtcactactttccaaaaatgttagaaaataattggggaagagtgatttttatgtcgagtgaggtaggagcattcactccaccagatatggtgcattatggcgtaagtaaatctgctctattggctgtatcacgtggaatggccgagttaacaaaaggcacaggagtgacggtgaacagcgtacttccttctgccacacgttccgaaggtattatggactatttacgtcaaactgctcctcgtcccgacatgacagatcagcagattgaagcacatttttttgagacatatcgtccaagctcattgattgcaagaatgattgaagctgatgaaatcgcatctatggttgcgttgttagcaagtcccttgggatcagcatctaatggcgcagcagttcgtgttgaaggcggaaccttccgttccattctgtaa

SEQ ID NO: 41651 - DNA, 1884 bp, Acinetobacter baumannii
gtgacacaatatacggctcaatcgcttgaagttctttccggtttagaccctgttcgtcgtcgtccggggatgtataccgatacttctcgtcctaaccatttagcgcaagaagttattgataatgctgtcgatgaagccttagccggtcatgccgacaaaatctgtgtcacggtttataaagatggttcgttgtcggttgaagataatggccgtggtatgccagtcgatattcaccctgaatatggacaaagtggtatcgaaatcattttaaccaagctgcatgctggcggtaagtttagtactgataactatcagttttcaggtggtttacatggtgtggggatttcggttgtaaatgctttatcaactcgtgttgaggtagaagttcagcgtcagggtaatttataccagatggcctttgagcaaggtgaacctgttgcgcctttggcagtgctagaaggcaaagcaccaaaacgtgcgactggtacaacggtacgtttctggcctgaagctaaatattttgatagtccaaaatttgctttaaaagcactcaaacataatttaaaagctaaagctgttttagcagctggtttaaaaattacttatatcgatcaaattaatgatgaaaaaatcgaatggcaatttgaaaatggtcttgtcgattatttgatggatgaattgcaagaccgcgaaattttgccaaaccctgcatttgtaagcagtgggcaagcagaccgtgcggcatgtgaatttgcgatttgctggaatgttgaaggtggtgaacaggttcaagaaagctacgtcaacctgattccaactgcacaaggtggtactcatgtgaacggtttgcgttcgggggtgactgaagcgctacgtgaattctgtgagttacgtaatttattaccacgtaatcttaaactttcggctgaagatgtttgggatggcgtgaactatattttatcgcttaagttccaagaaccacagttctctggtcaaaccaaagagcgtctttcgagtcgtgaagctgccaatatagttttaaatattgctaaagatgcgtttgcgctctggctaaaccagcatgctgaaattgccatgcaacttgcggaaatggcaatttctaaagcaggacgacgtttaaaagctgcaaaaaaagttgagcgtaaaaagattgtttctggcccggctttaccgggtaagttggcagactgcgtgggccaaacacgtgaagaaagtgaactctttattgtcgagggtgactctgcgggcggtagtgccaagcaggcgcgtgataagaactttcaagccatcatgccaattcgtggaaaaatcttaaatacatgggaagtttcttcagatgaagtacttgcttctcaggaagttcacgacattgccattgcaattggtgtagacccaggcagtgatgatttatctgaattacgttacggcaaaatctgtattttggccgatgccgactcggacggtttacacattgcgactttgctttgcgctttattcgttaaacattttccagcattggttgaagaagggcatttgtatgtagcaatgccaccattgttccgtatcgatattggtaaagatgttcattacgcgctagatgatgaagagcttgaaaccattttgaaaaatgttaaaggtaataagaacccgcaaattacccgattcaaagggttgggtgagatgaacgcaattcaactacgtgaaacaacaatggatccgaacacccgtcgtttggttcagcttgatctagatgatgcacatttaacggcaggtttactcgacaagctccttgcaaaaaaacgtgcagcagatcgtaagcagtggcttgagcagaagggtaacttagctgatatcactgtttaa

SEQ ID NO: 41652 - DNA, 582 bp, Acinetobacter baumannii
atgaatattatctacctccatggctttaatagtagctcttcttcaattaaagggctcagccttaagcagtattgtagcgaattgggcataaatgtgcatttgccagatttaaatagatctccggaacaggtagtagcccaggtttcagagctgattgagtctttacaagaggtggctttagtcggcagtagtcttggtggattttttgcgacatattttgtcgcgaaatataatattccggctgtactgattaaccctgctatgcaaccatggaagctgtttgatgagttatttcaagttgaaagtatgccttataaggtgaacgatcaatggtcaattgatcatgttcagttacgacagttagaacaactggaactgaaacagcctgaaaatgctgacaaaatactcgtcttgttgcaacaaggcgacgaaattttggattatcgtcaagcacaacgctattatagtgctgcaacaccatcctcattgattttgacggatgctcatggcaatcatgccatggaagattttgaagaaaaattacccttagtgatcgaattctttgcgcacaccatcaaataa

SEQ ID NO: 41653 - DNA, 1344 bp, Acinetobacter baumannii
atgccgagcttaacaccgttacatgaaacttattgtaaatgggatcgtacgccacctagtcaggccgacgtactagaaggtttagctcaactgttcagtaccagcttaaatggtgtacatgaattaatacaagtcattaatattgaagtattaaaaaatgcttttggtattagcgcccaaaatgctaaaaatttccaaaaacggcccgctgtccaaaaggtatatcaattttcttatggtgccttacaaaaatatggtagttgttttttagcaccagggttacgtcgtattattgaaaaatttccaacccttcatgagaagccattaacaccaacccttcattttttagtaggagtgttaaatggtattttcggagactatctacttaaacagcacagtcccctcgccttgccaatggttctatacgaccactacggtgcaatccaacaaggcgaacttgcaggccgtattgtaattttagttcatggtttgtgcatgaaccatcttacttggtcaaatgcacattatggcgggattggtgagcgtttgttagcgcagcgtgatcacaacacgatgctgtatttaaattacaatacaggccgccgtatttcagccaatggccgcagtttctcaaatttattagaagatttagtacagcgtaatccaagaattaccagcattgatttaattggtcatagcatgggtggattagtttcccgtagcgcactgttttacggtaaacaaaatatgtaccaatggattcatatggtcgaaaacctcgtctgtattggatctccccaccacggtgcagtacttgagcgttttggatttgcactacaagatcggctaggcgcttttccatttgttggcctaattggtcagctggttaacatccgtagtaatgggattttagacctacgccatggtagtgttcgagatgatgactgggaatacatggatgcccgtattggtatgatggatgacaaccgtgctccggctcctctaccttcccatatcaatacctttttagtggcaggaacactcgagtttgaaaaggtgcgtaataaagcgcttaccgtgattggcgattacttagtgagtgtaaaaagcgcgctaggtgaacatcctaatccacgttttcagcttaaagttccagactcacataaagcggtgttttatggcttaaatcactttgaaattcagtatcactcaagtgttgccgaacagattactcgctggttatatcctcatgtgaatgattatgtgcaagacggtattcaaacccatattattgatatgccgaactatacgctcgaagatttagaaggaattgtagagacgtaa

SEQ ID NO: 41654 - DNA, 726 bp, Acinetobacter baumannii
atgaaaaaacattttaaatttatcgtttttactgctttcatgattggatctattgaggtttcatatgctgactttggttttattcaagataaggatgggtacgttaatgtacgaggaaattcaagtttaaattctaaagttacgtccaaattaaataataatgaaattgtttcttgtgtgatggatgaagggacaaataatttttgtttagttaatgcaagcaatggtgtaactggatttgtctataaaaatagagtaaataattttagtggttacaattctattaagctatctcaatattctagagaaaaatctgtttataatgataaaaatataatagtagaagtgtatgcaaaaaaagctattttagatcctaaactttataaaacttttaaaggtgaatataagtattttaataataaaaaattctttggtactgatggtactttgcctaataataattttttacaacttgataaaatcattgttaagaataaagataagaaaatagaaattggtaaaaatgatatagagcaatacttttttcctaaaaatggtatagacagtaacaagaatgagcttgctgattttaaaatatattacttaaataataatatttttattttaaatacttttaataatggtggtgcagcagcatataatatcgttttaaatataaaaaatggaaaactagttgccaataaagcttggaaggttgaaatttaa

SEQ ID NO: 41655 - DNA, 462 bp, Acinetobacter baumannii
atgaaatacaaattatttacatttatttttctatcctttttctttagtgttacaaatgcaagtaatgatgagaaatgttttgaagactcaaaaagtttaatcacaaacttatataaaaactatccagtggatggaaataaaattattgagagtgctgatagaaaaactatttctaggtttttttctaatcaattaacaaatatgttagtaaaagattatgcttgtagaagtaatttaaatggtgtatgcaatatagattttaatattttaagtaatgcacaagatgatataggtaaatttagtatactacaagctacaaataatattgttactgttaaatttaatacgcctacacatggtgagtttattgattttttgatagaaaataaaggaaaatgtaagcttattaagaatataaaatacgataataatactaatttgattaagattttgcagcaataa

SEQ ID NO: 41656 - DNA, 954 bp, Acinetobacter baumannii
atgctttttaatatatttagtgtcttggaaaaaatagggctaaatgctcagaaacgtgctattcacgtacaattttctaatgaactactcaatcatcaagtattcttacaacgtatagaaggccaacatcagctaaatggtggcctaatggcagaattgatctgcctttcaaccaatgcccaaattgcattgaagcaatttattggtgttcaagtcgctgttgatcaggtcactgattcggggcaattgttccgaactacaggtattgtgactgaggccagttatggacaaagtgaggatggtaaatattatagattggctgtattaaaccaaaaaaattatgtggtttatcctctaaattatcaaataagtaaaaataaagctaactttaattattctattgaaaaagatgaattgtgtatagctggagatttatactcttatagagatacatatttaaattcaaaagcatgttttaaaattattgatgatgcttttgtaaaggttagtattgtagaaaatataaatcaaaaaactaataataagtcgctagtttatttaaaaactccaatttcttcagattttttctccaaatgtaacgagaaaaactcagctaagaaatgcacgcaacttgaaaattctaataatcgggcttattctttatctgaattaagaaaaatatctcctgattttataaatatatttaatgacacaaaaataaaatcattgaacgtaaatacatttaggttccttcctcaactaacagatagtttttattctattgctgagaaatatatagatacagatgaaagttctagttctgaattttatttaatcaaaataaagcctgatttaaaagtcgagaaaataggagattattactcaattgatagttcaggagtgataacttataaagatgaaaatggtaaaattttgaagaaaaatttaaaataa

SEQ ID NO: 41657 - DNA, 516 bp, Acinetobacter baumannii
atgcgattaagttaccgtttggtgagtggactgcttgttctggcaagcattgtcggcatgtcttttgcgttgtatttggaacatgtaaaagggttagagccatgtccgctctgtatttttcaacgtgttggcttaatggcaatgggttttgtggctcttattgcgtttttgcataacccggtttccaatgcgattaaacgcttttatgcatttttggcaggtattgcaattttatggtcagtgggggtggcgggccgacatgtttggttacagcatttaccaccagatcaagtaccaagctgtggtccgggtttaaattacctcattgatgctttaccaatgaaaaccgttttacaagaagtactttctggctcaggtgagtgtgcggcaattgactggacttttttaggtcagtctttaccagtttggtcattggcctatttccttttactgttattggtttgtttatggcagttattccgtttttatccagtgtttaagacggctaaaaagtaa

SEQ ID NO: 41658 - DNA, 1578 bp, Acinetobacter baumannii
atgagtcaacccactacaccatctcaatcagttattcctgcttgggtggattcgtcgctactacaaggcatgttacgtggaatagaacgtgaaagcctacgtatgcaaagtaatgggttcttatcacaagagttacatccaaaggcattaggttcagctttaacacatccgaaaatcaccacagattattctgaagcgttgatggagtttattacttcaccacagccaaccattggtgatgccttgcatgagctcaccgatattcatgcggttgtgcaccgtcatttagaaaatggtgaaaagctctggccgttgtctatgccatgtatgctagatgacaatgaagaacgtattcgtctagctcaatatggcacttctaatattggccgtttcaagacgctttatcgccgtggtctaggtattcgttatggtcgccgtatgcagacgatttcgggcgtacactataatttatctttcccggattctcttttttctgctttgcaggcacatgaaactgacgaaaaattaaaagcacttagtctgcaagattatcgtagtcatcgctattttggtctgattcgtaactttattcgtttaacgccactggttatgtttttggtgggtgcgagcccatcggtttgccgttgttttctgacgggtcatgaacatcatttgttgcctttaatcaaagggtcatattatttaccgtatgctacagctctgcgtatggggcgtttaggctaccaaaactcggcacaaaaaagtttaggcattcactataacaatttaacgggttatctggccggtttacaaaaagcagtacattctccatatccgccatttagccgtttagggttaaatgatgcctctggtgaaccattgcaaattaatgatcatgttttacaaatcgagaatgaatattacagtctcgtgcgtccaaaacaagttcctcaagcgggtgaaacaccgtctcaagccttgaaaaatcgaggggtgggttatgttgaacttcgtgcagtggacgtaaatccatattcggcaattggcgtcaatgaaacaacagcaggtttccttgaggcattagcgctttattgtttattaagcgatagtcctgaactgttatgccctgagcaagatttgattgagaaaaaccagacagaagtggttaaccgtggtcgagcaccaaacgcaaccattactgatttaaacgggtcttatcatattgaagattgggcacgtcagcatatttctaaaatgcaggattgtgctcgcttactcgatcagacctatgcaacagatctatacagctcggctttggctgtgatgcaagaacgtattgatgaagtagatgaaacattatctgctcatgtgattgatgacacattaaagcatggtggaacctggagctttggtagtcatatggcacagttacatgctgaaacttatgaaaagcatgagattagtgcagagactttgcaatattttgaacaattggctgtgcaatctttacagcagcaagaacaacttgagcaagatagtcagatcagttttgatcaatatcttgaacaatatagataa

SEQ ID NO: 41659 - DNA, 540 bp, Acinetobacter baumannii
atgaacgatcaagacattttaaacttctggttttcacctgaacaccgttcactctggtttgcaaaaagtgaggattttgacgcaaaaattcgtgatcaatttgcagacgttcatcgacaggcaactcgagcagaactttggtcttggcggaaaacaccagaaggtcgtcttgcagagattattgtgctagatcagttttctcgcaacatttatcgtgatcaacccgaatcttttgcttatgacggacttgctttagccttgtcacaagaagcaattagtttgcaactcgatgcacaacttaacccagaacagcgctcgtttttgtacatgccatttatgcatagtgaatcgaagctaattcatgagtttgctttaaaattatttcaacgcctcggcaatgaaattaatttaagctttgagaaaaaacataaagtgattatagatcgctttggacgttatcctcatcgcaatgccatccttggacgtgtctcaacaccagaggaaaccgaatttttattagaaccgaacagtagtttttaa

SEQ ID NO: 41660 - DNA, 564 bp, Acinetobacter baumannii
atgaaatatctctctctttgtttagctttaggcactgccataactttaagtgcttgttcaactgtacccagcaaaccaaaaactttcgatcagcttggccagttttcggcctatccgttaaatgctcaaacgtttcgaatcagctttcaggctgatccaaacatgagctatggagcagccgaagaaattactttggtgaaatcagcacagactacagtacaaaaaggtttccgcttttttaaagtgctgaacgacccaagtaatcaaagccaaaagccaccgcgtcaagctgtagtttacccatctgcaccaagcttttacccgtatggttactaccgccgctatccgggtttctggcatgatccgttctatgatttcccgcaagtggtcaatatcgaccctgttcaagtgtcgtatactattgaatgttatcgggatcaaaagcaggctcctcaagatgcctttgatgcaacgttaattctcaaatctatcggacaaaaatatggtttaagcccgacaggagaattgttgccgccacctgagccgccagtaaaacaaaaatga

SEQ ID NO: 41661 - DNA, 1311 bp, Acinetobacter baumannii
atgaatatggcagaagaagtacaccatgcacccaatctgaagcgcagcaaatatttcgctacgatggcacttattattgtggtggtgctgtggattgggttattgatcgccaatcgctttctgccagagtacacagacttaattcatattttaatgctaggtgcggaagctggtgtagtgggtggactagcagattggtatgcgattaccgttctgtttcgaaacccatttggtaagcttcctatccctaagtttttgcgtgatcataccgaaattattccacgtaataaggcacgtattgccgaatcaatgggtcgatttgtgcaggaaaacttcctgtcgcctcaggtggtcgaacgaagcctagaaaaaaccgatttaagtcttgccattggccaatggcttgccagtccacaaaacaatacgcaagtggtacaactcattcagcaaactgtacctaaagtttttgaatttgtgagccaagaacaaattgccaatttcgtgcaaaacaacagtgtgcaatgggtgcgtaacactcaagtcaataaacttgcaagtgaaatgctgcgtgcagtattggaaaatgatttccaccaagatgtactgcaacgtggtctcgatatcgcgcatgagtgggtggtacaaaatccggataaaactcgcgaattgacaagaaaaatgtttaaagcgctgggtgtctggtctcttgcaaaaggtgcaagctggatcggtattgatgttcagcagcgcaccattgattcactggttgaaaaagtagaatcaatgctggctgaccatgaacacccatggcgacaggaaattgaaactatcgcccactcgctcatgctggagttagcaaaccctgagagtattgccagccaacgtctaaatagtggcaaagatgcgttgctagatagtcctcaagttctaaatttcattagtggtgctgtcactattttatgtgatgccattaaagaagatttaatgaaagaagactctggtattgcaatgaaccttagagctgccattcagcagttgggtgaaaaccttgtccaaaatgtaaaagtacgtgaagttctcaacaaagaaatgacaggacttgctatgaactttacggaccaatatagccataaaatcatacgctatgtgagtgagcgcattcatgagtgggactcacgtgaaatgattggaaaaattgaaaatgaagtcggtggcgacttacacatgattcgtgtgaatggcgttgtagtaggtgcatttatcggcttaactctgggtgtaatacgagcagcgattgaatcaattttataa

SEQ ID NO: 41662 - DNA, 1155 bp, Acinetobacter baumannii
atgctacagcttcagtccaaattgcccgcacaaggggtgactatttttagtacgatgacggcaatggcacagcgcttgggtgcacttaacctttcacagggtttcccggattttcctgcaccccctgctttgctcgaagccctatctcaggcaactttggctggacacaatcagtatccacctggtgatggcattctcgcactgcgtgaacagctcgctttacaatttcaacagcgtgaccaacttcaacttgatcctgtaactcaaatcacgattacgccgggtgcaaccatagcaattttctgtgccatacaagcctgtatcaacacaggggatgaagtcattatttttgacccgagttatgacagctatggaccatctgtcgagttagcaggtggtaaagcagtacatattgccttacaagcacctgactttaaggtgaactggcaacaagttaaagatcgaattaacgataaaacccgtatgattgtggtaaataccccccacaatccaacaggtacaatctggtccgaacaagactggttagaactgatcgcactaattcaggataaaaatattgtagttttatctgatgaagtctacgaacacttagtttttgatggtcaacagcactttagcgcattgcatttccctgagcttagagaacgtagttttgtgattggttcttttggaaaaaccttccatgtcacaggctggaaaaccggttactgtgttgcttcacctgatctaatgcgtttgttccgccagatttatcaatatgttaatttctgtggcacaacaccatgtcagattgcgcttgcgcaatatatgcagcaacacccagaacatattcaggaactttcacagttttatcagactaaacgagaccgatttaatcaggcgattcacaatagccgttttttgcttaaaccatcgcaaggaacttatttccaaaaccttgattacagccagattagacctgacttaaacgatgtggaaatgtgccagtttcttgccgagcaacataagattgtggctattcctgtttcggtgttttaccaacaagccccagagtctttacgcttgattcgtttctgctttgcaaaaaatgatgaaacactgcaaaaagcaggagaaattctgaatcaatgttaa

SEQ ID NO: 41663 - DNA, 1368 bp, Acinetobacter baumannii
atgccaccaagacagtctttaattcaccagcaaaatctttggaaaacattttttgttttcttattgcccctgattgcaaccaatatcttgcaaaacctgtccggtaccattaacaccatctttgttggacaaatgatgggggtcgatgcgattgctgccgtctcggtttttttccccattttgtttttactgcttgcgtttattatcggcatttcaacgggtactactgttttagtagggcaggcatggggcgcgcagaatattgaaaaagttcaaagtgtggtgggctctactctgtttatgaccatcattggcggtatcattaccgcaatcattggtgtgttttttgcccacgacattttagaacttttaggtacggatccgaaggtgatgcacctctctttgccttatgtgcaatggatgttggcaggtagtcctcttctctttgtttatattatctatacctcaattttacgcggtgtaggagacagtactactcctttacttgcactggctttaaccagtgtgattggtttggtcattaccccgatattgcttaaaggttattttggtttacccgctctaggaattattgctccggcaattgcgaccattactggctatgtagctattctcatttttcttgcgatttatctaaacaagaaaaagcatccacttcggccgaaccgtcagcttttgcaacatattcgtcataattcggaattaagtaaaatcattttacgcctaggtgttccaaccggtattcaaatgattaccacttcaatggccggtttagtcattgtgggtttagtgaaccgtttcggagctcatgccacagctgcgtatggtgccgtgaatcaggtactcaactatattcagtttccagcgatttcgatctctatcgcggcctcaatctttgcagcacaagcgattggtgctggtaagtcggacctactcgcacgtgttacacgcaccgctttgggaatgaactttttatttacaggtgccttaattgcactcggctatctattttcaaaatatttgatggctttattcatcacagatccaactgtggtggtgttagggcaacagcttttatttattgtactttgggcaattttattctttggtgcaggtgccatttttgcatcaattatgcgtgccagtgggactgtaaccgtaccgatgctgattaacatctctgccattttatttattgaaatgccatgtgcttactggtttagttcgatgtggggacttaaaggcatttgggtcgcctatgccttggcatttgtcagtttatgtattattcaaggcttgtattatcaatttatttggaagaaaaagaagatcaaagttcttatttag

SEQ ID NO: 41664 - DNA, 834 bp, Acinetobacter baumannii
atgaaaaattttaaaaacaaagtcgctgcaattacgggtgcgggttctggcattgggcaacaattagcaattcttctggcaaagcagggctgccatctttcattaagtgacattaatgaaaagggcttagagaaaactgttgagctattaaaaccgtacagtaatattactgtaacaaccaagaagttagatgtttctgaccgcgaggcagtaaagcagtgggcacaggaaactgttcaagatcatggctgtgttaacctgatttttaacaatgctggtgtagctttaggctcaactgtagaaggcgcaacctacgaagatttagagtggattgtgggaattaacttctggggcgtggtttacggtactaaagaattcttaccgttcattaagcaaacacaagatggccatattattaatatttccagcttatttggtttaacggctcagccaacccagtctggctataatgcaactaaatttgcggtacgcggttttactgagtcattgcgtcaagaattagatattgaaaaatgcggcgtaagttcgctatgtgtacatccgggcggtattcgtaccaatatcgctaaagctgcaaaaatgagtgatagcttgagtagtttgggtatggacccaactaaatcgattcaaaactttgacaagttattgcgtaccccaccagaggaggcagctcgtcaaattttagatgcagttttgaaaaataaacgccgtttactcatcggtagtgatgcaaaaattctggatgcattccagcgtttattcccaacgggatatcaacgtgcttcaaccattgtaactaaatggatgaaataa

SEQ ID NO: 41665 - DNA, 672 bp, Acinetobacter baumannii
atggcgacaaacgactcaaccagtaaaaagaaaacaaaaactgtgagtaaagaacgtcagttcaaagggttatctctgtctgagcgcaaagaggcacgccgcgaaaaactcattgaagccggtattgcaacttatggaacccttggctttttttccgtgacggtaaaagatgtctgccaagaagcaaaactcaccgaacgttatttttatgaatcatttaaaaagagtgaagatttattccagactatctttttaaaaatgattgaagaattacagcaaaacttgatgcaagccgtcattaaagcggctccagaccctgagcaaatggtcgatgctggtttacgtgctctactgagtactttaaaagacgaccctcgtttggctcgtattgtgtatgtcgatgcaattttggtccaagaattacataatcaagccaccattcaggaaactctcgcccagtttgatcgtatgattcaagcttttgtgatgctaaccatgccgcaaatccagcataacgaaaatgaactctcattaatcgctactggtttaaatggatacgtgacacaaattgccgttcgatgggtgatgggcgggtttaagcagtctctagagcaagttttagcggcctgccgtatcgtttttttagctttgctcgcgaaagtttcaaaataa

SEQ ID NO: 41666 - DNA, 711 bp, Acinetobacter baumannii
gtgaaagatgactatattttaattgtcgatgatgagcttcctatccgcgaaatgatccatacctctttggacatggcaggctttcagtgtttacaggcagaagatgccaaacaggctcatcaaattatcgtcgaccaacgtccggcgcttatcttgctcgattggatgttacccgggggcgtaagtggggtcgacttatgtcgccgtttaaaaagagatgaaaacttagcagaaattccagtcattatgttgaccgctcgcggtgaagaagaccacaaagtacaaggtctggatgctggtgcagatgactatatgaccaaaccattttcaacccgtgaactggtttctcgtattaaagctgttctacgccgcgcaaatgcattaagcggtgaaaaaacaattgatgccaatggtttaattcttgatcctgtaagccaacgcgtaagctttggtaacagtattttagatatgggaccaacagaataccgtctgcttgcattttttatgacccatccggaacgtgcctatacacgtgcccagttgctcgatcaggtgtggggcggtaatgtatacatcgaagaccgtactatcgatgtgcatatccgtcgtttgcgtaaagtcttagaaccttttggtgtggaccgatttgttcagactgtacgtggtacaggttatcgtttctcaacacgtgcagatttagccgcaggttaa

SEQ ID NO: 41667 - DNA, 1359 bp, Acinetobacter baumannii
atgtatgaaccctaccccgtccccgaacaggtacgtgaacaaaagctttcccgctacagtagtttatggacgtttgctaaacaagatttacgacttttattatttttcctgattattgcaggtttagtcggtttaggaattgggtatttctggagctgtatttttattgcctttgtggtgttttttacacttcagttgcgttctttatatttggtcaatgactggattgccaataatccatacgatgtccctccgaacctcaacggaatttggggggcattattatttaacgtttaccgtgcccagcgccaagaacgtattgttcaagcggaaatggtaggacttattgaccgcgctcaatcttcattagttgcacttgccgaagcggtagtcttgattgatgatcaacatcaaattgaatggtggaacccagccgcagagcgtttactaggaattagtccacttgaccgtggtcgcaacttattaaccattttgcgccagccaacctttattgaatattttaacaatattgatcaggcacccgatgggattaaactccattcgaattttgatgatgaccgttatgtacaggttaagctcacacgatttggtggggaaagtcgcttacttgtggcatacgatgtgactcgtatgcataatcttgagcaaatgcgtaaagactttgtcgataatatttcgcatgaactacgtacaccattaaccgtgctcagtggttatatcgaaacctttaccgaccaagaagatattaacccgcgctggaaacgtgcatttgaccagatgcaatctcaaaccaaacgtatgaatgcgttggttaatgatttactactgttatcaaatttagaaaataataagaaaatcgcaaaaaatcagattattgaaatgccgagcttaatgaatcaattatttgatgatgctcaggcctacaatgccgattatgggcatacactcaatttacatattgatagccactgtgacctcatcggttcagacatggaaattgccagcgcatttagtaatttaattaccaatgccatcaagtatacaccaaaaggcggaaccattaccattggctggcacgatgacggtgagcatgcttactttagcgtacaagataccggtatcggcattaaccctaaacatttaccgcgtctgactgaacgcttctaccgcgtagacagcgaccgtagtcgtcaaaccggtggaacaggtttaggcttggcgattgtaaaacatgtactcatgcaacacggcgcctacttagacgtgcaatctaaagaaaatgaaggatcaacctttaccgcagtttttccaaaagaaagactctataacatgacttaa

SEQ ID NO: 41668 - DNA, 1197 bp, Acinetobacter baumannii
ttgattagaaaaagtaattctttattaaaaattttatttagcagtatttgtttgatatctggttctgctatggctgctccaattacagatttgagtaagcaaattgtgagtgaaaaaccgggctcaatactttctatagcgcaacaagatgtgacggatttatttcctcatgcagatcagcgcttattagtaaattatcgtagtcgaggtgtgaataacgagcctatcgttgcctcagcgtttattttattaccgaaaggaacaccaccaaaaaatggctggcccgtactagcttgggcgcatggtacaacaggagtagccgatacttgtgcaccttcgggtgattatgccggtggaccagttcattcatatcaggaagttgcttcaaaagcgttagatggttggcttgcacgaggctatgcagtagccgcacctgattatcaaggtctgggtactttaggtgcacatccttatatgaatgcaaagagccaattgcatacagtagtagatgcagtgcgggcgttacatatgcttaagccaaaagattttaataaacagtggttggtgatggggcatagccaaggcggtgctgctgctattaccgtggcggcttatggtcaaaaagatgctcccgaactagatttaaaaggggcaattgctcttgcgccaggtggctatcaatatgaaggcattgcagaatatgtgttgagtcatccaaacccagaaccaagtgtggcagcatttttcccgattgtattattgggagcgcaagcagcagagccaagtattattcctgagaatttagtcagtccagaaatgggcaatgtgctgactcaagcacgtagccgctgtttatctgaacttcaatctgatttgaagaaatctccttctagcatatttcgacctaatgcagatttaaaacctcttttatcttatttaaaacagcagtctattgaaaatatggtgccgactgtaccgttaatgattgttcagggttctaaagatcatttagttgaccctagaggaacatatgcttattaccaacagctatgtaaatcaaaaaaaccaataatttatcaaacgattgatggtggagatcatcgcgatgcactacgtcagagtcatacttttgccactgactttttaaatgtcatagagaaaaatcagacaaaatcgtattgctcaaatcttaagtaa

SEQ ID NO: 41669 - DNA, 759 bp, Acinetobacter baumannii
atgtcaaaacaaaaatttataccctacctgatttttcttattctcggttctctatccatccatagctttgcagacgtacatgtatatggtccgggtggcccagcacccgctatgaaagaagctgccaaacaattcactaataagacaggtatagcagtccatgtgacttctggtcctactgctcaatggtctgaaaaggcgaaactagatgctgatgttatatatagcggttcagaagccatgatgtctgatttcgaaaataccttttctgagcaaattataaaagactcggtagaacctttatatttacgtcccgcaacgattttagtgagaaaaggaaaccctaaaaatattaaaggatttaaaggcctcgctaaatctggcattaaagttttagttacacatggggcaggtcaagtcggtatgtgggaagatatcgctggcagaaccggaaatattcaattaacaaaagcttttcgaaagaatattgtcacctatgcagccaacacaggtattgccaagaaaaactgggaagaaaatagcagctatgatgcttggttagtctttaatatttggggaatcagtaacccagacgttggacaaattatacctatcgaaccagagctagttgtctatcgcgacacaggcgtagccttgactaaacatagtttaaaagacgctgaagcaaaacgttttgtagagtttttatcgtctcagcaaggtaatactattttcaaaaaatatggttggactaaataa

SEQ ID NO: 41670 - DNA, 1281 bp, Acinetobacter baumannii
atgcttgctaactatttaggaccttactgtaattttcatatttttttaggttctgaaatcatgttaaaagttaaatgtctgacagcttcgattttatctgtactttgtatttcactcactcatgccaatgattttaaagttttaaatcaaatttcaaaacaacctactcaccttcaaactggggaatataaagggaattattatgttccatctactttaaataccattacatggggttatttaccaaatcgagatgttaaacccgtgcttactgttccgtcgggtagtgtcgtaacatttgatacggtttctcatgaaggtttgcttgaagaccaagggcgtaatgctgaaaagttctttaaatcgaagggcgtaaattctaatcaaatattagaagatgcaaaaataattacgcaatcaaatttaaagcatgattttcataaagatggaccgcatattgtgacaggccctgttgcaattgaaggcgcacagcccggtgatattttgaaagttgaggtacttaaagttgagccgcgtgtaccttacggtgttatttcaaatcgacatggtaaaggtgctttagtaggggaatttcctaaaaaagcaaagcaagaaaatgcatcggctgagcatcctgaacgctatggaaatgtctcaattttcacaccaattgaaaaaaatgctaaaggtgagtacgaaggtgtattaaaaacagaatcgggtaaatcaatacgttttccgctgtatccttttatgggaattatgggagtagcagccaatacttctgagcctgttcactctgtaccacctgcaatgtatggcggaaatattgatattaatgaattaggtgcaggttcaaccgcttattatcctgttcaggttgaaggtgcattattctatacgggtgatagtcatttcgcgcaaggcgatggagaggtggcattaacggcactagaagcttcagcccgcgccacgttgaaatttaccttactcaaagcgggtaaggacaaaataccggggaaagaattaaaacaacctttagctgaaaatgctgagttttggattacaccaggacttgatgaagatctagatgaagcgatgaagaaatctacacgtgaagccattcgtttcttaaaccaagaatacgggattgatgaggcgacagcatatgcgtatttaagtgccgcaactgattttgaagtttcacaagttgtagataaaaccaaaggtattcatgcaaaaatcagaaaagctgattttaaagagtttgagagtaaataa

SEQ ID NO: 41671 - DNA, 852 bp, Acinetobacter baumannii
ttgagttttacatctcgcttaaaaaaagaattatttattaaggcacaaaatcttgttcctcagcatcagttaagtcgtgtagtgggtaaagttgctgcaagtgaaaatccaattttaaaagctgctgttattcatgcatttaaaaccaaatacggcattgatttatcgattgctgaacaaggcaatgcactgaaatataaatcttttaatgatttctttacccgtgccttgaaagatggcgtacgtttagttgatgaaaatccggatagtattgtttcaccagcggatggcgcgatttctcaaattggtaaaatcactgcgggcgaagtatttcaagcaaaaggccaaagtttctctgtagaaaagttaattggcgatccacaacttgctcagcctttccaagaaggtgagtttgcaacggtttatctttctccacgtgattatcaccgtgttcatatgccattttcaggcacattaactgaaacgttatatgtaccgggtgagttattttcagtaaatcaggtgactgctgaaaatgtaccgggattatttgcccgtaatgagcgtatggtatgtttgtttgatactgagcttggtcgtatggccgttgttttggttggtgctatgattgtggcaggtattgaaactgtggcaacaggtaaagtaaaaccatcgggtcgtatcgaattacagcatcatgagttgaagttagagaaaggtgctgagcttggccgtttttatttaggttctactgcaattattttatttgaaaaagataaaatcgagtgggaaaaacgttttaaagccgagtccgttgttgtcatgggcgaacgtatgggccatacaatttag

SEQ ID NO: 41672 - DNA, 855 bp, Acinetobacter baumannii
atgacgatgacactccctgattttaaactcgatttattaatagaagcagaagagttagtgccttatttaggcaatgaatatatccgtattgtagatttgagccgtgcatcagtttatgagcagctccatgttccgcatgctattcacttacagcctaaatggttagttgctcaacacgaagaagcaacaggtgttctaccggatgaagcgggtttacaagcgcttattgaaaaattgaatatttcaccaaatcaccatgtggtggtctatgatgatgaaggtggagcatgggcagggcgtttaatctggaatctccattgcttaggttttacccgtacaagtttaattaatggcggaattcatgcatggcttggggcaggtttaccaaccacagccgaggttgaagaattacctcgagttgataacttaattcagatcgatttatcacatgctgctcagttccgagtgaactatgaagaactacgcaaacaagttgagcaagaaagtgtgcaattgtgggattgcagaacgagtgatgaatatagtggcgtccgtttagcagcgcgacgcggtggtcacattccaaatgccctccattttgaatggagtactgcacttaatcgtcaaaatcatctaaaattgcatccgcttgaacgcacgcggcagcgtcttgaacaacttgggttcgatttaaagcaacctgtagtcgtatactgccagtcacatcaccgttctggtttggcttatattctggctagacttttaggttgggaagcaaaagcctatgatggtgcgtggagtgaatggggcaatcgcctcgatagtcctatcattactggagaatcgccgtcttga

SEQ ID NO: 41673 - DNA, 1215 bp, Acinetobacter baumannii
atgtctccaattatccattctttacttgatacagacttgtacaaatttacgatgctacaagtggttctgcataaattcccgcaaacacatagcgtctatcattttcgttgcagaaatttagaagatacggtctatccattagtggatattttggatgacttaaacgagcaactcgaccatttatgtaatctcaaatataaagaagacgaactacaatatttaagaaaattacgatttattaaaagcgactttgtcgattatttagaattatttcaactcaaacgccgttttattcatgcgagtatagatgaagaaggtcgattagacatccgtattgaagggccaatggttcaggccatgatgtttgagatttttgttttagccattgtaaatgaattatattttagccggattaaaacagatgaagtctgggctgaaggcgagcgtcgtttacaagcaaaacttgaattaattcagcaatacgaaaaagctcaacaaccgaatgatccaccatttttagtttctgattttggtacccgccgccgttatagttttgaatggcaaaaacatgtagttgctgcatttcataacactgtgccaaatgtgttccgtggtacaagtaacgtcttgcttgccaaagagttaaatattacgccaattggaaccatggcccacgaattcctacaagcttttcaggcgcttgatgttcgcttacgtgactttcaaaaagctgctttagaaacgtgggttcaagaatatcgcggagacttaggaattgctttaactgacgtagttggtatggacgctttcctcagagattttgatttgtattttgccaaattatttgatggcttacgtcatgacagtggtgatccgtacgagtggggtgataaagcatatgcacactatcgtaaattaaaaattgataccaaaaccaaaatgttgacctttagtgatggccttaatttgccaaaggcttgggaactacaccaatatttcaaagaccgttttcaggtgagtttcggtattggtactaatttgaccaatgacatgggccaaacaccgctcaatattgtattgaaactggttgagtgtaatggccagtctgttgctaaaatttcggacagccctggcaaaaccatgactgataacgatacattcttggcctatttacgtcaggttttccaaatcgaagagctggatgaagcaatttaa

SEQ ID NO: 41674 - DNA, 486 bp, Acinetobacter baumannii
atgatctattttcgctcggtatttcttgcaacttgtctgttgtgtagcagtataggagcttcggtttatgcagcaatgccatcttcacaggacaatggttcagcagaagtcattgaactgtttttttcagcagctaaagtcggcaatattgaagttttacaagaatttttaagtcatggttttccgattgatgttcaagatcattcgggttataccgcgttaatgatggcaagttattatgggcagaaagatgcagtaaaagtgttgctagaacaaggtgccaaccgttgtcttagagataaacgtggacatactgcattaatgggggccatcgtaaaagcagaatggggtattgctaaacaattgcgtcaagtcgactgtgatgccaatgccgctaaaacaggactgttgactgcagaacagtttgctattcaatttggacaacagcaacgtttaaaagacatccaaccgtcaacagaaaaatag

SEQ ID NO: 41675 - DNA, 1524 bp, Acinetobacter baumannii
atgtttaaacgaacatttttatttacaataattgcggcaacgctaagcacagtgtatgcagcacctttaacaaaagataatggcgcacctgtaggtgataatcagaattcaacaacagctggtgctaatggtgcaacgctgttacaagatgtacaacttattcaaaaactacaacgtttcggacgtgaacgcatccctgagcgtgtcgtgcatgctcgaggtacaggtgtatatggcgagtttgtctctactaaagatttgtcggatttaaccttggcttctttgttcaaagcaggaacgaaaacacctgtatttgtgcgattttcaacggtaattcatccgaaaggttcaccagaaactgcacgagatccacatggttttgctgtgaagttttatacccagcaaggtaattgggatttagtaggaaataatttgcctgttttctttattcgtgatgcgattaagtttccagactttgtacatgcaatgaaacctgatcctgtcactaatgttcaagatccaaaccgcatttttgatttcttacaaagccaaccatggtcgattaatatgttgacctatgtttattcgaatttgggtacgcctgagagttatcggactttagatggctttggtgtacatgcatttaagctctataacgacaaaggtgagtataaatacgttaaatttaactggcgttctcaacaaggcgtaaaaggcctgaatttagaacaacttcgggaagtgcaaggccgtgattggagtcatttaactaatgatatgtataagaacatctatgctggaaattacccgaaatgggatttgtacattcaagtacttgatccaaaagatctcgacaaatttgattttaatccgttagacgcaactaaaatctggccgaacgagctggttcctgaatttaaagtcggtacattgaccttaaatcgtatgccgaaaaactttttccaagaaactgagcaatctgcctttgcgcctggaaatttaattcctggtattgagccatctgaggatcgtttattgcagggtcgtgttttctcttattctgatacgcaattgtatcgtttaggtgctaattatcagcaaattcctgtcaatcgtccacgagttgcagtcaacaacaataatcaagaaggctttatgaatatgggtcaaactgaatcccatgtgaattatgagccaagtcagatcgagccaaaaccagcgaccgaaaaagccagagctgttcaaacaccactagaaggtacggtgatgcaacatgcaattcagaaacaacaaccatataaacaagctggtgatttatatcgtagctattcagcactagagaaaaaagacttaatccgtaatctagctgcagacttagggcaagtgaagaatgttgaaactaaaacggtcatgctgtcctatttctataaagcagatgcagattatggtactcgtcttgccaaagcagtaggtgtagatctgaaaatggtgcaagccaaagcagcccaactaaaagatgaataa

SEQ ID NO: 41676 - DNA, 444 bp, Acinetobacter baumannii
atgcgtgcattaattcaaagagtcctcgaagccaaagttgaggtcgatggtcaaacaacaggtgaaattaagaaaggtttattggtttttttaggtttaggaaaagaagatactttagagaaaggacaaaagctcatcgacaagattttgaaatatcgtatttttgatgatgagcaaggcaaaatgggctggaatgtatctcaggcaaatggcggagtcctgcttgtttcacagttcactttaatggctcaaacgcaaaaaggactacgtccagactttggtccggccatgccacctagcgacgcaaaagcactatatgaacagttggtagaatatactcgttcacagtttgaaaatgttcaaacaggtatttttgctgcggatatgaaagttcatttgattaatgatggaccagtcactttcaatttagaagttgaagcatag

SEQ ID NO: 41677 - DNA, 486 bp, Acinetobacter baumannii
atgttcatgaaactttcttctatacctgtagtcaagttaccacttgttgatgtcagtacagacccgttagatttattggtagcaggtttggcgctgcgtatgaaacagttggcacgtacaagtcctaagtttattgagctagtgcatgaccgcgcattccgtattcaaattggtactgatttaggtgtggctcgccaaattattattaatcatggtcacatcgatacagttgctggatcacctgaaaaagctgactttattttgcagtttgcagatagcgaacaaggcgtaaaaactttactcaaaggtgacccaacagcatttatgacgggtatgcaagacggcagcattaaaatggaaggtgatttcagcttgctcgtttggtttaaccaagcagctaaattgattccaccaaaattaccaaaaccagtaaaagataaagtacgtcaagcacgtgcttttattaaagaaaaaactggtcgttaa

SEQ ID NO: 41678 - DNA, 336 bp, Acinetobacter baumannii
atggtaacagcgaattttgccgctatcgccggactcagcttaattgctgtcgcgcttgttgctgtgttcttttctccttaccgtcgttggcttggttttatgcttgcagggatgtttttttgggggctattggaagtggtccgttttggagttcaagtcacttttgaaatgccagtcacatatagttatttaactgcactaagtctagcgatggtaatggttacatttgttttattacgtgaggataaacaggcacagaaggctttggcaaatcgccaatatatagaacacacgccagtatatgaagatgatcagcagcaatgttctagccgataa

SEQ ID NO: 41679 - DNA, 1224 bp, Acinetobacter baumannii
atgcgagaaatcattcttatatcctttttaggaccggaccaaccaaaccagtttacccgattaatgcaagtactatccgtacattcattgcaaatactggatgtaggtcaggctgttattcataatcaactgacattgggcattgtggtcgcctctgaaaatgaaaccgcgaccgcgttggcaatgaaagagattttgattttagcacatgatattggcttaacagtgcgctttaaacctatctcgggcgcagaatacgatcaatgggtcagcgaaggtggacgaactcgttatatcgtcacggctttagcaccggaactcactgctgcacatttacaagccgttacacaaattgtgtctagccaaggctttaacatcgaaactgtaactcgtttatcaggtcgtgtagatcttgaaaaagatagcacattgcctcgccgtgcttgtgtacagtttggtttaagcagtggtccgactttagatgctcaagctatgcgtgcagcttgtttgcttctttcaagcgaattaaatattgatgtggctgttcaggaagataacgcttatcgacgtaaccgccgtttagtctgcttcgatatggattcaactttaattgaacaagaagtaattgatgaattggcgcttgaagcaggggtgggcgagcaagttgctgaaattactgaaagagcgatgcaaggtgagttggacttccagcaaagtttccgtgcgcgggttgctttactcaaaggtcttgatgcatcagttttacctaaaattgcagagcgattgacgatcactgaaggcgccgagcgcctcatttcgactttaaaagcccttggatataaaacggcaattttatctggtggcttccaatattttgctgaatatttacaagctaaattaggcattgatgaagttcacgctaacgttttagatgtacaagatggcgttgtgactggtgaagtaaaaggtgtaattgttgatggtgcccgtaaagcagagttgctgcgtgagctggcgaacaaactcggtatttcactagagcaagcgatggctgttggcgatggcgcaaatgatttaccgatgcttgcgattgcaggacttggcgtagcatatcgtgctaaaccactggtgcgtcaaaatgcaaatcaggcgatttcaagcgttggtctggatggagtactgtatttactcggtatgcatgacaaagatttaagccgtgcttaa

SEQ ID NO: 41680 - DNA, 1290 bp, Acinetobacter baumannii
ttgattgcgcctagacaagggctatttgctagcctactgatcattagttttgcattgcatacctttttattggtgattgcaacgacacaccagctcaatgaaaaccgtgcgagccaaggtcagctcatgaccagtcaactcgttgcagacagcttatctgagcttgaacctgccaatacggtctctttagctctgattgccaatcgctatgcgaccaatccaagtgtggcatctatccgtattcttgacgccaataaacaagttttggcaacaagcggcatgtcaaaaactcgccaaggtgaaatttttgttcgtgatgcgcttcaaaacgagaaaaaagtcggttctattgaaatcacactaattcaaccaagtattggggaaattcttcgtacccaatggcttgcgattttagcctcactgtttttacatgttttattatggcttgcttaccgtgccatcgctcgcccaacgcgtagcgaatacttagctcgtattaacgaagaaaaccgtttaaaacatgaaattcaagagttaactcaagctctcgcgcttgaaaaacaaaatacagtgaccttggttgctcaagctcagcagcaagctaaagttaaaccaattgttcgctcgcaaccagaaaaaagcttagagtctacagaccaaaataccttggcacttaatattcaattttatgaccctaaacagttattaagtagtgttaaccagtctgtttctgtaccgtactttaaactttgtcagctctttttaaataagagtattgagctatgtacgaagcattatcatttgaaagcgactgatattgatgttgtagacgagtttcatgcagagggcgcaacacttgccatttcgacttcacatccacacgctgtagagtgtctacttatggtaggtacggttttccaattgctttcagacgttttatataagcgttaccgtgaagataaacgctttgcactacaaactcgcagtgccgtgtgtaatgccgtagaagcaatgcaaattgatgccaaagaagctgctcaacgtttagcgcaacatcttcatgcgaaagaatctgcactctaccttgataatgaacagcttaaagcaattcaagacagctatcagcttgttgcaatgcctaacccaagtaatgtcatgactcgtcatgcatttatgatcaatggtatgaatgctgaatgtgcagagcttgcacaaaatattcgaactgaaattttgatgggtaaaaaatcaattcctcaaaatgacagcccgagtagtgcagcatcttaa

SEQ ID NO: 41681 - DNA, 1122 bp, Acinetobacter baumannii
atgccgctgagtcgtgttgaagaacttgtcgccgatattcgtgcaggcaaaatggtcatcttaatggatgacgaagaccgtgaaaatgaaggtgaccttgtcatcgcagcaacgcatgtacgccctgaagatattaacttcatgattacacatgcacgcggtttagtttgcttaactttaagccgtgaacgttgtaaacaattaaacctcccgctgatggttgaccagaacggtgcccagcatggtactaactttacgttatctatcgaagcagctgaaggtattaccacaggtatttcggcagcagaacgtgctcacacgattcaagctgctgtggcagcacatgccaaaccaaccgatattgtacaaccgggccatattttcccactcatggcacagccaggtggtgtattacaccgtgcaggtcataccgaggcaggttgtgatttagcacgactggcaggtcttgagcctgcatctgtcatttgtgaaatcatcaaagaagatggcacaatggcacgccgcgcagatttagaaatttttgctgagaagcatggcctaaaaattggtacaattgccgacctaatccactaccgtatgaccaatgagcaaactgtagaacgtttggatcaaagaacgattcaaacagaatatggttcatttgagctctatcgctatcgtgagataggtaaccctgacattcatttggctttagtcaaaggtgagccaaaagaaggcgttacaacggtacgtgtacatggttttagtcctgttcgcgatttgcttaagctaaataaagctgacggtgaaccggcttggaatctagaccgtgcgctacaaacgattgcagcaagtgaccgcggcgttttagtctggatcggacaagatcatttgcaagacttgggaccagcgttggatgatttaactaagccaaaaccggtgaaatccaatgcagcactttcacatcaatatcaaaccattggtgttggtgctcaaattttgcgtgatttaggtgttgaaaaaatgaagcttctgagctcaccattgcgtttcaatgccttatctggctttaatttagaagtagtggaatatgtcactgctgatcaaatcacaacgaaataa

SEQ ID NO: 41682 - DNA, 471 bp, Acinetobacter baumannii
atggcaattcgccgtattgaaggtttattacatctcgcaagcgaaggtcgttatgcgattttagtgggtcgtttcaacagttttgttgttgaacacttattagaaggcgcgatcgacacgttaaaacgtcatggcgtaaatgaagataacattactgttattcacgctccaggcgcatgggaactaccgatcgttgctaaaaaattagctacatcaaaccagtttgatgccatcattgcactcggtgcagtcattcgtggtagcacacctcactttgactttgttgctggtgaatgtgcgaaaggtttaggtgtagttgcgttagaaagcagcttgcctgttatcaatggtgtattaactactgacagcatcgagcaagcaatcgaacgctcaggtacaaaagcaggaaacaaaggtagcgaagctgctttaactgcaattgaaatggttaatttattaaaggcaatttaa

SEQ ID NO: 41683 - DNA, 450 bp, Acinetobacter baumannii
atgtctcaaacactgcaagccgcttatgcagcaaaacgtaaagcacgtcgttttgctgtacaaggtatttatgagtggcaaatgagtcacaaccctgtacatgaaattgaagcgcgtacacgtgctgaaaatgcaatgcacaaggtagacttgaactattatcacgaactacttactcaagttatcgctcagcacgaagaccttgatgcgttacttattccggtacttgaccgtgaaattgacgcgctagatggtgtagagctcgcaactttgcgtttaggtgcttacgagttacgtgatcatctagaaattccatatcgtgtggtacttgatgaagcaatcgaacttgcgaagcattttggcggagcagacagtcataaatacatcaatggtgtattagaccgtttaagttcgacactgcgtagcgcagaaaaacaacaagcaaaataa

SEQ ID NO: 41684 - DNA, 918 bp, Acinetobacter baumannii
atggctgagttctcaattattgatcaatactttaatcgtcagtcacatcctgacgttgcgcttggtattggtgatgactcagccttaattactccccctccaaatcaacaactggtgatctgtgcagatacacttgttgctggacgtcacttccctcttgaaacctcgccccatgcgattggctggaaaagtgttgccgtaaatctgtctgatattgctgcaatgggtgccaaaccacatagtattttacttgcgatcagcttgcctcaagttgaccatgagtggcttgaaggatttagtcagggaatctatgactgttgtaatcaatttggagttgccttaattggcggagataccactcaaggtccgcaccttaccattaccgtcacagccatgggctggattgaaacaggaaaagctgtattacgttcaggtgctaaggtcggtgattatgtttgtgtaagtgggcagattggtgatgctgcttatgggcttcagcatttaggacattccctacaacaaagactggactatccgacgccacgttgtaagcttggagaagagctaaaagggctcgcctctagcatgatcgatgtgtcagatggtttagctcaagatttaggacatattttaaaagcatccaaggttggagcacgactcatcctggaaaaattacctgtcgatcctgtactgcaacaactagaagaacgacaacgttggcaatatgccttggcaggtggtgatgactacgaattatgttttacaataacaccgcaaaattatgaaaaacttttgcaaaaacaactagacgttaagattacaatgatcggacagatcgttgagcaaacaaaactaacttttgagcatttgggttcagattacccattgcaaattcatggataccaacactttgcataa

SEQ ID NO: 41685 - DNA, 516 bp, Acinetobacter baumannii
atggataccaacactttgcataaaccgccgattcattttaaagacatgtcttggttcaaccgctgcatcgttttctgtggggttggttttggatctggtcttgctcctaaagcacctggtacttttggctctgctttcgccttactttttgttcccatctggttatctctcgggtttactttaagtttaatcgctattctcatcatgtcagtggtgggtatttatatttgcggtcaaactgcaaaaatccttgatgttcatgatgatggtcgaattgtgtgggatgaatttgcaggtcaatctattacctttcttcctctgctctatttacaacaaataaattggatttgggtaattacaggatttatattatttcgaattttcgatgtttggaaaccttggcctatacgcgtcattgatcgccaagtacacggtggttttggtattatgcttgacgatattattgccggtgtatgggctgctctttgtacactaattattatccatttgagttaa

SEQ ID NO: 41686 - DNA, 1365 bp, Acinetobacter baumannii
atgtcaactactgtcattattcttgctgcaggcaaaggaacgcgaatgcgttctcagctccctaaagtactacaacctttagctggtcgcccgctactaggacatgttattaaaacagcaaaacaactattagcagaaaacatcattaccatttatggacatggtggcgatcacgtaaaaaagacattcgcacaagaaaatattcagtgggttgaacaagcagaacagttagggaccggtcatgctgtacagatgactttacctgtacttcctaaagacggcatttcattaattttatacggtgatgttcctttagtccgtcaaacaacacttgaacaactgattgaagtatcaaataaaaccggtattggcatgattactttacatgtcgataacccaacaggttatggccgtattgtccgccaagacggtaaaatccaagcaattgttgaacataaagacgcaaccgaagctcagcgtcaaattcaagaaatcaacacaggtatttactgtgtcagcaatgcaaaactgcatgagtggttgcctaagctttcaaatgaaaatgcacaaggcgaatactatttaactgatatcgttgcgatggctgttgctgatggtttagaaatcgcctcaattcaaccagagctcgcatttgaagttgaaggtgtaaatgaccgcgtgcaacttgcagcacttgagcgtgaatttcagaagcaacaagcaaaagaacttatgcagcaaggcgtaacttttgctgatcctgcacgttttgatttacgtggtacagtaaaagttggtcatgatgtccgtattgatgtgaatgtcattattgaaggcgactgtgaactcggtgactttgtagaaatcggtgcgggctgtattttaaaaaatacaaccattgcagcgggcactaaagtccaagcgtacagcgtttttgatggagcagttgttggggaaaatacccaaattggtccattcgcacgcttacgtccaggtgctaaattggcaaatgaagtacatatcggcaactttgttgaagtcaaaaatacaacgatcggtctaggcagtaaagctaaccatttcacctatttaggtgatgccgagatcggtgctgaatcaaatattggggcaggtacaatcacctgcaattatgatggtgcaaataaacacaaaaccactattggcgatgcagtttttatcggttctaatagctcgctggttgcgcctgtgactattggtaatggagcaacagtcggtgcgggttctgtgattacgaaagatgtggctgaacaaagtctctcctttgagcgtgctcaacaaatttctaaagcaaattatcaacgtccccaaaagcttaaaaaataa

SEQ ID NO: 41687 - DNA, 1839 bp, Acinetobacter baumannii
atgtgtggtatcgtcggaggcgttgcagaacgttgtgtaaccgagattttaattgaaggtttaaaacgtcttgaatatcgtggttatgattcggcaggcgttgctttactcaataaccagcaaattttacgtgaacgccgtgttggtaaagttgccaatcttgcagacgctgtttcagaacaccagcttactggagcaattggtattgcgcatacccgttgggcaacacacggtaaaccgaccgaaaataatgctcacccgcacatgtcaggcaaggtagcagtcgttcacaacggtattatcgagaactatcaagagcttaaagatgaccttcaagctttaggatatgtatttacttctcaaacagatactgaagtggtagcccatttagttgcagaagctctaaaaaatactgatagtttacttgaagcagtagaatctgtagttcctcagcttaaaggtgcctatgcgttaggtattattcacagcgattacccagatgaactcattactgtacgtgaaggttcaccacttgtaattggtgtgggtattggcgagaactttatcagttcagaccaattggcccttttaccagtaacaaaccgttttatttacttagaggaaggcgatattgcccgtcttactcgtacttcaattgaagtatttgtaaaaggtgaacgtgttgaacgtccagttaaagaacttgatgcaactgtaagcagtgcttcaaaaggtgaatataaacactacatgctcaaagaaatttatgagcagcctgaagcaatcaaacaaacaatttctcaagcgcttgatggcaacaatttacgtgatgatttcttgaaagatgctgatgcagatttcagtaaacttcaaagtgttcaaattattgcgtgtggtacaagttatcactcaggaatgatcgctaaatattggtttgagcaattgattggtgtgccttgccaagttgagattgcgagtgaattccgttatcgctcaccagtgattgtggaaaatacactttacatctgtatttcacaatcaggtgaaacagcggataccttagctgcactacgtgaaactcaaaaacgtgctaaagcaaataatatcgacattcagactttaacgatctgtaacgtcgcaacttcttcaatggtgcgtgaaactgatcaccacttattgacgcttgcaggcccagagattggtgttgcatcaacaaaagcgttcacgactcagcttgctgcattaatgttgttaatcttgaaaattggtcaagtgaaacagcgtattagcaatgtgatgattgaagagcttgctcgtgaattgtggcacagcccgaaagtcattcttgatacgcttaagcaagatgctgaaattttacgtttatcagaattgttcgttgaaaaacaacactgtttattcttaggccgaggcacacactatccaatcgctttggaaggtgcattaaagcttaaagaaatttcatatattcacgcagaaggttatgcggctggtgagttaaaacatggcccattggcacttgttgatactgaaatgccaatcgtgattcttgcgccaaatgacgaaatgcttgataagcttaagtcgaatatggaagaagttcaggcgcgtggcggtgagttattcgtttttgctgatgaaaatagcggtgtagtcgaaaaagatcgtcaacacgttgtacaaattccagcagtaaacgaatggcttgcaccaatcatttatagcgtaccagttcagttgttgtcttatcacgttgctgtattacgtggtacagacgttgaccagccacgtaacttggcgaagtcagtaactgtagagtaa

SEQ ID NO: 41688 - DNA, 801 bp, Acinetobacter baumannii
atgaataacaataacaacccgattggaatgattgattctggtttaggtgggttgtctctttttaagcatattcggcaggcccttccgaatgaagacattatctatttcgctgactcgaaatatgtcccgtatggagacaaagaaaacgactggattgtttcacgaaccacgcatttaatttcaaacttagttgctcagggcaaatgcaaagcgatcgtaattgcttgtaacaccatgacggctgtagcgattgaaacgattagagcgcaaattaatgtgccacttattgcaatagaacccgccgtaaaaccggcagtagcaatcactcaaagtaagcatattgcggttttggcaactgccaccacggtaaagggtaaaaatttaaaaagtttaattgaaacgtatgcgcaagatattaaagtgtctttagtgccttgtattggcttagctgaaaaaatcgaaacgggcaaagcacataccgcggaagttaaagattatttaaaaaatattttggcgccgttggtcgagcaaaaagtcgatacgattattttaggatgcacacactatccatttgtctcagatacgattcaggaaattgtaggccgtgatattcaaattattgagccttcggaagctgtgacagcgcaattaatacggcagctcaatcaatatcatttaagttctgaaagtccaaatgaggggaatcatattatttggaccagttcagacccgttggaagttgcggacgttactttttctttgttatctgagaaattgtctgtaaaagctgtagagctataa

SEQ ID NO: 41689 - DNA, 639 bp, Acinetobacter baumannii
atggaaaaatctttaaaagaataccaagctattatttttgatatggacggtactttagtcgactcctttagcttctttttaggggcattaaatcagcttgccaagaagcataaatttaaatctgtagagctacatgaagtagagcagtacaaacatctttcaccaaaagaaattatgaaagagatgaatgtttctaggtggaaactgccttggattgccaaagatttcattcgtttaatgaaagaaagagatcaagaagtctacatgtttgaaggcatgcgggatcagctaatagaactacataagcggggatatacgctcgcaattattacttcaaactctaaagaaaactgtcaaagtattcttggtacagaactatgtgaactttttagccatattgatggtggctcgtctatatttggtaaagctaaacgaattaagcgtgttctaaacattttgaatttaaataaagagcaggctatttatgttggtgaccaaacgactgatggcgaagctgcacataaagcaggcattgattttgctgcggtaggttggggttatacatcggctgaaaaattaaaaaccattcagcccaaagtcatgctaacagacttggcaaccatgaaaaaatttttctga

SEQ ID NO: 41690 - DNA, 1827 bp, Acinetobacter baumannii
atgaaaaacagaaccttacattttgcttgtatcagtgttttattttggatgtctcattcttctaatgctgcaccccccgaaataaatacaaataccatcgaaaaatcacaatctaaaccaaatagtaatgtctctgttcgggtgaaagttttaaaccagcttttacaggaacagtgggaatatactttgaaaaatagtcctgaaactgcaaccgttttaggagatttacgctacaacaatcgatggactgagctttcaaaaaatcagatcgagaaagataaaaaaagtacgcaaaattttttaaaacgttttgaagcaattgatagcacagggttttcagtaactgatcaattaaataaagatttaatgatttatcagttgaaagaaacacttaaaaattatgatttgaaattatatgaaatgccttttaatcaaatgtgggggctacatttacaatttccgggatttattagttcgattccatttgataatgctaagcaatatcaagactatatttctcgtttaaaacaaattcctcttattcttgatcaaggtattcagttagcgaaacaaggacaaaaagatggcttgatgccaccgaaatatttaattgaaaaggtggcaaagcagattaatagtattgcagctcccgcaggggcagacagtgtttttgcttctccattaaagcaatttccaaaaaatatttcgaaagcagaacaagagcgtttaagccgtgaaatattacagactatagatcagaatgttcggcctgcctatcaaaaactcggtacgtttattcagaaagattacttaccctatggacgacagcacgagggtatatggagcttgccaaacggtgacgagctctatcgcttttatgtagaaaataatacgacaacctcggaaagccctgaaaatattcatcagctcggattaaaagaagttgctcgtatagaagcggaaatgctgaaaattgctaaagcacaaggcttcaatgatttaaaaagcttccaacaatctttaaaaacaaatcctgcggttttcccaaaatctcgtgaagaaattttagagatatatcgcgggtatattgcccaaatgcaaccagagttgccgaagctgtttggtttattacccaaaaataaagtcgaagttttgcctgtagagcaatatcgagaaaaagaagcggcaggtgccgagtatcaccaaggcacgcctgatggctcacgccccggacaagtatatgtaaatactggcgacttctctgaacgttccaaaatatcaatggaagcaactgcttaccatgaggcaattcccggccaccatatgcagattgatattgcccaaaacttgccaaatttgccgatgttccgtaagcaacccaaccacactgcctacattgaaggatgggcactttacgcagagcaactgggtaaagatgttggtttctataaagaccagctttcagactatggaagactctcgagtgagttgttccgtgcttgtcggttagtggtggacactggcgtacactataaaaaatggacccgtcagcaaatgattgattttatgcgagaacactcagctttagatgaacccgatattcaggcagaggcagaccgatatatcgctattcctgcacaagcattggcatacaaaatgggtcaactcaaaattttagagctacgggagcttgcaaaacaggagcttggagatcgttttgatatcaaaacgtttcatgacatgattttaaatgcaggaacactgcctttaaatatactggatgcccgtattaaaaattggattaaggaacaaaaagcggcagcttaa

SEQ ID NO: 41691 - DNA, 954 bp, Acinetobacter baumannii
atggacaagaagttattttttaaacggtgtcacatgaatcacacatttaaatggcaaggccgacatgatggcgagggtgaggcacatcaacgtattcaccatataatgaacaccacccaacatgctgaatttgccctgattggttttagctctgatgaaggcgtaaaacgtaataaaggccgagttggtgctgccgacgcaccagatgcgattcgtacccaactggctaacttaccaattcatcgtccagtcagtattgtcgatttgggtacagtgacctgtgaatctgagaatttagagcaagcgcaaaccgagttggcagagcaagtcgcaaacagcttacaaaatggtttaaaaccgattgtattgggcggtggacatgaggttgcctttggcagctttagcggtctgttccaatatgtacaagcccacgcaccagataaaaaaataggcattattaattttgatgcccattttgatttgcgtgaagctgaacatgccacctctggaacaccatttttacaggcagctcgactttcagaacagcatcaaaaacaatttaattatttatgtattggggtcgctaaccatgccaatactaaagttttgtttgatacagccgatgctttaaattgtccatatttacgcgatcatgaggttaatatttttaacctaaacaacgtgctcgcagcgattgatgcttttattgaaaaagtagactgtttgtacgttacgattgatttagatgtcttcgcggctgcggttgcaccgggggtcagtgcaccagctgtcaaaggaattgatttagccacttttgaagcgatttttaagcatattcgagagactggaaaaattaaacttttagatattgctgaatgcaatccaaaatttgatttagacaatagaacagcaaaactggctgcctatattgtttatcaatatttgttttcttga

SEQ ID NO: 41692 - DNA, 1206 bp, Acinetobacter baumannii
atgaaaaaactttggcaaaactgccatattgcgaccatgcaaaatgggcaatattcctacattgaagatgctgcaattgtcacagaagggcatctcatccactggattggaaaacaacaacaacttcctgccgacacttattccgaaacagttgacttaaatggcgcttgggtaaccccggggctcatcgactgtcatacgcatagcgtatttggtggcaaccgtagtgttgagtttgaaaagcgcttacaaggtgtgagttatgctgaaattgctgcaagcggtggcggcattgccagtactgttcgtgcaacacgtgaagcaagcgaagaacaattactaagctcagcacttaaacgtattcgctgtatgcaacaagacggtgtaacgaccatcgagattaagtctggttacggactgaattatgaaaatgaacgcaagatgcttcgtgtgattcgtcaaattggtgaagctttaccaatgacggtcaaaagtacctgcttagctgctcatgctttaccgccagagtacaaagaccaaagcgacgcttatatcgagcatatctgtacagaaatgctgcctaaactgcatgctgaaggtttagtcgatgcagttgatgctttctgcgagcatttagcattttcacctgctcaggttgaacgtgtttttaaaacggcacaatcattggggctacccgttaagcttcatgccgaacagctttcatcgctaggtggttcaagtttggcagcacgttatcatgctttgtcggctgaccatttagagtacatgaccgaagatgatgtcaaagccatggcagagtcgggcacggttgcagtgttattaccgggtgccttttatttattgcgtgaaacacaatacccaccgattgaaagcctcattaaacatggcgtgcgtattgcgctgtcgagtgatttaaatccgggtacatctccagcactttctttacgtttaatgctgaatatgggcagtacgttattccgtttaacgcctgagcaagcattagcaggtgtcactattcatgctgcacaagcgcttggtttagagcaaacacacggtagtttggagcagggtaaagtcgctgactttgtcgcttgggatattgagcatccatctgaaattgtttactggctgggcggagatttgcctaagcgagtcgttcagcatggacaagaagttattttttaa

SEQ ID NO: 41693 - DNA, 1413 bp, Acinetobacter baumannii
atgtcacaaaactccacactacagcggggcttaaacacccgccacattcgtttcttggcattgggctcagcaattggaactgggcttttctatggttcggcaactgctattaaaatggcagggccttcagtattacttgcgtacatcgttgcagggattgcaatttatattgtgatgcgcgcactgggtgaaatggcagtccataaccctgtctctggctcatttagccactatgcttctcaatacattggtcctttggccggctttacgacaggctggacttatgtttttgagatggtgattgttgcaattgccgatgtcactgcgtttggtatttatatggggttctggtatcccgatgtcccacggtggatctggattttgtctctcatcatgttcttgggcgcaattaacctcattcatgtgaaagtctttggtgaactcgaattttggctctcaattgtcaaggtgagtgccattgttgccatgattttaggtggcttaggtttgatgttctatggcttccatgctgaccatagcagtgtagtgccggggattcaaaacttatggatctatgaaggctttatgccacatggcattgcaggcttggttgcatgtttatctgtagtggtatttgctttcggtggtatcgaaattattggtattacagcaggtgaatcacaagacccgaaaaccactttaccgaaagcaattaatgctgttccggtacgtattttacttttctatgtactaaccatctttgtactcatgtcgattttcccatggaaccagattggtagccaaggcagtccgtttgtacaaatttttgaaaacttaggcattaaatctgctgcaaatattttaaatattgtggtggtaactgctgcaatttcggcaattaacagtgatgtgtttggtgcaggtcgtatgttgtacggtatggcaaatcgtggtcaagcacctcgaattttccaaaaattatcgcgtaatggtgtgccttggatgactgtcgtggttatggctggcgtgctgttaattggtgtggtgctgaactacctgattcctgaaaatgtgtttgtcatcattgcatcaattgcaacgtttgcaactgtttgggtatggctcatgatcttgctttcgcaagtggctatgcgccgtaaattatctacagctgaaattaaggcacttgatttccctgtatttggctggccatatgcccctgcttttgcaatcggttttatggtgttcattttagtgatgatgggctacttcccagattcgcgtcctgcaatttatgtaggaatcacttggcttgctctcttaactattgcttatcgtatttgggtaaaaccagagcaaagcttgggaaaggaaagtgagcctgtccagcaaaacatagaaatggaaagctaa

SEQ ID NO: 41694 - DNA, 1539 bp, Acinetobacter baumannii
atggaattactgatccaaccgggaaaactgaccttagccgatttacgtcaagcttacctcaacccaattaaagttaaactagatgaaagtgcttcatctgcaattaatgcaagcgtggcttgtgtagagcaaattgtaaatgaaggacgtacagcttacggtattaatacaggttttggcttacttgcctcaactaaaattgcgcctgaagatttagaaaaattacagcgttcattagttctttcgcatgcggcaggtgtaggcgaagcacttgatgatgcaatggttcgtttaattattctattgaaagcaaatagcttggcacgtggtttctctggtattcgtcgtaaagtcattgatgctttgttggccttaattaatgctgaagtttacccacacattccacttaaaggttcagtaggagcttctggcgacttggcaccacttgcacacatgtctttagttttacttggtgaaagtaaggcacgttataaaggtgaatggttaccagcagttgaagctttaaaaattgcaggtttagaaccaatttctttagcggctaaagaaggtttggcacttttaaatggtacacaggtttcaacagcttacgctttacgcggcttattcgaagcagaagatttatttgctgccgcgacagtttgtggtggcttaagtgttgaagcaatgcttggttcacgtgcacctttcgatgcgcgtattcacgaagtacgcggccaacgtggtcaaattgatgtggctgcggcttatcgcgatttattgactgattcgagtgaaatctctcgttcacatgaagaatgtggcaaagttcaagacccatattctttacgttgccaaccacaggtgatgggtgcatgtttaactcaaatccgtcaggctgctgaagtattagaaattgaagcaaatgctgtatctgataacccgcttgtgtttgctgaacaaggtgacgtgatttctggtggtaacttccatgcagaacctgttgcaatggcggccgacaatttagcattggcaattgcagaaattggttcactgtctgaacgtcgtatttccatgatgatggaccgtcatatgtcacagcttccaccgttcttggtagcaaatggtggtgttaactcgggctttatgattgctcaggtaaccgctgctgctcttgcaagtgacaacaaagcgcttgcacatcctgcaagtgtggatagcttaccgacttcagccaaccaagaagaccatgtatcgatggctccaaatgctggtaaacgtctttggtatatggctgataacgttcgcggcattttagctgttgaatggttaggcgcttgtcagggtctagacttccgtgaaggtttaaaaagctcgcctaaacttgaacaagctcgtaaaatcttgcgcgaccaagttccttactacagtgaagaccgtttctttgctcctgatatcgaacaggctagtgaattgcttgcgagtggttgcctaaacgagttactcattccaaaactactccctagtttatctgaagtgtga

SEQ ID NO: 41695 - DNA, 1677 bp, Acinetobacter baumannii
gtgacaacaacgacaacaaaatttcgtgatgtagaaattcgtgcaccacgcggcactgaattaacggctaagagttggttaactgaagccccattgcgtatgttgatgaataaccttgatccggacgttgcagaaaacccgaaagaattggtggtatacgggggtattggccgtgcagcacgaaactgggaatgtttcgacaaaattgtagatacgctaaaaaatcttgaaactgacgaaactttattagttcaatcaggcaaaccagtaggtgtatttaaaactcataaagatgcgccacgcgttttaattgcaaactcaaaccttgtaccgcactgggcaaactgggaacactttaacgaattagacgctaaagctttggcaatgtacggtcaaatgacagcgggttcgtggatctacattggtagccaaggtattgtacaaggtacttatgaaactttcgttgaggcaggtcgccaacattacaatggtgatttaaaaggtcgttgggttcttactgctggtttaggcggtatgggtggtgctcagcctttagctgcaacacttgcaggtgcatgttctttaaacattgaatgccaacaagcaagtatcgatttccgtttacgtactcgttatgtagatgaacaagcgactgatttagacaacgctttagcacgtattgatcgctatacaaaagaaggtaaagcaatttcaatcgcacttcatggtaatgctgctgaaattttacctgagcttgtacgccgtggtgtacgtccagacatggtgactgaccaaacaagtgcacacgatccacttaatggctacttaccagtaggctggacttgggaggaatatcgtgaacgcgcgaaaacagaaccggaagctgttgtaaaagctgcaaaacagtcgatggcaaaacacgtacaagccatgcttgatttccaaaaaatgggtgttccaacatttgactatggtaataacatccgtcaaatggcgaaggaagaaggcgtagcaaacgcttttgatttcccaggcttcgtacctgcatacatccgtccgttgttctgtcgcggtattggtccattccgttgggcagcgctttctggtgacccagaagatatttataaaacagatgccaaagttaaagagttaattcctgatgatgagcatttacatcactggttagacatggctcgtgaacgtattagtttccaaggcttaccagcgcgtatttgctgggtaggtttgggcttacgtgcaaaacttggtttggcatttaacgaaatggttcgtagcggtgaattgtctgcaccgatcgtgattggtcgtgaccacttagactcaggttcggttgcaagtcctaaccgtgaaactgaagcaatgcaagacggatcagatgcagtatcagactggcctttattaaatgcattgttaaatacagcaggcggcgcaacttgggtgtctctacatcatggtggtggtgtaggtatgggcttctctcaacactcaggcgttgtgattgtgtgtgacggtacagatgaagctgctgcacgtattgctcgcgtactaaccaatgaccctgcaacaggtgttatgcgtcatgccgatgcaggttatgaaattgcgattaactgtgccaaagagcaaggcctacacttgccaatgatcacccaataa

SEQ ID NO: 41696 - DNA, 576 bp, Acinetobacter baumannii
atgattaaattgatcagggccgatcaatatacaaaaatgctttggaaaaatggtgcaggctttactttagaaattgctcgaagccaaggtgaagccgactttgagtggcgcatttcgatggcagatgtaacaacttctggaccattttcgttatttccgaataagcaacgcattattagcgtactcgatgggcagggcatggtactgcatgtcgatgaccttcctgccaaaaagctgaaacagggcgatatttttgcttttcatggtgaaagtcaggtccaaagtgaactggtagacggtgcaattcgggatttaaatttaatttatgatcctgcaaagtttcatgcccgttttcagtggttgaatgaggcagcggagcaggaatttataagttcggcagacctgatttttatttttaatcagggtagtgaaacggaagtgaacgttgatgagcattccgttcagcttgctgctcatgagacgctaaaaattgagaaaaaatctggtgtcacatcaatcaattttccaaaaaaacagctcaaaagttgctatatcattgagttaattcaacgttaa

SEQ ID NO: 41697 - DNA, 753 bp, Acinetobacter baumannii
atgcccagaacatcaaaacaagaacatactgagctttcgattgaagctgatagtccagttcctttatatcagcgcgtaaaacagctgatttcacagaagatttatgaaggctcttgggctgtaaataaaaaaattccttcggaaagtgaactcgttaatcaactcggctgtagccgtatgacggtaaaccgtgcgctgcgcgagttaacaacagaaggcttacttgttcgaattcagggtgttggttctttcgttgctgaagggcaaggccgaactgcactttttcaaattaacaatattgccgatgagattattgcacgaaaccataagcaccatgctgaagttttagtcttagaacaaatttatgcaaatgcagagcaaagcgtgttaatgcagactcgcgaagggcaaaaattatttcactcgattattgtgcattatgaaaatgatgtgcctgttcaggtcgaagatcgtttagttgatgcggcactgattccagattatttagaacaagattttaaaaccattaccccaaatgcttacctcatggcaaaagcacccgtgacagaaggtgaacacattgttgaggccgttttagcatcgcctcaagagtgtaagtggttaaagattactaaagctgaaccgtgtttactcatccgccgtcgcacatggtcaaacaaacaactcatttcaagtgcacgattgatttatccgggcagtcgctattatctcgaagggaaatttaatccatga

SEQ ID NO: 41698 - DNA, 1113 bp, Acinetobacter baumannii
atgcgtaattataaaatagatattcttcgaggaatttctatccttttggttcttttacatcattttaatattccttataaacttaaagatacatgtttaggttttgattttttaggtgaagcatttagcacagtcatcgcaagaaatggaaattatggcgtcaccatgttttttgtgatttcgggttttttaattacccatcacactttaaaacgagataaacaattttctgcaattaacctcaagcatttttatatccgacgggcagcacgtattttaccgtgtctggtattactcattttaggtgtaagcatacttggttcatttgacttaaaaccctttatgaaccaagcaccgaatggcattgaggtctcttatcctttaaccatatttgcagccttaaccttctggatgaatatcctgattattaaatttggttgggtaaactacgctttgggcgtgttgtggtcgctctctgtagaagaagttttttactttgtttttccattattgtgtctactcacccgtagtaataaggtctttattgctgtacttgttggagtgattttatatgcgccttattttaggtctctccattttggagaagaaagcggcgcttatttatatcattatttttcaagttttgatggtatagcggtgggctgtttaacggcgattttttctcataaatatcagccaaattggacctataaaaaacctctttcatggttgattattttgagtatgaccgctctatatttatatgcgcccattaaagaagtcagtacatggggtattagcttatttgctcttgccacaggtttactcattttgtgtttccaacatccttccgaaacacaagcacataatctatttaccaaagtgatggtctggttggggcaaagaagttacgaaacttatttgtttcatctggttgtgctgggccttttgaaagttgcttttgttccggctcaaaccgactctagcatcaaaattatacttttcattggctatttggttctgacttttatcattagcgcagcaattgaaaaatactattccaccccgcttaacagctacattcgaaaggtttttattaaagataaatcataa

SEQ ID NO: 41699 - DNA, 1266 bp, Acinetobacter baumannii
atgatcagtttaaatattattcaaagagatcaagccatgcacactgcaatcgccaactcatttgccaagcttcccgtcactgttttatcgggctttttgggtgcaggaaagaccacattactcaaccatattttaaataatcgcgaaggctgccgtattgccgtgattgttaatgatatgtctgaggtgaatattgatgcggcattagtacgcgaaggtggggcagagctttcaagaacagatgaaaaactggttgaaatgagtaatggctgtatctgctgtacgttacgagaagatttattggttgaggtgagacgtttagccaatgaaggacgctttgaccaattggtgattgagtcaacaggcatttcagaacctttacctgtggcagaaacttttacttttgaagatgaagatggaaactcactcaatgagtttgctcgactcgacactatggttacggtagtcgatgcgtttaactttcttaaagactacagttcagttgactccctacaacaacgcggcgaatcattaggcgagcaagatgagagaactgtggttgaccttcttatcgatcagattgagttttgtgatgtgattgtactgaataaaattgatttgattgatcaggctcagcaagatcagcttatcgccattttaaaaacgttaaacccgcgtgcccgaattgaaattgctcaatttggaaaggtcgctttagataaaattttaaatacacagttatttgattttgatgaagccgcgcaagcaccgggttggttaaaagagttacgcggcgagcatacacctgaaactgaagagtatggcattagtagctttgtttatcgtgcccgccgacctttccatccagagcgtttttatgatttggttcaggctgaatggccgggagtcgtgcgttccaaaggctttttctggttggctgccgaaccgacattggcttactcatggtcacaagcgggagcaatggctcgacacggtttagctggttattggtgggcagccgttgcagaagaagactggccgagtgacctagccagcattgaacaaattaagaaaaattgggatgcccgcacaggtgatgcgcgtcaggagctggttttaattggtatgcaaatggatgagcaagctttaatacaacgcttggatagctgcttgttaagcgatgaagaaatggctttaggaccacaagcatggcggagctggtctaatccttttaagcaagatgatgaaacgatgttgattgcttaa

SEQ ID NO: 41700 - DNA, 684 bp, Acinetobacter baumannii
atgaagcgttatttaggtttactcgtattatctctggcggcttgtagtactcaaacaccccagccgacgattactcatcgctctccctctttgcctcaaccatctaaaactgtggttaaaatcaaacaacagcctgaagattatatcgtttggattgcaactgcagatcacagacagtctgtacaagcttataagcaatttcttaagcaaaaaggacttgccgatttagttccagaccacgagttattacgttcagcccgagactggcaaaaatgtggagttgagccttacgcagttccaccacgcgagatttggtccaatattgttccgacgctcaatatattaaaagcattggttgatgatggcgtgattaacgattttgaagtgacttcggtctatcgagctttagctttaaaccgctgtgcaggtggtgcagatgcttcccgacatgtctttaatgcagcacttgattttaggattgggccagaacagcctagcgacttagaccagttcaatattcaacaaactaaaaccaagctttgtcagttctgggcgactaaaggccaagcgtttaatatgggactgggtgtttatgcttcaggacaaatccatattgatagtcaaggttttagagcatgggggccagaccatcactatagaacctcaatttgtcagggactataa

SEQ ID NO: 41701 - DNA, 1389 bp, Acinetobacter baumannii
atgtcaacacaagagcaaggaaacctgaaacatggtttgagtaatcgtcacatccagctgattgcgttgggtggagcgattggtacagggctgtttcttggtatatcacaatcgattaaattggcaggtccatcggtaatcttgggttatgcgattgcaggatttattgcttttttaatgatgcgccagctcggtgaaatggtcgtagaagaacctgtaagtggatcttttagccacttcgcttacaaatattggggaccttttgcaggcttcatgtcaggatggaattactgggtactcaatgtacttgtgtgtatggcagagttaagtgcaattggtctttatattcaatattggtggccgcaaatcccaacgtgggcatctgctctaacgttctttattctcattaatggtatcaatttactgcatgttaagttttttggcgaaatggaattttggttttccattgtcaaaatcttagcaattttagccatgatcggtttcggttcatatttacttgcaaccggcacagcagggcctcaggccagtatttctaacctttgggcattgggtggtttcttcccatttggtattgaaggcttggttatggcaatggctgtgattatttttgcttttggtggtattgagcttttcggtattactgctgctgaagcgcgtgatccagacaaaactttacctaaagctgtaaaccagattatctatcgtattttgattttctatattgcgacactttttgttttattctcactatttccatggaatcaaatggcagaaggtggcagtccttttgtgatggtctttgcttctttagatagccaaggtgttgcgacattattaaatttcgttattttgacagctgcagtttccgtctataacggaaccagttattgcagcagccgtatgcttttaggccttgcccaacaaggtaatgccccgaaagctcttgcccgtattaataaacgcggtattccaaccaatgcggttctagtctctgcatttgtgacggtattgtgtgttttactcaattatattttccctgaaaaagcatttggtttactcatgatgcttgtcgtagcagcgattgtgattaactgggtagtgatttcatggacacatttaaaattccgtaaattcatgcaacgtcaaggtcaaacgactaaattccctagcttcatgtatccatttagcaactatctttgcatggcatttatgcttggaattttagttgtgatgtctttaacgccagacatgcgtgtggcagttatgatgattccaggatggattttgtgtttgatggtggcttatcaatttaagcgccgtaaaataaaagctgagcagcctgtacatgctttagaagccgatatgtaa

SEQ ID NO: 41702 - DNA, 1308 bp, Acinetobacter baumannii
atggaacaaaaactaaactcttttattgaagtttcacctcaatctgatttcactattcataatttgccttatggtatttttagtagaacagccgaaggcgagcgtcaggtcggtgtagctatcggtgattgggtcattgatctcgctgctcttgaaaagcatggtcttttaaaactttcagatcaaaacacctactttaaccagcctacactgaataaatttattgaatcgggcaaagccaattggtctaaagttcgtaaaacgctacagtctcttctttcagttgataatttaacgcttcaagaaaatgaagcattacgtcaggaagttttagtcaagcaagacagtgttactttgcatttaccacttcaagtatctggttataccgatttctattcttctaaagaacatgccaccaatgtaggctgtatgttccgcgaccctaaaaatgccttacttccaaactggactgaattgcctgttggttacaatggccgtgctagctctgttgtagtcagtggcactcaagtcgtgcgtccatctggacaaattaaacttccaaatgaagagcgtccagttttctcagctacgcgtaaactcgatttcgaacttgaaacagcatttgttattggtaaaccaacggagcttggccagccaatctcaattgaaaatgcttgggaccatatttttggaatggtattactcaatgactggtcagcgcgcgatatccagcaatgggaatatgtacctctaggtcctttcaattcaaaatcttttgctagtgccatctcaccttgggtagtcacgcttgaagcacttgagccatttaaagtggaaggcccaaaacaagagcctaaacctttagcgtatctacaagaaaatatcgcgaatagttacgacattaatttgagtgttgaaattcaaagcccgaaatcaacacaacctgatgtgatctgccgtactaattttaaatatatgtattggtctatggctcagcagctaactcaccacaccattggaggctgtaacgttcaggttggtgatttaatgggttcaggtactatttctggttctacaccagattcgtatggtagcttgcttgagttgacttggaacaccactaagcctctaacacttgcgaatggtgaaactcgtggtttcttgcaagacggcgacacactcatcatgaaaggccactgtgagaaaaatggtatccgtattggttttggtgaagtccgaaatacggtacttcctgcattaacttttgattttgcagaaacttcggagcctgattatgaagctgtatag

SEQ ID NO: 41703 - DNA, 633 bp, Acinetobacter baumannii
atgaagctgtatagttactttcgtagctctgcagcttacagagtacggattggtctcaaccttaaaagtctcgcttatgaaactgtacccgttcatttagttaaaaatgagcagcaaagtgaagactatttaaagttaaatcgcagtgccttagtaccaactttagtggacggcgatttaaccctgtcacagtcattaagtattttggaatatctggatgaacaatatcctgaaaccaaattacttccaaatgatgtgaaagagagagccaaaatccgtgcttttgcacaggcgattgcctgtgatattcacccgttaaataacttacgcgtgctgaaatatttaaaaaatgatttaaatgtttcggatgaacaaaaaaattactggtatcagcactggattcttgaaggctttcaaacactcgaacagcaacttcaagattcaaatggacaattttgctttggacaacacgcaaccattgccgactgctgcctaattccacaggtttacaacgcgaaacgcttcaagattgatttgtcggcgtttccaaaaattgaatcaatttatcaacattgtttgtctatcccagccttctataacgcggcgccagaacaacaaccagattgggaatag

SEQ ID NO: 41704 - DNA, 549 bp, Acinetobacter baumannii
atgacatttgccattaaaaaaatacatcacgttgcatatcgctgtaaggatgcgaaagaaactgttgagtggtataaaaaaatgctcaacatggactttatcttagcttttgcagaagaccatgtaccttcaacgaaagcctttgacccgtatatgcatttattcctagatgcaggtcaaggcaacgttttagcattttttgaattgccaacccaaccagaaatgggccgtgatgaaaatacgcctcaatgggtgcaacatattgcctttgaagttgaagatttaagtgcccttttagctgccaaaaaacatttggaagacaacggtgttaaagtgttagggattaccaaccacggtatcttccactcaatttatttctttgatccaaatggacatcgtttagaactgacttataacgatgcacatgctgaagaaaaaattgcaaaaattactgaagaaatgaaaactgaaatgttagaggaatggagcaaaaccaaacgcgctccacaccatactcatttcttgcatgaagaagaattaggcgcgtaa

SEQ ID NO: 41705 - DNA, 780 bp, Acinetobacter baumannii
atgattgaagaaaaaatatctgggggggttcaatcacttgaagttggcttatccgtactaaatgcccttttagagcacaatcaacccattattctcaaagacttatctagtaagcttgagatgcatcctgccaaagtacaccgctacttggtgagcttaattcgcatggattacgccaaacaacttgaggatggccaatatgccttaggtgatcaagcatggcgtttaggcttaaactgcattcagcacagcgatactttacagttagtacaacatttaatttacgacttacaaagcaaaattggctgtggtattcaaattagtaagtggtcacccaaaggccctgtcgtggttcaatcgattgaatctaaccacccaatttcgattgtgaccaaagttggctcaattatgcctttagtcaattctgctgctgggcgtttatttgcttcttaccttcctgagcattttgttcgtcctttattagaaactgagtggcaaaaacatcaggaacttgggctaaacattgcgccacataactgggaagaatttttagaacttaaagaaacgatccgccaacaacaaatgtctgcggcgaaaggtgatttacttaccggtattaacgcagtaggcctgccagtatttaactcaaaccaagggattgagttttgtattgtggcgcttgatagcgaaatgtttttacctgttgacccacaaagtaaaattattgaaacacttaaaaatgagattaattcaattaatcaatatattaaaagccgctaa

SEQ ID NO: 41706 - DNA, 1056 bp, Acinetobacter baumannii
atggatattttagagaacccattagaattatgcggttttgcatttattgagtttgtttcaaaagaaaatgaattagatccaatttttgaaacaatcggcttttcaaaagtagccaagcataaatcgaaaaaagcgtacttatggcgtcaaggaaatatcaatattatcctgaattatcagccagaatcttatgcttcattcttttttaatgagcatggtccatctgcttgtgcgatgggattcaaaactcgtgatgcagcaaaagcttttaaaaaggcggttgaacttggtgcagaaccaatgtactcaaaagttgggccaatggagcttaacattccggcaattaaaggtattggtggtatgccaatcttcttagttgaccgcgatatttatgaaaatgactttgttttctttgatgatgcgcagcgtaaccctgaaggtgcgggcttaaaagaaatcgatcacttaactcataacgtctacaaaggacgtatggagtattgggcaaacttctacgagaagatttttaacttccaggaaattcgttatttcgacattaaaggtgaatatacaggtttaacctctaaggcattaactgcaccagatggcatgatccgtatccctttaaatgaagactcagacaagggtaacggtcaaattgcagaattcttagctgattttaatggtgaaggtattcagcatatcgcgtttatttgtgatgacttaatttcgacttgggataaattgaaaggccttggtcttaagtttatgacaccaccgccaaatacgtattatgaaatgcttgaagagcgtttacctgaacatggtgaaccaactgaagagttaaaacaacgcggtattttattagacggcagtactaaagatggccagaagaagcttttattacaaatcttctctgaaaatatgattgggccagtcttctttgaatttattcaacgtaaagatgacgatggtttcggtgaaggtaacttcaaggcattgtttgaatcgattgaacgtgaccagattcgccgtggtgtgctcgaagcaaaataa

SEQ ID NO: 41707 - DNA, 471 bp, Acinetobacter baumannii
atgcttttaatcagtgcctgtttaattggagagcctgtacgctacgatggacgctcttgctcacacactacacttaagcagctatttttaaataaaaaagcgcatgcactttgtccagagttattaggtggttttactactccaaggttacccgcagaaattgtgggaggaacagggcaagatgtacttgatggcaaggcaaaaatcctagattcatctggtttagatgtgactgagctatatttaaaaggcgcctatcgtactttagacattgcacggcaaatacaagcaacttgtgtggttttaaaagaaaacagtccgtcttgtggtagtcaaaaaatttataacggtacttttcaaggcgagaaaattacgggtgttgggattaccacggcactgttacagcgccatggttttgaagtgatttctgaaaatgagattgaagaatggttaacagcacatcctctttaa

SEQ ID NO: 41708 - DNA, 1344 bp, Acinetobacter baumannii
atgaaccagatttttaaattatttattcccatgctctctagcaatttaattgtagttttaagtggattggttgatattgcttatgtagggcattttagtaatgaccatgttgccgccttatcggtgtccttatctttatatacagtggtttatgtcattggaatggggatactgcaaggtgtgatgcttaagctctcggaagcttatggttgccataacataccacgtattcgtcaaatttttattcaaggcgtttggctgatgttaggttcggcattggtgagtattgccttgctttacttgttccgtgatctaccaaaattatttggtgcatctgaacatgtcgtttcaattactaaaaactgtatttgggctttggtatttattttacctgcccatttattgatgcgcttatttacagctttgtctcaggtcactgaaaatgcgtataaagttttattatcagatagtcttttcttcattcttaaaattattttgtcttatcttctgatttatggtgtcgctttattttcaattccgccactcggggcgataggggcgttgttagccactatcattgtacggtggtttatgttggccgtttattacctgttttttctagagaaaaggtacatctttattgaacatccagaacggtcagttgaagatagccggcaaagtctgcgtatgattttaaaaataggaatacccacagcgatcatggcgttgatggacgttgttgcattttgttcagttgctattctgattttacctttcgggagtgtggtgtctgcagcccatcaaattgtcgcgagcactggcggtttcatgtttatttttccttcatcaattgcctcggcttatagcattttggtgtcaagaactatgggcagcggcaacatgaaagaagcagataaaattgccagacaaagtatatgggtcattatggcagtgagtggcagtttatccttgtgtttatggttggagaggggcttaattgtcacgttctattcagatgatttggctgtacagattttggctgcatcactgctcttgattgtctgcatgtctcattttctcgatggcttaatgacgttactaacctctttgctgcgttgttgggatgtgtcgattttacccatgctaatttttttagtcgtggtgctatgtttcggattgggtggtggttggtggatggcttataaggggctgcactggggaagtcactctatatctgcaatgggaatttatggtttctggagtatggcagccataagctatttagtagcttgtgtattgagtggcttctgttttcgttttagaaagcaattaagaggtttttga

SEQ ID NO: 41709 - DNA, 939 bp, Acinetobacter baumannii
atgtctgcattactccgttttactcagtttgttcaaaagacgtttgccctatgggtaattattttcgcagctctggcgctatggcaacctgaattttttgtttggctcaaagcgtacatcccatggattttgggcattattatgcttggcatgggaatgaccatgaccgttgatgattttaaaggggtactacaaagccctaaagctgtgttaattggggtggtcgcgcagtttgtggtgatgccgggcttggcatttattttatgtaaattatttaatttgcctcctgaaattgcggtcggcgttattttggtcggttgttgcccaggaggaacagcttcaaatgtcattacctatatggccaaaggcaatgtggctttatcggtcgcctgtacctcggtatcaacactcttggctcccgtgttaacacctgcaattttctatctactcgccagccaatggctaaagattgacgcggcttcgatgtttatttcgattttgcaggtcgtactacttccgattgtgattgggctgattttgcgaacttggcttaaacgtcaggttgaatcctatattcaagtcatgccattagtttcagtgattgcaattgtagcgattgtggcagccattattggtggcagtaaagtagctattttacagtcgggtttgctcattttggcggtagtgatattgcataatgggcttggatatttattaggttttgccgcagcgcgtttctttaaattgccttatgcggacagtaaagcaattgcggtagaagtaggaatgcaaaactcaggcttaggcgtggcgcttgcagcagtgcattttgcggcttccccgattactgccgtaccaagtgctattttcagcctttggcataatatttctggtcctgcacttgcgacttattgggcaagtaaacacaaacaagaataa

SEQ ID NO: 41710 - DNA, 645 bp, Acinetobacter baumannii
atgaaaatgaataaacaaccacaaaattcggctttagtcgtagttgacgtgcaaaatggttttacccctggtggaaacctagcagttgccgacgccgatacgattattccaaccattaaccaattggcaggttgttttgaaaatgtagtcctcactcaagactggcatccggataatcatatttcttttgcagccaaccatccgggcaagcagccatttgaaacgattgaactggattatggatcacaggtgctttggcctaagcattgtatacaaggcactcatgatgccgaatttcatccggatttaaatatcccgacagctcaactgattatccgaaaaggttttcatgctcatattgatagttactcggcttttatggaagccgaccactcaacaatgacaggtttaacgggttacttaaaagaacgtggtattgatacggtctatgtggtcggaattgccaccgacttttgtgtcgcatggactgctttagatgcggttaagcaaggctttaaaactttagtaattgaagatgcgtgcaaaggtattgatcttaatggttcattagaacaagcgtggcaaactatgcagcaacaaggtgttgttcgtattcaatcgactgatctgttgaatgaatgctag

SEQ ID NO: 41711 - DNA, 894 bp, Acinetobacter baumannii
atgactcagcaagcacagaccattcaaggctcaatcgtcgcaatcgtcactcccatgttgaaagatggcggtgtagattggaagagtcttgagaagctggttgagtggcacatagaacaaggtacaaacagtattgtagccgtcggtacaaccggcgaagcctcaacattgagcatggaagagcacacacaggttattaaagaaattattcgtgtagccaacaaacgtattccaattattgccggtactggtgcaaactcaacccgtgaagcaatcgaattaactaaagctgccaaagaccttggcgcagatgcagctttacttgtaaccccatactataacaagccgactcaagaaggcctttaccaacactataaagcgattgctgaagctgttgaattaccgcttattctttacaacgtacctggtcgtacaggtgtagatttgtcaaacgatacagctgttcgtttagcggaaattccaaatattgtcggcattaaagatgcaacaggtgacgtaccacgcggtaaagctttaatcgatgctttaaacggcaagatggctgtgtattcaggtgatgatgaaactgcatgggaacttatgcttcttggcgcagacggtaatatctcggttactgcaaacattgcacctaaagcaatgagcgaagtatgtgcggttgcaattgcaaaagatgagcaacaagcaaagacgcttaacaataagattgcaaatttacacaatattctattttgcgaatcaaacccaattcctgtgaaatgggcactacatgagatgggactgattgatactggtattcgtttaccactcactcctctcgctgagcaatatcgcgaacctctccgcaatgccctaaaagatgcgggaattatttaa

SEQ ID NO: 41712 - DNA, 606 bp, Acinetobacter baumannii
atgatgcaattacgtcttggtttagtccttgcagtttcagccttaagtttagctggctgtggtcgcttcgcactcaataatcactctttagattataaaaatgcaaagcaactcgccccacttgagtaccctgccgatgcaactgtacgaccagcgacacctttgtatcctgcaccaacagtagaccagcttgctatcgatcacgcaccgaagtttgaaaacaagcgtggcaatcgttttgcattgccacgtcctgaaccacttcaaactgatacgacagcagatgcatctgctcaaacaggtagtgcgcttggtcgccctcaacttgtgacagatggtaataaaaatccactgttaaaaattgatggaagtactgccgagatttggcaatacaccaaagctacgttaagcacgttaaattacaacgtcatcgctcaaggtaacaatcaagcgacgattaaagtaaatgacaatacatatgtgcttaagctcactggtgttggctctagtcatagccttgctctatttaatccagataacacttttgctagccctgatgttgccgcagaagtgttaaaccagatttaccaaaattggccagcctag

SEQ ID NO: 41713 - DNA, 720 bp, Acinetobacter baumannii
atgttaaaacaaaccttgctctatactggtaaagcaaaatctgtatatgaaacagacaatgccgaccatctgattttagtctttcgtgatgatgcctctgcgttcaatggcgaaaaaatcgaacaactagatcgtaaaggcaaggtgaacaaccgttttaacgccttcatcatggaaaaacttgctgaagcgggtatcgaaacgcattttgaaaaattgctttctccaactgaagttcttgttaaaaaacttcaaatgattcctgttgaatgtgtaatccgtaactatgcagcaggttctctatgccgtcgtttaggtgtagaagaaggtaaagagttaactcctcctacatttgaattgttctacaaagatgatggcctaggcgatccaatggttaacgaatctcaagcgattgctttaggttgggcgactgctgaacagttagaacaaatgaaagtgttaacttataaagtaaatgatgtattaaaagcattatttgctgaaggcaacatgattttggtggacttcaaacttgaatttggtgttttccatgatcgtatcgtacttggtgatgaattctctccagacggttgccgtttatgggacaaagacactaagaaaaaactcgacaaagaccgtttccgtcaaggcttaggcggtgttgttgaagcttatgaagaagttgctgctcgtttaggcgtagatttatctgacatctaa

SEQ ID NO: 41714 - DNA, 204 bp, Acinetobacter baumannii
atggaactattcaagcctgaaaagagattaatgaatcatccaatccattttggtgaaaatccattagtgattttatctaattttagccattctgccttaaagcaaggatggagccaagctgaagtcgaaactgtcatttctgaagcttcccaaggcgactatatgaaactcatacgtaccctgagagcatataccttgttttaa

SEQ ID NO: 41715 - DNA, 840 bp, Acinetobacter baumannii
atggaccatgaactagaagaagagaaagtcgatcaaaccctaagctggcgtgaaaaaatggcagttgaagaacacgagaaactgtcgccccgtttagtgtatgaaattatccgccgtgatggtgccgaagagttagatcgcccaacagccgcgctcatcttttcaggcattgcagcaggtctagtcatcagtttttcatttgtatttaaagcgattattgcttcttatatcccaactgatgccatctggaccgatttaattaccaatttcggttataccattggattcctgatcgctattttaggacacatgcaactctttaccgaaaataccattactacagttgtgcccctatttaagccctttaccttagacaaattacgagctgtaggacgtctatggggaatcgtgattctatgcaatatcattggaacagctttggcgagtttattcttcctgaccaccgacctgtttactccaaacattgataaagcactagatgagctcgcacatcatgttgcgtctttttccgccatccaaaatctgcttaaaggggttatgtctggacttttaattgctgcattggtctggatgctaccttccgtcagcaataaattcctagtcatctttttcatgacttatctgataggactaggcgactttacccatgtggtcgttggctctaccgaaatgtcctatctggtctggcaaggagaagcttctcttggtgaatatatgtttaatttcctgatcccaaccaccattggcaatattattggtggtacaggcgtgtttaccctgctgatttatggtcaggtgactgaagaattggaacaatag

SEQ ID NO: 41716 - DNA, 1266 bp, Acinetobacter baumannii
atgtcagacacccatattccacttcctgaacgcctgcgcccgagagacttgtctgaaattattgggcaagatcatttgttaggtgaacatgcacccttacgtcaaatgattgatcagggacatttgccttctattattttttgggggccgccaggcgtcggtaaaacgacaattgctttgcttttagctcaggcaatagatcgtccatttgtgagcttatctgcgctgaatacgggcgtaaaagaattacgtgaagtgattgcagaaagtggtgacttactgacccctgtagtttttattgacgaaatccatcgctttaataaatcacagcaagatgcattattaggtgccgtagaaaaaggtaaaattaccttaattggcgccaccactgaaaacccgtcttttgaagtcaatagtgcacttttatcacgctgtcaggtctataccttaaacagtttagacagtgaggcaattcagacgctacttaacaatgcactccaaaacgataaatttttaaaagaacgctatattcatattgaagagtatgatgctcttttacagtttgcagcaggtgatgcccgtaaagcactaaatttactagacttaattgcaagtacttttgagcccgaagttgaaaataccattaccaatgcagttgtagtaaaagtcgctcagcaaaatattgcgcgttatgacaaatcgggtgaacagcattacgacctcgtttctgcctttatcaaatcgattcgtggtagtgatccagatgcggctttgtactggatggcgcggatgcttaaaggcggggaagatccggtttttattgcaagacgtatgttgattgccgcttcagaagacattggaaactcgaatccaaatgcactattgcttgcaggtgaatgtttccgttctgtacaggcggtgggaatgcctgaggctcgaattattttgggtcaaacagcagtttatttagcgaccagtgcaaaaagtaatagtacttacctcgcgattaataaggccttggaacttgctgagaaaacggcaaatttaccagtacctttacacttgagaaatgcgccaaccaagctgatgaaacagcaaggttatggaattaattatctctatcctcatgactacccagagcactttgtactgcaagactacttgccacctgagttaaagggaaccaaactctatgagtcggcaagaaacaagcgtgaagttgaaggtgaacgcttacaacaacgcagatggcagcaggaacaatag

SEQ ID NO: 41717 - DNA, 1173 bp, Acinetobacter baumannii
atgatgagacgattagcagcccccttattatgtagtagtttcttcttgttaatggcctgtggctctaataatactaattcaaaaaatcctgaacaaaatacaactgcaaaaacagagcagatcagtgctgccaaacaaacttatcaggtcgaggcagtcgcacattttaaagagccttgggcgatcaccagtttgcctgatcaacgcttattggtgactgaacggcaaggtaagctaaaaatttttaatccacaaaataaacaagtgctagatgttcagggtgttccagcggtgaactatggcggacagggtggtttaggggatgttgctctacacccagactttgccaaaaactactggatatatcttagttatgcagccaaagggcaaggtgggtctggtgcagtgatttcacgtgcgaaactagatttatctaatcctaatcaaccaaaaattaccgatataaagcaaatttggcagcaagtacctaaagtgtcaggacaaggccattatgggcatcgcatgctttttggtgcagatggtaagctttgggtcagttcaggtgagcgtcaaaagtttgaccctgcccaaaatatgaaaagtaacttgggcaaaatcttgcgtttaaatgacgacggttcagcagccttaggtaacccattttatgagcaaggcggtgtcactgctgaaatatggtcacttggacatcgtaacccattaggaatggcctttgatcgtaaaggacagctatgggtggttgagatggggcctaaaggtggtgatgagcttaatattattaccaaaggcgaaaactatggttatccgattgtttcaaatggagatcattattcaggtcagcctattccagatcatcacacgcgcccagagtttaaagcgccagaaattgactggacccctgtaatctcaccgtcgagcttaattatttatcgcggacaacaatttcccgcatggcaaaataaagctttaattggcgggttatcttcagaagcaattgtagttgtagatttagagcataagcccgtaaaagaagtacaaagattagagatgaagcaacgtattcgtgggttacatgaagcacaagacggttcaatttgggtaattgaagatggccccaatgctcgtttactcaagctgagtaagaaaccctcttaa

SEQ ID NO: 41718 - DNA, 459 bp, Acinetobacter baumannii
atgtctaccgagacctcacttcgtccattgttttggaaaaattatacgctagagcaactgactcaggctgagtgggaggcactgtgtgatgggtgcggattgtgctgtttggtcaagctagaagatgaagatacacatgaagttgcgtacaccaaagtggcgtgcaagttacttgattgcaatactggacgttgttctgactacccaaaccgtcagcagcaagtacccgactgtttacaactaacaccggaaactttaaaaaccatacactggttgccatcgagctgtgcctataaacgtttgaatgaaggcaaaaatttaccttcttggcactatttaaatacgggttccagacaaagcgtagtgaaagcgaaaaagtcggtagcagggcgttgtattcctgaaactgatgtacatgaagatgatatcgaagattatgtggtgcgttgggtgcgttaa

SEQ ID NO: 41719 - DNA, 159 bp, Acinetobacter baumannii
atgttccgttgggcaataatttttgcagtgattgcactcattgccagtctattagggtttggtggtgttgcagggttatctaaagactttgccgtgattttattagtgatagctgtaattctcgctgttattggttttatttcgcgaggccgaacttaa

SEQ ID NO: 41720 - DNA, 738 bp, Acinetobacter baumannii
atgagtacagcaattaaaacccgtgaaattcaatatactgcaccagatggtagccatttaattggttactttgcggctccagaaagtgaaacacctgtaccaggtgtcattattggtcctgagtggtggggtcgtaacgaatacactgaacaacgtgcgcgtgaacttgctgaacacggttatgctgcacttgcaattgacatgtatggcgataaaaaagtaacaacgactgcagctcaagcttatgaatggatgatgcagacatttgaagatctagacactgtgactgatcgtgccaacgcagggcttcagactttggctgctcaaccggaagtaaatagtgaaaaacttgcagcggtaggtttttgctatggtggcaaagtggtactcgatctagctcgctcaggtgctcccctcaaagcaactgcgacatttcatggtacattagctcctaaggctcctgctcaaaaaggcaacattcaaggtgaggtattggttctacatggtgaactagacagcatggtcaccttagaagatgttgctaattttgaaaaagagatgcaagctgctgaggttaaacatgaggtagtggttttaaaagatgctaaacatggctttagtaacccgcttgcagatgaaagagctaaagcgaatggtgtagaccttggctacaacagcgaagcggaaaaacaaggccttgctaaaatgtacgctttattagaacgtactttaaaataa

SEQ ID NO: 41721 - DNA, 363 bp, Acinetobacter baumannii
atgactgacaagaaatgtccgtattgcgattttgatgaatatgacatcattgataagaatgaatttgctgtaattttgccagacccaaatccgttgtctaaaggtcactgtgtagtgactccactacgccatgtcagctcgttttttgatattacgtctaaagagcaccaaggcttactgacacttcttgaaattgcccgtcatgaaacccagcttcgccatcagccagacggtttccatattggctttaatgatggtgaagtgtttggacagacttctgaccatttccacattcatgtcattccatattacaaaaatcaaccgttgaaacttgatcaacgttggggtgtacaaaaggattaa

SEQ ID NO: 41722 - DNA, 1035 bp, Acinetobacter baumannii
atgcctgaattttctttttctgatgccctcttaaactggttcgatcaacatggtcggcatgatttgccttggcaagtcgcagatgatccatacaaagtctgggtttctgaaattatgttacagcaaactcaggtaaaaacagttctgcaatattttgaccgctttatggagcgcttcccaactgtagaagctttaggctatgcaacttgggatgaagtcgccccttattgggcaggtcttggctattacgctcgtgcccgcaatttgcataaagctgccggacttttagcacagcaaggcaaatttcctgaaaccctagaagaatggattgcactacccggcattggtcgctcgaccgcaggtgcactcatgtctttaggtttacgtcagtatggcgtgattatggatggcaacgtgaaacgcgttttagctcgcttctttgccattgaagatgacttaagcaaaccacagcacgaacgtgaaatgtggaaactggctgaagagctttgtcccacccaacgcaatcatgactacactcaagcaattatggacttgggtgcgaccatctgtacgcctaaaaaacctctttgtttatattgtccaatgcaagctcattgtcaggcttaccagcaaggtttagaacaagaattaccttttaaaaaaccgaaaaaaacaccgcctgttaaaacggcagatgttcttattattcagtgcgaagatgaatggttctggcaacaacgccaagctcatggtctatggggcggtttattttgtttacctattttagaaaatgaacatgaacgcttgaaattaagtcagcaatttaagctacaacctcaaccacaaacttttcagatcagtcatagctttactcacttcacatggttacttaatgctcatgtgttccacgtggaacctgatcaaaaagaacatctggcgattgaacttgaaggccaatggctgagtccagaacaagctattgctaaaggtgttccaactgctatgaaaaaattgatctcgacaagccgttcatga

SEQ ID NO: 41723 - DNA, 537 bp, Acinetobacter baumannii
gtgcgacgtttagttccccatctctcacttggttttctcattattctattggcagcctgtgccagtgcgcctaaaaaacctgccccgctttcaccagcccaagttagcaaactcaagagtatgcagcttccaagtcggcttcctgttccggtaaaaggtgtcgatcgagatgagctaaaagacacatggggagctgctcggagtcagggccgtagccacgaaggaattgatattttggctccacgtggaaccaaagtgtacagtgcaactgaagggctcattgccgatcttcgtaataacaacttgggtggcaaagtgatctggattttaggcccggcaggaacatggcattattatgctcatcttgatggacataaacgtggcttaaacgtaggcgactatgtcaaaaagggtgacctcattggttatgtcggcaacacgggcaatgcacgttatacttcacctcatcttcattatggtctttacttagatggtaaaggtcgtggtgctgttaatccttattcatatttacgctag

SEQ ID NO: 41724 - DNA, 246 bp, Acinetobacter baumannii
atgtcggaagcgctgatcaatcgcttagtagagtttgccgagtctggcaaccagcaaaagatcattttaaatggcaatagctatcaaggctggatcatggaaatcagtgatgatgccctactgatcagtaccggtttttcagataaagttggcaaagacttttggctaaagtttgaagacttaactcaagctgaactgtattattgggatactcgcccaaatgaatgggtaccattcaaactctaa

SEQ ID NO: 41725 - DNA, 561 bp, Acinetobacter baumannii
atgaaaactcaacgctgcggatggtgttccgatgatccactctatattgcttaccatgatgaagaatggggcaaaccagaacacgacgaagcccgattatttgaaatgctctgtcttgaaggacaacaagcaggtctatcttggattaccgtactaaaaaaaagagaaagctaccgccagcacttttttaatcatcctattgctgacattgccgcatttacggatgactttttagaaacaaaactatccgatgcaggcttaattcgtcacttaggcaaactcaaagctattcgtgataatgcgattgcttggcaagcccttaaagcccaagttggtgatgtttctaaatggctttggcagtttgtagatgcagcgccacaaaacaatgatgttgcagattatcgtaaggcccctgctcaaactgagctcagcctaaaactttccaaaacgctcaaaaaaaatggtttcaaatttgttggtccaaccacctgctatgcttttatgcaggcagtgggtatggtcaatgaccatgaaaacgattgtcaatttaaagcttcctaa

SEQ ID NO: 41726 - DNA, 1029 bp, Acinetobacter baumannii
atgagcaataatacgattcaggcttatgctgcaatgcaggcaggtgaaaaactggtcccataccaatttgatgcaggtgaattacaaccgcatcaggttgaggtaaaagttgaatactgtggtttgtgtcattctgatatttctgttttaaataatgaatggcgttcaaccgtgtaccctgtagttgcaggccatgaaattattggacgaattgttgctttaggctcagaagccaaaggactacaaattgggcaacgtgtcggtattggctggaccgctgagagttgccaagcctgtgatgagtgtattggcggtcagcaagttctttgtacgggcgaaaatgtcgcaacaatcgtgggacatgcgggtggctttgccgataaggttcgtgctggttggcaatgggccattccccttcccgaagatttagacccagaaagtgcaggtccgctactttgcggcggaattaccgtttttgacccactactcaaacacaaaatacaggcaacacatcacgtgggtgtgattggtattggtggtttgggccatatcgccattaagctccttaaagcgtggggctgtgaaattacggcgtttagttctaacccagataaaaccgaagaactcaaagcaatgggagccgaccatgtggtgaatagccgcgatacagaagcggtaaaagctcaaaagggtaaatttgatttattgctgagtaccgtaaatgtgactttaaattggcgtgctttcatttcaacgctagcaccaaacggttctttgcactttttaggactaaccctagaacctgttcctgtttctgtcggctcacttattgatggtgccaaatcagtaactggttcacctacaggttcacctgccgctctacgccaacttttaaagtttgccgcacgcaaaaaaattgcgcctcaaattgagctatttccaatgtcacagctcaatgaagcaattgaacatctacactcaggtcaagcacgctaccgcattgtgcttaaagcagactttgtagaataa

SEQ ID NO: 41727 - DNA, 1425 bp, Acinetobacter baumannii
atgacttttcaatatcaggttcttgccaatcaattagcacatcgtatttatcaagatgaacttaaacctcatcaaaagctcatttccttacgagattttgcccgacaacatggtattagtttaagtacagcaaaaagttgctatgaattacttgaggcgaggggactcatttatgtaaagccgaagtcaggttattttgtagttgctcgtaccccatccagccctattccggatagtccggatttcttatctttgcctcgacatgtctcaaatctggagttgcataaccaaattcaggaagctgccttacaaagtcatcttgtacctttgggatcgattcagttaacgccgcactttattcctgtagaaggtttacgtcgttctattcaacgtgctttaaaaaattgtcagcctcaagattttctttattgtaataaacaaggtcatgaacaattaagaaaagcgctatccgatcattggcgtgaagatggtatttatatcgctccagaagatatttttattaccaatggctgtatgccggctttgtctttggtgattcagaagctcactgaagtgggcgatagtattcttattcctacacccacctataatggtcatttacagttattagcaagtttaaaacgacagattgttgagattccggcagatcatcgtggcattgatcttgagcgcttagaatctttaatgcagcaaggtttggcgaaggtttgcttaatgacagccaattatcaaaatcctttgggatattgctttagcaatgcagagaaacagaagattgctgaattagctgcaaaatatcagtgttttattattgaagacgatatttttggtgaatgtggctacagtagcgagcgaccattacccattcgatattgggatcgcgaaggttatgtgatttggtgtggttcagtgtcgaagtctttgtcgagtgcgtatcgagtaggatggttttgtttaacgacaaagttagaacatttaaagcttgaactgctggtaagtaatattggcgtgaatacacccttgcagttaggtctagctgattttatttatagtcgtggttatcgagagcatttagagcagttaaggcctaacttgatgcgacaagtcgaagaataccgtagctgtattttaaaagcctttgaaggtataccaattgcattgagccagcccgaaggcggatatgcattatggatacagttacctaagagtgtagatagtttagcgctctattacactgcccaagctcagggaattactgtagtaccgggccatgtttttggtgaggatgaacgctatcgacatttcattcgtttaaacgcaggccatgagttaactgccgatgtccgccaagcaattatgagcttggcagactggtcgcgacaacagatgcaaacagtgagttag

SEQ ID NO: 41728 - DNA, 375 bp, Acinetobacter baumannii
atgaaattaaaagttatattgttatttactattgttttagcaggttgccaaccacaaccaaaaaatgaacagcacagacacacggtttgccaaagtttgattgaaggttatttaaaaatgaccaaccagcaagactacaaaatggagcaccgcactgatgacgagaccagtgcgatttctcattatgaatataaacgtaatagttcaaatgaagttgttatggtgaattcagtctattccaaactatattttagctgccgagaacagcaaaaaagctattttctgtctcaacattcggcacaaggacaaacgacacctattttagaagttcatattccaaccgatagttatacgacctttagagagcgtttttaa

SEQ ID NO: 41729 - DNA, 903 bp, Acinetobacter baumannii
atgaaatcaacaattgaagaacttgttgcctttatcgcaatcgttgatacaggctcttttgttgcggcggcagaacatttaaaacaaacgccttcaggagtcagtcgatctttaacgcgcctagaagcgaagttagatgtgaccttgttagagcgaacaacacgtaaattgaaactcactcaagaagggcagcagtttttggtaaaggctcgtaaaatcttaaatgagctaaatgcggctgaagaagaactacaaaaatctgatcagggtactgcgggacttattcgcattgattcagcaacgccgtttgtcttacacgttattgcgccattaatgcataagtttcgtgagtgctatccaaacattgaaattgaattaaatagcaatgatcaggtgattgatttgctgcaacataaaactgatgtcgcatttcggtttggggagctcaatgattcaagtcttcatgccaaattagtatgtaaaagtcgcttatttatcgttgcaagccctgagtatttagcaattaagggtacaccgacacaacctgaacagcttgaacaacatgatttgattggttttactagacctacttatatcaatagttggccgattaaagttggtgatgaatatttttttgcacaatcaaaaattaaagcatcgagtggggagacggtacgtcagttgacgattagaggacatggtattgcacgactatctgaatttgaaatttggaaagatatggaagaagggcgattgattgcattatttgaagacaaaattgagcatcaatatcaaagcatccatgctgtgtattatcaacaagagcatctaccaaaacgaatccgtttattcattgaatttttggcagaacagttaaaagatggttttaaaaacgctctctaa

SEQ ID NO: 41730 - DNA, 804 bp, Acinetobacter baumannii
atgaatatcccacgttttggtctaggaactttccgtcttaaagaacaagcagttattgattctgttaaaactgctttagacgtaggttaccgtgtcattgatactgctcaaatttatgataatgaagcagcgattggtcaagcgattgccgaaagcggtgtatcccgtcaggacttatttttaaccacaaaaatctgggtagataattttgctcaagataagttcattccaagcttaaaagagagcctacaaaagcttcgtactgaccatgttgacctcactttgatccattggccagcaccagatttaggcgtttcaattcctgaaatcatgcagcttttacttgaagcaaaacaacaaggcttaaccaaacaaattggtatttcaaacttcaatattgcacttacccaacaagcaattgacacaattggtgtagagcatattgcaacgaaccagattgagctgagtccttatcttcaaaaccataaacttgtgaatttcttacaagagaagaatattgatgtcacttcatacatgacgcttgcatacggcaaagtgcttcaagaccctgttttagcagagattgcagcagctcataaagcaacgacagcgcaaattgcattggcatgggcattgcagcgtggttttgcagtcattccatcttcgactaaacgtgaaaacctgattagtaatttaaaagcacaggatatcgagttaactgcggctgaaatgcaaatgattgccgaactcgaccgtaacagtcgtgaagttagcccagagccatgggcaccagtttgggactaa

SEQ ID NO: 41731 - DNA, 1191 bp, Acinetobacter baumannii
atgaacactcaatcaaatacggcgttctcgttattggcattggcaataggtgcctttgccattggcaccacggaattttctccaatggggttacttccgaacatcgctaatgatttagggatttcaattccaacagccggtatgttaattacaggctatgcacttggcgtaatgctaggtgcaccgtttatgaccctgtggtttggaggttttgcacgacgtaatgcactgatttttttgatggcgatctttacggtcggtaacctgattgcagcgttttcgccaaattatatgagcttattaggtgcacgtctcattacaagcctgaaccacggtgcctttttcggaattggttctgttgtggcagcgagtattgtcccagcgcataaacaggctagtgctgtggcaaccatgtttatgggcttaaccattgccaatattggtggtgtgcctttggcaacatgggttgggcaaaacattggctggcgtatgtctttccttgcgatttccgtgctcggcatcattactatgctcgctttgtggaaagcattaccgcaaggtatggttgcccaaaaaccaaacgtgaaggcggaattaaaagtattaacgcgtacccctgtggttcttgcattactcactaccgtactcggtgcaggtgcaatgtttacgctctacacctatattgcgccaagtttgactgagtttacccatgcttcaccgaccttcattacgttcatgttggtgttgattggtgtcggtttctcgattggtaaccacttaggcggccgttttgcagacttatctatcaacaaaactctgattggtttcttggtactgttgattgtgatgatggtgactttcccacttcttgctcaaagccagattggagcagccattgcgttagtgatatggggtgcagcaacctttgctttagtaccgccattacaaatgcgtgtcatgtcagttgctcatgaagctccagggcttgcctcttcagtaaatatcggtgcgtttaacctaggtaatgcagtaggtgccgctgcaggcgcgttagtactcgatttaggttggggttatagtgcagtatcttttgcgggtgccttactggcgggattaggtttgttattggttttattccaaatcaaacgagaaagcagccccgctcaaaccttacaacagtgttcagactaa

SEQ ID NO: 41732 - DNA, 654 bp, Acinetobacter baumannii
atgaataaaaaacaaattgctttgaccactcttctttgcttaagcagcctctatacaggggctgcctctacagacaaggctaaactcagcctagaccgtaatcatattaaagtgtggacctatcaaaaagcagataacccagtctttcaatataaagcggaaacaacgtttgatgtacctcttgaacgcgctgtggcggtgattttagatgtagatcgtgcggctcaatgggtgccttatatgggcaaggtccaaatgctttctcaggatgaaaagaaaggcgaatttactttatatatggtgttagattttccttttccgctaaaagatcgcgatgtagtggttaaaggaaaaatgagtaaagcagccaatggcctaattactattaaaaatacggcaattaatagtaactatcctatacaacccgatgtcgtgcgcctaacacgctatgaaggggactggacatttcagaaacttgccaataataaagtcaaagtcaccactagtggctatgctgatccagcgggtgcaattccgttgagcttcgtcaatatgtttgttcaacagcaaccttatcagatgctgcttaaaatgaaacgggaagtaatgaacccgatttatgagcaacctaagttgccggaaattttaaaataa

SEQ ID NO: 41733 - DNA, 822 bp, Acinetobacter baumannii
atgtcagcagctccacgcattggtattttgggtgcaggcggccgtatgggtcgtacacttattcaggcagttcaacaagcaggctatcaattggctgcggcagtagagcgtccagaaagtagtttggtcggcacagatgctggtgaacttgcaggaattggttcagtgggtgtgaaggtttcaggaagcttggctgatgtacttaaagattgcgatgtaatcattgattttactgcaccagctgccaccgcccagcatttaaagctatgtcgtgaagctggggtggctatggtgattggcactacagggatgtctgatgagcaaaaggctgaattggatgaagcagcaacgcatacacctgttgtatatgctgcgaactactctgttggcgtaaatgtatcaatcaagttacttgagcttgcagcaaaagtatttggcgatacagtagatattgaagtaattgaagctcaccaccgtcataaagtagatgcaccatcaggtactgcattaatgatgggtgaagcaattgcggatactttaggccgtaacttaaaagaagttgctgtttatggtcgtgaagggcataccggtccacgtgatcgtcaaaccattggtttcgaaaccatccgtggtggcgatattgtaggggaacatacggtcatgtttattggtgagggtgagcgtgttgaagtgactcacaaagccactaaccgtatgaactttgctgccggtgcagtacgagctgctgcatgggttgtgggccgtgaagcgcgtaaatatgacatgaaagatgttttagggttgaacgacgtacaggtgtaa

SEQ ID NO: 41734 - DNA, 351 bp, Acinetobacter baumannii
atgcattcgaaaattattggtctaactgccattatggggataataagttcagtggcatttgcagaacctgcaatccagccaggagaaacagtagagagcttatctaaagcacgtattacaacaaacgtaaatactcaagcagcaacacctacagcgcaaacaagcgatgctaatgctgaggttaaagttgaagatattgatccaatcattgaagaaaaaactgaagaaaccctaaaggcagctgtacaaccagctcctcaagctactgtcgaagctatagtggctccagttacatcaagtgaactcaacgtaagtgttgatgatattgatgtcgctcatcctacagaataa

SEQ ID NO: 41735 - DNA, 1113 bp, Acinetobacter baumannii
atggctaaacgtgattattatgaggttttaggcgtttcaaaaaccgcaagtgatgatgagatcaaaaaagcctatcgtaaattggcgatgaaatatcatcctgacagaaaccctgacaatgccgaggctgaagaaaaatttaaagaagcttctgaagcttatgagattttatcggacagcgaaaaacgcagcatgtatgaccgtatggggcataatgcgtttgaaggcggctttggtggcgctggtggtggctttggcggtttcagtgcagaagatatttttagccagttcggtgatatctttggtggagcgtttggtggcggaggacgtcagcaacgccaacgtcgcggttcagatttacgctatgtcatggaacttacccttgaggaagctgtaaaaggggttaaaaaaacaattacctttactgctccagcaccatgtgatgtgtgtgatggtaaaggctctaaaaatccaaaagatgtggaaacttgtaaaacttgtcacggttcaggacaagtgcgtatgcagcaaggtttcttctctgtacaacaaacttgtggcacatgtcgtggccaaggcaaaattattaaaaacccatgccatgcatgtcatggttcaggtgtagcagatcgtcagcaaacattagaagtgacgattcctgcaggtgtggacaatggtgaccgcgttcgtttaagtggtaaaggcgaggctattcgtgatggtcaagctggtgacttatacgttgaagtggttgttcgtgaacacgaaattttccaacgtgatggtgccgatttatatatggacgtaccagtaagcattgctgatgctgcacttggtaaagaaattgaaatcccgactttggaaggccgagttagcttgaaaattcctgagggaactcaaacaggtaaattattccgtttacgtggtaaaggcgtgcgtcctgtacgtagcagtatggtgggtgatttactttgccgtattgtggtagaaacaccgattaacctaacctctcgtcaacgcgaattacttaaagaattacaagcatctttcgatggtgaagacagtgcttcttcaccaaagaaaaaatctttctttgatcgcttattcgattaa

SEQ ID NO: 41736 - DNA, 378 bp, Acinetobacter baumannii
atggggcaagaccatatcgaacagcatcgccgttatattgtaatttcttatgcgttcatgtttcttgcattgtttacggttatttttgcggcctttgcttatctggtcgctcgtaaagtagctgttgtggatgatgcggaagtttggattcatgctcatgcgctatggattatgcgcaatggtattctattcctcctcatgtcagtttttgctgtggtctggtttattcctctcttcttttttgcatgggatagcaacctttgggtaacggcttcaacagttgctggtgtagtttttagtgctattgcttggttatttttattaaatgcatggttaaaaggcttgtctaaatatttaaaaaataaggcagttttttaa

SEQ ID NO: 41737 - DNA, 3126 bp, Acinetobacter baumannii
atgaaatttaatctctctgaatgggcactgaacaataagggtattgtcctttatttcatgctcttgctcggcattattggtgcaatttcttattcaaaactctcacaaagtgaagatccgccatttacctttaaagtcatggtcgtacaaacctactggccaggggcaacagccaaagaagtttctactttagttacggaccgtatcgaaaaggaactgatgaccacaggtcagtatgacaagattatggcgtattcccgtccaggcgagtcgatggtgacttttgttgctaaagattctctcacttctgcacagattcctgatgtttggtacaacgttcggaagaaggtcaatgacattcgccatgaactcccaagtggtgtgcaaggtccattttttaatgacgaatttggcgatactttcggtaatatttatgtactgacaggcaaagactttgactacgcgcttttgaaagaatatgccgatcgtttgcaattacaactacagagagtcaaagatgtaggcaaagttgagctaattgggctacaagatcagaaaatctggattgaaatttcaaacactaaagcggttcagctcggtattcctgtttctgccatacaagaagccctgcaaaagcaaaatagcatggcaagtgcaggcttttttgaaactggaacggatcgtattcaaattcgagtaagtggccaactacaaagcgtagatgacattaaaaaaatgcctttactggtaggcgataaaaccattcagctgggtgacgttgctgatgtctaccgtggttttagccaacctgctcagccgcgtatgcgttttatgggtgacaatggtattggtattgccgtatctatgcgtaaaggcggcgatattattgccttaggtaaaaatctggaaactgaatttgcccaactgcaaaaaacattacctctaggtatgaaactacaaaaagtatctgaccaaccagtagcggtacaacgtagtatccatgagtttgtcaaagtacttgctgaagcagtcattattgtcttgttagtgagctttttctctttaggtttccggacgggtttagttgtcgctttttccattcctttggttttagcaatgacttttgctggcatgaatttatttgatgtcggtctgcacaagatttcgcttggtgccctaattctagctttgggcctgcttgtagatgatgccattattgcggtcgagatgatggccattaagatggagcaggggtatagccgaattaaggccgccggatttgcatggaaaacaacagcatttccaatgttgacggggacattaattaccgccgcaggctttttacctattgctacggctcagtccagtacaggtgagtacacacgctctatctttcaggtcgtgacgattgctttattggtgtcttgggttgccgcagttttatttgtaccttatttgggtgaaaaactactacctgattttaccaagacaggtcatcaagcaccttggtatgtccgtttatgggcaagaataactaaaaaaccgcaaccgcaaactgtggccatttcacaggaccatcattacgatccttatcaatcaagtttctatttacgttttcggaaaatggtcgagttttgtgtgacctaccgtaaaaccgtgattgcaacaacggtggggatttttgtgctgtctgtactcatgtttaagatggtgccacagcagtttttcccgccttcaaaccgcgctgaaattttagtcgatttaaaactcgaagaaggcgcatcgttaaccgctacagagcaagcggtgaaaaaggttgaacaattcctgtctaaacaaaaaggcattgataattatgtagcctatgtcggtacaggttcaccacgtttttatttacctctagatcagcaattaccgcaagccagctttgcacagtttgttgttttggcatcatcgcttgatgatcgtgatgaaattcgccgttctttagaaacccagattaaacagttgctcccacaagtccgtactcgcgtgtcattactcgaaaatggcccacctgttggttatccattgcagtatcgtgtgtcaggtgaagatttgaatctggtacgtaaagaagcacagcaggttgctagggtaattagtgaaaacccgaataccaccaatgtgcatttggattggggcgagccaagcaagattatttccattcaaattgatcaagaccgtgcgcgacaaatgggtgtgtctagtgtggatttggcgaatttcctgaacgcctcaattacaggtagtgcgattgagcaataccgtgaaaagcgtgagctgattgaaatccgattacgtggtgataaagctgagcgtgttgaagtagcttcactggcgagccttgcagtaccaactgcgaatggaacaactgtacctttagcccagattgcgaaaattgaatacaaatttgaagatggtctgatttggcaccgtaatcggttaccgacaattactgttcgtgcagatattcataccaatttacagccagctaccgttgttggtgagttagctgaatcaatggacaagttacgcgctgagctgccaagtggctacctcattgaagtggggggaacagtggaagagtcggcacgcggacaaagttcggtcaatgccggtatgccactctttttggcagtggtcatgacattactcatgattcagctgaagagtttgtctcgggcaacaattgtatttttgactgcaccattaggcttaattggcgttgttttattcttacttttgtttaataaaccatttggttttgttgccatgctaggaaccattgccttatccggcatgattatgcgtaactcactcattctgattgatcagattgaacaagacagacaggcagggcatccaacgtgggaagcaattattgatgcaacagtacgccgtttccgtccgatcattctcacggcattggcagcagtactcgccatgatccctctttcgcggagtattttcttcggtccaatggctgttgcgattatgggcggactcattgttgctaccttgctgacattatttttcttacctgcattgtatgcagcgtggtttaaggtgaaaaaaacagcataa

SEQ ID NO: 41738 - DNA, 1101 bp, Acinetobacter baumannii
atgaatctgttaaaacctctcatcatgagtatgatgattgtttgcatggtcacattaacggggtgtagtaaagaggctcccaaaacagaagaaataccctatgtgatggtgacccagccttcaaccacacttcacgaacaaaaaagctatgctggagatgtacaggctcgacaacaaactgccttggcatttcgggtgggtggacaagttacggctcgttatgtggatgtaggcgaccgagttagagttgggcaagtattagcaaaactcgatgtggcagatgcacagctacaattaaatgctgccaaagctcaattagaaaacgcacaggcagcagcaaaaacagcctcagatgagcttaagcggtttcaacaattattacccataaatgccgtgagccgttcgcaatacgatacggtaaaaaatcaatatgatgcggctcaggcagcattacaacaagctcgttctaattatgaagtttctgccaaccagactggttataaccaacttgtttctaataaaaacggtgttattacagcgcgtaatattgaaattggacaggtggttgcagcagggcaagcggcttatcaactggcaattgatggtgaacgtgaagtggtcatcggcgtaccggaacaagcagttagcgagattaaagttggccaagcggcatggataactttgtggtctaaaccgaacgaacgatttgccggatatgtacgcgaagtttctccagctgctgaccagtcccgtacattcacagttaaggtggcactcaaagaaggtcagtctgctattcagcttgggcaaagtgcacgtgtattttttagttcgactcaaactaatgtcatgagtgtgccactttcgagtgtatctgcaacagataaccaaccttatgtatgggtggtgaatgcgaatcagaccttacgtaaagtgcctgtaacgattggtgcttatggcagagatagtgtgccggtattatcgggtttaacaccaaatgattgggttgtgattggtggtgtgcacttgctgcgcgataaacagaagattcacccgattgatcgtgaaaatcgtgcagtgaaaattcagggagccaaataa

SEQ ID NO: 41739 - DNA, 624 bp, Acinetobacter baumannii
gtgcaaacagttaatcaaagtggtcgccccaaagatctggaaaagcgtgctcgtatcttacaggccgctaaagctatttttttaaagtccggttatcacggtaccagcatgaacctgattgcacaggaagcaggcgttactaaactcacggtttataatcactttcaagacaaagcaaacctgtttatctgtgccattacagaaacttgtgaagagactctaggcactaaaccatttgaattagatgcatcggcagacttttatcaaacactttatatggtgtgttcacgtgccttgcagattatttattcccccgaagcacttaaactcgagcatgtattatttgaacttgcagcagagcaaagtccactcgccctacagttttttgacgcatcccatacccgtctgcaaaatcagttagttgagttttttcaaaaagctgctcaattaggttttattcaggccgatgatccgctatatcaaacagagctgcttttgaccttattgcttggtgtacgccatcacaaggttctacttagaattattcctgtaccgaatgctcaagagatagatcggtttattcgagatgctattgatttatttctactcagatatcggcattaa

SEQ ID NO: 41740 - DNA, 2685 bp, Acinetobacter baumannii
atggttcagcaaatcgatgcgccactgcgtgaggatgtccgcttacttggcaatttattaggtgaaaccctaaaacagcatgcaggacaagaactgtttaatcagatcgagcaaatccgtgctcttgccaaaggtgcacgtgatggtcaagctgaagccgaaaagcaattagaacaattatttttagaattgcccgatgaagagctattgcctcttacccgcgctttttctcacttcctcaattttgccaatattgctgagcaatatcatgtggtacgtagccgcagacaggcagagttcgatccggatgcaaactccccgaatccccttgttcacttatttaaaaagtttaaagataaaaatatttcgacggaaaaactgttccggcaaatttgtgatcttaagattgaattggtacttacggcgcatccaacagaagtgagtcgtcgtaccctgattcaaaaatatgacgatatcaatgcttgtctatcacaacttgatcagcaaaaacttactccgcgtgaacgtcaaaatgctcttgccaacttaaaacaacaaattagttcggcttggcaaacagatgaaatcaggcagcaccgcccgaccccggtagatgaagcaaaatggggctttgccacaattgagcaaacgctttggaatgctgttcctaaatttatccgtgagctaaatgaactggttcaagacaattgccaacaaaacttaccacttcatattgctccggtacgttttgcatcttggatggggggagaccgtgatggtaacccgaacgttactcatcaaattacccaagaagtattgtggttatcacgctggcaagctgccgacctctatctaagagatatcgaaaacttacgttgggaactatcaattcagtcttgttccgaagaaatggttcaagccattggtagccctcatccagagccttatcgtgagtatttacgtgcaacacgagagcgtttaaaagcaactcgtcattggttagctcagcgcctacaaggcttagaagcagatgacagcaatgtcattaaaagcaaagatgaactgttacaaccattattactgtgctatcgctctctaattgatagtaatctgcctgaaatcgcgaatggtcaactactcgactttatctaccgtgtgaactgttttggtattgaactacttaagctcgatattcgccaagaatcaggccgtcatcgccaagccatttcagcaattaccgaatacttaggtctgggtaattttgagtcatggactgaacaagcgcgccaaaacttccttattcaggaactccaaagcaaacgcccgctactaccgaagtatattaatgagccagaaggtagtttgattggtcacccagatgtacaagaagtatttgcaaccatgcgtactttggcagaccaaccacctgagtctttaggggcttatattatttctatggctgaatatccaagtgatgttttagctgtattgttattgcaaaaagaagccggtattcagcatcctttacgtgtagtgcctttatttgagactttaaaagacttagacggcgcagcaactaccatgaatacgttgtttaatatgcattggtataagcagcatattcagggtaaacacgaagtcatgatcggctactcggattcagcaaaagatgccggtttcatgtctgccaactgggctcaataccgtgctcaagaagagctgactgcaattgctcgtaaacacggcgtacagttgactctgttccacggtcgtggcggctcaattagccgtggtggtgctccaacgcaacaggcactcttttcgcaaccaccggggtcaatctctggtgcaattcgtgtgacagaacaaggtgaaatgatccgcttcaaattcggtctagaaggtattgccatgcaaaaccttgaaatctataccgcagcaacgcttgaagcgacattattaccaccaccagaacctaaggctgagtggcgtgaacttatgaaccgtatgacagatcattctgtgaaggtttatcgtcaaacagtgcgtgaaaacccgcattttgtgaaatatttacggactgtcactcctgagcttgaattacaaatgttgccgctaggttcacgcccggcaaaacgtaaagtaagtggtggtatcgaatctttacgtgctattccatgggtatttgcttggacacaaatccgtttgatgttacctgcatggttaggtacaggtgcggcgattaatgaagtgattgccgatcagcaaaaagcaacgcttgatgaaatgcttcagcaatggccttatttccagacactcattgatatgctggaaatggtattgtctaaagccgatgccaatattgcactctactacgagtctcatttaactgaagatgaagatttaaaagtgcttggcaatcagttacgccaacgtctaaaagatgctgtggaaaccttacttacgttaaaagatgaatcaaaactattaagcgacaatgaagttttggatcagtctatgcaagttcgtaaaccttatttactgcctttgcatcttttacaagctgaactcatgaaacgccgccgtgattatcttgctgaacgtcaggcagaacatacccctgttgaccatgcacttatggtaagtattgccggaattgctgctggtttacgtaatacaggctaa

SEQ ID NO: 41741 - DNA, 1296 bp, Acinetobacter baumannii
atgtccaactggtttcccaaatggcagccttaccaaggtgatgttgaccatcgaccggtctctaccaatgaatatctccctccagttcaaagtgctattttaggtgtccagcatgcatttgccatgtttggagcaactgttttagcacctttactcatgggctttaaccctaaccttgctattttaatgtcaggtatctgtaccatcctgttcttcttaattacgggtggtcgtgttcctagttatttaggatcgagttttgcctttattggtgttgttgcagcagctacggggcatatcacaggttcaggggccaatccaaatctttctattgcgttgggtgggatcgtagcgtgcggtatcttttatgcactcatcggttttattgtcatgctcacgggtacacgctggattgaaaaacttatgccacctgtggtgactggtgcaattgtgatgattattggtctcaaccttgcccctgttaccattaaaggcgttgcaggccaaccatttgaaatgtggatggccttaattactgtactttgtatgggcagtattgcagtttttacacgaggcttattgcagcgtctacttctattggtaggtttgatcttggcttatgtaatctatgcgattgcgacaaacggtctaggtttaggtaaaccgatcgattttagccagatctcacaagcttcgtggttcggtattccaagcttttcacatcctacttttgataccaaggctattttaattattgcaccggttgcactgattttagtagcagaaaacttaggccatatcaaagcagtaggtgcaatgactggagaaaacctaactccacaattaggcaaagcctttgtcgctgatggtttagctacgacactttctggtagtgttggtgcgccagggatgacgacttatggtgaaaacattggtgtgatggcagtcactcgtgtgtactcaaccattgtatttgtgattgcaggcatctttgctattttcttaggtctatcaccaaaatttggcgctgtcattagtaccattccaagtgcagttcttacaggtgcatctattgtggtatttggcttaattaccattgccggtgcaaaaatctggattgaaaacaaagtcgatttttctaacaataaaaatctgattgtggcctcagtaaccattattttgggtgctggaaactttgaattattgtttggtaatttcaatttaggtggtattggtacagcaacgtttgcagctattattttaaactggctgtttagtttaaaagataaaacctaa

SEQ ID NO: 41742 - DNA, 891 bp, Acinetobacter baumannii
atgcgttttgatttttttgatttacagctggttcttcatattgtctcgactggtagcctcaccaaaggcgctgaccgctctgcgatttcacttcaggcagcgagtgaacgtataaaaaaacttgaacagtattttgaaaccccattatttattcgccaaaccacaggtgtagaactcactacagctggacatgcatttgtagagcatgctcgtcagcttttagctcaaaaagatcaactcgaacaagaaatgcagcggttcagacagccgacaacagaagcattaacactttggtgtaactcatctgctcaaagtgaatatctacctacgttattaccgcaatatttggtgcttcatccagaaatgaatatcgatttgcatgaagcagaaagttcagaaattgtagatgcattaacccaagggattgcaagtcttggcctagtctcgagttttttcaatacccgacatttgcaaactaaagagtttgcaagcgacccattagtacttatttgccctgtgacacatgagttagcccactacaaagagctaaatttagtagatgctttaagctatggttttattggactcaaatcgcatcactctttacaacagtccattgaaacccaagccaaattattaggttttaacatacagtatcggttgcgcttacctaactttggcgcaattgtcgaggtagtcgctaaaggtgtaggaattgcgattatgcctgcccgtgctgcacagcgcctacaatcggactatgattttcattcaattcaactgctaggcgcatgggcaaaccgtaaactacttttggccacacaaagtttcaatcagttgcctagtagttaccaacagtttgcagactttttattgcaacatcgtccttaa

SEQ ID NO: 41743 - DNA, 732 bp, Acinetobacter baumannii
gtgacatttctagcaattattatgatggtgtttgcctttgcgggcatgattaaaggcatgatcggcttaggcttgcctgcggtatcaatgggcttactcaccatcgcaatgagcccttttcaggctgcatctcttttaattgttccttcaatggtcaccaacgtctggcagctttttgccgaaggacatgtctgggcttttattcgccgtttctggacgttgctcgcaggtattgtggtgggctcaatatggagttttctacctaccttaagtcaaagtcatggtcaaagtagtgaaattttattaggttgcatgttggccttatatgggctttatggcctatgtgtgaagaaacttccgcatttaggaaagcatgagcgctggttatcacccattattggatatatcggcggggcagtgactgtagcaacaggcgttattattattcctattgtgccgtatttgcagtctttgcatttaaaacgtgatgagttggtacaggctttaggattaacgtttacggtctctaccatttgccttgctgtgtttttacaccataacccgatgtcaggaataacactggactatcgtttatctttcgctgcgttgttagctgcgctcattggaatgtggatcggtaaaaaaatccgctatcgactgaatgagcagatttttcgccgtatcttttttataggcttgatgtcattaggactttatatgattttgcattaa

SEQ ID NO: 41744 - DNA, 1290 bp, Acinetobacter baumannii
atgtcactgctacgccgttggtttgaccctatccgatcgagctggttttaccaaaagccttctcgtcaagcggtgttacccacggaaaatggtttaagtatttatttacgacttgatgatgtgtatagctatctggctgttcagcaattgtctcagctagatgaaattttaagtgatgaacttaaacctttaaaaattattatttcccatacggcttctgaacctccaaatagcatgacgcatgaggagtggcagcattattgtttaaatgatgccaaaattttagcaaatcagcaccggtttgcttttgatgagtttccagaaatcccaagtccagaatctttaaaacaagccgctgtcatattaaaaagaacccccctacaaggtcagaacttcttacatttacttgaagatatctttcacatgctttggcaacagcaatatggaaaattgcgtactctacatgccatggcagtcaagcatcaggttcctcagcattttccagaacgtatttttacgaatgaacctgttcgagcggcatactttgagtttggtgggcgtaaatatcatgcagtagatgatttattacgtttaacccgtcgtttaaaacaacaaaagttactgacaggtaatccgatatttttaattaatcatatcgaatggcgtgaacatttgattaatgatgctgaggcgttaaatgaaattcaggctctgcatcctgaacttgatgtatttatcgctttagaagacccgatgagctggttgttgcttgcctatattaaagaagagctcgcagactattatgatattcagctaaaagtttatcctttgagttatcggggccgagactggtttgactggagcttggcaacacgtgtgtctaaacgtaccgaggttgcttttacacctttttgccgacctacagaagaaagtacgcttgggatggcaaagcttttctatagtgtgccggaaaatcagcaacttgatacaatttttactattttgcaggctgtttggacgaaaggaaaagatctatctttccagaagcatttccaacagttacagcagcaactgggtattgagcagttaactgaacaggatatacagtcggttttagcgcaaaatgatgcactttgccaagacaagcatcaacctgatttgccggttttagagttacgtatcgatgggcaaagctatgtatttaatagcctgtatcgggtttggatgattgaaagtatttttagtaatgttttagaagaaaaatacaaaacggcctcaacttctaattga

SEQ ID NO: 41745 - DNA, 1788 bp, Acinetobacter baumannii
atggctggcgcacgtggcttatggcgtgcaacaggaatgaaagatgaagatttcggcaaaccgattattgcagtggtcaattcatttacccaatttgttccgggccacgtccatctgaaagatttaggacagcttgtcgcggcagaaattcaggcagcaggtggtgttgctaaagagttcaatacaatcgcggtggatgacggtatcgcaatggggcatgacggcatgctttattcattaccatcacgtgatttaattgcagactcagttgaatatatggtgaatgcacattgcgccgatgcgatggtgtgtatttcgaactgtgacaaaattactccgggaatgttgatggctgcgatgcgtctaaatattcctgtggtgtttgtgtctggcggaccaatggaagcaggtaaggttaaattccgcggtgatgaaaaagcaattgaccttgtagatgctatggttgttgcagctgatgacagctacacagacgaagaagttgcagaatttgaacgttcagcatgtccaacctgtggttcgtgttcaggtatgtttactgcgaactcaatgaactgtttaacagaagcgctaggtttatcgttaccaggcaatggttctatcgttgcaacgcatgcaaaccgtaaaaaattattcttaaaagcaggtcagcttattgttgaattggccaaacgctactatgagcaaaatgatgcaagtattttgcctcgttcaattgccactaaagctgcttttaaaaatgcgatgacacttgatattgcaatgggtggttcaaccaatacagttctccacttgttagctgcggcaaatgaagctgaagttgactttacgatggatgatattgatgagttgtcacgtcgagtaccagtgctttcaaaagtagcaccagcaaaacaagacgtacatatggaagatgtacatcgtgcaggcggtatcatggccattttaggcgagcttgatcgtgcgaatctacttgatgtatctgtaccaactgtacatgagaaaacattaaaagatgcgttagataagtgggatattatccgtactgaagatccagatgtatatgagttctatcgctcgtctccgggtggtgttccaactcaggttgcattctcacaaaaccgttactactcaactttagatggcgaccgtgaaaagggcgtgattcgtaatgcagaacatgcattctctaaagatggtggtttagctgttctttacggcaacatcgcacttgatggatgtattgtaaaaactgcgggcgttgacgaatctattttaaaattcacaggttcagcacgagtttttgagagccaagatgcagcggtagaagcaattttaggcaatgaaattaaagctggtgatgtggttgtgattcgctacgaaggtccacgtggtggtccgggcatgcaagaaatgctttacccaaccagctatcttaaatcgaaaggtttaggaaaagactgtgcgttagttacagatggccgtttctctggtggttcatcaggtctttcaattggtcacgtttcgccagaagctgctgaaggcggtgcgattggtttggttgaagatggcgataccatcgaaattgatattccaaaccgtaccattcacttgaatattgatgatgcgactttagcgcaccgtcgtacagttcaagaagcgaaaggttggcatccgaaggaagaacgtaaacgtaaggtatcaaaagcgttaaaagtttatgcaatgcataccacaagtgcagcaaaaggagctgtacgcattctataa

SEQ ID NO: 41746 - DNA, 963 bp, Acinetobacter baumannii
gtgaaaattatttttgctggcacccccgaatttgctgcaacagcattggcggctctactaaaaacttcccatgaaattatcgcggtttatactcaaccagaccgtaaagcaggtcgtggacaaaaactaacaccgtctcctgtaaaacagcttgcgctggaacataatattcctgtttatcaaccacttcacttcaaagcttcaactgaagaaggcttggcagctcaacaagaacttgctgctttaggcgctgatgtcatggtagttgcagcatatggcttaattcttccacaagctgtgctcgatacacctaaatatggctgtttaaatattcatggctcattattaccacgctggcgcggtgcagcaccgattcagcgtgcaattgcaacaggtgacgacgaaactggtatcaccatcatgcaaatggcggcgggtttagatacaggcgatatgatgtataaaacctattgtccaatcacttccgaagatacatcagcgacgttgcatgacaaacttgcagctcaaggtgcaacagcaatttgtgcggtacttgagtcagaagaaactctacaaaaatatttagcagaacgcgaagttcaagacgaaagcttaacagtctatgcgcataaactcgtgaaatcagaagctcgtattgattggtctatgaatgcagttcaagttgaccgcaatatccgtgcattcaacccatggcctgttgcctttattcaacttgatgaaaataatgcgctgcgtgtttggtattcaacaatttctaatcaaaataaagcagatgctaaagctggtgaaattattgcaatcgataaacagggcgtacatgttgcttgcggtgaaaatacatttatttgtttaacgagtgtgcagtggccgggtggtaaagcattaaatgctcaacaaattgcacaaactcaaaaacttcacgtaggacagattctgccatga

SEQ ID NO: 41747 - DNA, 1305 bp, Acinetobacter baumannii
atgagtcaggctacttcaaattcatcacgttttaacctgcgcgctcaagtcgtccagaccttgctaaaagttcagcaaggtcaatcgctcgctagtattttaaatacacagctgaatcaagtagcagagcgtgatcgtgcactatttcatgaacttgttttaggtacattgcgccaatggttcgcacttaagtcaattagcctgcctttactcagcaaacctttaaacaatgagacagtagaaacctgcctatacgttggcctttatcaagttttatgcacgcgtattgcagcgcacgctgccatctcggaaacagtcgatgcgactaaacaacttggtttccctgcactcagtggtattgttaatgcaattttgcgtcgagcaactcgtgaaactgatgactttcagcaaggtttacagcaagcacatggcttaccaagttggctttttaaacggttaaaaaaggattgggaagaacaaacagaagctctctgccaatcgttaaagcaagccgcacctttaactttacgggtgaaccagcgtcatattggtcgagatgcttatttagcaaaactacaaaggttagacattcaggcacgtgcgtgtttgttttccgaagctggtattgtccttgagcaatctgtacaaatcactcagttaccgggttttgaacaaggctggttctctgtacaagatgaacatgcacagctatgtgccaccttgttgcctgatttaaacaataaaacggttgttgatgcttgtgctgccccagggggtaaaacggctcatttgcttgaaaagtttaaaccagcacagctcatcgccattgatcaggacccaagccgtttagtccgcgtgactgaaaacttaaatcgcttagcactcgatcaaagccacacggaaattttggcagccgatgcaaccaagtggaatcctgttcaacctgtagattctatcgtacttgatgctccttgttctgcgacaggtgtgattcgacgtcatcctgacatacgcctattgcgccaatctagtgacatagcccaaaccattgagctacaaaagcagatcttagagcacatgtggcagcaactcaaagttggcggtacattgctttatatcacctgctcaattttaaaatctgaaaacgaacagcagatgattaacttcttcacagaacatcctgatgcaaaagaagtgaaaatcgaggcagattggggaattgaacaagttcatggcagacaactgttgccagaagcacaatctggtgatggattttattattgtaaaattcaaaagattacataa

SEQ ID NO: 41748 - DNA, 144 bp, Acinetobacter baumannii
atgaatacttcggcaatcgtgatgttaataatttcgatggtatttgtatggggtggattagcactatccatcttacatttaacaaagcatcctgaagagttagatgaagttttagaagaagtaaaagatcagcatacgctttga

SEQ ID NO: 41749 - DNA, 1479 bp, Acinetobacter baumannii
atgacagatactcgtgaaaactggacgtcacgatctggttttattattgcagccgttggttcggctgtaggcttaggtaatatttggcgctttccgtacgttgcgtatgaaaatggcggtggtgcgtttcttattccctatctattagcactcattactgctggtttaccgttattatttttagattatgcggtaggccatcgtagtactggttcacctcctaaggcatatcgtgccttatttaaaggtggtgaaacattagggtggtggcaggtttgtgtctgtatcatcattggtttgtactatgcaagtgtacttacatgggctggtagctatgtttacttctctattggccaaatgtggggaagtgatccggaaggtttcttctttaatacctatttacagaccacaaaagcaaccggctttgatctacagtttgtaggtcatttattctggccgattgttgggatttgggcacttactctcatcattctttatggtggtgtgaaaaaaggtgtggaattatcaaataagattttcatgcctttattattcattctcttcactattttagttattcaatcgttacgtttaccaggtgcggtacaaggtttaaatgcattctttacaccgaactggtctgcaatgatggattataaagtttggttagctgcctatggccatactttcttttcactctcagttggtttcgggatcatggtcacctatgcatcctatttaaaaccaaaaacgaatttaactggttctggtttaatcgttggttttgcaaatgcatcaacagagattttagcgggtattggtatcttcgcagcgcttggctttatggcacatgctgcaggtactgaagttaaggatgttgtgagtggtggtatcggactcgcatttattgctttccctaaaattatttcaagtttaggttctggtgctgatctattcggtcttttgttcttctcttcattatttgttgctggtatttcttcaatggtcagtattttggaagtgcctattgcagcaatgcaagataagttaaagtggggacgtaagaaagcggtaacgattattggtggtggtagtgcactggtttcaattattttattctcaagtgtaaacgcaattaagctcgttgatattgttgatcactttattaataacattgggattattggtggggctttattatcaattattagcgtagcttggtttaaacgttcagcacttaaagagcttcgcgaccatgtaaaccgtatctcaaccattcaattgggtaaaggctgggacttcactttaacagtcattacctctttaatcttattaacaacactctgtatgactgtttttaatttgatcaaaaatggctatgatacttatagtatgagcttacaaggtgtctttggctggggcagtgtgattttctgtgcagtcgttgctatcgtgttaagtaaaatgaaagatcgctag

SEQ ID NO: 41750 - DNA, 693 bp, Acinetobacter baumannii
atgaaaatattaaaactgtcttttttagcactcgggatgggtcttagcggattcgcacaagcagattttataggcgtaaaaggagacgttggctactggttttatgacggcaaagctaatatgtcttcacaatctcctgaagatcaagatctagaccgaaaaggtagtgctcaactttcattagcttttgagcacccaatcccatttattccaaatgcaaaaattcgttatgttaatttagatactcaaactaaatcagaaactttgggtcaagctaactataacgttgatttagatcatagtgattttattctctactatgagttactagataatattgtcagtgtagatgcaggtcttggtgcaactgtactaaatggagatattactgcctataccggtaaacgtgtagatattgataagacatatccgattgcttatttatcaggtgaagtaaaacttccatttacagggttaagcgctaaaggtgaagcaacatatacaaactttgatgatgcaaaaattacagatgcgttagtagaagcaaagtataagtttgccgataatttattaatcgatttaggcttaacagctggttatcgtatcctcaatatcgatttagatgattacgataacaatgaccttaaatttgaatttaaagggccttatgtgggcttagaagcacatttctaa

SEQ ID NO: 41751 - DNA, 600 bp, Acinetobacter baumannii
atgataatctatggtgatgtagattcaggtaattgttataaaatcaaaatgttactatccctattaaatataaatcatagatggattcatgttgatattttaaataaagatactcaaacagcagagtttctatctttaaatcctaatgggaaaatacctgtcttagttttagatgatggacgggttctaagtgagtctaacgctattctaggctacttggctgagggaacggagttgattcctgcagatccttatatgaaggcaaaaatgtatcaatggatgttctttgaacaatatagccatgaaccatttattgcagttgctcgttttattaataaatatctaggattaccgtcagaaagaatagaggaatatcataaattacaaccaaaaggccataaagcgttatctattatgaataaagctttagtagagcacgactatcttgttggaaataaatttacaattgctgatattgctttatatgcatacacgcatgtagctgaggaaggcggcttcgatttaaagttatacccaaatattcaagaatggtgtcaacgaattcaaaaatgtccaaaatatgtgagtatggttgaataa

SEQ ID NO: 41752 - DNA, 801 bp, Acinetobacter baumannii
atgacacttagctgtattcaacaacctcatcaacatttacaagcaaatttagaaggtggcgtactcaccttagccataaatcgcccagaagcaaaaaatgcattatatggcgaactttacttatggattgccaaagcacttgatgaagccgaccaaaataaagatgtacgagtaatcgttctacgtggtgccgaacatgactttaccgctggtaatgacatgaaagattttatgggttttgtacaaaatccgaatgctggtccagcaggtcaagttcctccatttgtactccttaaatctgctgccagattatcgaagccgcttattattgcagtaaaaggcgtggcaattggtattggtgttacgattttattacaggcagacctcgtttttgccgacaatacggccctctttcaaattccttttgttagccttgggctttctcctgaaggtggtgcaagtcaattattggttaaacaagctggttatcataaagcagctgaactactgtttactgccaaaaagttcaatgcagaaactgctctacaagctggtttagttaacgaaatcgttgaagatgcttatgccactgctcaggcaactgcccaacacttaacagctttaccgcttgcttcattaaaacaaaccaaagcattaatgaaacatgatttagatcagattattgaatgtattgaccatgaagcagaaatctttatgcaacgcgttcaatcaccagaaatgctagaagctgtgcaggcatttatgcaaaaacgtaaaccggacttttcacagtttaattaa

SEQ ID NO: 41753 - DNA, 633 bp, Acinetobacter baumannii
atgagcgtaactggtgagttcataaaaagtgaaaaactaattatgtatacatttgactatctcgtttttataggtcgttttcagccatttcatttggcacatatgcaaacgattgaaattgcactgcaacaaagtcgctatgtgattttggctttaggttctgcccaaatggaacgtaatataaaaaatccgtttcttgcaattgaacgagaacaaatgattttatctaatttttcattagatgagcaaaagcgcattcgttttgtacatgtggttgatgtttataatgatgagaagtgggtaaaacaggttaaatcattagtaaatggtgtaatagagccgaactcaaaagttggtttgattggccatttcaaagatgagtcatcttattatttacgactatttccagaatgggtgatggtcgaacttgatagcttgaaagattcgatttctgccactccaatgcgtgaagcctactatcagggcaaaattaaaacggatgcatttcccaaaggcaccattcaatttttggaagaattccaaaatacaccgttatatttacagctacagcaaaagtttttacaggcagaccattcaaatattgaggaaaccgtgtcgtctcataaagaatga

SEQ ID NO: 41754 - DNA, 570 bp, Acinetobacter baumannii
atgaatctactaaaagtttgtactttattgccttgtagctttgttattgctgcctgctccgttaattcatcaagcactcctcctacactgagctcttctacaccacaagttcaaaaatcatcgatagaaataagctgccaagatttacaaaatcctgcttaccgacaagctgtgcttaatgcaattaatcaaattcgacaagattctcgtcaatgtggtcagcagtatttttctgcagctaaccctttaagctggaataataatttatatcaaggtgcaaatgctcactctaaagatatggcaaataacaactttcttgggcatgttggctcaacaggtttagatttaagagcgagattaaaaaaatatcatatgctgagtaaagccaatggtgagaatgtcgcgagtggacaaaaaactttaaatgaggtcatggctaaatggatcgccagtcctctgcattgcagtaatattatgaaccctagatataccgaatatgccattgcatgtgcttctgaccagtctgctaaacaaagaagctactggacacaacaatttgcaggtttttaa

SEQ ID NO: 41755 - DNA, 462 bp, Acinetobacter baumannii
atgtctgagaatattcaactgccaaatcaggttttcccaaccacacacggcgaagttaatttggctgaagtcgataatgattggctgattatttacttctaccctaaagactcaacgccaggctgtacaacacaagctgtcggcttttcttgtttaaaagatcaatttgatgctttaggtgctcgcatttttggagtatcacgcgactcggtaaaagcccatcaaaactttacagaaaagcaggcactgacaatcgatttaattagtgacaaagaagaagtactttgcaaacactttgatgtgattaaagaaaagaatatgtatgggaaaaaagtaatggggatcgaacgctctacttttattttccataataaaaccttagttaaaagttaccgtaaggtgaaagcggccggccatgctgaacaggttttagaagatttaaaagcattacaaacagcttaa

SEQ ID NO: 41756 - DNA, 687 bp, Acinetobacter baumannii
atgcaagaacaatggaaaactaacgcacataacagaccgtcaattgtctcctttagtggaggtaaagatagctctcttgcactttatcatgccatgcaaactggtaacgtaattggtttaatcgttatgctagaagagcaaggacaacgctcccgttcacatgcaatgccacttgatattattcgggcgcaagcacaagcaattggcttacctgtatttatggcatcttctagctggaatgactatgaaaataaattcatcaacttattaaatgaagccaaacaaaaaggtgctgaggtactggttacaggtgatttagatatgccggaacatggttgttggcatgatcgtgttactaaaacagtgggccttaaattaggaatgccgctctggctacggccccatcgtgaagttgttgaagaatttattcaacttggatttcagagtgtagttgtgactgtaaaccttaaactcggaatgaaggtggaagatttaggtcaagtgttatcgttagaatatatacaggaacttgaaaaccgtggaattgatccatgtggagaaggtggtgaatttcataccactgtgattgatggtccaatttttaacaaagctattcctgtaagaaagctcgatattgtttatcatgaagaatatgcttttttaccacttgaattagatcaaatttaa

SEQ ID NO: 41757 - DNA, 417 bp, Acinetobacter baumannii
atgaagttgttaaaatcaaatcttattctttcatctttattctcagcagctgcacttatggctggttcagctcaagcagctgaaaacccagttcaagccgcatataaaagcactaacgttaaaggtgcattaatcaacgtttgtaaagaccaaactgcaaaaggcggtaaattaagttcagctgaagtaagtaaattctgtagctgccaagttgaagcgcaaggtaaagtgactgaagcacaaaaatgggaaattcaaagcgcaatcaatgcgaagaaaagcccaagctctttagcttttgtacaacagcaaaaccgtgaccttaaagcatgtttcggtcctcagttaacaactaagcttgagaaactaactgaagaagcaatgaaagcagctcaacaacaagctcctaaaaaataa

SEQ ID NO: 41758 - DNA, 672 bp, Acinetobacter baumannii
atgcgccctcgtgccattgttttactttcaggcggcttagactcaaccacttgcctagcttgggcacaagcgcgctatgaatgtattgctattagttttatgtatggtcaacgctcaaccactgaacttgatgctgcaaaagcattagctcagcgtgcaggtgttgaacatcgtgtaattaatatcgatttagccaatttaggcgggtctgcacttacagatcataacattgctgtaccagaacaattacaagaaggtattcctgtaacttatgtaccagcacgtaacacaattttcctctcttatgccttagcagcagcagaagttttcaatgctgaagcaattgttatcggcatcaatgctgttgattattcaggatatcctgactgtcgcccagaatttattgatgcttttgccaatatggctcgtttagcaactaaagctggcgtggaaggaaaacctcttaaatttgaaacacccctgttacatttatccaaagcgaatattatacgtttagggattgaacatggcgtagactatagtcaaacggtatcttgctaccaagcagatgctcaaggacgtgcgtgtggtaaatgtgacagttgccgtttgcgtaaagaaggctttatcgatgctggtgttaccgatccaacacgctatataccgcaataa

SEQ ID NO: 41759 - DNA, 711 bp, Acinetobacter baumannii
atggcttccttacgttcctctgcaattcctgtctctgaccctgcgtccggtctacgcattaccgagattttttactccttgcagggtgaagcaaatgcctctggcctaccgactgtatttattcgtctcacaggttgccctttacgttgtagttattgcgacaccacttattcttttgaaggtggcgaacgcttatcacttgagcacattattgaaacggctgaaaaatatcaaacgccttatatttgtgtaacaggcggtgaacccctagcacaacccaattgcttaattttattacaacgtttatgtgacgctggttttgacgtttccctagaaaccagtggcgctcttgatgtatcaagagtggatccgcgtgtttcaaaagtcctcgacttaaagactccaacttctggtgaagaacaccgtaatctcatcagtaatcttgaccatttaacaccgcgtgaccaaatcaaatttgtgatttgtaatcgtgaagactatgaatggtcaaaacaacaagttgaacaatatcaactgcaaaccaaagtcagtactgtctggttctcccctgcttttgcagttgaaaaaggtgctgttggcctgccacgtttagcacgtgatctggcacagtggatactggacgacaaactgcctgtacgtttccagctacagttacataaactgctctggaacgatgaatcaggtcgctaa

SEQ ID NO: 41760 - DNA, 822 bp, Acinetobacter baumannii
atgtctcagctttctacaatcattgagcaagcatttgaagaccgcgcaaatttcactgcagcagattgcccaagcgaaattcgccaagctgttgaagaagcaattgctggtttagataacggtacacttcgagttgcagaaaaaatcaatggtgaatgggttgttcatcaatggttaaaaaaagctgttttattatcatttaaacttaatgacaataaaccaatcgagtcatgtgatcttcgtttctacgacaaagttgaaactaaattctctggttggactgaagagcaatttaaagctgcgggtgttcgtgttgttcctcctgctgttgctcgtcgtggtagtttccaagctaaaaatgtggtgttaatgccatcttatgtcaacattggtgcttacgtagatgaaggcacaatggttgatacatgggcaactgtaggttcatgtgctcaaatcggtaaaaacgttcacctatcaggtggtgttggtatcggtggtgttttagaaccattacaagctaacccaaccattattgaagacaactgctttatcggcgcacgttctgaaatcgttgaaggtgttattgtcgaagaaggctctgttatttctatgggtgtttatatcggtcaatctacacgtatttatgatcgtgagactggtgaaatccattacggccgtgttcctgctggctcagttgttgtaccaggtaacttaccgtcagctgatggtaaatacagcttatacgctgcaattatcgtgaaaaaagttgatgcacaaacacgtgcaaaaacaagtttgaacgatttgttacgcgctgactaa

SEQ ID NO: 41761 - DNA, 729 bp, Acinetobacter baumannii
atgaaagtattacgtgttttagtgacaactacagctttacttgctgctggtgctgcaatggctgatgaagctgttgttcatgacagttatgcattcgataaaaaccaattaattccagtaggcgctcgtgctgaagtaggtactacaggttacggtggtgctttgttatggcaagcaaacccatatgtaggtttagcattgggttataacggtggtgacatttcttggcgagatgacttatcaattaatggtactaaatatgacgttgatatggataataacaacgtatatttaaatgctgagattcgcccatggggtgcaagtactaaccgttgggctcaaggcttatatgtagctgcaggtgcggcgtatttagataacgattatgacctaactaaacgttcatcagatggtactatcaaaattaacggaacaaattattcttataatggttctgtaaatggtcagttaagttacaaaaatgatatcgctccgtacttaggttttggtttcgcacctaaaatcaataaaaactggggtgtatttggtgaagtaggcgcttactacactggtaacccaactgtagagttagataaacaaggtacttttgttaatgctgcaggtggtaatgcggatgctgacttacgtgctgaagaaaacaaaatccgtaatgatgataaatacaaatggttcccagtgggtaaagttggtgtaaacttctactggtaa

SEQ ID NO: 41762 - DNA, 924 bp, Acinetobacter baumannii
atgaactttcaacaattaagaattatccgagaaacagtacgccaaaactttaatttaacggaagcatctgccgcgttatacacctctcaatcaggtgtaagtaaacatattaaagatttagaagatgaattaggcgtacaacttttcgtccgtaaaggtaaacgtctgctgggtttaactgaacccggtcaatcactccttagcattgtagaacgcatgcttgtagatgctgaaaatattaaacgtcttgccgatgactttaataaagtggacgaaggtactttaacgattgcaacaacacatactcaagcacgttatgtattaccaccaatcgtcaatcaatttaagaaactatttccaaaagttcatttgattttgcaacaagcaagccctgtcgaaattgcagaaatgcttttacaaggtgaagctgatattggtatcgcgacagagtctttaacaactgaagaaaatttagcaagcattccatactatcaatggcagcacagcattattactcctcaagatcacccacttacgcagctcgataaaattgatcttgatgctttatctgaatacccactgattacttatcacggcggttttacaggtcgttcaaagatcgataaagcatttgaagatgcacaaattgatgccgatattgtaatgtctgcgcttgatgccgatgttatcaaaacttacgttgaactcggcatgggcgttggaattgtcaatgatgtcgcttacgatgcagagcgtgactatcgtttaaaacaaattaaaactgatatctttggtgtcaacaccacatggattgctgttcgcaaaggccatttattacgtggttatggttatgagtttatttctttatgctcacctgatgctgacattaaagcattgaaaaaaattgcctatccagatgaataa

SEQ ID NO: 41763 - DNA, 1062 bp, Acinetobacter baumannii
atgagtattcaagttaaaaatattgaaaaacactttggtgcattccatgcgcttaaaaatatttcactcgatttcccagagggagaactggttgccttactcggcccatctggctgcggtaaaacgacgctacttcgtattattgcgggtttagagtcagcagatggtggtcaagtcttactagaaggcgaagatgcaaccaatgtacatgtccgtgaacgtcaggtcggttttgtttttcagcattatgctttattccgtcatatgaccgtatttgacaatattgcctttggtttacgtgttcgtcctcgtgccacacgcccatcggaagccgaaattaaaaaacgtgtgactcgtctactcgatttggttcaactgggctttttagcagaccgttatccagcccagctttctggtggtcaacgccaacgtattgccttagctcgtgcacttgccgtagaacctcgtgtgttattgcttgatgagccatttggtgcactagatgctaaggttcgtaaagaattacgccgctggttacgtaacttgcatgatgagctacatatcacttcaattttcgtaacccatgaccaggaagaagcacttgaggtagcagaccaaattattgtgatgaataaaggtaacgtcgaacaaattggttctccgcgtgaagtttacgaaaaacctgcaacgccatttgtatttgatttcttgggtcaagcaaatcgttttgaaggtgaacatgcaagcggtattatccgcattggcaatgatcgtatcgaattaccgaccacagttcaggcaccacaaggaaaagtaattgcttttgcccgtccggatgagttacatattcatgcgcaaccacaggcaaatacaattgaagcaacttttgtacgtgaagtctggattgctggaaaagtagtggcggaattacaagatcgtaatggacgtttaattgagattgctctgagcagtgaagctgcaaaacaacatgcatttaaaccaaatcaaactgtttgggtaagtgcatctcaacttcacctatttgcagatcaagttgcttaa

SEQ ID NO: 41764 - DNA, 885 bp, Acinetobacter baumannii
atgaacctacataccgacagcaatgcacttgccttgaaattgcaatctcgtgacgcgacacgtgaaccaacttgggtacgttatacgctcattacaattgcactgatttttttccttagctgcctcatgttgccacttattctggtttttgttgaagcatttaaacaaggccttgaagtctatgttcaagctttaattgatccagatacgttatcagcagtgaaattaacactattgaccgcagcaattgccgttccgattaatgtgatatttggtgttgccgctgcatgggctgtttccaaatttcagtttaaaggtaaagcaattttaaccaccattattgatatgcctttttcggtttcacctgttattgcaggtttaatgattgtactgattttcggtgctcaaggctggttaggcggttggctcatggaacatgacatcaagattctatatgccgtacctgccattgttttagcgaccatctttattacagttccatttgtggcgcgtgagttaattccacttatggaagcgcaaggaactgaagaagaggaagcagcgattgtactcggtgcatcaggttggcaaaccttttggaaagtcacactccctaacattaaatggggtctgatttacggcgtgattttgtgtaatgcccgtgcaatgggtgagtttggggcagtatcagtagtttccggccacatccgtggtgagaccaataccctgcctctacatgtcgaaattttatataacgagtacacctttagtgcagcttttgcggtgtcctcactacttgctttcttggcactattaacactgattttaaaaacctggttagaactacatcaagacaagccagaaccgcattcaactgattcgtaa

SEQ ID NO: 41765 - DNA, 834 bp, Acinetobacter baumannii
atgtcgcagcgatcccgagtgctgcctgggtttggcctatcattgggcttcaccctcgcttacgtttcttttattgtgcttattccattagccgcagtctttatcaaatcatttggaatcggatgggacggactatgggaaattttaacctctgaacgtattttaaaatcgcttcaactcagctttagttcagccttaattgcggcgtttattaatgttgtttttgggctacttttagcttggtgccttgtccgttataactttcccggaaagcgtctggttgatgccttagtggacttaccttttgcacttccaacagcggttgcaggcattgcgttgacctcactctatgcgcctacaggctggatcggtcaatatttagaaccacttggtattcaggttgcatatacccccatcgggattacgctagctttagtgtttatcggtattccttttattgttcgaaccgttcaaccggtattaagcgatattgaaactgaacttgaagaggcagcttccgcactcggtgcaaatcgttggcagaccattaccaaaattattttaccaatattactccctgccctatttacaggctttgctttagcatttgctcgcggtgtaggtgaatatggttctgtaattttcattgcaggtaaccagccgtttaaaactgaaattgctccgcttatgatcatttctcgcctcgaagaatatgactatgcaggtgcaacgactattgcagcagtgatgttggttctctctttcattattttatttgtcattaacttacttcaagcatgggcaaaccgtcgtacagggagaaatgtcacatga

SEQ ID NO: 41766 - DNA, 609 bp, Acinetobacter baumannii
atgacacacactgtaattgttccgggtgtaggtggaagtgaacatcaacattggcaatcttggttgcagcgtcaactcgtgtctagttctcgcgttgagcaaaagaactgggatagacccgtattaagcgaatggattgagcaattcgttaacacagttcaagcagtacaagcaccagtccaaattgttgcgcatagtttcggctgcctaactagtgttgctgccttagcagagcatccagagttacaacttcaagttaaaaaactgattttggttgctcctgcaaatccggcacgttttggtgaagcgggatttgcccgtcatagtttgactgactacaaagattattttcatcagctaaaaattaatgtgcctgcaacgctactcattagtgaaaatgatccatggttagacttttttgatgctttacagcttgcgaaatcttggcaattaaccccgattaaccttggacaagtcggtcatattaatgttgcttcaggcttcggtccgtttcctgacttactgaatcatctacttcctgaagactcaatgtgtagccactcatctattgatccggtaaagacacatttctctttgaaatttgcttaa

SEQ ID NO: 41767 - DNA, 1008 bp, Acinetobacter baumannii
atgcgtttttctcagttaaaagtcggggttattgctgcattactttctgtttcatcgtttgcagctcaagaattcttaaacgtttcttacgatccaactcgcgagttatatacagatttcaataaacagtttggtacttactggaaacagcgtaccggtcaagatattgagtttaaacaatcacacggtggttctggtaaacaggcccgcgctgtaatcgacggcttaaatgcagatgttgtgacattagcacttgctgctgatattgatgaaattgctgaaaaagcaaaattgcttccaacagactggcagaaaaagttaccgcaaaactctactccgtacacatcaactatcgtgtttttagttcgtaagggtaaccctaaacaaattaaagattggggtgacttaatcaagccaggcgtggaaattattacgccaaacccgaaaacttctggtggtgcacgttggaactatcttgccgcttgggcttgggcaaaacatcaagcaggtggtaacgatgcaaaagcacaagaatttgttcgccaaatttataaacacaccaaagttttagattcaggtgcccgtggtgcaaccactacatttgctgaacgcggaattggtgacgtattactggcttgggaaaatgaagcacatttagctatccgtgaacaacctggcaagtttgagattgtgacgccatctttatctattttggctgagccaccagttgcaattgttgaaaaaaatgcagcgaaaaaaggcaacttaactattgcaaaaggttacctcaactatttgtactcacctgctggtcaagaaattgcagcacgtaatttctaccgtcctcgcaatgcagctgtactcaaaaaatatagcaatgtatttaagccattgaaacttgtcaccattgataaagagtttggcggttggacaaaagtacaaaagcaacactttgataatggtggtgttttcgatcaaatcgtgaaaatcaatagtgcagagaagtaa

SEQ ID NO: 41768 - DNA, 813 bp, Acinetobacter baumannii
atgtggtgttttaaaaatggacaacctgtagagaccattcctttattggaccgggcatttcattatggggatggctgctttaccacaattcgtgtttttcaaaataagattgagcttaaagcacggcactgggaacgtctaaaacttgcttgccaaaaattatctttggttgcagattttgagttaatcgaacaaagtttgcagcatctccaaaatcagaatctcgtgctcaacgggactttaaaaattgtgattagccgtggtgaaggtgatcgtggctatagtttgccaaagcatgcggcagatatttatatctggttttatccaaaagcattggagcagttccagccagattttatacagtgtggtgttttaaatcaggctttaggtttaaccatgccgagtttagttgggcttaaatccttaaaccgtcttgagcaggtattgctaaaaaaagaagcagatcaacaaggctgggttgaagctttagtaactgatgtacaaggttatattgttgaaggggtaagcagtaattgttttattcgtttaaatgatagatggattactccggaacttcgctataatggcgtccacggtgtgatgcgtgcagaaattttggcgcgtatgcagcactacggaattgcctgtgaagtcagaataattgagctagatgaagtaccacaaatacagagcctattcttttgtaatgctttacatccaatgcgagtagttactcaaatcagtgaacaaattctagagtcacaggcgtgcctaaatttatttcatactcttaacttgaatcagattcattaa

SEQ ID NO: 41769 - DNA, 1071 bp, Acinetobacter baumannii
atgccgaagccacctgtgaatgcgaaagcaaaaaatgctaaaaaaaagggcaagaaaacagcatctaattttccaaaaaagttagtgctgattggctgttttatcgttttaatttctatttttgctattttatggtcaagtttatttaaagcttatcctattgaagggaaaaagcagatgctatcgatcacatcaggtgagacctattctggttttattgatcgcttagccaaagaaaataaaatccatttcccaattgtacttaagctttatcaaaagtttatgattcatgacagtatgaaagctggtgtatatgagatagagcagggaatgagcgtaagacaagtattagaaatgttatctgatgctgataatgcccagatgaaccgtgttctagtgattgaaggaacaacttttaagcagctgattacagcactaaaaaacgataaaaatgtaaaaaatacgatattggatttaccagatgaccagcttatgaaggctttaggtattccttatcatcatcctgaaggtctgtttgctcccaacacttatttctttgctaaaggtgagaccgataagaaaatcctgactgatttataccatcgtcaaatgaaagccttagatgcggcttgggcaaagcgggcaccgaatttaccttataaagataagtatgaagctttaatcatggcttctattgttgaaaaagaaacgagcctcgatagcgaacttacacaagtttcaggggttttcgtgcgccgtttaaaactcggtatgcgtttacagactgatccaaccgtaatttatggtatgggtgcaaactataagggtaacattactcgcgaagacttacgtacaccaacaccatataatacctatacaattaatgggttaccgccaactccaattgcgctgccaagccaaaaagccattgaggctgcgttacatccagatgattcaaataacatctattttgtagcgactggtaatggtggacataaatttacggcagacttgcaagcacataaccaagcagtgcaagagtatttatccgtgttgagatcgaagaaataa

SEQ ID NO: 41770 - DNA, 600 bp, Acinetobacter baumannii
atgtttattagctttgaaggcacggaaggggtaggaaaaactacacttattcgaaaaattcatcagcattttgaagaacaaggtaaacaagttgttttaactcgagagccgggtggaacaccgttagctgagcaaattcgttcgatgcttttagcagtgaatcatgatgaaaatatgagtcatgataccgaactgctcttaatttatgcggcacgagctcaacacttacaacaagttattttgccggcattagagtctaataaaattgtattaagtgaccgttttactgatgcgagttttgcttatcaatgttccggtcgtggtttaagccaagacaaattacagcttttaaaccagaacttcgtttcacgcatgccggaggtgactttctggttagatgcaccgattgaacttggtatgaaccgtgcacgtgaacgtggagctttagaccgttttgaacaagaaaagttaagcttctttactaaggttcgtgaaggttatgaaaccttatggaaggttgagcctgagcgtattaaacgtttagatgctacacaaagtccagatcaggtgttcgagcaagctctgcaatatttagcatag

SEQ ID NO: 41771 - DNA, 417 bp, Acinetobacter baumannii
atgaaaagctcaaaagaagaaattgtggcatttcttgaaaaggaattcccacaaagtttggaacattgcacgattgaatcagtcacttctaaagctgcggttgtttattatcatgttgaccaaagacatcaacgtccgggtggtactatatctggcccgactatgatgactttggcagactttgctttatatattgcaatactcggcgaaattggaattattggtttagctgtaaccaccaattttaatattaatttcctgagaaaacccgcaggtgatcaagacttacgcagtgaatgtaagctcatgaaagtaggaaagagcttagtcgtaggtgaggtctggatttattcagtagggcaagaggaacccgtggcacatgtgaccgcgacttactcaattcctcctagaccataa

SEQ ID NO: 41772 - DNA, 1650 bp, Acinetobacter baumannii
atgcgaatggacatgcctaatcaacagacaattcaccactttgacgtgattattgtgggcagtggcggtgctggtttaagtctggctttatcgttaccaagtcattttaatattgcagttttagctaaagctgctttaactgaagcaagtaccttctatgcacaaggtggtgttgctgcagtacttgatgaaactgactctattcaacaacacattaatgacactatgattgcaggtgctcatttatgtgaaatggatgcagtccagcatactgtagaaggcggccgtccttctgttgatttccttttaaagcaaggcgttcagtttactttagatgaagatgaacagcttcatttgactcgtgagggtggccattcgcagcgccgtattattcattctgctgatgcaactggtaaagctatttcaaccactttggttgaacgcgccaaagaacgtaaaaatattactatttttgaaaactacattgcgattgatttaatcacgtcgcataaattgggtcatacagagcaggcaaatcgtgctattggtttgtatgcactagatgaaagtactgaaaaagttcataccttccttgccccatttaccgcacttgcttgcggcggcgcaatgaaagcttacctttatacgtctaatccggatattgctactggtgacggtattgcgatggcataccgtgcaggttgccgtgttgccaatatggaatttaaccagttccatccaacctgcctttaccacccgcaagcacgttctttcttaattactgaagccatgcgtggtgaaggtgcttacttacgtttaccagatggcgaacgttttatgctacgttttgacgatcgtgcagagttggctcctcgcgatattgtggcacgtaccattgaccatgaaattaaacgtctcggtattcgccatgtgtggttagacattacacacaaatcacctgagtttattaaagagcacttccctacactttatgcacgattgcttgagctaggtatcgacattactaaagacatgattccggtagtgccggctgcacactatacctgtggtggtgttgtggttgactcaaatagccagactgatattgaaggtctatatgcaattggtgaaacctcttatacgggtttacatggtgcaaaccgtatggcgagtaactcattacttgaatgcttcgtttatggcatgagtgcagcaaaagatatcgaaagtaagtttgataaaaacttcaaattaccggaagtaccaacttgggacgattctcaagtaaccaatccagatgaagatgtcgtgattttacaaaactgggatgagttacgttcgaccatgtggaactacgttggtattgtaagaaccacaaaacgtttagaacgtgcgttacaccgtattgaaatgctaaagcgcgaaattactgaatattatcaagattatcgtgtcagcaagaacctgattgaactgcgtaatcttgtacttgtttccgaaatgattgttcgttgtgctatgcaccgtaaagaatcacgtggcttacattacacacttgattatccggaaacttcgagtgagattcgtaaaacggttctgacgcctccaaactttgcagtagagcaacctttggtgaatactagtgtataa

SEQ ID NO: 41773 - DNA, 1377 bp, Acinetobacter baumannii
atgaaatctcgctatttacaacaaggaatgtatgcagcggtatttacagttgctgctgttcaagcaaatgctgctgttgatttttcaaacctcgttgaacaagttagtccggctgtggtgagtgtaaacgttgtaaaaaaaatgactcaggatgaactgttacaacagcaagttcctgaaattttaaaacgtttctttggtaatcaggtcatcattccacagcaacaaggtcctcaagagaaaactgcatatggtagcgcgttctttattagtaaagatggttatttacttacgaaccaccatgtaattgaaaatgcttcccgcatcagtattactttaaatgaccgtcgtgaaatagatgcaacagtggtcggtagtgatgagcggacagacgttgcattattaaaggtaaatggaactaactatcctgctttacgcgtaggaaatgttgaccgtttacgtgtaggagagccggttttagcaattggttcaccatttggttttgattattcagcgtcggcaggtattgtcagcgctaaatctcgtaacatgagcggtgaaacctctgtaccatttattcaaaccgatgtggcgttgaaccctggtaactcaggcggtccattgtttaaccagaatggtgaagttgtcggggtgaactcacgtatctttagtggtacgggtggctatatgggcttatctttctctattccaattgatgttgcgatggatgtagctgaacagcttaaaacgaaagggaaagtgactcgttcatacttgggtgtcatgatgcaagatattgaccgtaaccttgcagatgcctataaattacctaaaccggaaggtgctctgattactcaggtttctccaaattcacctgctcaaaaagcagggcttagagctggcgatgttattctaaaattaaatggtgcttctgtactgcgtaccagtgatttgctttatgcattaaataaagtacaaccaaaccaaactgttcagtttgaagttttacgcgatgataaaacccgaaatatctcggcaacactagcaactgcacctgatgaaacaccagctaccggtaatcaagcctctgcttctaaaggtccagtattgggaatgagtattcgtgatctcgctgtgccagagaaaaatgctttaggtataaaaggcggtatttatgtacaagatgttcgccgtggtggattagcatcattgtcaaatatcattcctggcgatgtgattattcaggttaataatactcagattttgaatagtcaggattttgcaaaagttgtttcgaatttgccgaaaaatacagttgcgcgagttgggattattcgtcaaggacaacgagcaatgcttggtttacgtattcagtaa

SEQ ID NO: 41774 - DNA, 456 bp, Acinetobacter baumannii
gtgagcagtattttcgatttacatattcaggttcagccacagcatattgatgctttagggcatgttaacaatgtaatgtatgtccagtggatgcaagacgtcgctgctgctcatgtggaaacattaggggtaggagtaaccaaatatctagagctaaaacatgcaatggttgcggttgaacaccatgtgcaataccgtaaagctgcgtttgaaggtgaagaaattgtactgcggacatggctagatgatattaatgctctatattcatttcgtcagtatgcctttttccgtccttctgatcaggcaattttgttcgtcggaaataccaaatgggcatgtattgaaattgcttcaggtcgacctaaacgtatgtcgccgacttttacacaggcttataaacctcttgattcaagtataaatcctttagatttcactgtttcatatagtagtaattaa

SEQ ID NO: 41775 - DNA, 549 bp, Acinetobacter baumannii
ttggagcgtttattttcgattgaaaccgatagactaattttaaatgaacttaaagaagatgatctaaagttcatttttgaattattttcaaattccatagtacttgaattctatgatttaaaagcttttacttccttagaggaagcagaagctttgattgaaaaaatgcataagaaatgggatcagcagctaggttttaggcatgcaattcgtcataaacatgatggaattatatttggcacatgcggtgtaaacagtattaagcaaattaatgatgatttcggtgtagtcattggttatgagcttcatcctgatgcatggggtgtgggttatatgcaagaagcacttataggattaattcagtatctgaagcaagagcaattgtttaggaaaaaaataaaatatatttgggctgaaatatttgaaaagaacgtgaggtcacaacaagttgtaaacagacttggatttgaattaattggaacaacagtcaaccatactgttaatacattagggggtgatttactcaaatttgagttgaagctgtattaa

SEQ ID NO: 41776 - DNA, 1818 bp, Acinetobacter baumannii
atggcgcaagctaaaaaatccgttgatatcaaaaatatccgaaatttctcgattatcgctcatattgatcatggtaagtctactttggctgaccgttttattcagatgtgtggtggcctgcaagatcgtgagatgcaagctcaggtcttggactcaatggagctcgagcgtgaacgtgggattaccattaaagctgcttcggtgacgttgtactatactcatccaaacgggcaggaatatcagcttaactttattgatactccggggcacgttgacttctcttatgaagtatctcgttcattagctgcttgtgaaggtgcgttattggttgttgatgctgcacaaggtgtagaagcacaatcagttgcaaactgttataccgctattgagcaaggcctcgaagttcttccaattttaaataaaattgatttgccgcaagcagagcctgagcgtgttattcacgaaattgaagaaattatcggtattgaagcaaccaatgcacctacatgttctgcaaaaacaggtttaggcgttgaaggtgttttagaaacattagttgatgttattcctgctcctacaggtgaccgtgaggctcctttacaggcattaatcattgactcatggtttgataactatttaggtgttgtctctttagttcgtattaaagatggtcgtatccgcaagggcgacaaaatgttggttaaatctactggtcagactcacattgttacatcggtaggtgtattcaaccctaaacatactgaaactggcgtgcttgaagctggtgaagtaggctttgttatcgcgggtattaaagatatttttggtgcgccggtaggtgataccatcacgctttcaacaacccctgaagtagcttcacttcctggttttaaaaaggttaaacctcaggtttacgcaggccttttcccaattgatgcaagcgattttgaaccattccgcgaagccttacaaaaactacagatcaatgactcggctttattctttgaacctgaaagttcagatgcgcttggttttggtttccgttgtggtttcttgggcatgttgcacatggaaatcgtacaagagcgtttagagcgcgagtatgaccttgatttgatcagctcagcgccaacggtagtgtatgaagctgtcactaaaaaaggcgatacgatctatatcgatagtccatctaaaatgccggatggctctgttgttgaagatttacgtgagccaattgcagagtgtcatattcttgtaccgcaagagtacttaggtaacgtcatgaccctatgtattgagcgccgtggtgtacaaaaagacatgaaattcttaggtaatcaagtttcaattacttttgaaattcctatggctgaagtggttatggacttctttgataagcttaaatcatgttcacgtggttttgcttcacttgactataactttattcgttttgagagttcatctttagttaaggttgacgtgttaattaatggtgagaaggtcgatgcgcttgcaatgatttgtcaccgtaatgatgctcgtcatcgtggtattgctttagttgagaaaatgaaagatttgattccacgtcaaatgttcgatgtcgcaattcaggctgctattggtgcacaaattattgctcgttcgaccgtgaaagcgatgcgtaaaaacgttttagcaaaatgttatggcggtgacgtgtctcgtaagaagaaactacttgcgaaacaaaaagaaggtaagaaacgtatgaaacaagtgggtagtgtagaaatcccacaagaagcgttcttagctgttttgaaagtagaaagataa

SEQ ID NO: 41777 - DNA, 828 bp, Acinetobacter baumannii
gtggattttgattttaatttaattcttgttcctgttacgctgattttatttgcagtgtggttgctagataagcttgtttttaaacagcgtgcaaataaagggcgagagaacgaaaattttgttattacatgggcctatgacttttggccggttttagctgttgtgcttgtacttcgctcatttctttatgaaccatttaatattccatcagactctatggttccgaccttagagactggcgattttattttagttaataaatttgactatggtgtccgtttacctatcgtcaataaaaaagtgattgatatcggtgaaccgaaacgtggtgatgtcatcgtttttcgttatccaccacaacccactattagttatattaaacgtgtaattggtttacctggtgaccatattgtttatgatcatggacaattgattattaatggtcaaaaaattcctaaagtaccaacacagtttagtcgcgaaaaagatgctttagatacaccaacttctatttatcataaagaaacaattggtgatcatacttttacgatgcgtgagcttgaaggcgtaaatgttgcgcgtcaggcaccatttatcaactatgttgataatggtaaatatgcaaaccaagacggtttatattgggaagtaacagttccgaaaggacattactttgcaatgggggataaccgtgatcaaagtgctgacagtcgtttctggggcttcgtacctgaagaaaatttaacaggccgagctttctatgtctggatgcataaagaacctggtttccacctgccaagctttaaccgaaatgggaaaatagattaa

SEQ ID NO: 41778 - DNA, 375 bp, Acinetobacter baumannii
atgcgtaaggcacaacagggtacttcgtatttagcaattttatttggggtggtcatatttgcaattgcggtgaaagccgtacttgcagtttggccagcatattgggatgatcgtgtgattaataatcagattacagagcttatgcaacaaagctcggctgatatcacaccccaaaagtttatgacacagatggaccaacgactggaaatgaacaacattcgtgatctgcattttaaagagattgctgaagtgtttaaccagccaagtctaacagtcaaaaagaaatatgaggtaagaaagcctttcttgctgaatattgatttagttttaacatttgagaagagttttgacaaaacatcagttcaagctaagtga

SEQ ID NO: 41779 - DNA, 693 bp, Acinetobacter baumannii
ttgacaaaacatcagttcaagctaagtgatcctcgcttactcagtcgaatcggttatcaatttaagcagcctgaattgctacagttggctttgactcatcgttcggtgagtcataagtataactacgaacgtctggaatttttgggcgattcactgttggggatgattatcgccaattatttataccatgcgtaccctcatgaaaatgaagggcgcttaacgcgtatgcgcgcgactttagtgcgtcaggaagcattaggtaaaattgcaaccgatttgcaacttagtcggtgtttaatattaagcacaggcgaattgaaatctggtggtcatcatcgtgagtcaatattggctgacacagtggaggccattattggtgcaatttatcttgatagtagtgatctgaacctactcaaagatattgtgttaaaatggtatacgccttatttagatcatattgagccaacagatcaactcaaggatccgaaatcacgtttacaagagtatctacaagcacgtaaaaaacctctccctgtttacgaggttgtagatattcagggtgatgcgcctcatcagcactttaaagtcgaatgtttggtagatggtttatcaaaaattcatggtgaggggtcaagtcgtcgttttgccgagcaggcagcagcggcggaaattttaaagttattggagcaataa

SEQ ID NO: 41780 - DNA, 1029 bp, Acinetobacter baumannii
atgtcgatgcattctgatcaaatcaatccagattcaaacgaaaaccaagatccaaacaatctgattgatcaattttttagttccaaaggcgttacaattccttcggattttaagagcggatttgtggcgattgtaggacgtccaaatgtgggtaaatctaccctcatgaaccatttattgggccaaaaactctctattacttcacgtaaacctcaaacgacacgccataaaattattggtattgattcgcgtgaaaaaatgcaagcggtttatgtcgataccccaggtatgcataagaaagaagtacgtgcaatcaataaaatgatgaaccgtgctgcgcattctgcgttacgtgacgtgaatttagtcttatttgttattgatgcccacaagtggacacaaaatgacgatttagttcttgagaaactcaagaatgctgatatgccagttattttggtgattaataaagctgatacttttggagataagagagagattctccctttaattcaagaacgtgccaaacttatgaattttgcggagattgttcctgtttctgcactccgtggagcaaacttagagcacttaagtgaaacgattgaaaaatatcttccttatcagccacctttgtattcattcgatcaaattacggaccgttcagagcgcttcttggcaagtgaaatcatccgtgaaaaaatcatgcgtcagttgggtgaagagctaccttatgatttaacagtacaaattgaatctttcaaaacggaagaagcaactgttaatgaaaaaactggtcgtttaaaaccagcatgtacctatattgatgcaactatttttgtggatcgtcctggtcaaaaagcgattgtaattggtgaaaaaggtgccaagcttaaaacaattggcatggatgcacgtaaagacatggaaaaaatgttcgaacaaaagatcatgcttaccttatgggttaaggtcaaaggtggttggtctgatgatgaacgtgctttaaaaagtttaggatatagtgatatctaa

SEQ ID NO: 41781 - DNA, 201 bp, Acinetobacter baumannii
atgaaagcaattacatcaatattgattatccttggatgtacattgatgttgcaaggttgtgtatataagcttgtaaccgtaccagtaggtattgcttataaaacgactaaaggtgtagtgaagggtacagctgctgttgtaggggctgtaattcctgatggtgatgacgacgataaaaaagaaaaagaatctgaggaatag

SEQ ID NO: 41782 - DNA, 714 bp, Acinetobacter baumannii
atgatgcgcaatgaagtcctacatggatatatgattcaccatcgtaaataccgtgaaaaaagccatattgtgcatctcttcactcaagaatatgggcgggttgatggtattttaagacagactccgcctcctcaatatcagccaatccggttgcaagccacaggcaaaagtgagctcaaaaattttacaaagctggaaatactaaatcagccggttttcttttttggcgatgctttttttgcagggttctatttaaacgaaattgttcttagactttgcccactagaagaggcaatgccacaaacttttgaacaataccagttaacgctgcttcaactccagcagctatcttctcatgaaaatccggatttatttcttagacagatcttgaggcaatttgagcatatcttgcttgcagagctgggctatgcgattgatttttcaattgatagctcacaaaaagaaattttgcctcaacagttttatcagtttcaagtgactgaaggatttgcccccgttgttcaggcaagtcgctcatcgttgtcaggaaaagcaattttatccatgctgaattatgagcagggacaggatttttctcacgaacaattgcaattattaggtaaactataccgtcaaatgattacatcgcttttaggtgaccgtcccctaaaaagtcgacaattgtggattcaaaatactcaaactcaatcgtaa

SEQ ID NO: 41783 - DNA, 726 bp, Acinetobacter baumannii
atggctgcattgcttggtgtaaacatagaccatgttgctactttaagacaggcgcgcggtactgcttacccagaccctgtagaagctgctcttatttgtgaacaagcgggtgcagaggggattactttgcatttgcgtgaagatcgcagacatattcaagatgatgacgtacgccgtatgcgtccattattgaaaacacgtatgaatcttgaaatggccgtaactgatgaaatggttgagtttgcgaaagaaattcaaccacaacatgtgtgttttgtaccagaacgacgccaagaagttacaacagaaggcggtttagatgtagtgggtaactttgaaaaagttaaagctgcaactcaagctttagctgccattggttgtgatgtttcactctttattgatgctgattttgctcaaattgatgcagccattgcttgtggagcgcctactattgaattacataccggggcttatgcagatgcaacaacagagcaagaacaacaagaagaacttgctcgcattgtaaaaggtgtggaatacgcagcttcaaaaggtttggttgtaaatgctggtcacggtttgaatctgaaaaatattgctccaattgcggcaattccacaaattcatgagttaaatattggtcactcaattattgcggaaagtgtttttgttggactagtacaggcggtgaaagacatgaaaacagcgattcaggcagcaggataa

SEQ ID NO: 41784 - DNA, 645 bp, Acinetobacter baumannii
atgtcgagtatcaattacgatgaattaatgcagcctgtattagcatttttagggtgccaaaccccaaaagaatggttggatgaggccgttaataatttagacatcttgatgcaagatcatgctaactgtgagaaaaaggcagcgggtacagccatgaacttgatgttccgctatagttttttcacggacctacaagttaagcttgcccagcttgtacgtgaagaaatgcttcactatgaacaagttctagaatttatgacaaaacgtgggcaagagtggaaaggtttaagtgctggacgctatgcaggtggcttacgaaaagaaatccgcacatatgaaccagaagctctaattgatgtactcgtgatcggggcttttgtagaagcacgttcatgtgaacgcttttatgcgcttgctccgcgtgttgatgatgagttagggcgttattaccgttacttacttaagtcagaatctcgtcattttgaagactatttagcactagcgcttgacgtcgcaaaaactgccaaaatgaaagatcctgaagaagatattcaacagcgtattgaacatatccgtgaagttgaaaagaatctgattttgactccagatgatactttccgttttcatagtggtatccctgcataa

SEQ ID NO: 41785 - DNA, 759 bp, Acinetobacter baumannii
atgttagcattagttacaggcgcatcagcaggttttggttatagtatttcaaaaaaactgattgagtcaggctataaagttattggatgtggaagacgcgcagaaaaattagaagaactacaaaaacagcttggcgaaaatttctacccactcgtatttgatatgactgatacggcagaaaatataaataagttatttaaagaattaccaaatgaatttcaaatcgatcaaattgatttattagtgaataatgcaggcttggcattgggtctagagccagcagataaagcggatttagatgattggtacaccatgattgataccaatgttaaaggccttgttacggttacccgattaattttaccaagtatggtaaagaagaaatcaggcttaatcattaatatgggttcaattgcaggtacatacccatatccaggtggtaatgtatatggggcaacaaaagcttttgtagagcagtttagtttaaatctacgtgcagatttggctggtactggcgtgcgagtaacgaatattgagccagggttgtgtggtggtaccgaattttctcttgtacgttttaagggagatcaggagaaagctaacagtctatacgataagaaaaatccaattttgccggaagatattgcaaatacagtagcatggatcgcatcacaaccaccgcatattaatattaaccgtatagaaatgatgccaacgactcagacttttaaccctttaaaagttgtagaagtggaataa

SEQ ID NO: 41786 - DNA, 429 bp, Acinetobacter baumannii
atgaaaacacttactgttgcttctattttttctaattttgatttttatcaacgcaattatctcaatattttaaatcaaccagaatcttattacactcctgtagaagatgcatggatcgatgcttttccatttaaaaaacaagatttgtacttaggtgacttactacaactctggtttagttcaaaatgggatgtgcatacttcgttgaaagttttaaagtgttccaagatattagatcaatctaaacctctctatattttccagctcgaaggagaattattcctaggtaaaaataaagttttagcctggtctactcagcatcatgaagtgatagagcttcaacttaagaatatttgggcgccttatgtggttgcgaaaacttgtgaccgcccagatattccttacttaataaaaaaggcagccgtttaa

SEQ ID NO: 41787 - DNA, 438 bp, Acinetobacter baumannii
atgaaaaatcctatggaaatgacaggcctcgaatttttacaagccatgattgaaggtcatattccacctgccagtattagcaaaactattccgatgcaacctactgagatttcagaaggatctgtaactttcaaagcacaagcagatcataatcacttaaatcctttaggtggcgtacatggtggttttgctgcaactgttctagattcagtgactggctgcgctgtacataccatgctacctgctggtgtgggttatggaaccatagatcttaatgtaaaaatgtgccgccctcttccacaaaatcaggttttaattgctacaggtaaagtgatcaatttaagtaaaaatttaggtatttccgaaggaaaaattactgatgaagaaggcaaactttatgcttatgcaacagcaacctgcatgattattcgaccataa

SEQ ID NO: 41788 - DNA, 411 bp, Acinetobacter baumannii
atgaacggacagtgtttatgtggtgaaacagctttcgaagttgagttaaaaaatcatgatgtacatgtttgccattgctcgatgtgtcgtagacaaaccagtggtgtcattatgacagttgatgtagttaaaggtagtttaaagtttattcagcaaaagcatcttagtgtatttaactcttctgaatggggtgaaagaggcttttgtaacgcttgtggaacaacaattttttggagaacaaaagatcaaagttactgcaatatcaatgtgttttctttaaatgaaccagtaaaagacttgaaattagatatggaaatttttattgattcaaaacctgatttttataattttcagaatgatacaaaaaaactgactgaggctgaggtggcagctttatttaatttagaataa

SEQ ID NO: 41789 - DNA, 1701 bp, Acinetobacter baumannii
atgatagatactaaacctcttatagcaattgatcttggaaccagtaactcactagttggtatttttgaaaatggtcagtccaaacttattaataatccttatggtatgaaaactacgccctcagctattgcattggatgagcaagggcaaatcttaattggacaagctgcattagagttaagaagtcgtggtaaagaggtattaactagttttaagcggttaatgggtacctcaaaaagattaaaattaggtcagcagagcttttcagcagttgaattgtcttcattgatattaaaatctcttaaacaggatgtggagcaggctttgcaatgtgaagtagaggaagccgtgattacggtgcctgcttactttaacgatatccaacgtcaagccactatatctgctgcagaacttgcgggtttaaaagttagtcgactcattaatgaacctactgcagctgctctagcatatggtttagggcaaacgcaggatagttgtttcctgatttttgatttaggagggggaacctttgatgtctcaattgttgagttgtttgatggcatcactgaggtgcgagctagtgcaggagataactatttaggtggagatgactttgttcagttgttaatgaaacaatactggaaacagcatgcaactatttttggctatactgaaaatgctattccatttgatattgaaacagcattaagagctagagcacaacatagtcttcatgttttaagtaaagaagcgaaaacagatttaatatttaaatgggaagataaggaggccaccctagaaattactcaagaagaattcgcagtatgggccgaaccattactgcttagattacgccgcccactagagcgtgccttgagagatgctagagtcctgcctcaacaggttgaccagattattatggtaggtggtgcgacacgtattccagttgttcgtaaattagtaacaaaattatttggtcgttttccatcgacaagtgtccaacctgatgaagcaattgtacgtggtgcgtgtgtgcaagcaggtttaaaagcaaaagatgtatctttaaaagaaattgttttaacagatgtttgcccatttagtttagggattgcagtggaaaatgatgagcagttttcacctatcttagagcgcaatattgtaattcctgccagtaaggtaaatacgtatactgcgatgaataaagggcagagagaaattattgttaagatttatcagggcgaacatcgactgtgtaaagaaaacatttttttaggtgagctcaatgtgcctttacctccaaataatgactatttatctattgaggtgcgattctcttataatccaaatggtattttagaagttgatatagaagttccaagcacaggagaaaagctccaaaaagtgattgttaatcatcaaaatgtaatgagtacggaacaaatagagcaggcccgtcaacagttgcaggaattgaaaatacatcctcgtgatactttaatgaataagagcttattattacgagcagagcgtttatttagtgaatatacaggagatctacgtttacagattggagagcgaacacaacaatttaattatattctaaatctgcaagatccaagacaaatacgtgaggcacaacaacatttcgaagcttttcttaatgaaattgaagatttaagtttgtttgaagagtattaa

SEQ ID NO: 41790 - DNA, 1962 bp, Acinetobacter baumannii
atgacagcttggcaaagattaggaatagaaccaacagttaaccagagagaaataaaaaaggcgtatgccaaacaactaaagttaatcgatcaagatacccagccagaagaatttattcttcttagagaagcattagaaactgctcaattcgaagcagaacatttaatatatgaaaacgaggatttggataactcatcctctatatttgaagaaaataattcttttaatgaccaaaatttaaattcagatgacttaaatgatcaaacacttgaaaataaacttaagagactaaaacatcatattgctattcaagacattaactttaatatacgtgatgaattaatacattttaataatgaaattgaagcatataaagataaaagtattagcagccatttcagagatcaaattttagatctattaagaaaaaatgatcttgatgatttttgttatatctttacagaaaaagatgctgaaaatattgtcacaaaccatcagaaaataattgaaaaagaaaaaaccgaatattctgtttccagtaacgaatgtattcaatcagatgcacttagtattccagtaattcttgaggaagttagcaatgcactatggaataaagatattagcgatataacattcgataaattcaattatttacttagtcaacaatatgatattcctcttagtcaacaaatagaaataaaagatcaactccaagcccctttagcagaaattgaaattgatgatctacagcccgaatattttcggtttctagaattgtggcatgaaacttatcctgatgatattcatcaatataatccatcttattactcaagcttattacaggaaaaattaaatagttttttatctcgatacaaactcttaaaaaagtttcctaatgaacattttgaattattaaatgaactttctggtgaaaaaaaatttcatccattaaaaatgctcaaattaagaaaaagtttaaataaaatttcaaagaactatagtacagttgaagttattgataagttacagctttctatcacccaaactaaccctaattacttatttctaaaaagtttaagcaatttttggaaatttactataataaatattctatttataactataacctttctcttttttaattcccttatagctccagataatcaaattatagtaaatttattaattacggcctgcattagtctgttatatatatttatactacaacctatattaaataccagaattttaggtcaccctggttatgaaagaacattgggctattatcttaaatattggtgtttaagtggatttattctctgcagtttgaccccttggcttccagatttaccccatcaacttctaagttatggatggtttatatctacaactatactactgagtactttgctgctagatgcaacaccatatatgaatagattagagcaaagtgcatttattaatatcgataaatggataattaatatcggtttaatctctcttagtatttttcttatttctgtctttcttattattggtgaacctgatcatatctggttcataatttatagtctgatcccgatctgtttcttattttacccagaatctttccgccctctcttctatatttttggatacaataaagaagataccaacttaacagataaacaaataatgtatagaagtattggtattatcttctttaggctattctgggtttttggctttagctatttatttataaaatcttcctcacaaccttttatgtatgctgcaggcttgattctaggaagtatattaataaccggatttagtgccaagaatctctcttctacacttaaatatttaacctacatcgccttatgtatagcaacgttatacaccatactcttccctttgatattaatttattatttatatcaaagctatcaagcaaaaaaaatcattttatctagctgctaa

SEQ ID NO: 41791 - DNA, 1230 bp, Acinetobacter baumannii
gtggacgtacgtctttctgatcgtgtcaatgctatcaaaccgtcccctacacttgctgtaactaataaagctgctgagcttaaagctgctggcaagaacgtgattggtttgggtgctggcgagccagattttgatacccctcaacacatcaaagatgctgcaattgaagcgattaataatggtttcaccaaatatacggctgtagatggtactcctgggttaaaaaaagcaattattgctaaattaaagcgtgataataatcttgattaccaacctaaccagattttggtttcttgtggcggtaagcaaagcttctttaacttggcactagcattattaaacaagggtgatgaagtgatcatccctgcgccattctgggtaagctatccagatatggtcattattgctgaaggtacgcctgttatcgtgaaatgtggcgaagagcaacgtttcaaaattacacctgaacaattagaagcggcgattactcctaacactcgtttagtggtattaaacagcccatctaacccgacaggtatgatttacagcaaagctgaattagaagctttagctgaggttttacgtcgtcatccgcaagtatttgttgcatctgacgacatgtatgaaccaattcgttgggaagatgagttctacaatattgcaactgttgcacctgatttatatgaccgcacgattgttttaaatggtgtttctaaagcatatgcaatgacaggttggcgtattggctatgcagccggcccagcaaaaatcattggtgcaatgaaaaaaatccagtctcaatcaacttctaacccgacttcaatttcgcaagttgctgctgaagctgcgttgaatggtccacaagatgttttaaaaccaatgattgaagcgtttaaacgtcgtcatgacttagtggttaatggcttaaacgacatcaaaggtatctcttgcttacctgctgatggcgctttctacgcgtatgcaaacattcgccctcttattcgtgcaaaaggcttaaaatcttgcacagaattctctgagtggttacttgaagaaactggcgtagcggtcgttcctggtgatgcatttggtttaggtggtttcatgcgtatttcatatgcaacagctgacgaagtacttgttgatgcgttagcacgtattaaaaaagctgctgaatcaatcgaaggcgttgatgctgcaattgcatctatcgaagctgagaaagcataa

SEQ ID NO: 41792 - DNA, 180 bp, Acinetobacter baumannii
atgactgagcaacagccaaaacagaaaaaggctttggtgaaattgccatttccaatgccgaatgaaagtaaccaagcaggcgatgctgtacacaaccaagtacgtccgaaacctgaacaatatgcagatagaacttggatgccaccgcgtggtactcgtcgttctatgggtaagcgctaa

SEQ ID NO: 41793 - DNA, 1437 bp, Acinetobacter baumannii
atggaaactttagattcttcaatttttgacctcaccccaattccaatgtggattgaagactttagtgaagttaagcagttatttgacttatggagaaatcaaggggttgaaaacttatatgaatttctaagtcaaaatgaaaatctagtggttgaatgtgctcataaaattaaaattattaaggtcaaccaaaaagtattagacctttttgaagcaaaaaaccaagaagagttatgtgccaacttaaatcttatttttaaaaaagaaatgtttgaagcccatattcatgaactcgaagcgttatggaatggcaaaactcatttctcgagtaccactataaattacacgctctctggtcaacgtattgatgtacaactacgtggagcaattttaccgggttctgaaactacgtttgaccgtattttaattaccaccgaagacattactccatatcaaaatgcgcttcgtcaggaagagaaaaatcgacgcctagcagaatcaatgtttatctactctccgacttcgctttgggttgaagattttagccgtattaaaaatagaattgatcagcttaggctattaggaattgaagactttaggacttttttagatgtacatcctgaatttgttcgccaatgcatagaagacattttaattttagacgtcaatcagtcgactctcgatttatttaaagcaccagataaaaccactctgttaaaaaatacccataaaatttttgccgaagaaatggtggaaacttttagagaacagctgattgaactctggcaaggaaatattcaccacaagcgtgaagccgttaactatgcgttagacggtcaaatcagaaatgtcttactgcaatttaccgtattccccggttatgaagaaacttggggattggtacaggttgcgcttacagatattactgcacgaaagaaagccgaaaattatctagaatatttaggccagcatgatgtactgactaaactttataaccgagctttctttacagaagagcttaatcgtttaaatcgcagtattatccgccctgtttcttcaatttttttagacatgaacggcttaaaggaaaccaatgatcaactcggccatgatattggtgatggtttattacgtcgagtaggtaatattttaaatcaggcaattatgaatactgcttatacagcttctcgaatcggtggtgacgaatttgtaattttaatgcctggtgcagatgaagcgaatgttttgatgatgctgcaaaccattcaggagctttttaatatagataatcaatattattcaagtcatcctattagtattgcgattgggcacgccacaacaaaagaaaatgaacaagttgaagatatgctaaaacgcgcagatcatcatatgtatcaaaagaaaaaaagttattatcaagaaattcttctaccataa

SEQ ID NO: 41794 - DNA, 792 bp, Acinetobacter baumannii
atgacctatcaatatcatgatgaaagtattgtaaccgaactccctgaagataccgtgtttgtcttcggtagtaatatggctggacaacatggtagtggagccgcacgtgttgccagtcagcattttggggctgtagagggtgtaggacgtggctgggctggtcagagctttgcaattccaacattaaatgaacatatccaacaaatgccactctcccaaatcgagcattatgttgaagactttaaagtttatgcaaaaaatcatcctaaaatgaaatactttgtgacagctttaggatgtgggatcgcaggttataaggtttccgaaatcgctcctctttttaaaggcatacatcacaatgtgatttttcctgaatcgtttaaaccgtatgttgaagaagatgctgtttcacagttcccaacactcactcaaaaaatggttcaaagtttcattaatgatgaagttattttctacttcaatcacggcagtgaatcttttgaagatgctttagataaaacggatttatcacgtgctgaaaaagcgatagcgcttattgtgcttaatgaggaattgtaccctcgtgaccgctatggcagaggccgtgaccacgaattgagggatattttaggtaagctcaatggtaagatttttaatattcatggtaactcagaaggtgcaatgattttcgtaagtgtaattgttgcgcttatggaactttatgattttgatgagcaagattttataaaattatggcgcggtgagaaaaatatcgaccaccctattaaccgttaa

SEQ ID NO: 41795 - DNA, 2022 bp, Acinetobacter baumannii
gtgaacgaaaatcaacctttcgatttggtcactcattaccagccagcgggtgatcagccacaggcaattgaaaagctggtgaatggtatcgaaaagggttttcgtaatcagttactgctaggtgtgaccggttcaggtaagacctataccatggcaaatgtgattgcccaaactcagcgtccgacgattgtgatggcgcataataagaccttggcagcccagctctatggtgagtttaaagctttcttcccaaacaatgcagttgagtatttcgtaagttattacgactactatcaacccgaggcttatgttccgtcgtcagatacatttattgaaaaagacgcggcaattaatgaccatattgaccagatgcgattatcggcaacgcgtgctttgttagaacgtcgtgatgcgattattgttgcttctgtttcggccatttatggtttgggtgacccaaatgcttatatgcaaatgttattgcatgtggtccaaggtgaccgagtaagtcgagacgaaattattcgccgtttggttgaaatgcaatatacgcgtaatgagcttgaattcttacgtggtacgtatcgtatccgtggtgaaattattgatattttcccggcagaatcagaccaacatgcgattcgtattgaactctttgatgacgaagtagactcaattcgatggtttgatccgcttaccggtaaaatggtccgcaaagtaccacgtgtcacgatttacccgaaaagccattatgtgacgccaaaagacaacctaacacgtgctatcgataccattaaggatgaattgcaagaccagcttaagttcttccgtgaacatgacaagttactcgaagcgcagcgtatcgagcaacgtacgcgttatgatttggaaatgatgcagcagttagggtacaccaatggtatcgaaaactactcacgtcatttatcgggacgaccggcaggtgaagcaccaccgactttatttgactatgtacctgaagatgccttacttattattgatgagtcgcatgtaacggttcctcaaattggcgcaatgtataaaggtgaccgttcgcgtaaagaaaacttggtgaattacggtttccgtttaccaagtgcgcttgataaccgcccaatgaaatttgaagagtgggagcgtatagttccgaccactatttttgtgagtgccacaccagctaggtatgaactggaaaaatcagaacaagtggttgagcaagtggtgcgtccaacaggactaatcgaccctgaaattgaagttcgtcctgtattaactcaagttgatgatgttctttctgagatcaatattcgtaagaacctcaatgaacgtgtattggtgactactttaacaaaacgtatggcagaagatctgacttcttatttaaaagaatatggggttaaggtcgcttacttacactcagatattgatacggttgaacgtgtcaaaattattcatgaattacgtacaggcgtatttgatgtactagtgggtattaacttgctgcgagaaggcttagatatgccggaagtttctttagttgctattttagatgcagataaagaaggtttcttacgttctgagcgttcgcttattcagacgattggtcgtgctgcgcgaaatgtgaaaggtaaagcaattttatatgctgatacaatcactgattctatgcgaaaggcaattgatgagacagagcgccgacgtgcaaaacaaatcgagtttaatgagcagcatggtattacaccacgtagtgcagttcgtcaggctgtgaaagaaattgatacgggtgaagtactttctgatgatcagattgatgagaaagtattagagcaggcacaagcacttagcgcagatgaacgacatattctttctgaccctaaattgtttagtaagcacattactaagctagagaaagaaatgttaaaggcgtcgaaggatttacaattcgagcaagcggcgcgtattcgtgatgaaattgttcgtttaaaagcgcaaatgttgcaataa

SEQ ID NO: 41796 - DNA, 588 bp, Acinetobacter baumannii
atggcatttcgaaataatgttccgcaagccagttggcgcttggcaaaaattgcattgggcggtattgttctgactggcttagctgtcggaacatatgcgtatgcccagcagaagcctctacctacagtcgataaggttgaattagaccgttatttaggtgtgtggtatgaagtcgcgcgtaaacctgcttttttccaaaaaaaatgtgcttacaatgtatctgcaacctataccttaaatgaaaatggaaacatagttgtagataaccgctgctacaataatcaaaagcaattacagcaatctatcggtgaggcctttgtagttaatccgccgtataacacgaaattaaaggtaagctttttacccgaagctgtaagatggattccgataattcgtggagactactggattttaaagctcgatgaagattaccaaacagttttggtaggcgaaccttcccgaaaatatctttgggttttatctagaacgccgcatccacacaaagaagtggttgatgaatatctaaattatgcaaaaacattaggatttgatattcgagatattattcataccgagcataaagaataa

SEQ ID NO: 41797 - DNA, 945 bp, Acinetobacter baumannii
atgttaaagggcgtgattttgtctgtcatggcatcattaacttttggtgttctttatttttatactcaattactcggccaggttgatagtgaacagactttcggatggcgtattattgcgactttgccatttttaactttatttatgtggtggagtggtgatttaagccatattaaaaatatatatcaacgtattttagcgaaaccttctttacttctattactcattacaacatccgttttgacttcggtgcagttatggctgtttttatgggggcctatgcatggacgtggtttgcaagtttctttgggatatttcctgttaccgcttgttttggttttagcgggtagtgtcttatatggagagaaaatatcgaaatttcagtggatcgctattgttcttgcaattattggtgtagggcatgagatttttcgactaggaagtattgcttgggaaactgctttagtggctataggttattccgcttatttcttgttacgtaagaaaattaaaacggataatttagggggcttttggtgggaccttctgattattatgccagttgcaatctatctgacacatacagggttattgccatatagtaagttcctcgatcaaccgacactcgggttggttattgcgggcttaggtgtgcttagtgctataggcttgggatgttatatattggcaagccgttatttacctttggttgtgtttggtctgcttggatatcttgaaccggtattacttgctttagcatctttagtgctaggggaaagcattggtaaagaagaatggtttacttatcttccaatttggtgtgccgttttcgtattagttttagaaggggcttttcatctttaccaacagcaacaaaaagccaaaaatttgcaattaaatatcgaaaaatatcaaaaaagattaaaaaatgatgctcacgattag

SEQ ID NO: 41798 - DNA, 1458 bp, Acinetobacter baumannii
gtgagcaaagacactatcatcgccctgcacgctgaacaccaaggccgttggaaaaaccgtgaagaaatcgcggaacgtatgattgcattaatcggtcaattataccgtgaaaaaaatattgtcgtatctgtttacggtcgctctttaattaaccgttctgttatccaaattttgaaaactcaccgtcgtacacgtgttgtagatgttgagctttctgtagtaaatactttccctattttagaagctttagcaaaagttgaaaatatcggttctgcagaagttgatatcggtaaacttgcagttgaatataaagaaaaaggcggtgatgttgacgcttttgttgctcaagctgttgagtcaattaaaggtagcgcaacttctgaacaacctaaagatgtagttctttacggttttggtcgtattggccgtatcttggctcgtttaatcattagccaatcaggtttaggtcgtggtttaagccttaaagcgattgttgttcgtaagtcttctgacggtgacttggcaaaacgtgcttctttacttcgtcgtgactctattcacggtacttttgcaggtacaatctctgttgatgaagaaaacgaagcaattatcgctaacggtaacttcatcaaagtaatctatgcgtctagcccaagcgaagtagactatactcaatacggtattgaaaacgcgcttttaatcgacaacactggtaaatggcgtgatgctgaaggcctaagccaacacttgaaatgcccaggtgttgcacgtgttgtattaactgcaccaagtaaaggcgaaatgaaaaacgttgtatttggtgtaaacaactctgacattttagatgaagacaaaatcatctctgctgcaagttgtacaacaaatgcgatcactccaattcttaaagtattggatgacaaatataaagttcttaatggtcacgttgagacagttcactcatttacaaatgaccagaacttgatcgataactaccacaaagctgatcgccgtggtcgtgctgctacattgaacatggttattactgaaactggtgctgctaaagctgttgctaaagcattgcctgcgttaaaaggtaagttaactggtaactctgtacgtgttccaacaccaaacgtatctcttgcgattttaaacttaacgcttgataaagaagttgatcgtgaagaagtgaacgaatacattcgtcaaatttcgatcaactctaaccttcaaggtcaaatcggttataccaactctacagaagtggtatcaagcgactttatcggttctcgtactgctggtgtatatgatgctcaagcaacgattacttctggtaaccgcttaactgcatatgtttggtacgataatgaagtaggttatagctgccaagtattacgtattgctgagcaaatgtgtggcgtaagctataaaaaaattcctgcagaaactaacgcttaa

SEQ ID NO: 41799 - DNA, 735 bp, Acinetobacter baumannii
ttgcagcagtttaaaagattattgatcgtcttcttttttattatcatcgcgaatatatgtggtgtacttatcgccatttgggtgtttaaacattttaatatttatattccgttgaaaaaccaggcagtagcgatcgatttacaagagccattacaggtacaagttaaagtaaaagatgctttaaatgtcgatgttaaaggtcgagtgaatgctaatattcctattaatgagaagttaaatattcctttaacgcagactttaacaccacgtgtctatttcgataatatggtgccgattagtacggttattccagttaaagaaactttaaaagttgagcaaagtttgccaattgacacgaaagttcaggtgagagtgcttggtaaagatattactttgccattaaaaggtaatattcctttacagttagatgtacctattgatattcaagttccactcgatcagaaagttcatttgaagtttgatgcgccagtaaaaacggtcttaaaagaaaatcttcatattccattaaatgctcaattaaaaacaaatattccaattcagggaagtttgaatgtcccggtgaaaacagctttaaatgcgtcggtagatgtaaaaaataccttgcctgttaaaatcgagcatggtgagttaaaaataccactatcgagcatgagcctgaatcgcgttaaatctggcgaagatcactcttcacctgttcagaaccagacaaaatag

SEQ ID NO: 41800 - DNA, 675 bp, Acinetobacter baumannii
atgtttggctcattaaaaagtatattaatcagtttctttctgattatgatactcacggcaatcttattttggttttatttaaacatacaggcttcagttgtggtttcagcacatgagtcagatattcgattaccagaatcattagaaactaaaatacatgttggcaataatttgcaagtccaatcgataggtaaattagacacatctattgatattgaccgtcagatttcagttccattaaaaggaagatacttggctgatttagagtttgaagtcgagactccaattacggtaagtgttgattatgcgacaacattaaaagtcgatcaggtgatgcctttagaaacaaccactgatttaatttacaaaaataagttattaccaaggtttccattaaaattaaatatcccgattaaacttgatattccatttcagttaaaacgtagttataccattccggttaaaattgcttttaatggtccggtttattttgagtttgatgaatctataaatttgccaattaaacatcagtttaacccaagtttgaacgttaacgatgcaatggaaatggggaatatctcaagctttaatgccattatgtataactctgttcagcacactaaagctaatttggacatgaagatggatttacctttacgtaatgttcatccttag

SEQ ID NO: 41801 - DNA, 1221 bp, Acinetobacter baumannii
atgcgctttgttgatgaagcagtcattaccgtagaggctggcgacggtggcaatggcgtagccagttttcgccgtgaaaaatttgtaccatttggtggcccagatggtggtgatggcggacgtggtggaagtatctatattcaagcagatgatgatacaagtaccctagtcgattaccgttacacccgtaaattccgcgctgagcgtggtaaaaacggtgcaggtgctaactgtaccggacgtggtggtgaagatgtggttttaaaagtacccgttggtacaacaattgttgatacagattcaggcgatattattggcgatctggtagaagacggtcaaagagtaatggttgcaagcggtggtgaaggtggtttaggaaatactcactttaaatcatcaaccaaccgtgctccacgtaaatgtacgacaggtacaaaaggtgagttccgtgaaattcgccttgagttgaaagtattggcagatgttggcttattaggtatgccaaatgctggtaaatcaacatttattcgtgcagtaagtgccgcgaaaccaaaagtagcagattatccatttaccactatggttcctaacctaggtgtagtagatgctgaccgtcaccgctcgtttgtgatggcagatattccgggacttattgagggtgcagcagaaggtgcgggtttaggtattcgtttccttaagcatttagcacgtacacgtattcttttgcacattattgatgtacaaccaattgatggttcagatccggcccataatgctaaagcaattatgaatgaacttgccaagttttctcctactttggcgaagttaccaattgtattagtactcaataaacttgatcagattgccgaagaaagccgtgaagaatggtgtcagcatattctagatgagttgcaatggacaggtcctgtctttaagacctcgggtttactcgaagaaggaaccaaagaagttgtttattacctcatggatcagattgaacaacaacgtgaacgtgaagttgaagatcctgagtacgcagcagaagtaagagcattccgtgaacagcttgaagctgaaacacgtgaacagaccattgcagcgaaggaagcataccgtgctatgcgtaaggcacaacgccttgaaagcatgatggacgatgatgatgacttcgatgacgatgaagacgatggtgatgtagaaagcatctacgttcgtgattaa

SEQ ID NO: 41802 - DNA, 1134 bp, Acinetobacter baumannii
atgatagaagtggtcgatgggcaacgtaagctcagtgagtgtaaacgaatcgttgttaaaatcggatcatctttactcacggcaaatgggcagggtctagatctggacgctatttcgcattgggcgaaacagattgcagatttacacaatgctggacacgaaattattttagtgtcttcaggagctgtggcagaaggtatggttcgtatgaagcttgcgagtcgacccaccgatctacccagtcttcaagcatgtgccgcaattgggcagatgggcctaattcatacttggtctagtgtgcttgaaaatcatagtatccgaactgctcaggtgttgttaacacatgatgatttggcagaccgccgtcgttacttaaattcatgtgatgcattgcagaacttgattgattggcgtgttattccggtcattaatgaaaacgatactgtatctaccgatgagattcgttttggtgataacgatacactcgcagctatggttgctggtcaagtacatgctgatttattaattattttaacagatcagcaaggtatgtttgattcagacccacgtcataaccctgacgcaaagttattatcaactgtgcgcgccatggatgatgttttatttgaaatggctggtggtggtggtgtgcttgggcgaggtggcatggtcactaaagttcgtgctgcacgtttagctgctaagtcaggttgcccgacattgattgctagtggtgaaagcgacaatgtgttgtcacgagtgatggctggtgagatgctgggtacattgtttacgactgataaagaccgtatgacagcgcatcagcaatggcttgctgcacatttacaaacagcgggtcgtcttgtaattgatgatggcgcagttgaagcgattaaattgaaacatcgcagtttattgcctgttggggtaaaaactgttgaaggacattttgatcgtggtgatgtggttgaatgtgtcgataaacaaggtaaacgtgttgcggttgggcgagtgaattttagctctcgttctgctgaaattattaaaggtctttcttcagacaaagtttaccaagtacttggtgaagcccgttcattagaaatgattcatcgcgatcatatggcaatttactaa

SEQ ID NO: 41803 - DNA, 657 bp, Acinetobacter baumannii
atgtatgcaacgagcgaaacgaataagactataaaaaatctcgccctgttcgattttgatggaaccttatgtagtaaagacagttttacagggttcatcttttatgcgttgtctaaacgtcatattgtgaagcaaggcttgaaaatcctgccatggattcaagcctattatcttaacttttatccagcccatgctatgcgtgccaagctatttcgtagcatgttcagagatactcctgcaattgaattgcaaagactaggcgaagaatacgcacaagaactcgtctctgcactttcacctgaaatttttacacaattacagcaacaccagctattaggtgatcaggtggtattagtttctgcttccattgatatctatcttgctccactttgcaaactactagatattgaattaatttgtacagaggctcaaattaaaaatggcatgatgactggttactactcaactccggattgtagtagtgagcaaaagaagttgagaatacgtgagcaatattctctaaagcattatcagcgaatctatgcgtatggaaatagctcagaagatttagacatgcttagtcttgctacacatccttttatggtcggtgaagatcgaatcttgccctcattaaccccacaaaaaaagctcgcatga

SEQ ID NO: 41804 - DNA, 1209 bp, Acinetobacter baumannii
atgaacaaaccgttgtcttcccgttttttatttaaatcattcggtatggttgccgtatgcatgagtttagctgcttgtggagataaagcctggtggtcaaataatgatgagcctgaattagaaagccagcaaatcaaacgtctcattccatctcgtgtgcatgaccgagagtcatgggctaaagatattgatgacattatgaaagacttagacattcctaaaaccaaacaaaatgtctgtagtattgtggcggtcgttgatcaagaatccaattttgttgccaatcctcaagtgccaggattaggacaaaaagcagttgaggaagtcagtacacgtttaaatgaaaaatttgaagataagcttggcaaaaccattggtggaacaattgcaggttactttgaagaagtactaagaacccaaccctctcctgacaataactatatgagtcagatgcgtaaagttaaaaccgagaaagaccttgatttactttaccgagaaattttcgactttatggccaaacactatcacgtgagtgctttaactggcgcagctaaattagttggacaagatattggcgaaaaaatgaatccgatcactacactgggttcaatgcaagttcatattaactatgccaaagcaaacaaacgctcgagtatgaatactgctgcactacgtgatgacttatataccgagtatggcggcctttattatggaattcaccgtttaatggtttatccggcagattatgataaagccatttatcgttttgcagattacaactctggtatgtactctagtcgtaatgcagcttttcaaaaaatgctaaaagaactcaccgacaaggatataagtcttgatggcgatctactcctttacacaaaagatggtgatccacgcgcaactcaaagcgagtcagaaaaagaactaattaccgtatttgctagtaataatgttttagttacaccaagacagattcgtgatgatctaaaattagaaaaagagaaaaagtttgagagtactcaaacttatattgcattgactaaactttataaatcaaaaactggcaaagagccgctctatgcaattatgccgcaagtggtgatttctgggcctaaactaagtcgtgactataatactaactggtatgcaacccgcgtaaacggacgatatgaaacatgtatgcaacgagcgaaacgaataagactataa

SEQ ID NO: 41805 - DNA, 1026 bp, Acinetobacter baumannii
atgtatattggtccctatcaactgtcaaataatttaattgttgctcctatggccggtgtaactgaccgtccatttagaacgctgtgcaagtatttcggtgcgggtcatgcagtcagtgaaatgatgactgctgacaagactttacgtatgactaaaaaaagtctttatcgtgctaattttgatggagagttagctccaatttctgcacagattgctggttccgatccggaacagttggctgaagcggctcgttaccaagtcgcaaatggcgcgcaaattgttgatatcaatatgggatgtcctgcaaagaaagtatgtaataaattagcgggttcagcattattacaagatgaagatttggtagctcgaatattagatgcagtcgttgcagcagttgatgttccggtaactttaaaaacccgtttgggatttttaaatggccaagagaatattctacgggtggctaagcgtgccgaagaggctggcatcgctgcattagcactacacggccgtacacgtgaagatatgtatttaaataccgcccgttatgaattgattaagcatgttaaagaattaatccatattcctgtgattgctaatggtgatattgatagtcctgaaaaagcaaaatatgtactggactatactggggcagatgcaattatgattgggcgggctgcacaaggtcgaccgtggatttttcgtgaaattgcccattacttaaaaactggtgaacaccttgctgctccgaatattgaagaagtcaaagaagtgcttttagggcatttgtctgagttatatcagttttatggtgaatactctggttgtcgtattgcccgtaagcatattgcttggtacaccaaaggtttacgctcaagtaatgagtttcgacaaaatatgtataaagttgaaacgactgctgaacaagctttagttgttgagagttattttaatcaattgctcgctgaaggtaatttgatgagtgatgttcaggttgaacaggttaatttattagatactcactaa

SEQ ID NO: 41806 - DNA, 1047 bp, Acinetobacter baumannii
atgagcctattacaacaacttgcaatcaaacatccaatttttctggctcctatggcgggcgtctctactcctgaattagcagccgaggtttcaaatcaaggaggccttggatcattaggcttaggagcaaacacaccgcaaagtgcacgtgaacaaattttaaaaactcaagcgctcacggaaaacccatttcaagttaattttttctgtcatcaatcgactgagcttaatgtagaaaaagcaaaactatggcttgattacctacgtcctcattttgaaaaatttggtgctcaaccgccccaagaattacactgtatctatccaagttttttagacaatgatgattttttaaatgttgttttagaaactaagccaaaagcagtaagttttcactttggtattccgcatccgcatcaaattaaagctttaaaagaggctggtattttgactatggtttcggcaactaatttgatcgaagctcaagctattgaggcagcgggtatcgatattattattgcccaagggattgaggcaggcggacatagagggattttcaaccaaacttttgatggggcaattaaaactagtgacttggttcaactgattgtgcagcactgtacacttccggttgtcgccgcaggtggcataatgactggcttacaagccaaacatatgttgggcttaggcgcagccgcagtccaattagggacagcatttgttcaatgccaaacttcaaatgcttctgccgaatatcgcaaagccctatttagtaaacctgtaacacagattagtgctagtctttctggacgccctgctcgggggatactcaaccattggcatataaaaattgattcacctactcgccctgtacaacccgaatatccttatacctatgatttagcaaagcaactaaatgctcttgcaagcaaacaccaagattacggttttggtgctttttgggcaggaagtaacgttgcacaaatacgtgaacttgaagcacctgatctggttaatcaactggtcgttgaaatgctagacagtgaatag

SEQ ID NO: 41807 - DNA, 702 bp, Acinetobacter baumannii
atggcttttccacatcatacagagcatcatgccattcaacgctcaggttggctaagagcctcagtattaggcgctaatgatggcattatttcagtgactagcttaattatggggatggctgcaagtggggcaagctcacatactctatttatcacttgtattgctggactcatttcaggcgcaacctcaatggctgccggagaatatatttcggttaaatctcaagaagatattgaaaaatcagatttagctattgaggcaaaagaattaaaaaaataccctcaaaaagaattggatgaattaactcaaatctatatttctaggggactttcaaaagaactagcaaaggaggtagctattcagcttacaactcatgatgctttgggtgcacatgcccgagatgaaatcggtattcatgaaaatacggcggcaaacccaattcaagcagcactctcctcagcagcttcattttcatttggggcatttttccccatgcttgccattttgtttagcccagagcatttaattatgccaagtgtccttattacaggtatcgcggcattaacaattttaggtgccctttcgagttattttgcaggcacttctaaaatcaaaggtagtttacgtattaccttatggggtattttagcgatggctttttcaagctggattggttccttatttaatgttactcctttataa

SEQ ID NO: 41808 - DNA, 1221 bp, Acinetobacter baumannii
atgaaaaatatcaaaacaataaactctataacacattcaatattattgatgggagcagtgatctcttctttgggaatgaccggtataagctcagtttatgcacaagagcaagtcgaccctgcatataagcccggtaaccctatttatgataaatgggatagattttataaaattgaacagtctcaaccgcaagaagcagaaaaaatattagttgagcttagtaaactgacaccaaccgatattaaagtctggaaaagtcttacttatttacagattcggcttgaaaaaagggaagaagctttacaaagcttaagacaagcaagaaatttagctcctcaagatgacaccttaaaattacaagaagcttatttgctgaatcagcagaagaaagatcgtgaagcattggttttatttaaagagttaagttcctcttcagaccctgaaattgctgctaaagcaactcaggcagttaaaaatttaagtgggggagaagttaaaccatattttaaagatatttattttgcaccgtcttatgagtcacgttatgacgatgttatttttcctttaaaaatgaggtatggcaaaaacatcgataacgggcgagcccaagtatatgcctttcttaatttaaaccgcgatactcaatcacaaggtggggtccgacctgaaattattgatgaaaatgcagccactttagggttaggggcaaattatcaaccgtggacttccattcctgtgcgagcctatgtcgaagttggtggaagttatgacttgattgatagaaatagaaagcgatttcgtgagagtgttgtgggcggtgtaacgggttatcaagaatggtattcacaatcaaactgcgatcattcactttgtttagataattattttactgacttatacggcaatgtcgcgacttattcgagagaggactataacgttattggggacttacgcttacgcacaggtttaaatctctataagggtgagagtgggactgtgcaggcttatgtgaaattgcatggcttagcggatagcgaagatgaatattacaataatttatttgaatatggtccaggcatttcatggcagccttttaattatcaaccgataaaactacgggttgaacgtctatatggcaattattttaaagacgtaccggttaatacaaaagatcattacaacaatactcgtgtagaacttgttttttataaggatttctaa

SEQ ID NO: 41809 - DNA, 1137 bp, Acinetobacter baumannii
atgaagaaaatttttatttcaattgtatttggtactcgtccagagctcataaagttggctccggtaattttattagcaaaacaagactcacgatttcaggtagaagttatttttacaggacaacatgatgaattagttcgagatgcgatagatttctttggggttgaaattgatcatcgccttaaaattatgaatgctggacaaagcctaaatcagcttttaattcatggcttaacgcaacttgaaaatatctacacagatggtcaaaaaagagatgcaattgttattcaaggtgatactacaaccgtgttagctgctgggctagttgcattttcaatgaagattcctgttgcccatgtcgaagcgggtttacgttcttatgatttagatcatccatttcctgaagaaggtaaccgccagttagtttctcgtattaccaaatggcattttgcccctacagaacaatcaaagcgtaacttgttaaatgagcagattccaccttcattgattacagtgacagggaatacggtagtcgatgctgtgtatttaggaaggaaactcatagctgaaaagacgggtttgaaaaatcaacttgagccttacggaattgaattaaaacaaaatgataaagttgtacttataactgctcaccgccgtgagaattttggcgaaggaattcagaatatttgtaatgctgttgagtatttagcaaaacagcatcttgatttacattttatttggcctgtacatttaaatcctgctgtacataatgtagtgcacgataaatttaaaagtcatgctcaaattcatcttgtgaagccactcgattatccaagtttattggccgttatcgaccgctccacctttattttaacggactctggtggtttacaagaagaaagcccatcatttaataagcctgtcttaattttaagagacacgactgaacgcccggaagtggtagaggtgggaggaggggtattggttggaacaaatcagcagaaaattattgaagaggctgagaaacttttaacggattcgcagcattaccaaaaaatggctcatgttgaaaatccgtttggtgatggacgcgctgcccagcgaatattagatgaaattgccagaacttataactag

SEQ ID NO: 41810 - DNA, 906 bp, Acinetobacter baumannii
atgaaaaaacagataccaattaaaataactgcttttattattttaattatatgtagtgtggtgggttatgcggggttgttcaaaaatcatgggcaacctcccattattgagggtattttctggcaacctgacaatgatactactcctcctaaaggaaactggcattacttaggaataaatacttttgttccccaatggtcagtcgttgaatctaaatcttggtggaaaaactccaacctccctcaatgggaaaaagccattgatttacaaaaaattaaacagcaaccttgggctaaaaatcttatattggggttagcaggtgaatataatgaacacgaagcgcgtgctaatgtcgttgctttgggagaaaaatctgcacaaattattcaagaacaaaatgatgcatctttaaaaggctattattttccagtagaagccgacccaacatggctaagagtaagtaccttaggacatgttttggaaaaattaccctctcctatttgggttagtgtttatagtggtgaaagtgaacctgaaaactacgatttatgggttaaaagctggcttcctcaacaagcaggcgtttttttccaagatggtgtaggtgtcggagtacgaactcccgaacaagctagacgtattttagatcaacttgaacagacacttggaaaagataaaacagttattgttttagaagcatttcgaaccaagaaaaatggtcaattccgtgcagcctatccttgggaaattatctctcaaattaaggcgtatgaagggaaaaaaatttatatttttgatggcccccactatatgggccgatggtccgtttatatagtcggtctatggtatcgactcgtttatggcagcacacccgtcaccataaacgaatcagaaaactcaaaataa

SEQ ID NO: 41811 - DNA, 1845 bp, Acinetobacter baumannii
atgaaaaagacttttgatctttaccaaacagctcaagtgctccttgccagcaccagttttttgcttgccatgtctactcatgcttatacatggaaactcgacgatattagtacctcgactaaatatacagtcgagcctcactttttctatattggaaaaggtgctgaatggcaaaacattcagttttcgagtgactactcaactgaaaatgacacaacagtactcgtcaaatatgacgataagctcatttataacactacgcttaatggtgatggccaattcaaatttaatattcctgccagccagagcggttttcaccgtttagattttattattcaacaatatgcaaaaccaacgacgcttaaccaaacaaaagaaacattctgtacagaagatattgatcacttaacttatttgagtaattcccaactcgactttacgcctgttcgaaatgagtaccgtttaaaagatctaccggacgctttatttaaccctcaggctagacgacctacaccttttgtcgggatcttaaaatataaccgtaaagaaattaccgaagcctctatgttgggccgattagtaagttcgtggagttctgtaacgccaattgaatgggttgattcaggccaaaccaatctaaatcctgaaacgaactttattattgaagtgattcgttcggcaagcccactcaaaggaggagccttagtacaaattgctaaaccggctgaaggtgtaccgacgctatctattacttatcacactccacaagagcttactgctgccattaacgggctaattaatccaacttatgtgcaacagcttgatacgggcagcgctatttttccaactacaatttcagcaccagcttgggcgcaatttaaaaaaattgatacgcttgcagatctaggtattcaggattttcgactaaatcatgccgaaaagaatttatttcttgattttccggcagtatggcaacctactgatattctgcaagggcaaatcgcacttcgtattcaaagtggactattacaaggttcaaatattacagcatggattgatggaggacttgcaggaagtatgaaaacggcggatctcgcatccgaccctgtaaaccgacagttcaacatctttgccaaggaaatttcaaatacaaccaactttagcttaaaacttgaaaactcggttattgctaattctcaatgtttacccaatgctcacggctcactctgggttgataccgccaaatcaaccgtcaaacttccccataaactaaaaaatggtgttgccgctctttcaatgaccttagccaccaagccaacgattgcaattgatgaccaatccggggcattaaatattgccattattttaggacaagtcgctaaaaacatgctgctgacacaagcaccaatgccagtgaacctagtacgcttctctccgacctctccacaagcagtgaatgtgagagtgaacaaagagatttatcagcaacaagtcttaatgcatcaaaatattatttatgcacccgcagcagcgaatggctttatcgtaagttataacaataaccgcttcgatgtaattacagattctgaaaacggtgcacaaacctttatgcatttatggggaaaaatacagcataaaatcccaaataatgtgaccaaaatgctggtttctgaaaacggcaatatttatgttcttcaaaaattaattgtgggtaatcaaaaagcgccattagttcagcaatcatcattctttttattagttgtgattatctctgcaattatgataatagtgatcttcttgtggtattggttacgacgtaataatgaaaaaacagataccaattaa

SEQ ID NO: 41812 - DNA, 1251 bp, Acinetobacter baumannii
atggctccaattgatatcctgtttttatttggctttttaggtatttggattccacaagcattttgggcatggttaagctatcaagcgtggaagtattccaaaacggctgaaaaagagctgcaaaacttaccaataccagaaagatggccagtcttaagtgttttgatccctgcttataatgaaggcgttgtgattgaggacactttgcatgccattgctcaacaggattatccggcagagtcttatgaagtcttactgatcaatgatggctccaaagacaacacccttgaaatcgcagaaaacctcgcaaaaatttatccttgcataaaaattgtcaatgtacccaaaggtatgggtggtaaaggtaaatcaagaacgcttaataatggtcttcctcatgccaaaggtgagctaattgttgtttatgatgccgatagtacccctgaacccgattgcgtccgattacttgcccaaaccttgttagccgataaaaagttagtggcggtaaatggcaaagtcagaactcgtaactggcaagatagtattttgactcgttttattgcgattgaattcatctttttccaatggatctttcaaggtggacgctggcaacgttttgaactatcaacattaatgggaacaaattatgtcatctggcgcgatgctctagagactttgggcggttttgatgaaaaatcgctagtcgatgatacagaaatgagtttccgaatttttatcggacaaaaacgaattaaatgggttccctatgcaatcggttggcaacaggaccctccttcgttaagtgtattcgttaaacagcgctcacgctggactcaaggtaatttttatgtaacacgcaaatatttacctgtagcactcagaaccccattcccaatcggaattgaaattctaaataacattatgtgctatatcctttttgtaccggctttattctggagtcatattaccttaacgcttggcttacttgatattgcaggtatttcagttcctggtccatttacactactgtggggactctcattttgtctctatgtagcacaaatgtggtttacgctttctttagaaaaagttaaaccagaactttacttttactcggtcttatcttacgtaagttactcacaaatcttcttatttattgtgtttaaagccgcattcgacatgctaaaaaataaaatacagggcaactcccttcaatggtacaaaacggaacgtagcaaggagaaaaaataa

SEQ ID NO: 41813 - DNA, 897 bp, Acinetobacter baumannii
atgtctaatcttcttaatatttgtggaattgtaatcgcctctagccaatatccagatgccacattacaacagttctatcgacaatattatcattgcgaaattaaagctgagcaaataaaagccgaggttcaaagtcctagtgatctttccatgtttttcccttaccaagatacatggtggcctgtctttacgattgatcagattagctctgaaagtttccaaaagtttatccataacggaattagacccggcattatcttgccagacgaagtattcggttttcctcactatttcttgttaaaagaagcagtaagccaaggtgctattcctattgcgctttttaaaactgaacaacctcaatattttgccgcaaaagcaactttttcgaccgctattggtttacgcccaatggctgcttttgtgagtacgggatgggatgaaaatttaatttctcaaccagcaggtagttatattatccagctaaattcagcaaatttaccattaccctcaagagaagtcagacaaggccaacattttttttactcggccaagggttttaacggtcatgtttcaggttatgaaattatcattaatccccctgctgatttacctctatctaatattcgatatcctcaactcggcatttcttggaactttaataatattgattatgagagtactcctgaacatgtaagtacgaatcttataggttatatatttattatattaagtattgttgttgttccacttgacctgattttaacaacgacgtatccggatctactcggcacatttggtagctatatttcatggatctccttagtggtcggggcaattttattattgctgctcatctcttctattattaggagggtccgtaaaaatggctccaattga

SEQ ID NO: 41814 - DNA, 741 bp, Acinetobacter baumannii
atgcaacaaaagcaccccggtagaacactcgtcttatggattatcgcagctcatctatttatgggaatggttgcatacgagtggctgcctgtgagttttagaggaagttggatttttattcttcttcttttaatttcaggtgcttttttagaagtcggtttgtctttaattgtaggtttagtggcttttattggagttgccgtatactttttactcgacttaggcgcacaaacacatattgaacgtcagttacttttactattcattattcccctaattccgctctttctaagtgctgtacgccacaatattgaaattaatgtacagaaataccgtgatattcaaagctatgaccgaaattatcgccgcgatattttcccgctcagtgctttaaaatactttcagcgtagtttttttaaattacttgatcaccacaatgtacaagattatgaagtattcgaaatccgaattcttaatcgcagtctgattaaagaaatgttaggcgatgatgtctggaaaacaactcaaaatgaaatgattaaaattttgagccaacatgaacccaacgagattgttttccagtttgcagatgatgatctggaaaatatttacagtattatgattcgccagcagaaaacagaagaagaccctgtattcttaaaaaaattaaaagaaattacgactttgcgtcttgaggtggaatacaaaattgttcctattccacctgaggagatgagctaa

SEQ ID NO: 41815 - DNA, 1443 bp, Acinetobacter baumannii
atgtcaaatgcttatcagctcatttggtttcgccaagatttgcgtatacatgatcatgcagctttatggcacgccagccagcaaggaccttcactcggtttagtcatcttatcgccagagcaatggaaacaacacgccgatgctccaataaaaataggtttttatttacgacaactcagaacgcttcagaaagagttagcagcactgcatattccactagttattcaagtcattccctattggaaagagatcgcaaactttatttctgatttcagcaagaaatataatattgaaaacgtgtatgccaatatcgaaataggcgtaaatgaattaaaaagagataaaacggtacaagactatttaaatcggcatggcaaagaactatttttattccatgaccgtactatttttccgttacgttcaatccgtaaccaatcacaacaaccatatcaagtatttagtgcattcaaaaaagcttgttatacaaagctcgacacaagcggtttacctcaatgttatccggtccctaataaacaaaatgaagtaccactagattttttacaggggaaaaatattgatttagacgaaattgaaaaactattttgctcatctctctcaaaagaacagcaagatttatggcctgttggcgaacaatacgcattagaacaattagatcaatttattgaagaatcggtttgtcactataaagtcgagcgcgattttcctaatatacaagctacaagtaagctttcaccttatttaaatattggtattttatctattcgacagtgtttacaagcactctttcgcaatcaacatggcaactttcacttagtcaatgaaggccaacaaacatggttagacgaacttctttggagagagttctaccaacatattttatttgattttccgcatgtttctaaacacatcccgtttaagaaagatactcagaagattaaatggaatcataatccagaacatttaaccgcatggcaaatgggtcaaaccggtattcctattgttgatgctgggatgcgacaacttttacaaacaggctggatgcataatcgagtacgtatgattacggccatgtttttatgtaaaaatcttttgattgattggcgcattggtgaacaatggtttatgcaacatttaattgatggtgacctcgccgcaaataatggtggttggcaatggtgtgcctcaacaggaacagatgccgtaccttattttcggattttcaacccaattactcaatcaaagaagtttgatccggagggagaatatattcgccaatgggtgaaagaattggctcatttggacaataaaacgattcatgaaccctactcaagcaaaaccgatcttggtttaaattatccaaaacccatagtagatttaaaagaaacacgccttaaagcaattgaaactttcaagaatatttag

SEQ ID NO: 41816 - DNA, 483 bp, Acinetobacter baumannii
atgactgcaattgcaaataaccacgtggtttcattccactataaattaacaaacgctgagggtgaaacacttgatcaatctcaaggtgaaccacttgcctatttgcatggcgcaggcaacatcattcctggtttagaaaatgcattaactggtaagactgttggtgataaattcactgttaacgtaccagctgctgaaggttatggcgaatataacccagacctagtacaagaagttcctgctcaaatgttccaaggcgttgataacattcaaccaggtatgcaattccaagctcaaacagatgacggcgttcaaatcgttactgttaaagctgttgaaggcgacaacgttatcgttgatgcaaacttcccacttgctggtcaagatttaacttttgaagttgaaatcgtagaaatccgtgaagcttctcaagaagaattagatcacggtcacgtacacggtgcaggtggtcaccaccactaa

SEQ ID NO: 41817 - DNA, 1287 bp, Acinetobacter baumannii
atgacccaaaacttacatcatattgttattgtcggtggtggcgctggtggtttagaactcgccacgcaacttggtgaaacttttgggaaaaatggtaaagccaaaattacattggttgaccaaaatttaactcatatctggaaaccgttacttcatgaaattgcggcgggttctttaaatcctcacgaagagcaaaccaattattttgcccatgcagagaaacaccactatgaatttgtgttgggaacattaacagcagtaaataaagataagaaaataattgatttaattccccctcaagtctctaaagaacaaaatacccatattcaacaactcagttacgatacactggttttagcgcttggttcagtatcaaatgatttcaatacacccggtgttcgtgaaaactgccatttcctcgatagccgtaaacaggcggatattttccagcaagatcttttacatttatatatcgaagcgcaaaatcaacccgatcaacgtacattaaatattggaattattggtgcgggggcaacaggtgtcgaacttgcggctgaactgattgaaacgaccaaaaacttttatcgctatggtttgaaaaagatccatccgaatcaagtcaaaattacactcattgaggcctcagaacgcatcctccctgccctaagtgaaaaaacagctgagcatagcgcaaaacagcttcaaagaatgggtgttgaaattttaactaaacaccgtgttgaaaaaattgatgaacactgtatctattttagtaatggtaaccaactcaacagtgatattacggtatgggcagctggggtaaaagcaccaaaagtacttgaaagtcttagcgatttcgaacgtgacaatattaaccgcttaatggtctatgcaacgctgcagacctattccgatcctaatgtatttgcatttggtgattgtgcgcattgccaacttgatgcaagacacccgcctctcggaccacgtgctcaagttgctagtcaacaagcgagctttttagtcgatgctatggctgctaggctaaatggccgatcacaaccgatgtttacttttaatgacaaaggttcacttgtgtctttaagtcgtaataaagcggttggagaattactgggggatgtcagtgtccaaggatatattgctaaaacgatgtatgtatctttataccgtttacatcaagcaacaattcacggatacactcaagctggactactcacaatgaaagatttacttacaagacgagtacgaccaaaaattaagctgtattga

SEQ ID NO: 41818 - DNA, 1320 bp, Acinetobacter baumannii
gtgaaattcttcctatctctttttacgctgtttagtattttctgtactactcttaccaatgctgctctacttaatattgctcctgaaagtgttgaagccgctgcatggacaattgtagatacccaatctggtcaaattattgctgagcataatagtcatgtacaacgtgcgccagcatctttaactaaaatgatggtggcctacattgcattaaaagagattaaggctggaaagttaaaactgaacgaagtcattactgcaacaccagtcgtaagcgtggtgcagtgggatgaatcacaaatgtacctcaaagcgggcgagcaaatttcagttgatcagctcttggctggtttaattgttatgtctgcaaatgatgcagctgtgactttggctgaaaaaatttctggtgatgtgcctcatttcgtacagcgtatgaatcaagaagcacaagcgctgggtatgaaagacacgcactttagtaaccctgctggcattacaatgccggatcattacacgacagctcatgatttgagcttattaagtcaggcagtgattcaccagacccctgaatatttacattattcgaaaatgccgagctttagctacaatcaacgttttcaccacgcgacgaaccttgctttaaaatatgacccatctgtagatggcttaaaaactggctataccaaagcagcaggttataacttggctctaacagcttcacgcccttcattttcaccgaacttaccgcaaagacgtttactggtaattgtcttaggtacaccaagtgctgtgaaacgtgctgaaattgcagataaattaatgaatcttgcttatgcttatacacgtgatgaagtggttattcctgagcaaaaattaattgctgaattgcctgttattaaatcaactttaaaaatgtttaaagtagaaactaagcagccaaccattgttacgacttctttatatgctgagccaacaccaattgatttaaatacgtttgattatgctacacagcgtattcaagttcttgatagcaatcaacaacctaaagttattgctccacttgaaacaactcaaacacgtgtaaatattcagttaaatgagcaaaagttaacagcaccgttaatgaaagcgatgaatttggcaacagtttcaatttatcaaaacaaccagctcattcgcagtcttcaaattgaaaatgatgtacacattgaagaagcaaatattttccaaagaattatgatgtggttctcaagcctattctcaatcttttcatcaagtgagcacagtgcagcaaaactctaccctatagattcgcactaa

SEQ ID NO: 41819 - DNA, 1704 bp, Acinetobacter baumannii
atgttgcattatcaaattgagttcgatgattacaaacaacaccttgttcacgtgacaattcgctttttagcgaatccaaatcaggaactatggttgccaacgtggattccgggcagttatctcattcgagagttttctaagcacatcgaggcagtaaaggcctatgatgaagctggacgcatgctcaatattaaaaagactgaaaaaaatcgctggcgtttatttaacaccgatcacgagttaattactgttgaatatgatgtttatgcatatgatttatcagtacgtggtgcttatgtagatcaaacgcgtttatatattaaccctgcctgtgtgtgtttaggcttagaaggccaagaacaatctgcatgtgaattagaaatctttttgccggatgaattaaaacactttcagttagcaacaggattagcttcaaaaagtttagtaaaaggacgttttactttaaaagctgatcattatgatcaactcattgatagtccatttgaactggctgatcaaacgcgttttagcttcgaaacgcatggaattgaacatgagtttgtaatttcaggtactcacgctacgaatgttgatcgtttaaaaacggatattgaaaaaatttgtgcagccgaaattgatctgtttggttcagcaccgtttaaaaactataccttcatgactatggcaacagggaatagttacggtgggttagagcattgcaatagcacaagtctgattactccacgagatgatttaccgaaatcgaatgaacccactgaaccttcgaaagattatcaacgtttcttaggtttatgcagtcatgaatattttcattcgtggttagtaaagtttatccgcccagaaaattttgcgaactacaatctgcatcaagaaggttatacctcgctactgtggatttttgaagggtttacttcgtattacgatgatttaattttattgcgcagtggcgtgatttcccaaaagtcttatttagatttgttgaagtcacagattgatcgctatttgcaaaacccgggacgttttgttcaaacagtagcagaatcaagttttgatgcttggattaaattttatcgtcaagatgaaaattcgaataatgcaggcacgagctattataacaaaggtgcattagttgccttatgtttggacttaggcttacgtttacgtggttctagccttgatgccttaatgcgtcgattgtatgaaaatacgcaaaacggtgttcaggttaatgagcgtacaatttttgatttatgcgaagagctaacaggtgatagttggttagagcaaatcaatcatttgattaatactactgaagagttaccactcgatcagttattccctgagtttggtttaagttatacgcttaaaaatgataagactttagcttatggtttaaagctagctgataagcctgaaggtgtgttagtacaaaatgctcaccgtgagggagctggtgctaaagcgggtatttctgctaatgatgtcattattgcaattgatggactaaaagcgaccacaaaacttattgagaaatatgctaaacaaaagggtaattactcagtcttggctttccgccgtgatgagttattgtcgtttgaagttacaagtgacagcataaacttaactgaagttgaacttattattgaagatcaaagcaaagctgacaaatggttaaaagcctaa

SEQ ID NO: 41820 - DNA, 2238 bp, Acinetobacter baumannii
atggctggtgaaaagtcaaccatcatttacacactgactgacgaggcgccattattggcgacttattcgctactgccgatcattgagacctttactaagccagctggtatcgagattgttaaaagtgacatctctgtagctgcacgtgtgctcgcagaattcgctgactacctaagtgaagagcaaaaggtatccgacaaccttgctgagctaggtcgtcttacacaagatccagatactaacattatcaaactcccaaatattagtgcctctgttgcgcaattgacagcatgtattaaagaacttcaatctaaaggttatgcaattcctgactatccggaaaacccagcgactgaagaagaaaaaacaatcaaagctcgttatggcaaatgcctaggttcagcagtaaaccctgttcttcgtgaaggtaactctgaccgtcgtgctcctgctgccgttaaaaattacgctaagaaacaccctcactcaatgagcgagtggaaacaatggtcgcaaactcacgtttcacacatggaagaaggtgacttctaccacggtgaaaagtcaatgacacttgaccgtccacgcaatgtaaaaatggaacttatcacaaacagtggtaagagcattgttcttaagccaaaagttgcgcttcaagaaggcgaaatcattgactcaatgttcatgagcaaaaaagcgctttgcgacttctatgagaaacaacttgatgactgccgtgaagcaggaattttattctcattacacgtaaaagcgacaatgatgaaagtttcacacccgatcgttttcggtcactgtgtgaaaatctactataaagaagctttcgaaaaacacggtaagttgtttgacgaattaggtattaacgtaaataacggtatggctgggttatacgagaaaatcgaaactcttccaacctcattacgtgaagaaatcattgaagatttacatgcttgccaagaacaccgtcctgcacttgcgatggttgactcagcaaaaggcatcactaacttccattcacctaacgacatcatcgtagatgcttctatgcctgcaatgatccgtgctggtggtaaaatgtggggtgctgatggtaagcaatacgatgctaaagcagtgatgccagaatcaacatttgcccgtatttaccaagaaatgatcaatttctgtaaatggcatggtaactttgatccaaaaacaatgggtacagtaccaaacgttggtttgatggctcaaaaagctgaagaatacggttctcacgacaagacttttgaaattcctgaagcaggtattgcaaacattactgatcttgacactggtgaagtgttattgactcaaaatgttgaagaaggcgatatctggcgtatgtgtcaggtgaaagacgctccgattcgtgactgggtaaaacttgcagtaactcgtgcacgtaactcaggcatgcctgcgatcttctggcttgacccatatcgtccacacgaaaatgaattgatcaagaaagtacagaagtacttaaaagatcacgatacgactggtcttgatatccagatcatgtctcaagtacgtgcaatgcgttacacacttgagcgtgtagttcgtggcctcgatacaatttctgtaaccggtaacatcttacgcgactacttaactgacttgttcccaattatggaacttggtacttctgcgaaaatgttgtctatcgttccgcttatggcgggtggtggcatgtacgaaactggtgcgggtggttcagcacctaaacacgtacaacaacttgttgaagaaaaccacttacgttgggattcgcttggtgagttccttgcgcttgcagtttctctagaagaaatgggtattaaagaaaataatgctcgtgcgaagttacttgcgaagacacttgatgaagcgactggtaaattgcttgacaatgacaagtctccatcacgtcgtacaggcgaacttgacaaccgtggcagtcacttctacttgtcactttactgggcagaagcacttgctgcacagaacgaagatgctgagttgaaagctaaatttgctccacttgcaaaagcattagctgaaaacgaacagaagatcgttgctgagcttgctcaagtacaaggtaaaccagctgatatcggtggttactatgcagttgacccagcgaaagtaagcgctgtaatgcgtccaagtgctacattcaatgcagcgctttcaactgttcaggcttaa

SEQ ID NO: 41821 - DNA, 789 bp, Acinetobacter baumannii
atgaaaatcgtcattctcaacaaaccatatgacgttctctcccagtttcgtaaagacgaagcacacatgacggtctctgactttgtagatgacccgactttgcgcatagcaggccgtcttgatatggactctgagggtttagttttcttaactgatcatggtggtttgaatcagttcattaccaaccctgcgaataaaaaatacaaaacgtatttagttcaagttgatggcgatgtaaccgaagaagcactcgagcagcttcgtaagggtgtagagcttaatgatggtatgactttaccagctaaagcaattaaggtaagtgagcctgaatggttatgggaccgcgatcctcctgtacgttaccgtgccagcattccaacatcttggattgaaatctctatttgtgaaggtcgtaaccgccaagttcgtcgcatgacctctgcggtaggttttccgactttacgtctcattcgtacaaaaattggtacgattgacttagttcaattgggattacaaccgggcgaaaccaaagaaattgagcctctactctacccagactttaaagatgttccggctgaacaaccttatcgttcacgttcatatgtgaaaaaaccgggtggcactggcggtaagccaatggttcgcaagaacaaagatggatctgcgaaaaaatctggtacaaagcgtatttggcaaatggatgaaagtgaaaaaccgcgtcgtaagactaacggtacaacgcgtccaaataccaaagcaccacgtggtcgtagccgcaatagccgataa

SEQ ID NO: 41822 - DNA, 1257 bp, Acinetobacter baumannii
atgggttatcagaagatcgtggttcctgccgacggtgataaaattacagtaaaagcagacctgtcactgaatgtaccaaatcatccaattattcctttcattgagggtgacggtattggtgtagatattacaccgacaatgaaaaaagttgttgatgcggcaattttaaaagcctatggcggcaaacgctctattgaatggatggaagtgtattgcggtgaaaaggccaataaaatttacggtacttatatgccggaagaaacctttgaagcgctgcgtgaatttgtagtttcaattaaaggccctttaactacaccagtcggtggtggtattcgttcactcaacgttgcactacgtcaagaactggatttgtatgtatgtgtacgtcctgtgcgttggttccaaggcgtcccttcacccgttcaacatcctgagttaactgacatggtgattttccgtgaaaactcggaagatatttatgcaggtattgaatggaaagcagattctgaagaagctaaaaaagttattaaattccttcaagaagaaatgggggtcacaaaaatccgtttccctgaaggatgtggtattggtattaaacctgtttccaaagaaggaacacagcgtttagttcgtaaggctattcagtttgcaatagataatgacaaaccttcggtgactcttgttcataaaggcaatattatgaaatataccgaaggtgcctttaaagaatgggggtatgagttagcactagatcgtttcggtggtgaattaatcgatggcggcccatgggttaaaattaagaatcctaaaaatggtaaagacatcattattaaagacgtgatcgcagatgctttcttacaacagatcttgatgcgtcctgctgactattctgtaattgcaacccttaatttaaatggtgactatatttccgatgcattagcagcagaagtagggggaatcgggattgcgccaggtgcgaatattggtggagctattgcagtgtatgaagcaacgcatggcactgcacctaaatatgctgggcaagataaagtcaacccgggttcaattattctctctgctgaaatgatgctccgtgatatggggtggatagaagcagcggacctgattattaaaggtatttcaggagcgattgcagctaaaaccgtaacttacgattttgagcgtttaatgccgggagcgaccttgttacgttgctcagaatttggcgatgccataattcagcacatggaagattaa

SEQ ID NO: 41823 - DNA, 492 bp, Acinetobacter baumannii
atgaggatttttagggagttttataaagttaaaaatcgtcactgtactctatgtttttataatatatattttaagcaaattaatttatatcaattaaaaactctaaaaatgttcaatgtatcaaacccagcaaatgccgttgttgtaggtattatcgcaataattgctacagttagtcttctgatatggaagtttaatttttatctcggtatagatatatacaccagtggagaggtgctatttaaaacattattgtatgccgccctaataggactatttagttactattttcgccatacaattaaaattagtaatacagtgattttatcattaccgctttttttcttttgtattcggcctattctaaactacaaaatgacgcataccattggaaatgtaccactgtatgcaacacatcatgggcaaggcttaatattgctgagtttaacgatattagcatgtatattgtgggcctatacggctaattcttag

SEQ ID NO: 41824 - DNA, 411 bp, Acinetobacter baumannii
atgagcaataacaattatattgatgagcttttaaagctcttggcgatgttcgcttttatcggtgttttattactggcatttaaatgtcagaccatctttgcactggatatgacaacatcatacgaagtctctgtaaggattgttatctatattgtcacagcagctattttgggttttttaacacgcaatcatattgagtttacaacacaatttttaattgctgttccatttgcatacttttggctagagccaattcttgactacaaggccattcaaactatcccagatgttccgttttatctctcgggtcatggtcaaagtttagggctactcatcgtgatcatattttgttttgccttatgggtatttaaagaaacaagctcaaactcgcttgagtctcaaaatgtctaa

SEQ ID NO: 41825 - DNA, 126 bp, Acinetobacter baumannii
atgaaaactctgctctttcctttatttctagttgctttcgttcttattattcaagccctagatcagagttatcaaaagaaaatcgggatacctaaaactgctaaacatcccgaatttatgcaataa

SEQ ID NO: 41826 - DNA, 1179 bp, Acinetobacter baumannii
atgtctacattctatcgaatgagcctgcttgtctttttagcgacttgcctaggaattggtatttttagattttcctataccgcactcatgcctattatgattgtgcaatatggatggactcatgattttgcaagctatttaggaagtgcaaatttattgggctatctggttggcgcattattggcactgtttagcattaaagaaaaatctatacccgctttgattataacttcggcggttttaggtagcttaagcctactctgctgttcttttatacacatgtctttggcttggtttgttctctggcgcaccatttcaggtatcgcaggtggcctactcatgattttggcacctagctttgccatgaaaaatattgcaattagccaaaggctcaaagtcaattttttagggtttagtggtattggcgcaggcgtattatctgccactctcattattcctgcacttaaaaatatgcctgttcaatatgtctgggaaatttttgccgccatttccattattggcagtttggtgctttttcagttattaaggcacccacctaccgagtccgttcaaacggccaatcaagctcctcaaaacttcaaacattcacgtttaggactggtcattattattgcttatatgtgcagtgcttttgcatatatcccacactctttattttggatggactatttatcgggaaccctacattttccattgcaacaacgaaacttattttgggttctttatggggttggaagttgtattggcgcctttgtggcgtattgtttaagccgccttattggatatttgcaggcaattaaatgtctatacggtgtctattgcttggcagttgccctaccttttttttcacatgctactgctttgctcactttatcgtcctttcttacaggtttactcacacctgccaccgtatttattagctcttatagcctgctacagatttatgaacagcgttatcaaaaaatctggagccttgccaccattgggtttgccagcactcagttattaggtggcgttgttattagtactttacatcacttgcattggtcttatgcacacctgttcttaatgggtggcattgttttgctattcgctttaatccttttagttcgcacccgttcttccatacccaccactctcggagaaaccaaatcatga

SEQ ID NO: 41827 - DNA, 882 bp, Acinetobacter baumannii
atgttgcttaagtctttagagttttttttagcggttgcagagagtggaagtttttcattggctgcacaaaaaatgtgtacggttcaatccaatatcacgagccacgtgaaaaagcttgaagaagagttaggtgtgattttattaaatcgtcataaccccgttacattaaccaatgcaggacaccagctacatagttatgctgtgcaaatgatcgcactgcataataaagcgaagacaatcttccgagaaggtgatattgacccgaatgaaactattcgtttgggcagtatggaaacgacagcagcaatacgacttccgcaattgcttaatgaatgtatgcagcaacatccgaatttgccgcttgaacttcaaactcacccgacaggatatttgttaaatgctgtgcaacaaggagaagtcgattgtgcttttgtcgcttctaaatatgtgattccagagctatatagttttccggtgtggcaagaacaactggttttggtgtgcccaaaacaacaaattgattttcccgacattgccaccctcgcaaagactcgatttattgcatttcgacaaggatgttcctatcggcatgcaattgagttgtttttaaatgatcacagtgtgccaccttcgcaaattatggaaatgggcagtctggatggcattgtaagctgtgtggaattaggtgtcggttttgctttattgccaaagtcatatctgaataaagtagccgataaagtctcattaagttgttttgaaattaacactgaatctgcacatttcactacttatttggtcgctcagcctcctgaaacatggggcagtaatttaaagcagtttatttgttttattgagcaacaatttatacagaaatgcgcttaa

SEQ ID NO: 41828 - DNA, 1395 bp, Acinetobacter baumannii
atgaatatacccttaatcatcaatattgtggtttttgtcgggttaatatttttactcgcccaaacacgtaaaacggactggagcttatctaaaaaagttctagctggcttaattttaggtgtagtgtttggtttaggactacatttgatttatggcggtggccatccgattcttgctgaatctattagctggtttaatattgttggtaacggctatgtaaaacttttacaaatggtcgtgatgcctttggtctttgtttcgattttaggtgcggtagcgaagctacaccaagcttcttctttaggaaaaatcagcttctacaccatcgggactttgttatttaccacactcatcgctgcgctggttggggtatttgtgacgaacttgtttggtttaactgccaaaggtttggtacaaggagcggctgaaacagctcgacttactgcaattcagaccgactatgtgggtaaagtaacagacttaagcgtaccgcaatttattctttcttttattccgagtaacccttttgctgagttaacgggtgcaaatccgacttcaattattagcgtggttatctttgctgtctttttagggatagcagcactcaacctaatgaaagatgacgcagaaaaaggtcaacgtattctgacggctattcaaacattacagtcttgggtaatgaagcttgttcgtttagtgatgacacttacaccatatggtgtttttgcccttatgacgaaagttgtggcaagttcaaatgtcgcagatatcttgaacctaggtggtttcttggtggcgtcttatttaggtttggcgattatgttcgtcgtgcatgccattattttgactgtgaccggtgtttctccacttaagttcttcaagaaagttgctccggttctaacattcgcgtttacgagtcgttcaagtgctgcaagtattccactgagcattgaagcgcaaactcgtcgtttgggtgtgcctgagtctattgcaagtttctctgcttcttttggtgccactattggacaaaatggttgtgcgggtttatatccagccatgctcgcagtcatggttgcgccaactatgggtattaacaccctagacccaatgtggattgcttcgttagtgggtattgtgactttaagttcaattggcgtagcaggtgttggtggtggtgcaactttcgcagcattgatcgtacttcctgctatgggcttacctgtaacattggttgctcttcttatttcaattgaaccactcattgatatgggacgtactgcgttaaacgtaaatggttcgatgactgctggtgtagttacaagccaatttatggggcagaccgacaaagctataatgaatagcgaagatgaaattgaattaactcaacatcattaa

SEQ ID NO: 41829 - DNA, 816 bp, Acinetobacter baumannii
atgaaaatgtatcaagtcgatgcttttaccaaagagttatttcgtggaaatccggctgctgtgattgttggaaaagagtggccagatgcagatttaatgcaaaagatagcacttgaaaataacttatctgagactgcttttgtaaaaattatagactctgaaaattatgaaatacgttggtttactccaacggttgaggtggatttttgcgggcatgcgactcttgcgagtgctttcgtattatttaaagattttactgagaaaaagactcttaattttcatgtacgaaacttaggtttgtttgtagttcatcaagatgaagacggcaaaatcagaatggattttccaattcgtaaagctcagcaagttgaagattatccggctattttacgtcaagcattaacaaaaccttttaaagcggtttatcaaaatgttcaagcctacattgttgaatatgagtcagtgcaagatgtgttagatgagcaacctgacatgaacttacttaaagccttaggtaagcggactgcaattacaactacagcaatggatgttgcaatcacctcaaaagctgaccatcaatatgactgtgtttctcgttattttgcacctgtcgcaggcattgatgaagacccggttactggttcaattcataccgcaatagcgccactatgggcagagaaactcgctaaaaataatattgtggcctatcaggcttctagccgtggaggcgtattgtattgtaatgtcttaaatcaggaacgtattgaaatttcgggatatggcaaactttatatgcaagccgaaatttttccttaa

SEQ ID NO: 41830 - DNA, 2763 bp, Acinetobacter baumannii
atgtttatgcagtttaaacaactgactctctccctatgtatttttggtttaagtgctgcctcttttgcacaaacaacattagtaaaaagtaagcaaaatgttgaggaatataaattagataatggttttcgggtagtgcttgcgccgaatgacaaagaaaataaaatctttattaataccatttatttaacgggttctttaaatgatccacagggtaaaagtggtttagcacatttactcgaacatttagcatttaaaggcacgcaaagtgtaaaaggtgaagaattccaacgccgtttagatcaatatacgttaatgacgaatgcgagcacggattactattcaaccaaatacaccaatattgtccgtccagaaaaaacagcactcgatcaagtgctgtaccttgaatctgagcgcatggacaaattagttctacaagaaaaatttgtgccttctgaaattgaaatcgtaaagcgtgaacgtgaagtccgtatggatcagccttttgctgtcttgatggatcaaatgtggaagtcggcttatggtaatcaatatctaggtcgattaccgattggtgatttacctgagcttaagtcaattaaaatgcctgagttgaaccagttctatcgcagttggtatgcgcctaataatgcggtcatggtgatttcaggcaagtttgataaaactgatgttttaaaaacgatagaccaatattttagcccaattcctgcgcgagctgtgcctaagcctgttcaagtgcctgtgttagattctacaaaactcaaaaaccgtgagtttgtggtgaaaaagggtagtgatttggccaaattccatatctatatggatggtaaaaacacaaaaattcaaccggaactggctttcgcacctatgttgtataccatgcagccaagtggtcatttgtaccaaaatatggttgaaacaggtgttagtacagacgttcaggcatcaacatggctagatcaagattttaacgtcgtatttttaggtgctatttattcaccaaaaaatgaccctaaaaaagttgaaagcgctttgctctctggaattgaaaagggtaaaccttttacagagactgagctaaatcgtgtaaaaagcttaatgaaaacgcaaggtgagttagtcaataaagatgccgttgctttgggttcccgtttaagtgattacactgtagcggatgggcaatgggaccaatattttaaagatttagattcaattgataaagtgaagctcaatgaggtaaatcaaaccttaaaacagttccttgttgcaggtcatcgtattgatggcgatattttgccaacaccagaagaccaaaagaaagcattacaactcgacgcaaaagataagcctaaaacattagatcaaacagatgttaaagcagagcctttaaaagatccgaaagtttatcaacaagaagttgccgagtttttaaaaacgtctaagcaatatgccgaaagtaatgagaaaaagatcattcgcggaaaacttaaaaatggaatgaagtatgctttattccctgtagaaacccgtgatgatcgtacctatgccaccattactatggattttggtactgaaaaatctttattcgataaaggtacggttgttgatttaacttcatatttattgcttcgcggttctgataaatatagcttgcaagatattgccgataaatcgattgatgcaggtggcgcagcttatgcgagtgccgatggcaatggtatgaccattaatattcaatctaaaactgaaaagttcgatgagtttttcaagtttgttctagaggtcatgaaaaatcctaaatttgaacaatctcaatttgatttaattaaatctcaaagcttatctagtcttgatcgtccttatacggaaccggatgtggtagcaggtctaacattatctcgcttggtagaagaataccagccgggtgatttgcgttatcactttgaaccggagctggctaaaaaacaattaaagaatgtgactcaagagcaagtcaaagagctttatcagcatttctttgccatgaatcatgcgcaaattgcgattacaggtgcatttgatgcccaaaaaatgaaaaagctattgaatcaagagttcggaagctggaatagcaaacaaccgtatgaaaaaatcttgattcaacatgttgattttcctgcccagcaagtacatgtcttatctgagcagcgtgagtttggtagttatcaaagtgtacttgcattaccggttgggaaaaatcatcctgacgcttctgcattaattttaatgaattacattttgggtgaatctcaaatttcatcacgtttggctcaagagcttcgtgaaaaaaatgcattggtatatggttttggtactggtttgcaattagatcgagacacgaatgtaggtgcgttaagcattagtgcaaattatacggctggtcgctcagcacaagtttctgcttcagttcataaggttctaaatgacttaattactcatggtattacagagcaggagcttgcagcagcgaaggcggatatcatgaagaaacgtgttactgccttagaagatgaacgtaatatccacggtatgttaaatctagagcttgagtcaggtaaaacattacttgaccgtgttaaacatgaccaagagttaacaaagttaacggttgctgatgtgaacgcagttattaaaaaatatattaaaccttcaaatcttgttgaagttatggctgaccagtatggtcaagcacaaaagcagtaa

SEQ ID NO: 41831 - DNA, 384 bp, Acinetobacter baumannii
atgtctcaaaagattaatgcaacagatattactgaagaagaagcgttaaatgctgttttctttgagcgtgcggatgaattcattaaacaagcaaatgatttttgtcgcccgcctaaaggccaaaagccagacccggccgagcttcgtggtcaagtgagcgcagccatgttatttgcaactgctcgttttaatacatgggtggctgccaataattttaaagatggtaatgaaatgcgtgatgcaaaagatcaggtgatgtcttaccttcttcaacagttccaaatgatgcttgaagataactttgatgagtattgtgaacagttcgataactacttacgtttccgtaagaatgaagattttcatactcacaaacacgaccattaa

SEQ ID NO: 41832 - DNA, 633 bp, Acinetobacter baumannii
atgcaagatgcaattgccgttcaaagtctaaaaacagacattgctttattacgccagcatatttttccaccccaatatttggagcatgtagaagggctgccaatttattatggtttgcaagaagaagttgtggcctattaccaacaatggaaagatttaatagaaagggcacaagagctttttcaaccttttatggaagatgaattaccagatgcaattcatttaccaagccatctaaacttacccttattctttttccatgtagaccgaattcggattaataaaacacgcgcaaaagaatcaaaaactttccgtggtgttgcaagtcttattgaaaaatgtgggcagtttgacacagaccagatatttaccatgcaagaatggttgcaaagtgatgatacagcagcgctagttgcacaccgtgaatttattgatttacggacgtatgtattccagcatggtcaaagtgaatatacgcgttcacggttttataccaatggtattgtgttaggggtagagccacactttaaactcgtcgatgctcgcgataaaccaagaaaacagcgtagtgatagctatagcgatccattagcagataacggtgtatggaaagtatttggtaaatatagataa

SEQ ID NO: 41833 - DNA, 1464 bp, Acinetobacter baumannii
atggttgaagttgagcttaagtttcagttacctgaatcgaagaaaaaaaccgtccagcaatatttaaaaaaacataaagcacagcatattcatttacaagccaagtattacgatacgccagatcgcctacttgcaaaaaatggtatggccttacgcttacgtaaagaaaatgatctgtgggtacaaacctttaaggctgccggccaaagtcatttacatcgtgtcgaagaagaagtttttttaggaaaatgcgatcaagaacctgacttaaaccttgagttatataaagacaataaagccgtcacagatttgattactcaagctttaggctctgaagtcgaaaagctaagcttacagtttgagactgatgtacaacgtacctatcatgtttttgaagcagatgacacggcaattgaagtctgtcttgatgacggcgccgtaaaaacagcaacagcacaaagcaaaatttgcgaagttgagttcgaacttaaacaaggtgcagttaaaacacttattcaatttgctcagcaatggattaatcgttatgaactttggctcgatgtgagaagtaaagccgagcgcggtaatttactcgcattggggcaagctgcttcaccggctgttcacgcaaaaaatctgaacttagataaaaacatttcagcagaacaggcactcaaaaagattgtagaaaactgtttgggacaattcttgcctaacatggccgcaattgccgatggagttgccgaggctgagcacattcatcaggcacgtgtaagcttacgccgtttacgtagtgcactaaaacatttttcagcatggtcagacgagttaaaccctgtgtgggaagagcaaattgccgaactgttccgtcagcttggggacacgcgagatgaagatgccattcgtaccgaaattttacctatgattgtgcagcatggttcacctgagcttttacttccgatctctgaacagccattaaaagaccttgccacactgtttaaatcagcagacaccattaagcttatacttgccttattagcatttgcctattcagaagaagacaatcaaaacggcaaaggaaaattgaaaaaacagataggaaaaagcttagataagttacatcatcaagtggtgagtaatgccgatcatttcactgagcttgaagtcaccgaacagcacagaacgcgtaagaaagccaaacagcttcgttactgcattgagtttatatcgagcttatatcctcgtaaaaatattcagcagtttttaaaacaattacagcctgtgcaaaatactttagggctttataacgacttatttattgccgaagatctatttaataaagcgattgaacacgacccacatttttggtttgcattaggatgggttaaagccaaacaaccttatttacaaaatcagtctgccgaagctttgcaaaaatttaaacaggcaaaaacattttggtaa

SEQ ID NO: 41834 - DNA, 378 bp, Acinetobacter baumannii
gtgaatgcacccgtaaattttaatcatgaaactcagccagagtttgaactacctattaaaaactatcaggaattttatcgtttttatttaactgaacaccgtaacattatgagtaggcgcttacatgcggtgggcagtagcattggtctatactttttttcaaaagctattcgtaagaaacaggccaaatacgcactctatggtttagtttctggctatgcatgtgcatgggttggacattttatgtttgagaaaaataaacctgccagttttaaacagccactttatagctttatttctgattggcgaatgctctctgatgttgcgactggtcgattaagtttaattgatcgcaagcacgataaaattccaagttaa

SEQ ID NO: 41835 - DNA, 612 bp, Acinetobacter baumannii
atgcgcggtttatatctcattaccaatgatgacccaatccaattattattagaaaaattagacgccgcactcgcaacccgtcaaatcgcaattttacagtaccgccgtaaaaaagtagacaaagccgaccagcctgctgaagttgaacagatcaaacagttatgtgaaaaatatcaggttccttttgtcattaatgatgacctaaaactggctgctcagtttggtttaggtgtgcatttaggtcagagcgatggtgaaatcactgatgcaaaatcgcagttaccagaaggtgtcattattggccgtacttgcttaaactctttagagcttgctcaaaaagcaattgccgatggcgcaacttatgttgcctttggtgcggtttatgcaactgccactaaaccggaagctggcaatgtaggtatagaagtgattaagcaagcagcagctcaatatgatttacctatttgtgcaattggtggtttgactgttgaaaattcaaaacccgtgattgaggctggagctgacctctgtgcagtcattagtgatatattaggtcgatcaactgctgaaattcctgcccgtgtacaagcgtgggcacaattattttcttaa

SEQ ID NO: 41836 - DNA, 1299 bp, Acinetobacter baumannii
atgagtttatctccaaagcaagaacagttatttaaacaagccagcaaacacattccaggtggtgtgaactctccggtacgtgcctttaatggcgttggaggcacaccggttttcattgagaaagccaaaggtgcgtatttgtgggatgtagatggtaagcgctatgtagattatgttggctcttggggaccaatgattttgggccatgctcatccggatattattaaggctgtgcaaacagcagcagaagatggcttaagttttggtgcaccaaccgtacacgaaacaacgttggcagatattatttgtgaaatcatgccatctattgaattggtacgtatgaccaactctggtacagaagcgaccatgactgctattcgtttagcacgtggttatactggccgtgacaagatcgtgaagtttgagggttgttaccacgggcactctgactcattgttagtaaaagcaggttctggtttattaactaaaggtgagggcgaaccaacatcaaaaggtgtaccagctgactttgctaaacatactttaacactgccatataacgatattgcagcattaaaagaatgctttgctaaatttggtcatgaaattgcgggcgtcattattgaacctgtcgcaggtaatatgaatatggtgaaaccaattgatggtttcttacaagcgattcgtgatgtgtgtgatgaatacaaatctgtatttattattgacgaagtaatgacaggtttccgcgttgcattgggcggtgctcagtcagtttataacgttaaacctgacttaacgactttgggtaaaattattggtgctggtttacctgtaggtgcatttggcggtaagcgtgaaatcatggaatgcatcgcacctttagggggtgtataccaagcggggactttatctggtaacccacttgctatgcgtgctggtattgaaatgtttaaacatttacgtcaaccggacttttacagcaaattatctgctcaacttgaaaagttacttgcaggcttacaagcagcagcagatgaagcgggtattccatttaaaactcagcaagctggcgcaatgtttgggctttactttaccgatcaagaagacatcacaagctttgactctatgttggcatgtgatattgaagctttcaaaaagttcttccatggcatgttaaaacgtggcgtaaacttggcaccgtcagcatttgaagcaggctttatttcatctgctcattctgatgaagatatcgagtttaccattcaggctgcaaaagaaaccttcgccgaaatgaagtaa

SEQ ID NO: 41837 - DNA, 705 bp, Acinetobacter baumannii
atgttttattccttacctcgaaaaattcagttagccgcaagtacttcaaattggcctattgaatctacgcaaagcatattgctcctagtcgggctagatgatcttgaaaaaatatctgattgggcgcatcagccattagccgatcatttagaaatgctaagtaaaagagcacaagcactcgaaattccggtcatgatgattcagtcatctcaacttcaacaggccatgttacagcttgggcagcacttgtcatcaaacactcaggcacaggtaattatggcggggaatttatcaccgctatttaagcaagtcatgcagcttgttttatccattaccgattatgtagctgttgtaaatgatgcaatcttggcgagtagtttagagcagcatatacaatggattgaaaaaataagttttgaccatattcaacatataaacacgcagactttaatgcgcttatggtctttaagtgcaccgtcgtcacaggtgttgtccgataaaggaattttattggcagttgctgaacaggtagggcgacatccaatggaaattcatcccgaaatagatttaagaaactatggtctagacgcttcgggagtcaattatttggtggaattatggcgtgctaatggtgctagcctaactgttgatgagttgatgcaaacccctacattgcaacatattatgcagttattgaagcgctaa

SEQ ID NO: 41838 - DNA, 639 bp, Acinetobacter baumannii
ttgagtgattttctaagtgaacatctgatctatcgtgatgatgattttatggtgattcataaaccttcggacatcttgagtgtgccagggaaaggtgatttacatgacagcgttttgacaagactggtggcaattgaaccacgaactttgctcattcaccgccttgaccgtgatacttcgggtattttggtttttgggttatctaagcgtggacagagtgcgattgcacgccaatttcaagaccgtcaaacttcgaaaatatatgaagcgctagttgctggtcatttagagggtgaagggacagtggatatccctgtcgtctatgatccgagtcgaccacctttacatattgtcgatgcttctcataacaaacctgctttaacacattggcaggcaattgaacatttccagattcaaggacaaccggttacgcgtgtcaaattaacaccgattaccggacgttctcatcaactccgtgtacacatgcaatatctgggacatccgattgtaggtgatacattgtatgcaacaccggaacaattacttgttcctcgtctgtgcttgcatgctaaacagttaagctttaatcatcctgtcacaggggaatcattaacttttaactgtcctgtaccgttttaa

SEQ ID NO: 41839 - DNA, 2838 bp, Acinetobacter baumannii
gtggaaaaattgcagcagtatgctattggtcaacgttggctatcagatacagagactgagctcggtttaggcgttcttattgatgtagatgaaagatctgtcagcattttattccccaagagcgatgaaacgcgtgtttatgcacgcaacaatgcaccgctttctcgcatcatctttaacacaaatgatgaggttcaagaccaagaaggccagaagtggattgttgagtcggttgaagaccgtcatggtgttttgcgttataacgtggttcgtactttagaaaatggcgagcaagaacgtaaagcgctaaacgaaacacgtattggtgcacaaattcaattatcaaaacctttagatcgtttgctcgcaagccagattgattataaagagtggtatgacctacgcattgaagcaatgctgatgcaggcgcaaatgcaaaccagcccattacgcggcttggttggggcgcgtgtaggtttaattccgcatcagctttatattgcacatgaagtcggtaaacgtttcgcaccacgtgttttacttgctgatgaagtaggtttaggtaaaacaattgaagctggtttaattatccaccaacagcttaaaaccggccgttctgaacgtatcctgattttagtccctgattctcttcagtatcagtggatgattgaaatgcgacgccgtttcaatttgcaattttctctgtttgatttaacccgtactgcatctatcaaagaacatgatccagaacttaacccgttcttaactgagcaatgcattattgccagcgtcgacttgatggtggaccatgacgatttgcgtgagcaagcattagaagctggtttcgatttactcgtcgtcgacgaagcacatcacttgatgtggagcgaagaagagggtggtaacgatcgttacgacttggttgaagagcttgctgaaaatacggcaggtgtattgttgcttactgcaacgcctgaacagctgggtgtagaaagccactttgcgcgcttacgtttgttagatccacagcgctttagtagtttagagcgtttcttggatgaagaagctcaatatcagcaaactgcgcaagttgcagaagtgcttatgtcggatgaacctttaactcaagagcatttaactgctttagaaggtttgttggggcattcaattgaagaccaacctgagcaacgtttcagagcgattcatgagttgttagaccgtcacggtacaggtcgtattttattccgtaatacgcgcgaagcgattcaaggcttccctggccgtgattgccaacctgcgcctttacctgcgccagcagattggtcaaaagacggtaaattacgtgagcaaatgtggccagaagaagcacaaattgacggctcatggatgcaaaatgatccacgtgtaccgtggttaatggaaattctacgtaaagaacttaagcataaaaaagttcttttaattgcccgtagtggtcctgttgtcgagtctttagaaagtgcgcttcgtttgcatgcagggattcgtacagccatgttccatgaaggtatgagtttgcttgagcgtgaccaagcggctgcttactttgcagaagaaagctacggtgctcaaatcttactttgttcagaaattggttcagaaggccgtaacttccagtttgcgagtgatttaattttatttgatttgcctgcaaaccctgacgttttagaacaacgtattggtcgtttagaccgtattggtcaagaaaaccgtatccagattcatgtaccttacttaatgggcaccgctcaagagcgtatgttccgttggtacaatgaagcattaaatattttcagcaatatttctccaacagctcaaacgctacaagaaaactttattgttgaattaaaagattgcttacttgccgaccaaggtcaaacatttgaagatttactcgaagaagttaatgttcaacgccaagctttagaagcagagttacaagctggtcgagatcgtttgcttgagtacaactcatgtcgtcctatcgttgcacaagaaattgttcaagcgttagaagactatgatgacaacacaacgctacctatgtttgtgaagcgtttcatgtcttcaactaatattgactttgatgagcaaagtaacggtacagtcattattcgtccaaccgaccagatgcaagtgcaaggtttggcattagatgaagaaggtatgactgcgactttctatcgtgaccaagcgcaaatgcgtgaagacgctcagtatctgactttagaacatccatttattgaaagtgtcatggaaatgatccgtacacaatcatttggtagtaccaatgttgctgtgcttaagtccaatgcattaaagcaaggttcggttttacttgaagtctggtttaaagttgatgtggtggcaccaaaatccttgaacttgccatcaagcttaccaaaacaacttattcgcgtattgttaagtgaaaatggtcaggacttatctgaaaagattgatccaaccattttaaaaccgtatttgcatcacttagatggcaatagctgccgccaagtggttaaggcccgccgtgaagtgattgaagagcgttataaacaagcacttgatattgctaaagaaggtttacctcagcttcaacagcaagcaaaagagcattatggtaataaatggcaatatgagattgatcgtttaacttacttaaaacagttcaacccgagcattcgccaagacgaaattgagcgcttacagaagttgcaaaaagaaggtttaagcttgcttgatggcttaaccgtaacccctgaagcgattcaagtgcttgtagtagttaaaccataa

SEQ ID NO: 41840 - DNA, 1017 bp, Acinetobacter baumannii
atgcaaagtttgagtaatcgtcaaagcctgattgcaagctatattctgatgggcatttttttgctttcggttatccccttgcatctcttagcaagtttttttgcaggctttctcatttatgaaattattattagtttaagctctattgttgaacgttatattgatggtcaaagagcccgcatttttattagtattttattaagtattattactatttctcttattgcctttttcattacaagtttaattagctttgtagtttatgatttaaaaggagtcggtttacatagtattaacggtaaagtcgaccaaacattactgcacttacaagcggagattgggaaatatttaccgggctatattccagatagcgttacagaactgaaagatgaaatattcgcgtttatgaaagataacgtgactacattaaaaaatgccagttccgatattttgcataatctagtgactatggtgatgggacttattatcggtatattggttgctattcacggctttcaccgacgtaccccccaacctgttttcaaatcgttactgatccaacgtattcaaaaattatcaatttcttttagaaatgtggtttttgcacaaattaaaatttcagcgattaatacgctgctctttatattatttgcttttgtactattgccgatctggggtgttcacttacctttcgccaaaaccttaaccattcttacctttatgtttggcttaattccaattttagggaatttaatttcaaatactttaacttttattgctgctcttacaatttcactcggtctagcaggtgttgcgctactctacctcgtattagttcacaagttggaatactttattaatgccaaaattattggtcataaaattaatgccaatgcatgggaaattttattggccatgttaattttcgagtcaatctttggcttaagtggcttaattgcagcaccgattttctatgcttatttaaaactagaattaaaagatgccagattgatttaa

SEQ ID NO: 41841 - DNA, 696 bp, Acinetobacter baumannii
atgacccaaacttcactttctcagagcccaaatgacacaacctcatcacaagatgtcattgaaataaaaacagtaacgcgttctgttggaagaaaagcgacgattacgaaagaagaactttttcaggcagctcttaacctgattggtccacaaaaaagtattgcctcactcagcttacgagaagtcgcaagagaagctggtattgccccaaacagtttttatcgtcactttaaagacattgatgagttagctatttcactcattgaccgtgccggtatcgttttacgtaaaattattcgtcaagctcgccttcgtgcatctttgcaagacagcattattcgtagttctgtagaaatttttctgcaacagcttgatgctgatgaaggcaatttaagtttattgttgcgagaaggttttactggttccgcctcttataaagctgctgtagatcgacagctcaacttttttcagcaagagctacaagaagatttaattcgcttagaacgcctcaataacaatcatctatatcaccctgaacttgttgcaaaagcaattacacaacttgtgtttcatatgggtgccaaagtgattgatcttcctattgatcagcgtgcggaagtcgcagaacaaacaatgattatgatcagaatgattttagaaggtgcccgtcatctagacgaagcaaaaataagatag

SEQ ID NO: 41842 - DNA, 1071 bp, Acinetobacter baumannii
atgcaagcaatcgaaaagagaaattctctattcaattcattaacacaagctgtatttgacaaaaatatggcgaacttctggctacaaaaaataaatcctttatggtctgtgcagcatggactagttcaaattgtaaaaaaagaattcgtagctcatgacactgtgagcctgacattaaaatgcaaccgcttggtgaaaatgggcgcggcaggtcaacatcatccagtgattgttgaaattgcgggccgtcgttatgaacgtacttatagcttgacgcaaattgatgcagagcacttacgtttaacagttaaaaaagttgctgatggtattgtcagtaactggtttattgcagaaagcaaaattggtgatgtttttgagcttgggcagccttatggtgacatgcaacaaaacattcagacaccgaaattaattatgttagctgctggtagtggtattacaccaatgttgagcttaatcacagcaattaagcaaagccaacagttagaaaaaacgcaggttcagcttttatattgggtcaaacagcgttctgatgctgcttttacagagtactttgaacaagtggctgaacaaaacccaaactttagctatcaggtgttttacacacaagaaacaccaaatgatgaacgtttaaatgccgaacatcttgcactggttgatggtattgaaaacagcacagtttatgcatgtggtccatcgggttttgtttcaactgttgaacagctttttgaaaaagcaccaactgtacttactgaagcatttagtttaactaatgaaagttctgcggatgacattggttatgtgaatgttacattaacccagtctaataaagtgattgcaattcctaaaggccaatccattttggtcagccttgagcatgaaggccttaagccgacacatggctgtcgtatgggaatttgtaataaatgtgtttgtagtaaaacgcaaggttctacacgtaatttactaaacggtagccaaaatacggaaccaagccaattacttaaaatttgtgtgaactcagcacaatccgatctagttattgatctttaa

SEQ ID NO: 41843 - DNA, 1095 bp, Acinetobacter baumannii
atgaatatgccagtgaaagtcgaatattttaaaaatcctaaaaatcgagatttgactccagcagaacttgaagcatttgcaaaagagcttgatcagatcaaacaagaagtattggatgatttgggtgaaaaagacgctaaatatattcgccgtgtctatgctgctattcgttatagtagctttttaggccgggcttgtttatttgcaggttggttcccgccggcgtggattttaggtacgggtttattaggtttctctaaaattatggagaacatggagctcggccataatgttatgcacggtcaatatgactggatgaatgacccgaaatttaatggtcaaacttatgaatgggatactgtaggtacctctgataactggcgtcaaacccataactataaacatcatacttataccaatattaaaggtattgatgatgacattggttatggcttacttcgcttattccctgagcaacgttggaagccagggttcttattgcagcctatttacagtattccattttgcttattgttccagtggggcgtagcaattcagaatcttgaaattgggcgcgtactttacaagcgtaaaactaaggcacaatttttagaagagttaaaaccggttaataaaaagattggcaagcaactctttaaagattatgttttcttcccacttattgcagggccggcagcactaccagtatttacaggtaacttagttgcaaatggccttcgtaatatctggacctttagtattattttctgtggtcatttcacgaaagatgctgaagtgtttccaaaatctgttttacaagaagaaagccgtggacactggtatatgcgccaaatccgtggttcttctaacttaacaggttcagaagcattccatattttgtctggtcacttaagtcatcaaattgaacatcacttattcccagatattcctgctcgtcgttatcgccaaatggctccaaaagttgaggcggtttgtaagaaatatggcttgaactataacaatgccagctttgttaagcagtttggacaagtggttgggcgtattgtgaaatatgcgttcccatttaaaaaataa

SEQ ID NO: 41844 - DNA, 576 bp, Acinetobacter baumannii
atgaataaaccacttttattagtttttcatcccgatttgagccaatctaaggttaatcgcgctttggttgcaacattacaggatcaggacaaaattgatattgttgacattcaaaagctgtataacggatctttagataaaatgaacgatggtgcgattgaagctcaacgcctgatttctgcttcgcacattattttgcagtttcctatctattggtattcagttccacctatttttaaagcttggatggatgccgtcttaacgcggatgttttatcttttttatgaacaggaaggtcagcatattgaaggcaaaccactttatttgcatattacggttggcaatttaagttcggcatatcaaaaactggggcaaaatggctttactctagatgaactcatggctcctttaaaagccactgcacgcagatgtggtttaatctggcatcctccccatgttatttttaatgcaaatcaattgaatgaaaatgatattacagagcaaacctcgctctctataaaacagtttgaacaatggggcatatttaataataattcaataattccttcatattag

SEQ ID NO: 41845 - DNA, 897 bp, Acinetobacter baumannii
atgaacaaacagatttcttgggatgatcagaaattctttttagtggttttagaagaagggagtttctcagcagcagctcgtaaattgggcgttacacaacccactgttcgaacacgtattgagcatcttgaacatcagttgggaactgttttgttcagccgttctgttcatggtttgaagccaacggaacacgctttggcccttgaagtccctgcgcgagcaatgcaacgtgcttctgactattttatgcggacagcaagtgctccgttaaatctaattgcaggcagtgtccgagtgagcgtatcggattttctgggaacaatggttctacctcaattactttcaaagttccgcttactgtatcccgaagttaatattgaattatccctaaacaattcttctgccaacttacttgagcaagaggctgatctggcaatcagaatgtatccaccagttcaagaggcacttgtggctaaaaagataggtgaggtgccattggggctctatgctcatcgagattatatacagcgtaaaggtaatcccacttgtctagaagatttaagacaacatgatttgattggtccagatcgtaatcttcttgaaagagaaatgataaggatgcttttacctgagcttaaaaatgaacaattcaagatacgcaccgatagccatcctgctcagttttcagcagtaaaggccgcgttaggaataggttttattcagtgtcctatagcaaatcaatgccaagagcttatacaagtgattccagacctagaagttcatcgatatgacctatggctcgtaattcatgaagattttagacaaattccgaaaatcagaacgctttttgattatttggctcaagctttgggaaattatttaattgggaaaatttag

SEQ ID NO: 41846 - DNA, 702 bp, Acinetobacter baumannii
atgcgtactttagcaatatctactcttctccttggtacggtactcagccctatggtttttgcccaagatgataatgcccttcactacaatattgtaaatgttcaagcagaagcttctcgccaagtttcaaacgatgaaatgcatgcaactttatatattgaaaaaagcaataagcagcctgcagaactttcaaaccaaattaaccagttaatgaaccaagcactcgcaacttcgcgtaaatacccacaagtgaaagtggaaactggtgcccaaagcacttatccaatttatgacaatgacagtaataaattaaaagaatggcgtggccgcgcggaaattcgtctagaaagtaaagattttaaagctgctagccaattaattaatgagttacaacaaagctttcaaactcaatccattaattttagcgtctcagatgagcaacgtaaaaaagttgagaatgaattgatggtagaagcgtctaaaaactttcaacagcgtgcgcaaatgttgactcaagcatggaataaaagccaatattctttggtcactctaaacctgaacacgaataattattttcctcaacctgtaatgcgtgccagcctagctaagttcgctgctgctgaagcggcaccggctcaagacatggctgctggtgaatctaaaattactgtaaatgcaaacggttcaatccagtttaaataa

SEQ ID NO: 41847 - DNA, 1374 bp, Acinetobacter baumannii
atgagcgttacttctgtcaaccctgccactaatgctaccaacgaatattatttgactcgccaaagtcaaatggaatcgaatgttcgtagctatccacgtaaattaccgttagcgatagcgaaagcacaaggttgctgggttactgatgttgaaggtacacagtaccttgattgtttagctggggcaggtacattggctttaggtcataatcatcctgcggtgattcaaagtattcaagacacattggcaagtggtttgccattgcatactttagacttaaccacacctttaaaagatgcgtttactgaagcgttgttagcatatttaccaggtggtaaagaagaatattgcttacagttctgtggtccttctggtgcagatgcgactgaggcagcaattaaacttgctaaaacttacactggccgtagctcagtgatcagtttctctggtggttaccatggtatgactcatggttcacttgcaatgactggtaacttaagtgcaaaaaatgcagtgaatggcttaatgccaggcgtacaattcatgccatatccgcatgaatatcgctgcccacttggtttaggtggtgaagctggtgttgacgctttaacttactatttcgaaaactttattgaagatgttgaaagcggtgtaactaagccagctgctgttattcttgaagcaattcaaggtgaaggcggtgttgttacagctccagtaaaatggttgcaaaaaatccgtgaagtgactgaaaagcacaacatcgttttaattttagacgaagttcaagcaggctttgcccgttcaggaaaaatgtttgcatttgaacatgccggtattgaacctgatgtcgttgtaatgtctaaagcagtaggtggtggtttaccacttgcagtattaggtattaagcgtaaatttgatgcttggcagcctgctggtcatactggtactttccgtggtaaccaacttgctatgggtacaggtcttgttgtattagaaacgatcaaggaacaaaaccttgctcaaaatgcacaagagcgtggtgaattcttacaagctgaattgaaaaaattagctactgaattcccatgtatcggtaacgtacgtggccgcggtttaatgattggtgttgaaatcgttgacgagcgtaaacctgctgaccgtattggttctcaccctgctgactctcagttagcggctgcgatccaaactgcttgctttaacaacaagttattgcttgaaaaaggtggtcgtaacggtacagtaattcgtttactttgcccactcatcattactcaagaagagtgtgtagaagtaattgctcgctttaagaaagcagttgcagaagcattggttgcagtgcgaggcgcgtaa

SEQ ID NO: 41848 - DNA, 1533 bp, Acinetobacter baumannii
atggtggattttgcagaacatcgtaaagcgttactctgcaatgatgcacaatccattgctgactatgagtcagcaatgggcgaagcggtaaaagccgtttcagcatggttgcaaaatgaaaaaatgtacacaggcggtagcattaaagagttgcgttcagcaatttctttccaaccttcaaaagaaggtatgggtgtacaacaatctcttcaacgtatgattgagcttttcttaaataaaagcttgaaagtacaccatccacattcattagcacatttacactgcccaaccatggtgatgagccagatcgcggaagtgttaatcaatgcaactaaccagtctatggactcatgggatcaaagcccggcaggttcattaatggaagtgcagcttattgattggttgcgtcaaaaagtaggttacggttctggtcaggcaggtgtgttcacttctggcggtactcaatctaacttgatgggtgtattgcttgctcgtgactggtgcattgcgaaaaactggaaagacgaaaatggtaacccatggtctgtacagcgtgatggtattccagctgaagcaatgaaaaacgtcaaagtcatttgttctgaaaatgctcacttctctgtgcaaaagaacatggcaatgatgggcatgggcttccagtcagttgtgactgtacctgtgaatgaaaatgcacagatggatgttgatgctcttgaaaaaacaatggcgcatcttcaagctgaaggtaaagttgttgcttgtgtcgttgcgacagcaggtacaactgatgctggtgcaattgatccattgaaaaaaatccgtgaaattactaataagtatggttcatggatgcatatcgatgctgcgtggggcggtgcactgatcttgtcaaatgactatcgtgcaatgctcgatggtattgagttgtctgattcgatcactctcgacttccataagcattatttccaaagcattagctgtggcgcgttcttgttgaaagatgaagcgaactatcgtttcatgcactacgaagctgaatacttgaactctgcttatgacgaagagcacggtgtaccaaaccttgtgtctaagtcattacaaacgactcgtcgttttgatgcattgaaattgtggatgacaatcgaatcactcggcgaagagctatatggttcaatgattgatcatggtgtaaaactgactcgtgaagttgcagattacatcaaggcaactgatggtttagagcttttggttgaaccacaatttgcttcggtattgttccgtgttgttccggaagattacccagttgagtttatcgatagcttgaaccaaaacgtagcagatgaattgtttgcacgtggtgaagcaaatattggtgtaacaaaagttggtaatgtacagtcattgaagatgacaacattaagccctgtagtaactgtcgacaacgttaagaaccttttagctcaagtattggctgaagctgaacgtattaaagatgcgattgcttctggtaactacgtaccaccaatcgactaa

SEQ ID NO: 41849 - DNA, 1431 bp, Acinetobacter baumannii
atgcaacaagcgaatatgcttaatgaatttaaacttattattggcggtcaactttgttcaggtgaacaaggtgaactggaaattattaatcctgctacaggcttaactgcggcacattgtgcaaaagcatcagttgcacaagtgaatcaagctgttagtgcagctaaacaggcttctaaagcttggcagcttgtctcgcatgatgagcgtaaatcaattttaaacaagattgcagacggtattgaaaagcacgctgaaatgcttgcagagctggtggtgcttgaacaaggtaaaccactcgcactggcacaaatggaagtgcagggtgcaattggctggacgcgttatgcggcttctatggatttaccggtagaagtaattgaagacagtgaaactaagcgtattgagcgccatcgccaaccactgggtgtagtggcttcaattacgccatggaactggccacttatgattgcagtttggcatatcatgcctgctttacgtgcaggtaacgttgtcattagcaaaccttctgaatacacaccattatcgactttacgtttatgtgaaatcattcagcaagaagttccagcaggtgtaatctcaattgtggttggtgctggtgagattggtgaagcattatcttctcatccagatgtgcaaaaagtcgtgtttacgggatcaactcgaacaggtcagcacattatggctggtgcagcacagcagctaaaacacttaactttagagcttggtggtaatgatgctggtattgtattaccagatgcaaatatcgatgaaattgctgctaagatttttaatatggcgttcttgaatgctggtcaaacatgtgcggcgttaaagcgtttatatgtgcatgaaagccaatatgaagctttatctcaaaagttagctgatattgccaacgctcaagttgtgggggatggtatggcatcttctacaacatttggaccagtacaaaaccaaatgcaatataacaaggtgaaagctcttattgctgaagcgattgcacaaggtgcaaaagcactttctggacaacaacagttaccagaacagggctactttattgcaccaactattttgactgaagtttctgactcttgccgcgtggtacaagaagagcaatttggtccagtgttgcctgttttaaaatataccgatatcaacgatgctattgctcgtgccaatgacagtgagtttggtttgggcggttcaatctggtcttctgatcttaaagccgcacaaacctacgctacacagcttcaatgcggaacggtctggattaatacccatgcagaagtactgcctcatgcacctttcggcggctggaaaatgtctggcttaggcgctgagtttggtttggaagggttgcttgaaaatacgattggacaaacggtccatattagtaaaatctaa

SEQ ID NO: 41850 - DNA, 486 bp, Acinetobacter baumannii
atggataagttcgactggcaaatcattcaggcactacaaaagaatggacgactcaccaatcaggaaattggagatttaatcggtttatctgcttctcaatgttcaagacgacgtcaattgcttgaacaaaaaggcgtgatccttggttatacggcacgcatccagcaacaggcgctagggctggaagttacagcgatgattcacataaacttaaggacacacgaggcgaaatcacagcaagctttccaagagctgattgaagctgaagataacattcaggatgcattttcaattagtggtgatgcagattttattttaaaagtcgttgctgaaaatttagaacagctttcacaatttgtgactgaaagattgctttcttataattttatagggcacataaagtcttacattgttcttaaaaaaattaaagaacagaatcattttttaatcaagcctaaaagtatgagctatcatcactctcaataa

SEQ ID NO: 41851 - DNA, 1722 bp, Acinetobacter baumannii
atgttcatagaaattggtgaatttttaaatcttcgtctaaaacaaatgggtatccaacatctttttggtgtacctggtgattttaacctctcatatctagaacaagttgaagcagacccacaactcgaatttattggaaattgtaatgaattaaatgctgcctatgcagcagacggttatgcacgaattaacggtttttctgccttggcaaccacttatggtgtaggtgacttaagtgctattaatggtattgcaggtgcctatgcagaaaatgtacctcttattcatatctcaggtattccacctttacatgcagttcaaaagggtactctcatacatcatacgttagttgatggtaactacgacaatattatgaactgtatgaaagagttcacagttgcccaaactcgtttaactcctgcaaatgcagcttctgaaattgaccgtgtattgcgtcagtgtttccttgaacgccgtcctgtacatatccaactacctggtgatattactcacgttaaaattgaagtgtctgagcgtccgctcgacctaagctacccagctgttgaacctgaattattgcaaagtgtggtaagtaaactttgtgacattattgagaatgctcaaagtccagcgcttttaattgataatgaagcctcagtttttggcgtaacttcacttttaaatgatttgtctcaaaaatgctcaattccatttgcaggtatgaatactgcaaaaaatattatggatgaaggctcacctcgttacatcggaacttatgtgggtggagcaagccaaccgcatgtaaaaaatatcattgaacaatctgactgtttaattggtgttggcgcgcgctttaccgatgtaggctcagctgtatttacgcatcaaattgagaccaagaactatatcgaaattaaatcttacggcttaaatatttttggtcaggattttccgggtattgaaattggacaattacttgtcgagctaaataaaaaagttgcgccacgtaaatcgtcaatacctcttcttgaaaaacaacctcagaaagtaattgaagcgccagcccaacagaagcttagtcaagatgtgctttggaactacatttcagggttcttaaaagaagatgatgtgattattggtgaagtaggaacatcaaactctgcattgtcaggtatcaaacttcctgccacagctaaatatattgctcaaccgctttggggttctattggttataccttgccagctttgcttggtagtttgttagctgctcctgagcgtcgtcaaattttgtttattggtgacggttcgttccagcttacggtacaagaactctctacgattatccgccatggtttaaaaccaattattttcttgttgaacaatggcggctacaccattgaacgtttaattatgggtgaaaacgctgcctataacgacgtgcaaaactggaaatacaccgaaattccagcggtatttaacggtaaaaaaggccataccacttacgtggttgagactgctggccaactgaagagcgttttagataatgttcagcaaaatgatcagttaactttcattgaattgaaactaccagcaatggatgcgccggtaagtttgaaaaaatttgcttctgtgattgcacgttttgactacggtgatcgcggctacgaaattttaaaggagcgttcccaaccagttaaatgtaaggatgcaatctctttttaa

SEQ ID NO: 41852 - DNA, 1380 bp, Acinetobacter baumannii
atggatgcaaataataagcacgagttaaaacaaggcttatccaatcggcatattcaactcatcgcactcggaggggcgatcggaacagggttattcttaggtctatcacaaacaattaaactggcaggtccttcaattttattgggatatgcaattgcaggaattattgcctttttgattatgcgtcatttaggtgaaatggttgttgaagaaccggtaagcggttcttttagttattttgcgaacaaatactggggcaaaatggctggttttatgtctggctggaactactgggttttgtatgtactggtgagtatggctgaactgagtgcaatcggtacttttattcagttttggtggccagaaattccgacatggctcactgctttatttttctttattttaattaacggcattaacttggtaaatgtccgcttttttggggaatcggagttcttattttcctgcattaaaattgttgcgattttaagtatgattggcttcggtgcttatcttttactttcaggctcagcaggtccgcaagcgggtgttgcaaatttatggcaacacggtggtttcttcccgcatggtattcatggctttattatggccttggctgtcattatgtttgcattcggtggtctagagcttatcggtattgcagcagctgaaacgaaaaaacctgaaacaacaattccaaaggcagtaaaccagattgtttatcgcatcctgattttttacattggtgcaatcggtattcttttatgtctttatccatggaatatggtggcagaaggcggtagcccgtttgtcttaattttccagtccctcaatagtaatggcgttgcgaatgttctgaactttgtggtcttgattgctgctatttcggtttataacagttgtatttactgtaatagtcgtatgttgcatggtttagcagagcagggcaatgcgccagcaattttgaaaaaagtgaacagccgcggtattccggtccctgctgcaattgtgtctgcttcaattacagcagtctgtgtagtggtcaactatttaattcctggacaagcttttcagctctttatgatgttggttgtggctgcgcttgttattaactggcttatgatctcagtcacgcatttgaaatttaccaaagcaatgaaattgcaaaagcgtcaaaccaaattccaaagcattatgagcccatggagtaattatttaactattagttttgtatgtttcattctcattattatggcgatgacaccagatatgagactcgctgttattttggggcctatctggcttgcggttttagcgattatgtatttctttaagtatcgtaaaaaaatggtcgcaatgccggaagtacaatcaaactaa

SEQ ID NO: 41853 - DNA, 1032 bp, Acinetobacter baumannii
atgcgcttaaatccacgtcaaatcgcaattgcattagcagtaactggggccgctgtaacaacgactgcaaatgcagctcgtgatacgattcaaattgctggttcttcaactgtattaccatttgccagcgttgtagctgaagagtttggtaatacattccctcaatttaaaactcctgttgtaggttctggtggttcttctgctggtttaaaacagttctgtcaaggtgttggtgacaacacaatcgacgttgcaaatgcttctcgtaaaattaaaagcactgaaatcgaagcttgtaacaaagctggtgtaaaacaaattcaagaaatcaaaattggttatgacggtattgtatttgcctctagctcaagcaaagcagcttataaattaaaaccttaccatgtgtttgctgctttagctgcacagttaccttcaaaaggtaaattggttccaaacccttatacaaactggaaccaaattgacaaatcacttcctaatgagcctattacgcttgttattcctgcgtctaaccacggtacgcgtgaagtttttcaagaaaaaatggttgaagctggttgcgaagcgtatgaatacttcaagagcctagacaaagacgctcaaaagaaagcatgttctactttccgtaaagacggccgtgtaattgaaattgctggtgactatacagaaactctagctcgcttaaaaacttctccaagtgcagtaggcgtatttggtttaagtttctatgacatgaaccgtgacaagttacgtgtagcgacagtaaacaacgtagttccttctgagaaaactgtgttaaatggtacataccctgtatctcgtccactatacttctatgtaaaaggcgagcacttaaaatcagttaaaggtttaccacaatacgtagaatacttcctaagcaaaaaagcaactggtaaaggttctaaagctgagcgtgatggtttaatcgcgatgtctgatgcagaacgcgctaaagttttagctgactttaaagcaggtaaaactgttaaataa

SEQ ID NO: 41854 - DNA, 1380 bp, Acinetobacter baumannii
atgaatctgctacttatcggtgtgttgttagcccttgtggcaattgcatatcaacttgggctgagaaagagccgccacctagcaggtaagggaagcaactcggcgacattacattctcgtcctggttattatggcgcactggttgggctttggtgcggtatccctgcttttttaattttgatcatttggaacttggttgagccaagtattttaaatcatattatttttaacaacgtacctgcttctgtgacagcttctctagatgaagcagcaagaagtgtacttgttgatcgagttcaagcgatcgcttctggttttggggtaagtgatcatcccgcggcttatgagttggctgctgctcagcaatatgcgaaatttcaaactattggctcttttgccaaatttgctgttgttgtctgtgccgctttgttgggcttagtgtgggcaaagaaaaaaatcagccaagaatatcgcgcacgtaaccaagttgagcgtgcaattaatgttggtttaatcttatgttctggcgttgccattttaaccacgatcggcattgtaatgtcgatgtttggtgaggcaatgcacttcttccattttgtaagtccaatcgactttttctttggtacagaatggaaccccggctttagtacttcaggtaatgcagaaggtagttatggtttattaccattactatggggcacgctcatggtcagtggtattgccttattagttgctgtacctgttggcttaatgattgctatttatttagctgagtatgcttcgccgtggttacgctcatgggcaaaacctaccattgaagttttagcgggtattccaacaatcgtttatggtgtttttgccatgatgattattgggccattctttaaagctgctggtgcgtatgttggtattgaaattaatgcaaccagtgctttgactgccggttttgtaatgggaattatgattatcccattcgtttcatctttgtctgatgacattattactcaagttcctcgtgcacttcgtgatggttcgttaggacttggcgcaacgaaatcagaaacgattcgccaagtggttttaccggcagctttaccgggtattacaggggcatttttattggctgtttcgcgtgccgtaggggaaaccatgattgtggttttggcagcagggaacagtccacttctacatgcaaatccgtttgaagctgtttcgacagttaccgtaaccattgtaaaacagttaacgggtgatactgattttgcgagcccacaggccttggtggcatttgcactgggattaacactctttgtgatcactttaggattaaacattgttgcactgtacattgtgcgtaaataccgtgagcaatacgaatga

SEQ ID NO: 41855 - DNA, 1398 bp, Acinetobacter baumannii
atgagtacatcaaatacatcgtctcctatggatcagaacgtatttgatccacaagctgctgctcaggcacgtgatcgccgtaaaaaagtgattgaaaaatcactggctaaacgtcaccgcaaagaaaaagctttccgctttgcaggtttgtcagcagttgttattggtcttgcattcgttgcgctactgtttggcagtattttggcaaaagggttaccagcattctggcaaaccagtatgaatgtaccagtctacttcgatcctaaagtaattgatgcaggtccagtgccagtacgcacacaaggtgaaacacctgcacattaccaagaacgttatgtcgattggcaaacgaaaatgggtatggtcgattgggatagcctgatcgtaaatggcatgattgctaaagatccttcacttgcatcacaacgcgattatttaagtagcctttatgcaagttctgaagcttatcgcttacgtgatatggtgtttgctgacccatcactcattgggaaaaaagagaacctaactttcttgggtgatgccaatgtagatgtatggctgaagggtaatattgaccgctcattaccagacgatcaacaacaacttgatccggaaatccgcaagctggcagatgaccttaaagcaaaaggtgtacttgaaaatacctttaatacgactttatttaagaatcctgactctcgtagttcaccagcgattagtggtcttgcaggcgcattcatgggttcattattcatgatgctgattgtgatcattatctcgattccaatcggtgttgccagcgcaatctatcttgaagagtttgctccaaagaatgtcattacagacattattgaagtcaacattaataaccttgctgctgtaccttcaatcgtgtttggtttgttgggcgctgcaatatttattggttggatgcatttaccgttgtcagctccttttgtcggtggtttagtattaagtttaatgacactaccaacagtcattattacaacacgtgcttctttaaaggctgtgccaccttcaattcgacaagctgccctaggtttaggtgcgtctaaagtacaaaccgttttccatcatgttttaccgttagcattgccgggcatcatgacgggtgcaattattggtgttgcacacgcactcggtgaaacggcacctttacttttaatcgggatgagtgcattcgttgcaagtgttccaaccaccccatttgatcaagcaactgctttacctgtccaagtttatctatggcagggtaatgagttgcgtaacttcttcgaaggccgtactgctgctgcgattatcgtacttcttgcattaatgattggtttaaacagccttgcaatttggttacgtaaaaagttcgaagtgcgttggtaa

SEQ ID NO: 41856 - DNA, 903 bp, Acinetobacter baumannii
atgaatactattgatattacgaattccttagaaaaggataagttagtgaatactgaacaatctcaacttacagatacacaactgcatcatggcacttcgtacgtttcgcattttgaaccacatgcttcaaaaaagccaaactcaaccgaaatcaagatcagtgcacaagatgcccatgtttattatggtgactttgaagcgattaaaggcatcgatttagatatttatcaaaatgaagtaattgcgtttattgggccatcaggctgcggtaaatcgactttcctgcgtactttaaaccgtatgaacgacacgattgatggctgtcgtgtgacaggtaagatcactctagataacaaaaatatctatgatccgaatctggatgttgtattactgcgtgcacaggttggtatggtgttccaaaagccaaatccatttcctaaatctatttttgataacgtggcatatggtccgaagctacacggtttagcacgtgacaaatatgacctagaagaaattgttgaaaatagcttgcgtaaagcaggtctatgggaagaagtgaaggatcgtttaaaccaaccggggactggcttatctggtggtcagcaacaacgtttatgtattgcacgtacaattgcagtaagtccagaagtgattttgatggatgaaccttgttctgcgcttgacccaatcgcaacggcaaaagtggaagagttgatttctgaactttctgatcaatacacaatcgttattgtaacgcactcgatgcaacaagcagctcgtgtttcagaccgtacagcttacttccatttaggtgatttgattgaagtaaactctacagagaaagtatttactcagcctgaccaccaattgacagaagcgtacattactggccgtttcggttaa

SEQ ID NO: 41857 - DNA, 963 bp, Acinetobacter baumannii
atgttattccatttgcctaaactccctgcggaaatacgtgtcagtcatttaaatgcacgtgtaaatgaacagagaaaaaaaattgcacaaaccacagcaagccgtttagagcttttacaattggctcaacaacttgcaaaagaagctaaaattcgccgtaagaacaaccagaaaatttttgttttagattttaaaggtgacattcaggcatctgcggttgaaaatcttcgtgaagaaatcacccttattttagcaacggctaaagctggacgtgaccgtgttgtggtacgtcttgaaagccctggtggtatggttcatggatatggattggcggcagctcaattggttcgtttgcgtgacgcaggttttcatttaacgatttgtgtcgataaggttgcggcaagtggcggctacatgatggcttgtattgcaaatgaaattatttctgcaccgtttgctgttgtgggttcgattggtgttgtggctcaggtaccaaatttcaatcgtcttttaaaagaacataacgtggacttcgaactttacacagcagggcaatataaacgtactgtcaccatgtttggtgagaatactcctgaaggtaaggcgaaatttgaagaagagctacaacaaacgcatgtgttgtttaagcactttgtagagaaatatcgtccacagcttaatgtagacaaggttgctacaggtgaacattggtatggtcaagatgcacttgatttaaaccttgtagataaactacaaacttcagatgagtatctattagcattgttacctcagcatgacgtatatgtaattaatacccgtaaaaaagcaactttgggcgaaaaattaggtttgcaagcagctcaaatggcagatagcctgattccggctgtaatgaataaagtggctgatactttagcaaaagcgaattcaactttagttcaaatgcgcgatactaaattttaa

SEQ ID NO: 41858 - DNA, 2190 bp, Acinetobacter baumannii
atgacaagaataattgtagcatccaaagagggtttggacgttctgcaagatggtcagctcaataaagtggttttaaaccaacctactattattcaaattggtgtaagtcaaaaagatatcgcatcgatggaaaagcagggtggaagtctagtcatccatttaaaaaatggagaaacaattatcttagaaaatttctttaatgaagcaacgaatacaacagagcattcactcgtttttccaactgaacaaggaaaatttgttgaagcacaatttgatgctcaaggtaaggttatagattatagaggcttaaatcatgttacggatttggcctataccagtaccagcccttcaactgcaacaatggccgttgataatgatccaagcttttcgatgggtaatgtactaaaagcaggtttagcagttttagccgctgaaggtttatatctttgggcatttgataatgatgacaaagatgactcgcctgttaatgtgccaaccactgcgaaaccaacagaagtaaaacttgcagatgatgctgttacggtcactggtaaagctgaagctaatgcaaaaatttatattaaagatttaagtggaaatgtgattgcttcaggtaacgcagatgcaagtggtaattttacgattaagctcgataaacctttgacagatggaaataaattaaatgttttcgctcaaaacggaggtggtaaagagtctattggtgctgctattacaggtacaaaagatacaattgctcccgatgctccacaagcccagttaagtgaagatggttcaatattagatggtaagactgaacccgatgcaatggttttcatttatgatgccagtggtaaattcatagatactacaaaagcaaattcagatgggaagttttcttacaaatttactccgcctttgaccagtgaagcgggtggtaaagtggttgctgtagataaagctggaaatgaatctgagccaactaaaatcattgctggaaaggacactttcgctccagatattcctttagttgaagtgaataaagaaggaacaatggttgaaggaaaaacagaggctaatgcaaaagttcagataaaagatgcagatggtaaagtcattggaactggtacggcaaatgcagaaggtgaatttcagattacactttcttctgctttaaaagattcacaaaaggcgacaatcattgttgaagatgcggcgggtaatacttctaagcctttagaaattaaatctggctatgacactatagcgccagataaacctacagctcaaattaatgctgatggaaccacggtaacaggaactgccgaagctaatgctaaaatacaaataacaataggtactaaggtaattggtacgggaacggcagatgcaaatggaaaatttacaatcgcgatttcacctgctttaacagataataataaagcgaaagttaccgcaatagatggcgcaggtaatagttctgtagcatttgaagtaacaggtacaaaggatacaacccctcctgataaacctacatttaatagtgtgtataatgataatgggactactttaaaacaaattattcctaactcagaaacagatgatacaactccaaaatttactgtcaaagttgaatcacatgcaagtttgactatttatgataatggcgtagcaatttcaatgattgaaataggtgatttaggtaagaatacgacctggtcatttacacttaataaagagttatctcttggtaaacatacaattactttaattcaaaaagatgcagcaggtcttcctagtgaagagagtgcatcattcaccttttatgtcgtcgcaccaaaagtggcgagtacgagtgaagttgtcagtagtgatgtaaatgaagttgttccttctgttacggatagtgtcggattaaatacattaaagttagcgcaaactacaaccaatgaaatgactagtcagcagcaaaaatctgtgtcattacatgatttattaaaaagttcttcaacggatgcttctgacccaatcgcaaaaattttatctgtaacagattctaaacctgtagtgaatgagcagagcgaagtaaataatatagcgagtgatgtcacaactaatctagaacagcttctaccaaatacgacttcttcacctttgcaaaatattttagagcaaacctatccggttgtttaa

SEQ ID NO: 41859 - DNA, 642 bp, Acinetobacter baumannii
atgatcgaaaaagaattcaaagttaaacactatattgcacttggcctgctttttattgccattatcatttcaggtattcaaccacttgagtttgaggcttatttgcttcatcaagctggcactgtttttatggtgatgctgctttttattattttcaaaaaaattggactcgatttcttaagttttactttttatctactgtttttattaatccatattattggtgctcactatctctactcctacgttccatacaatgactggatacaacaggtgttccatttcaatctagatcaatatatgggctggtcccgcaatatgtatgatcgtttagttcatcttgcctatggtgttttgctctacccacttatttatcgtgtattccaagtatggttgccgactgcacgacctttttcgctatttttacttgtagtccagtttgtgatggcatcaagtgtcttttatgaactaattgaatgggcaatcgcagttgggttatcgcctgaacaagcagaaaactataatgggcaacaaggtgatatgtgggatgctcataaagatatgttactcgctacaattggcgcaatcctctatgggcttttcgccttgataacatcacccaaattaaacaataaaccgtaa

SEQ ID NO: 41860 - DNA, 1389 bp, Acinetobacter baumannii
atgaacgctttaaccgcactatcaccattagatggacgttatgccagcaaatgtgatgcgctacgcccttttctttctgagtttggtttaattcatgctcgtgtcactgtggaagtgcgttggttacaagcgctttctaaccgcccggaaattgttgaagttgctcctttctcagctgaaacaaatgcagctctagatgcaatcgtaagcaacttctctgaagaagatgcaaaccgcattaaagaaattgaacgtacaactaaccatgatgtaaaagcagttgaatatttcttgaaagagaaaattgcaggtattgctgaattacaaaatgcgggtgagttcattcactttgcttgtacatcagaagacatcaataacttgtctcatgcacttatgcttaaaaacggtcgtgaagttttagtatcaagcatgaagcaaattttaaatgcaatctctgctttagctacaactcatgctgaacaaccgatgttgtctcgtacacatggtcaaactgctagcccaacaactttgggtaaagaaatggcgaacgttgcatatcgtttagctcgccaaatcaaacaatttgaaaatgttgaattactaggcaaaatcaatggtgcagtaggtaactacaatgctcacctttctgcttatccaaatgtggattggccagcgcattcacaagcttttgttgaatctttaggtttaacatttaacccatatacaactcaaattgagccacacgactacatggctgagttatttgacgcgttacgtcgtttcaatacaattttgatcgactttaaccgtgacgtatggggttatatctctttaggttacttcaagcaaaaacttaaagaaggtgaagttggctcatcaactatgccacataaagttaacccaatcgactttgaaaactctgaaggtaacttaggcattgcaaatgcagtattggctcacttaggcgaaaaattaccaatttctcgctggcagcgtgacttaactgactcaactgtacttcgtaacatgggtgttggttttgctcaaagcttaattgcttttgatgcttgcttaaaaggtattggtaaacttgaactcaatgcaaaccgcttaaatgaagatcttgaccaagctcaagaagttcttgcagagccaattcaaacggttatgcgtcgttataacgttgaaaaaccatatgagaagttaaaagcattaactcgtggtcaagcaatgacgcgtgacatgatggttgacttcgtaaatggtaacgaacttgctcaagtaccaagtgaagagcgtgctcgcttagctgagcttacacctgcaacttacacaggtaatgctgctgaacaagctaaacaaattaacgaattaattagcaaaatctaa

SEQ ID NO: 41861 - DNA, 735 bp, Acinetobacter baumannii
atggtggagttaccctttcaacaatcacaagccttgaatgttcgccaaaaccgtgcccttgccttggctggggtatttcaagcgacccagcttacgcatatgaccgccatgacaggtcagcaaagtattggtgaaagtggtaacttttattttgagttattaataaaggcgagtttaaatattcgccctacaacaaataataatactgttcagacgttggatttttttaatcaattggctgatatttcgttgggtcttaaaactcttgaaaattgtatcactcagccttttagcaatgcgcctaaatctcgcttgcctaaaatgcgtagtgcaaaacttccaatgtcttatgcgatgtcacttttgcagttagagaaaaaggtctatagcaatcctgaatatgtggcgattattgaaaaagcgcagcagaagattttaaaacagctttctttttttgataataactatttacacccaagtattttagccaatttggcgcaaacctatgttgatactgccggacagattaatccacgtattcttgttcgtggtaatgctgaggcatttaaagataccaaccataccaaccgtattcgtgcttgtctgtttacagggctacaaatggcccatttatggcgacaactcggcggtagttcatggaacatgatttttagcaaacgtaaattgctacaggatattcaagcacttgctcgtttacagtaccaagttatctaa

SEQ ID NO: 41862 - DNA, 1134 bp, Acinetobacter baumannii
atgcaacaacgtgtcatcgtcggtatgtctggtggcgtagattcctctgtttctgcggcgctcttacttcaacagggttatcaagttgaaggccttttcatgaaaaactgggaggaagatgacggcacggaatactgtacggcaatggaagatttagccgatgctcaagcagtcgcagataaaatcggtattaaacttcatactgcaaactttgctatggaatattgggaccgcgtattcgaacacttcttggctgaatatgcagccggtcgcactccaaacccagatatcttatgtaataaagaaattaagtttcgcgcatttttagatcatgccatgaccttaggtgcagattttattgcaacaggtcattatgctcgtcgtgctgaaactgcttataactctaaaggtgaagcatatgcacctttattacgtggtttagataacaataaagaccaaacttatttcttacatgcagtgcatggccgtgaaattaataaaacccttttcccggtaggtgaaattgaaaaaccggaagttcgtagaattgccgaagaactagacttagcaactgcgaagaaaaaagattcaactggtatatgttttatcggtgaacgtcgctttaatgacttccttaaacaatatttacccgctcaaccaggtaaaattgtacttgataacggtaaagaagttggtgaacatcacggtctgatgtactatacgctcggtcaacgtggcggtattggtctaggcggtatgaaaggtgcatcagaaggtgcatggtttgtacttcataaagatgttgccaataaccgtttagtggtcggccaaggacatgatcacccacttatgcaaagtacacagctttggagtgaggccattgactgggtagcaggcgagcaaaatattccggctgaaggattacgttgcaccgctaaaacacgctatcgccagcctgatcaagcttgtacagtgtttattgatgaaaatagtgagcatggtgttcgtgttgagtttgatgaacctcaacgtgcagttacaccaggccaaagtgttgtattttattcggatgaagtttgcctaggcgggggtgttattcaccatacaaacgcccctacaccaaattttatttaa

SEQ ID NO: 41863 - DNA, 489 bp, Acinetobacter baumannii
atggccgcatggactcctcatgtcactgtcgctacagtcgtagaaaaagatggacgctatctttttgtcgaagaacatagcgaaggttttgtacacacagtgtttaatcaacctgctggtcatgtggaatgtagtgaaacactaacagaagcagcgatccgtgaaacgcttgaagaaacaggacatcatatagatatagatgccctacttggtatttatacttataccccgcctatgtttccggaccgtacttattatcgcttctgctttttagcgcatgtgacccacgtcgaaagcgacccaaaacttgatacaggtattgtttctgctgtctggatgactctagatgaacttaaagaatctgcccgtgcacgtagtcctcttgtcattaaagccattgaagacgccatgaaaggacaacattatcctttagctcttatttatgagcaccctttctctccctcattaacttctcatttggatgcctag

SEQ ID NO: 41864 - DNA, 546 bp, Acinetobacter baumannii
atggcaaaaaacatccgtccttatttagaccatcacccacaaattgatccaagctgttacattgatgaaatgtccgtggttgtaggtgatgttaaattggccgaaaatgtttcggtgtggccttttgcagtcattcgcggagatgtaaatagtattcaaattggcaaaaatagtaatgtacaagaccactgtatgctacatgtcagccataaaaatgatgcaaaacctaatggttcacctcttattattggtgaagatgtgacagtaggccatcatgtgactttacatggatgtactattggtaaccgcgtactagtcggaatcaatacggttattttagatgatgttgttattgaagatgatgtgatgattggtgcgggaagcttagttccgcctcgtaaagtcttaaaaagtggttatctttatgttggaagccccgtacaacaagtacgtcctctaaccgaaaaagaattggcatttttaccttactcagcaagacattatgtaaaagtgcaaaataaccataaagataatcaaataaattaa

SEQ ID NO: 41865 - DNA, 1149 bp, Acinetobacter baumannii
atgactcgaaaaagcgctattgctgcactcctcctcttaccaagtttttcttatgcagcaactgtcttatcagctccgccagaattaaataataagtcttatgtattaatggattacgagacaggacaaattctcgcttctaaaaatgaaaatgaaaagcttgctcctgcttctatgactaaaatgatgacaagctacatcattgaacaaaaattattaaaaggtgagcttaccgaaaatgaacaggttcgtatgaacgaatctgcttggtgtaaaggcagtagttctgaatcatgtatgtatgttccattaaatggcacagcaactgttttagaaatgcttcgcggtattattattcagtcaggtaatgatgcatcaaaagcaatggctgaacatattgctgggaatgaaggtacttttgctcacatgatgaaccaagaagcaaaacgtatcggaatgaccaatacccagtttattaactcaacaggtatgccagctgaaggtcattactcaactgcaaaagatatggctgttttagcacaacatattattaaagacagctcaaaatactacccgatttattctgaaaaagaattcacatttaacggtatcaaacaaggtaaccgtaatgctttactttacactgacccaagtgttgatggcttaaaaacaggccatactgatgaagctggttactgcttaacgacttcaagtaaacgcggtccaatgcgtttaatctcagttatttttggtacaccaagcatgtctgaacgtgctgaccaaactcgtgcactattggcatggggttttgcaaactttgaaactgcaaatgtacaacctgcaaaccaagttcttgcaaaagctaaagtttggtttggtaaagaaaatgaagttcaggttggtttagctgaaaacttcaatgtaactatgcctaaaggcaaagcggacggcattaaaactcaattggttgttcaaccgaacctaaatgcaccacttcaaaaaggtcaagtcgttggtaagcttgttgcaagtttagatggtaaagttattgctgaaaaaccattggttgctttaaaacctgttgaagaagctggtttcttcgcacgtttaattgaccatatcaaacaattcttcagcaacttattctaa

SEQ ID NO: 41866 - DNA, 423 bp, Acinetobacter baumannii
atgtttatgaaaaaaagtttagttcaatcactttctgttgttttactcatgacaatggcaacagtgggttatgctgctgacaagaaaaaaacagctgaaaagaaaactgaaaatgaaaatgttgttgaagttacaccgtccaaaggtactacaccggaagaattagcagcaattcaagtactttctgaaatttgcccaagtttaattggtaaaaaagatgccgaatttgctcaaggttatgagcgtcttgtaaaagactatttgccaaatgaagccgatccagttgcagctttagaaaaacgtagtaaagacaagagcttcaagaaagtcttaaaagaagcacgtaatgatgcaaaagctgctggtaacgaacaaaatacgttagtttgccaagacgtgaaagcttatcaatcgcaaaactaa

SEQ ID NO: 41867 - DNA, 372 bp, Acinetobacter baumannii
atgaaaactttcgctcctttttttcaagtattggggatcagtatcacattgtgtactcaagcggtttttgctgatgagggtatctcaacacaagaagctgacagcttaattaaagatgacattgcctcgactcaagtcttacaagaaatttgccctacttttgttggcgcaaatagaaaacttgaaaccaatactcaaaagattattgccatgtacctaagtggttattccaataaatcaatcaccttctctgcgctgcaaaatgattcagaatataaaaccctgttaagtgaagcacgtcaggctgccaaagaaatggatcaccacgaacaacatgaactttgtgaggaagtggtaaattacaaagattaa

SEQ ID NO: 41868 - DNA, 768 bp, Acinetobacter baumannii
gtgaatattttaattgccaatgatgacggtgtatttgcaccaggtatacaagctttagctgacgcgttaaaaccactaggccgtgttgtggtggttgctccagaaagtgaaagaagcgggttttcgagtgccttaactttagatcgtcctttacgtcctattcaaattgctgaagatgtatgggctgttaatggcacaccagccgattgtgtttatttatctatgaatggattatttgatttcgaatttgatttggttgtcagtggtatcaatagtggcgcaaatttaggcgatgatgttttatattcaggaactgttggcgccgcctttgaaggtcgtttaatgaaacaaccggcaattgcggtttctttggctgggcctgatgtacgttcatacgaccataaagatgattatgcacaagctgccaaatgggtacatgactttattgcaaaaggactacctgcgctgccaccgcgacatatttttaatattaatattccagatgtacctcagcttaaagggactcaaattacttaccaaggccgccgtgcccaatctaaacctatcaccagccatgtagaccctagaggaagacaggtgtactggattggtcttgcgggtgaggcggtaactgatccacagcgtattgctagtcaaatacaatctgatttttttgcggtcgcgaatggttttgtgagcgtgacgccaattcagatggatgcaacaaactatgcggttttagaagatttgcaggccagtttggggtaa

SEQ ID NO: 41869 - DNA, 831 bp, Acinetobacter baumannii
atgcatttaactgggcaacaaagcagattgcatattcaaagagacaaaataatgaaaattatgatgttgtctgtagctgtaggttttactgttgcaatggcaggatgtgcttctaaaccacaaattaataatagttctcgctatgcaatggctcctaactattacacggtccgttcaggtgatactttaagtggtattgcaatgcgttatggtctggactatctcagtattgcagagatgaatggtattgcaccgccatatcgtatttatgttaatcaatcattacgattgaagaaatcttcttcaccaagaaccgtgtcgacacaagtcatggcgcaaccggaaccaattaagcgtcaaacaattgctttaccgacaactactgcaccaaccacaaccactccaccgccagcaactgttgcgccatcaaccaatacaacagtgggagcatctattccaagctcaagcttacgttgggtgaaaccaaataacggtccggttattcaaggctttaatttggcgaataatgtcaaaggaatccgttacggtggtaaccaaggtgacccgatttatgcggcggctgatggtcaagttgtatacgcagccgatggtctgaaagaatatggtaacttagttttaattaaacatattgatggttacatcagtgcgtatgcccacaatagcaagatgatggtgaagagtggtgacaatgtaaccgcaggccaaaagattgctgaaatggggtcttcaggagcatctcgcgttatgcttgagttccaaattcgccttgacggtaaaccgatcaaccccgcaaatcttttaccaaattag

SEQ ID NO: 41870 - DNA, 930 bp, Acinetobacter baumannii
atgttagatcagcttcgtgcgatgggtgtttttgcttgtgtggttgaaaaaagttcatttagtggtgcggcacgtgaattaggcattacaacaagtgctgtaagtcagcaaatccgttctcttgaaaatgaaatggatgtaattttattacatcgttctacgcgaaaacttagtttgactgaggcagggcaggcttttttctcaagttgccaagaaatgttggcagcagcagaaagaggcaaaatcagaatcaatgaattgcgagatgatttgattggtgacttgcgtattgcaactacccctgatttagcggttcagcacattattcctgctttatctcactggatgtctgcccatcgtggtctatctgttcattttgaagtggggcatcgatatatcgatttaatcgaagagcgaattgatattgcagtgcgcatgagttctacagcggtagaagagagcgactctgttattcctatggcttttgtcgatcagattttggtagcttctcccagctatctcaatcaaacaagcccaatcttgcatccaaatgatttaaacaaccatgagttgctttctatcaatgcaatgaatgattcacgtagttttaattttaagcacgctaaaactggtgaaaaattaaatatcgagatggcaagccgtttgcaaagtaataatttacaagtggctaaagcgctatgccagcaagggcatggaattgccagaattttatatttagatgctcaaaaagaactgaagaatggttctttaattgaaatccttccagattggaaactcccagctttcactttatatgcagagattgcaaaacacgatcaacagccaatgaaaattcaacgttgtgtcgaagcgcttaagcaatacttcagccagttggctggcggaagagcaatgcagattgttcgttaa

SEQ ID NO: 41871 - DNA, 2619 bp, Acinetobacter baumannii
gtgacacaaaaacttgatcaagtgacatcttcaactttatcactcgctaaaacaaacaccacaaacgtcacaataaatgcatttccttcagcttttgagcaacctgatattaaaatgactttagataaaacagcgttaaaacccgaacaacttacgcatattccaaattttgaaaatattccagcctcaacaaaacgcatcaagccgctcaacaactttttagggcaagaccgcgccaaagcttcggtagaagccggtatttccttaccctactctggttataacatttttgcggtaggaacagcaggcttaggtaaacgcaccatgattaagcgtttactacaacaacatgccaaaacaatgcctactccagatgattgggtatatgtttataactttaaacaggctcgtcagcctattgcgctacgctttcctgctggacaaggaaccaagtttcaacaaactcttcatcaaacttggcaaattattttaaagcagcttgaacgtcgttttagtgcagagacttatcataaccgtatcgagcgaatccgtcaggaaactggtgatgaacagcaacaggcacttgtcgaattaacgaaagaaggcgaagaacttgatctaaaattgatttctcgaaatgagaaacatggctttgtacctgtacagttaaaagataaccaggttcaagaactgactcaaacagaaattgacgctttaaatagtaaacagcgtgctgagattgcagccaatattcgctatatggataaaaagcttgagcgtcttggtttgcatttgggcgacttagaagatgatgcacgcgacaaagtttctgttttaaatcgagacatcgccactcaagtggttatgccacgcatggacttaattttaaataaatatgggcaagtgaaaggccttgaagattatttaaaacagtatgctcaagatatcattgacaatgttgagttaattttagaacaagaagaagatgactttgctcctgctatgttcaatcgcgtaccggcgcgttatcaagcaaatgtgattgtctcaaacaagccaaatagcggtgcaccggttatttttgaagatttcccaacccactacaacttgctgggtcatgtagaacaactcacccacaacggtacaattactacagatttcactcttattcgccctggtgccctacatcaagccaatggtggttttttaatgctggaggctgaacaactactcgaacagccttatgcatggcaaggtttaaagcgtgccttaaaatcgggccaactcaagctctcttctcttgaacatatgttgactttaaccggcagtatttcgatagagcctgctgctattccacttgatattaaagtggtactaatggcagagcctgagatttattatgaaattttagaagtagaaccagagcttggtagcgtatttaaaattcgcgcagattttaccgatacattacaacgtaatgacgaaaatgaacaagcttatatgcagctgattgcagactatgtgcaagccgataaactgcttccatttgaccgcagtgctctagcggcattactgactgactcaagccgtcaggccgaagaccaaagctcattgtcgttacatgcttcaacgttgggtgatcttattcgtgaagcgcatcatcatgcatttaaagccaatgataagatggtaaccgaccagcacattaaccttgccctacaacaccgacaatatcgcttaggctatttaagagagctttactggcaagacttatggcgtggaacccagttaatcgaaacttctggccatcgtttaggtcaaattaatgccctctctgtcattcactatgcagatgttgagtttggtttaccttcacgtttaactgcttcggtttatcaaggcggtggcgatattcttgatattgaacgtagtgtagaactaggtggttcattgcatgccaaaggcgtgttactcatgtctagcttcttaaaagctcactttggacgtgaacagattttacatttttctgctgctctggcttttgaacaaagttacggacaagtggacggcgacagtgcaaccgttgccgagctttctgcattaatctctgcaattagccagttaccaattgatcagtcatgggcaattaccggttctatgaaccagttaggtcaagttcaaccaattggtggtgtaaatgcaaaaattgaaggcttctatgatgcgtgtaaactacaaggtttaactggcaaacagggtgtcattattccacgccaaaacatgcaacacttgatgctacgccaagatgtgattgatgcggtgcgaatgggtcaattccatatccatgcaattgatacaattgatcaagcacttgagattttaatggctcgccctgttggtactctcgacaaaaaaggcaaatacagcaaacattctatttatgctgctgtaatggaacaacttgagtactggcaagcgatcgaagatggcgcagaagttgaagaggagccaaagaagaaaaagaaaaataagaaaaaaattaaaaagcatgaagagctcacagccgatgatcttcctcaagaaactcaagaggaggttgctacgctaaagcaaaaataa

SEQ ID NO: 41872 - DNA, 2190 bp, Acinetobacter baumannii
atggaaaataaaaaacgaatgaccacacaaacctctggttgggtctcggcgtttaaagcatttttagaccgtcgtgcattaattatgctatttctgggtttttctgccggaatacccattttattgattttctctagtctctctttatggctaggtgaagcaggcattgataaaagtgccgtcacttttttcagttgggcggctttaggatattcctttaaatttgtttgggctcccttaattgatgagttacctgtaccagtcttaactaaagctttaggccgaagacgtgcatggttgcttatttcgcagtgtttaatcgtacttgcgatatgtacaatggcttttgccgaccctgctttaggtcacagttatcttgttcaaatggcggcaggcgcagttttacttggcttctcggctgcaacgcaagatattgtgattgatgcttatcgtattgagctggctgaaactgaaatgcagacagtgttggcatcaacttataatgcgggttaccggatcggtatgattgtagctggtgctggtgcattattcttagcggcgcatttggggaccgcaaaaggaaattatatttacgaggcttggaagacgacctatttaacgatggcagcagtcatgttggtcggtattattacaactttactcgttcgtgaacctaaagttgatcgtatatataaaaactataaatcaagtgattattaccgtctggttttagtattttttattgcagttatctcatttgtattaacctatatttactcaggccaagttaccgaagcaatttcaaaagctggcaatattcaagatagtgctgctttatttggtttagaagctttaaggttcttaacggcgacaggtgttgccattctagctggttatctattggttaaaataggtgtggtgaaccagcaaatggctaaggaaacttggattgccccaattctggatttctttaaacgttatggtgtcaaacttgccttagtacttctattcttgattgggttcttccgtatttcagacattattgctggtgtgatttctaatgtcttttatcaagatctgaactttagcaaagaacaaattgctgaagccgtaaaagtttatggtgttattttcagtttggtgggtggtttcttaggtggcttattagctcaacgtatgaacatcatgaaactgatgttcgttggtgctgtattggcaagctctactaatctcattttcattggcttagtaaaatctggaaaaccgcttgatatggtggatgtccaaattgggaataaccattataaagtgaagccagatgaagtggggtattggaagctcaaagtgccaagctcaagttttaatggcacccaacaaattgatgtcaaagctggttatgctttgcaagatcaacaagccgagactatcgttcgggctcaacctctagtgtcaactcactctgagagtgttcctttacaaattttacctttaatgggaagtgatcagatatcggctaactcttccgaaggcagtgtcgtgattcgtgggcagtattttggtaaagccttatcacctactcaaaagattgtggtgaatcttgatggacaaaattttgatgcaaaaatgacagatcaaaagggcgtgtttaacgcagcaattgatatgcaaaaattattgtcatcaccaagtaagcaacttactgcttcaattgtcgatggaaatcaaaaaatattatcgattgctcaccattatgaagtcgcttcaaattctgtaccaaaacctgaattagatgtgaatattgatcctttaccgtacattgatactcaatcaggtcaagaagttgagattagtggtaaagtcattaaaccttatagctcactatggctttattttgccattgttgttgataacatggcttcaggcttagccggtgcggcatttattgcattcctttcaagtttgaccagtgtgtcatttactgctgttcaatatgcgatctttagctcacttatgacccttaccccaaaacttttaggtggatattcgggtaccatagtgagtaatattggatacccaaacttctttttgatgaccacaatgatcgggattccaatcttaattttagttgtttgggttggaaaactgcttaaagatcatcaaacacatgacatagaaaaggcaggtgaataa

SEQ ID NO: 41873 - DNA, 402 bp, Acinetobacter baumannii
atgcgaatgcttcatacaatgttgcgagtaggcaatttagaacaatctttaaagttctataccgaagtattagggatgaagttacttcgtaagcgtgattatgaagaaggtcgctttacgctggcatttgttggttatggcgatgaagaaaataataccgtgcttgaacttactcataactgggatacctcaagttatgatttaggaaatggctatggtcacattgcgattggtgttgaagatgcttataaagcatgtgaagaaatcaaagcacgtggcggtaaagtcgttcgtgaagctggcccaatgaagggtggtgtaacggtgattgcatttgttgaagatcctgatggctacaaagtcgagcttattcaacaagacgcaaatgctagaaataattaa

SEQ ID NO: 41874 - DNA, 966 bp, Acinetobacter baumannii
atgctgaagttcttggcacttgatcgatttacaattttgttggttggcatggtactactagcaactttttttccagtcagtggtcaagctgcgcagtatttcaatatattaactacagtcgcgattgctattttatttttcttgcatggtgccaagctgtctcgtgaggcagtcattgaaggtattttgcattggaaaatgcacttactggtatttgcaattacgttctttatttttcctgctattggtttattggctaaacctattcttttacctttattagggcagcagctctattggggttttttgtttatgtgtttcttgccatctactgttcagtcttctattgcttttacttcagttgcaaaagggaatgtagcgggggcagtatgtagtgcatctttctcaaacttggtgggtatgtttattacgccggttttagtcagtttctttattttaggacaaagtcagcacggatttgatcctacatcttcaattatacaaattactttgttgctattagtgccttttgttttagggcaattacttcgtccctatgtttttccatatatggcaaaagtaccaagtattgtaaaagcatttgaccaaggttcaattttgatggtggtctatggtgcatttagtggggcagtggttgcggggctttggcatcaggtgagttggaaaaccttactgcttttgaccattgcttgttctgttttactcaccattattatgctgcttgcactttatttaccgcgcgtttttggttttaaccgagctgatcaaattacagtgttcttttgtggctcaaaaaagaccttggccagtggtgtacctatggcacaaatcttatttattggccaacctttaggtatgatcgttttaccaattatgatctttcaccaaatacagttaatggtctgtggggtcattgcaaattacttggctaaatcccaagattaa

SEQ ID NO: 41875 - DNA, 225 bp, Acinetobacter baumannii
atgcgcgccgatattcacccaaaatatgaaaaattagttgcaacttgttcttgcggtaacgtaatcgaaactcgttctgctttaggtaaagaaactatttaccttgacgtatgttcagcttgtcaccctttctacactggtaaacaaaagaatgtagacactggtggtcgtatcgacaaattcaaacaacgttttgctggtatgtctcgctctatcaagcgttaa

SEQ ID NO: 41876 - DNA, 2109 bp, Acinetobacter baumannii
gtgagaaactctttactatctaaaaggttaaaacgtactgaaatacgtttactcattattgatgataaccagttacgttataaccaaattttaaatttattatcggggaatgattatcaagttaatgccttattacttgatgatttaaaaagttttgaaaagcagctcaatacatcttgggatgtcattatttttggtcgcgcctatgatttgaaaattgaacaaactctctcccttgttcaagcctcagaacagccgcagcttccaatattacttttacagccagatgattaccaagcgcagcaatatcaaagctatattcaaaaagggatttatgatgtagtccctttagaaccgctagattatttctatattacgctggttcgggcactgtcatacagccgccttttacagacggaacaacgtcttttggctgagcttgatactattcatacgcatacgcaaacgctggtcgacaacagccataaagccgttgctatttttcaagaaggcatccacattaaggcaaataccgaatatttgaatctttttggtttccagcaagaagaagacattatcggattaccgattttggatgtcttacaacccaacgatttaaatatttttaaacagcggtttaagaaaatttctttaggccagttcgatcaagcacgctttgaaatccaaagtcagcatcaggctatttcgggtaataatgcgctaaaactcgagtttattccaagccaagaagaagacgcagtacaactcaccatcgactatcaagttgatttaactgctccagcaaatagtgctccgtccgaaaaaagtgttgggttgagtgcagcttggccgcagattaatcgtcatttatcgacccaccctgcccaagcaaacgccgttgttttatttagacttgcacagtgcccagaacgaatttttcaacagggttggcaaactttagggcaatatttcaatcagctccatggttttttaaaagaccatgcacagatgccgattttccaagtcgacttgggtagttatgtcgggattttacaagctgaaaatagttcagttttaaactcacagctgacgagtttacaagctttgcaaaaagaacacttgttaaaagtgaatgagcaaaacttttcagtgcagttaaagcttggttatgcttttctcaaccaaccattaactgagaactcttttagctcattattgaacggggctgaaaaacaggatttacctcgggttacacctcaacttgaagtaatgccaacagtagaaaaaacggtttcaccgagcattgaagctgttcctcttgatttaacaattgaacattttgaccatacgcctcagtcctctttgctccagcagttaagacaaaaactagctcagggcgaaatacatctgaagtaccagcaaatttacgataagcatgaccaagaaactcacaactatgaagtgacaagtggttttattgcgggtgaacaatggtatgacttaaatgatttaagtgatcttaaagaagatgcagaactttcaattcagttagaccgctggatattggtagaagcgtgtaaacagcttcatcatttcattgctcagtatcctaaagcgaaactcattattaaccttaatattgatattttgctgaaagataaaacattccctgagctgatttccaaactactgactattatcggaagtaaaattgaaagcccactgattttgcaattttcagaacaagctcttcagccttatctcccaattgctcaacagcacattgctcgcttacgccaacatggtgcggaaatttcaattcgagattttgcttcttctatgtatagcgattcaatattacagcagcttgatattcaacttgtaaaattacagtccagcaaaactgatctattaagctcagaccaagggcttaataacttgcaagaaaaaatattgaactatttgactgtaaaaccgattggaattttattagctcacttgaatgatatgaacctgtttgctaatgcatggaatgtagaagcacgttttctacaaggtgattattttcagaaaaaacttgaccgcttaacagacgtacaagaccaataa

SEQ ID NO: 41877 - DNA, 1746 bp, Acinetobacter baumannii
atgatgaataatgcactttcggacatttttcacaatcaaaccgcacttactcgtgaacggttaagcttttgtgaagccaacattaaagatcttaatgagtgggtcactaccctttctattatgcaattgggtgatacttcaaaagcgctatttacagcaattttggagctgaatgagttaaattgtagtgaaaccttacgctttgacttaattcagacacttcacccaaccattaataatgtgttggcgagtttagaaaaaaacttctttaaccaaggcgtcattagtaccgaccgtaacgagcacattattgaactggctatgcttctgcgctgttattttgccagtatttatttaaatattgcgcaaacaagccacgaacagctacaaaagcagaagttttctttgttctcttttaaacaaaagaaaaacttacaaaccgcacgaattctggcgacattccacgcattgcagcagttgaccaatcttttatatcaacagcatatgctctatagcgaacctgtaaaaggtcaatggttaattgcccaccagctttacgaaacagcggttcaatacaaatatcatttaaccaatattaatcatattcaaggtgtacagcacccgttagccaatattacgcaggcttatgcacagcttattttattagatatttttaacaccaatcagattcgccagtcagaaattcaggccctgtttcaatgtagttttgactgggcacgcatgattcagatcttgccgaaagacactgcttcaacaaagtatgtggtcgacccgactaaagatcatccgcctgtatataacaagaaacaaagctcaaatttcaatccaagtatttttattagcacgcaagctttgcttgagcatgtcactgccaccatgcataaaaatgctcaatatatgtctaaaaatgaaaagatttatttgagtcccgcattaaagtttcacgttcaaacgattttaggaaccacagcacagcgccgtcatgagcgttatgaatataatgcagctttacaaatttgttttggcttaagtaccgcacatttttatttatctaaagccaaaaactttgaagaaacgctacaactgagtaataactataatttacaaagtgaatcgaaagttttatccaatttagagaaaaaagaacaacaaacctcgtcttatcaacgcttaagccgtgagagtaaaaccatttatcaaactaccgtgcttgatattagtgttaatggctatcgtattaaatggtccggcgaagcacctaaaaacttaagaaccggcgaatatattttggtgaaggaaacgctacatggtcagtggcgtggcggtgtaattcgctggattaagcaatctacagaaaaaagtctggaactgggtttagaaattctttcacaagccatgttcccttgcgctgtgcatattcaggcagagcgtcatacgcgtaattatcaccctgcattattactacaaactcaaaacttagaagaaatacaaaacacgcttattttaccggggtctcaaatttttagagagcaacaaacaattcatttacgattggggacagaagaaatcaaagtgtatctactcaaagcacaactcattactcaaagttttattcaatttcaatttgagcttctgaatgagcagcaacagtacctgcttgatcagttcatgctgaaaaagaataacaccgtgaatagccaagatttatgggaagcattaaagtga

SEQ ID NO: 41878 - DNA, 1017 bp, Acinetobacter baumannii
atgataaactatttacaccaagagcaaaactggcaatcacaactcagtgaccttattaccgatcctttagagttgttgaacctgctcgagttatccactgatcagctattatcaggggcgattctggcttctgaaaagtttaaattgcgtgttccgcgtgcgttcgtcggaaaaatgaacgctaaagatcctcttgatccgcttttactccaagtgttgccacatcatttagaacttgaggaacatcctgagtttgtcaccgaccctttaggtgaagaagcagccaatcagttaccgggtgttttacataaatataaatctcgttttttactgactttgaccggtgcatgtgcggtccattgccgttactgcttccgccgccactttccttatcaagaaaatttacctaaaaatgaagattggctaaacattaaaaattatatcgagtcgaaccccgatattaacgaagtgattttaagcggaggtgaccctcttacgctttctaaccgtaaattagcgctttggctagaacgtttatcatctctcaaacaagtgaagattctgagaattcattcacgcgttccaattgtcattccaaaccgtatcgacgaagagcttatttctttattaaaaaacagtaggctgcgtattattctggtggtacactcaaaccatgcttctgaactcgatgactttacttgttcaaaattgttgcagctatctgaacaccacattactgttctaaatcaggcagtattgcttaaaggggtgaatgattctgctcaaactttaactgatttaagttatcgtctatttgaagctcgcgttatgccatattacttacatgtattagataaagtaaaaggcgcacaacattttgatttaataccatctgaaatagatgcgatatatcaagacgtgttagcgagcctaccaggatatttggttcctaaactcgtcagggaaattgcgggcgaaaagaataaaacaccgctttttggggctacaactttttga

SEQ ID NO: 41879 - DNA, 570 bp, Acinetobacter baumannii
atggccaattattctacaaatgatttcaagccaggccttaaggtcatgcttgatagtaacccatgttcaatcatggaaaacgaatacgtaaaaccgggtaaaggccaagcgttcaaccgtgtaaaattacgtaaccttaaaactggtaaagttttagaaaaaacttttaaatctggtgatactttagaagctgctgacatcgtagaagtagaaatgaactacctatacaacgatggcgaaatgtggcacttcatggacccagaaagcttcgaacaaattgcagctgacaaaactgcaatgggtgatgctgctaaatggttaaaagacgactcaaatgaaacatgtacaatcatgttattcaatggcgttcctttaaacgtaaatgcacctaacttcgttgtgttgaaagttgttgaaactgatccgggcgtacgtggtgatacttctggcggtggcggtaagccagctaagcttgaaacaggtgcggttgttcgtgttccgttatttgttcagcaagaagaaagcgttcgtgtagatactcgtactggtgagtatttagagcgtgcataa

SEQ ID NO: 41880 - DNA, 2097 bp, Acinetobacter baumannii
atggacacaatgcaagcgaaatctacgcttccctccaaattggtctggagcctagtagcaattataggtgctatttctttcgggatgctggcgctaagtcgtggtgaacatgttaatgcagtatggttggtactggcagctgcatgtgtgtatagcatcgcatatcgattttatagtctatttattgcaactaaagtatttgaattaaacccgagacggttaactcctgcacatcgtttagccgatggcttagactatgtgccaacaaataagtatgtactgtttggacaccactttgccgcgattgccggcgcagggccattagttgggccgattttggctgcacaaatgggctttttaccgggcaccatctggttattggttggtgtggttctggcgggtgcggtacaagactttctagttttatttatatcaacacgccgtgatggccgttcactgggtgaaatggcaaagcaggagcttggtccttttgccggtattgtggttatgttgggcgcacttggggtaatgattattatccttgcggtattggctttagtggttgtgaaagcacttgcacatagtccgtggggtgtctttagtattgcagccactattccaattgcattgttcatgggcgtttacatgcgctttattcgtccgggacgcattgcggaagtttcaattattggtttcgttttaatgatgctggcaattgtgtatggtggacatgttgccgcagatccatattggggtgagttcttcactttaactggaacacagctcacttggtgtctcatcatttatggttttatcgcatcggtactaccagtttggttgttattagcaccacgtgattatttatctactttccttaaaatcggggttattcttggtttggcagtcggtattgtgattgcattgcctgaccttaaaatgcctgctgttacccattttattgacggtacaggtccggttttctcaggtagcttattcccgttcttatttattaccattgcctgtggtgccatttcaggtttccatgcgctggtatcgagtggtacgacaccaaaacttgttgataacgaagttaatatccgcatgatcggttacggtggtatgcttatggagtcttttgtcgggatcatggcgatgatctgtgcaacagtattagacccaggtgtgtacttcgcgattaatgcgccagcagcagtgctcggtacaaccgtagaatctgcagcggaagctgtacgtaatttaggctttgttgttacgcctgaaatgttgacggttttagctcaagaagtaggtgaaagctcaatcctttcacgtacgggtggtgcgcctacctttgctattggtatggctcatatcatttctgaaatctttaacagccgtgccatgatggcattctggtatcactttgcgattttatttgaagcattgttcattttaactgcggtagatgcaggaacacgtgcttgtcgttttatggtgcaagacacggttggtattgttattccggcggttaaatcttcaggttcattctttggtaacttgttaggtacagccgttgcggtaggtggatggggcttcttcgtctatcaaggtgtgattgacccacttggcggcgtcaactcattatggcctctatttggtgtgggtaaccaaatgctggcttcgatggcactcattttgggtaccgtgattctgttcaaaatgaaaaaagagaagtatgtgtgggtgacaatcattccaaccattttcttgttcattacctgtatgacagcagggtggcagaagattttccacgaaaacccgaaaatcggtttcttggctcaagcacataagttctccgatgcgattgctcgtggtgaaattcttaagcctgcaaaaaccattgccgaaatgcaaactattgtgatgtcgaaccagattaatgctgcactttgtggcttctttatgattgtatcgattgtcatgattattgcctcaattggtattgttcgtcgtgctttagcaagtccaacaccgactgtaaatgaagcgcctgcggtatataccgatcctgaagtggttaccactcgaggagaataa

SEQ ID NO: 41881 - DNA, 303 bp, Acinetobacter baumannii
atgaattttaaatttgcaaaaaatggtactgtcattattgcgaaaatcatcaaaatgaccgtgctttcgcaaaaagagatattgctctctccaaagaactggtcacgtatcgcaaccttgtggcagcgtttacagcaaagcttccgactcatggttggtgtgccggactatcaaacgtatctggagcatatgaaagcccatcatccagatttaacgcctatggatgcacaaactttctatcgacattgtgttgatgcaagatacccatctgcaggtggtactttgaagaagtgcccttgttaa

SEQ ID NO: 41882 - DNA, 1323 bp, Acinetobacter baumannii
atggtaacttatggcaatgatcaaaacggtttatggctaaagttcgataattttacttcaaatgatattaggcaaattgaatatataaataatgtcttatatgtcactaattattcaggaacttactattcacttaattttaattctcttgctaaagctcgcatgattttcagtgatggggtcgaaaaacaggttttatttacaagtgggggtaatggtctaaacatttctactgcaaacagtgagtggattgtaggcacaaattcagtcgatcaaatatgtagtggtgcgggaaatgatcgtctatttggtggagtaggagacgatatttatcaattcagcaaaggggacggaatagataaagtcactgactatagtggaaataacacgattcagtttatggcgagtaatttggcagacctatctatacaaggcaatggaagtaatttagaagtcaaatactctgatactgatgcagtattaattgaagggaatgtaagtaactttaaatttttagatggtacaaccgccacactcgatcaattacttacaaataaaacaattacactcactggtaccaaaggcaatgaaacgattaatggctttgcatccaatgacattattaatgggcttgaaggtaatgatactttaaacggaaacgcggggaacgatacgttaaatggtggtgctggcgatgataggttatatggtggaaccggtaatgacttaactgtaggtggaactggaaatgattggttagcatcaggaggtggcgacgatacttatcaatttagcaaaggagatggtaacgatacgattaatgactactcgggtaaaaacaccatccaaattaccgatgtttctgcaaaagatattacattcacaactaacgctaataatgagttagtcattaattattcagcaacggatagcatcacgttaaaagcctacattaacaactacattctttcagatggcgtggtccaaacctatcagcagtttctaacaggaaaaactgcaacgtggaatgggacagataacgccgataacttttcgggtactcttccaaatgatgtgatcactggaggtaaaggtaatgacacgttaaatgggcgcgaaggtgacgacacttaccgtttttctttaggagatgggatagacacaattaatggagattactcaggcaataacacaattgtgtttacagatgtgaaatctaccgatgtacaatatagttttgataaaacaactttaaatatccagtacagcgatagtgatattgttaagttaactggctatcttgccaaatattgggcgtggtga

SEQ ID NO: 41883 - DNA, 408 bp, Acinetobacter baumannii
ttgccaaatattgggcgtggtgatgtaacggcttatttaggccgtagtagtacgggtgcggccttacctgaaaatttatatggcacttcatatgtcaatattcgagatgtaggtccttcaccgttagcacgagggatttactataaggcaaccgcttctatgaatgctggggattctggtggaccttggctgtcagatgataatactttaattggtattaataacggtattgcgggtactgataaatacggtgctgtaatctgtcagtatactcatcaaatcaatgatgtattggtgaaatggtcagcagccggaaaccaaactggagcagtaacaccaccaactacaccgccgtcagtagagccaacgactcaaccgccggtaacaaatccaccaacggctgtatga

SEQ ID NO: 41884 - DNA, 687 bp, Acinetobacter baumannii
atgaatgcttatttgcatcgtagtgaagatcgtggtcatgttaaagcaggctggttagagtcttatcatagcttttcgtttggtagttggtataaccctaaatatatgggggtaagtgcacttcgagtcattaatgatgaccgaatcgatgcccacaacggtttcggtactcactcgcatgacaatatggaaattttaacctgtgtgcttgatggtgcaatttcacaccgtgacaccatgggaaatgaaggccagattaaagcaggtgaatggcaacttatgagtgccggtacaggtgttgctcatagtgagattaataacaccgatacgtcagtgcacttattacaaatctggattattcccgatgtaaaagaagccgagccaaattatcagcaaattagtttggacccacgtaatcaaccgaacgaatggcatttaattgcaggccctgacgcaaatgcaccaatgcatattcgccaagatgcagaggtaaaatctgctgtacttgaaaaagatcgtgaacttccagttgagacttcaaaacgagttaattacgttcatgtaatttcaggtgaagttcgtattggtgagtacgaagtgaaagcgggtgatgctctggtctttgaagataatgccgtgattcatgcaaatgaagacagccaatttatctggtttgatttaccttaa

SEQ ID NO: 41885 - DNA, 969 bp, Acinetobacter baumannii
atgaacaatttaacccttccaaattatgaagatgtcgcagccgctgctgaacgtataaaagattttataaataaaacccctgttttaacttcacgtacggtgaacaatgaatttgaagcagaagtgttctttaaatgtgagaattttcagcgtgtaggcgctttcaaatttcgtggtgccatgaatgcacttttgcaatttaatgagactcaaaagaaagcaggtgtagttgctttttcttcgggaaatcatgcacaagccattgcgctttcttcaaaaattcttggtattccagcaaccattatcatgcctaaagatgcacctgctgcaaaaatggcagcaacgcgagaatacggcggcaatattgttgaatttgaccgttatacggaagatcgggaaaaaattggaaaagagattgccgaaaaaaatggtctgacattaattccgtcttatgaccatccgcatgtgattgcaggtcaaggtacggctgctaaagagttatttgaagaagtcggtgatttagattacctgtttgtatgtttaggtggtggcggtttgttggcaggttctgccctgtctgctcgccagctttcttcgaactgcaaaatatatggcgttgaacctgcgctaggaaatgatggacaaatgtcttttagaaaaggcgaaattgttcatattgataccccaccaaccattgccgatggtgcgcaaactcaatatttaggcaaattgacctttcctattattcaacagaaagttgatgatattttgacggtcacagacgaagaactcatcaacgctatgaagttctttgctgaaagaatgaagatggtggttgaaccgacaggatgtctcggatttgcggctgcccgtaatttaaaagatgagttaaaaggcaaacgtatcggcattattattagtggtggcaacgtcgatatttctaaatacgcggagtttttatctgcctaa

SEQ ID NO: 41886 - DNA, 624 bp, Acinetobacter baumannii
ttgggcaatcgtgataaacatttactcactcaacttgatactatcgcgaaagggttaagtgaaacactagcgccattttgtgaagttgttgtccatgacttaaccaatcctgagcatgccatactctcaatacacaataatttgtctggccgacaagttggagacccagcaactgagttagggctggcaagaatcatgtctccggagtttccaaaccttattacaaactatgctaaccagtttgcagatggtcgccctgcaaaaagcacctcgatcggtattaaagatgaagagggccagtacgtagccgctttatgtatgaatattgatttaaccttatttagagggatgcaaagcgctttagagcatttcactaaaattgagactgacagcattattgaaaacttggaaccgaatggcacggaagcaattcgaagatatatcgatcagtttgcttcaaaacatgccactacaccgcgtatgttaaaactcaatgagagaaagcaattaatacaagaactcaagaataatggcttactagaaattaaaaaggcggtggaaacggttgcccaacatttaggtatatccagagccagtgcctatttgtatgtaaaagaaacttaa

SEQ ID NO: 41887 - DNA, 861 bp, Acinetobacter baumannii
atgacaaaaattgcagaaaaatcgaaacaagaatatggcgacttattaaaagaaaaagaccatttacaagatatggaacagcttgagatgactattgtctcgatccagacgccgtatccgtctattgtaagaattcaaggaaaaatcaacacattacaaccagagctttggcaagctcccaatttggcaattcggttaattgtgagcaatccgccagagggacaacccatctcacgcgtctatacggttcgttcatttaaccctataaatgctcaaatcgaaattgattttgttaaacatgaagatttaagcccagcaatggaatggcttaattcggctcaagtgggtacaaaaatcgggcttattggcccacgcccccatttcattcccaatttcacagccaaaaagcatgtggtcatgtttgccgacgatacggctgtacccgcgttatattcaatactcaagcaatgggaactcggcataagtgcggatattttcattgaaagttttgaaaaagacattgctagccaattacccgaacttgagcatgtcaaaattcattcgttccataaagaacatcacacgtcacagaaaggccttcttttaaaggcagcatttgcgctagaacattacgaaaatattacgatttgggcggcttgcgaacgcaacgaagcaagagccttacgtcaattttttctagaagaccaacagttaaataaaaatgacgtgcgtattgccggctattggagagacggcgtatctagctcagagttagacaaactgcgtgctcaacattatcaggaacatattcagcaaggtaagaccttgaacgaatatgatgacctcgatttggcaaattaa

SEQ ID NO: 41888 - DNA, 1848 bp, Acinetobacter baumannii
atgctaaaagatttgagtcaaaatttagggcaaatgaatgataaaaataacaacgtagaaaatttcttaaagcaaatttatgaaaatatttttgataaaaattccaatcgaacagcactcatttttgaagatcgtagcattagttatgctgaggtagggactcaggtcgccaaagttatgtatgcgctaagaaagcaagacttggcgacagggtcggtggtggcaatttgcctgagaaaaagtcctgagcatatttatacagctttagcatgtgcgctcactggcatcatttggctacctgtagatatggattctccgccatcgcgactgaactatttattgacgaatagtcgggcagatgttgtggtgagtgactcatccattgcaggtgttcgaaacctaaatattaatgaaattttatcggctacaactgagtatgaaccgagctttaatgccgaaatcaacagacgtccggcttattatttatatacttcgggaagtacaggaactccgaaatgtgtggtcctaaataatcaggccacagaaaacacgctacaacagacgatctcggaatggaaaattactactgacgatgtgattatggcggtaacaccgtttcaccatgatatgtcggtatttgatgtatttgcttcaatggcagtgggtgcaactttggtggttccatcttttgagcaaagtaaaaatgctgttgtctgggccaatttagtagatcgttgcaaggttacgatttggagcagtgtccctgccattgtcgatatgctgttcagtgtagcgcaaaaagtacaattacagtctttacgtttaattgcccaaggcggcgactatatcaagccttcacttatagcgaagttaagacaacaattacctaacgctcgtttattttcattaggtggacctaccgagaccacaatttggagtatatggcatgaaataaatgagcaagatcaggaaattattccgtatggaaaagctttagaaaataaccgttattttattttggatgaaaatctaaagccttgccaaatgggcgaggtcggtacgatgtatatggccggcctgaatttatctaatggttatttacttgatggggaaattaattataaagatttcgttgatattcaagtgagcgaaaatgaaactcaaactgcttttcgcatgagtgaccaaggatattttagggaagatggaaatattatttttgcgggacgtgaggaaggttatttaaaaataaaaggcgtgagaatctctgcggccgaggttgaaaatactttgacgaagaacccgtatatccataactgtgtggtgatcagttgtgtacatccaacgactgaaactcaagagttagtcgctatttacaccctagaaaataaatataaaactactcgcctaaatagccccgaattaaaaaacttcttaaaaatacatttgccgagttcacatattccttcgaaatatttggccgttgaaaccatacctttgacccgaaatggaaaaattgatcgtaaagctgtgcaagaaatcgctcaggggaaaatttatgtaacttctacgttgtctgcaaactcttctaaaacacagtcatcaatcgctgaggtgggggattcggttttatcggttttccgtgaatgcatcgctgacaaccaagctgaaaaaatggatattttttatagaagtgaaatattagatataggaattcgtccgaaacaactcatgagtattgctcagaaactttctcagaagcttaatacacaaattgatttttatacgctagttagctgcaaaacaattcaggatgtggtgaataaagtagagcagcaaataaaatag

SEQ ID NO: 41889 - DNA, 2094 bp, Acinetobacter baumannii
atgttggaacaattttccaaatcgccctctctcctttcggttactgattacgaagaacatatctggatgttgcaattacaacagcctgaacaagttaaccgacgttttaatctatggaaacttaatcaaggtttagacattcaactgctcattaaagcaattcaagacattattaaaactacacctgacttaaatgttcgctatacatttagtgacgaaggtgatttatacaagtatccatttgatgatcattcggcttgtctagaagtaaaaaaaagcaatgcagaacaagtatttaagcaggtcgccgccttaaaagcgcaagcatggaatgcagaatttcatccccctttttttacaagtctcatagaaacagagcaagactattttcttattttagcgctccacccgattcttgatgaaagctatcaaaagtcagatttcattcaggctatacaaaatcgatatcaacaatattcacccaataatgtgccattggtgctgacagaaattgatatctcaaatcatcttgcaagttctacaaaagcgccagaacaacctaatcaaacttatgtttcagaaattattttagaagagtttcgaaatacgctcgctgaaccagaaatgagtcagcatgatgacttttttgattttggcggccattcactattagcaacgcgaattattggaaacctactcaataaacatggaattgagattcaatttaatgatttctttaaatctccatctgcggctgacttagcccaatatgctttcgttaaatctgcaaaaactgaaaaaaccaccttacaaagtgtagataaagccccgcttactttagctcaagatttcctgtggcaagcttattctgcgttcgattttagcccaatttataacttaccatttgccgtagaattccttgaagaaattaatgaagatgttttctttcaggcgtttacagatattgtggagcgccatgcaggtttacgcacaatttttaatagcgccaatggtcaaacctatcaacaggttattcctacatctgaacttaaaaaattcaaatggttttggaacagtgccgaaagtaaagatgcaacgcttgccagtgaagcttcatataaatttgatttaacccgtgaacttcccttaagaattcgtttaattcaaaatgccaaaggtcgccaaactctatcgtttttagttcatcacatggtgattgatgaatggtctttaaataccattatggctgaccttgcgcatgcttatcttgctcgctcaaatgctcaagccccaaactggaaagcacccgcccaatccattcttgatttttctttactccagcaaaaacaaggtattaaccaagaccatctaaattattggactaacctattaagaggagcaaccaaaggactaaaccttcctgtttcggaacatgaattaaatgctgaaaagggaaaacctccagtccaatggctcgaacttaaatttgcaccggaaatgtatgaaaagcttctcgcattttcgagacaacacagctcttctatttttgcggttctctatactgctatcgccaatgcgttacagcaacaaggtaatttaaaagatattgtgattggtacttctgcatctggacgaactgatcctgagttctttgatacggtgggttactttacgaccatggtggcgcatcgcacacagtttagcccttcagattcattccaatcgttgctccacaatatcagcacaatgattaatacctcgatggcctatgcagatattccaatcaaccatatacaaaatgcattaggaatgagcgcagatgaaggactgttatttgatgtgtttattcatatccattcaaataatgctttaaacggcgcgctcaaaacacctcagggacaagaccttccttatcgtcagattttgccggaacgtgatgaatcgatgtttgggttacattttgaaattatggaaaatgtgattgatggacaacatcagttaagcatgattattacttatcaggcccatcgcttcccgactgcaacagtgcaaagtatctgtgaaaaaattaaggcaaccttagctcaaatctag

SEQ ID NO: 41890 - DNA, 132 bp, Acinetobacter baumannii
atgagaatattcaatcatgaaaggttaataagcccatcaaatgttgaacaaattttccctcgctttggtttgatgggattaaatttgcaatttgcatcggctttattacgctcaagtggggcacgccactga

SEQ ID NO: 41891 - DNA, 942 bp, Acinetobacter baumannii
atgcgatttggcttattctgtatttttatcattttatgtatttgctcattattgctcggggctgaacaaatacagtggtctaccttattttctttttctcatgagagttggctcactcttacagccagtcgtattcctcgtttaattaccattgtgcttaccggtatcgggttggcggtatgtggtgtcatcttgcagcatattgtgcgtaacaagtttgttgaaccggaaacttcgggtggtttagatgctgccaaactgggaattttagtgtcgttaactttagttccggtaaccagcacgctgagcaagatgatatttgcgatcattttttgttttattgccagcttaatttatatcgcaattattcggcggatccgttttagaaatacggttttagtaccagttattggtttgatgtacggcagtgtactgagtgccttagctgagttttatgcctatcgctttaatattttacaaagtatgcaagggtggcttttaggagatttttcaaaaattgtccaaggccactatgaagttatttacattatttttccgattgttgccctgacttatcttttcgcacaccgctttaccgtaattggtatgggggaagagatggcttctagtttgggactcagttatgcagctatagccgccattggtttgatactggttgccattacagtttcgaccacagtaattacggttggtgctattccttttgtcgggctcgtggtccccaatttagtcgcactgaaatacggagaaaacttagctaaaaccttgccgattgtggctttgggtggggcatctctattactgatttgtgacattcttggccgctcaatcatttacccatttgaagtgccgatcggacttaccgcaggtggtgtggggggaattattttcctcatcctcattttgagggagttcagataa

SEQ ID NO: 41892 - DNA, 948 bp, Acinetobacter baumannii
atgcgcattacaaagctatggatgatttatctgatcgttatctgcctagcagtatgttttttatttttaaactcaggactagattttgattacgtcattcctaatcgacttctgcgtcttgccacgattgtgatagccggtatttgtgttgctttttcctcgattgtttttcaaacgttggtgggtaatcgtattttgaccccttccattatgggctatgaagcgatttatctcttatggcaagttttgttgttgttcttttggggaacgcatggactaagccagttaggggtaaatggtaatttctttatctctatcgttttaatgctgctttattcgtgggtaatccataagtggttattgccatatggcagaaatgatgtctttctcctgttgcttttagggttagtccttacgatggtcgttgggacgattactcaatttattcaactcaaaattaatcctggtgaattttctgttttccaaggccttagctatgcttcttttaatcgctctcaaccagaaactttattgtatgccagcttagccgtagtcattgttctatttctcggtaggaaagcgctccctgttctggatgttctgattttagggcgtgagcaagcgatttcattaggcattcatcatcaccgctatgtcagtttctatttagccctgatcgctattttggttgcggtatctaccagcctgattggcccgacagtatttatgggcgtattcattgccaacattacttatgcgctaacaagaagttataagcataaattaacgctgcccatgggctgtgccatcacgattgccatatttattgctgctcaaattttagttgagcacgtttttaattacaaaacgaccgtcagcattctggtcaatctggtatgtggcatttatttccttgcgctgacggttcgtacccgaggtgttgcatga

SEQ ID NO: 41893 - DNA, 771 bp, Acinetobacter baumannii
atgattcatgtcaagaatatcaataagtcatatggaaataagccaatactgactgacgtaaatgttgaatttcctacaggtcaggtgacgtcactcattggtccaaatggagccggaaaatcgactttgctcatgatgatggcacgtttaattgagccggataaaggcgagatttttcttaatcatcaaaatattgcggatattaaaaccgctgtttatgccaagcatgtcgcgactttacgtcaagcacccggctttaatttgcgcttaaccgtagaagagctggtgtcatttggacgctttccctatagccgtggtgttttaaccgagcaagatcatcaggtggttgatgaagctattgagtttctttctttagaaccactgcgaaaatcttacatagatgaaattagtggtggtcaaagacaaatggcctttttggcgatgacgatcgcccagcaaacagacgtacttttattagatgaacccttaaataaccttgatatgaaacatgccgttcaaattatgcgtgcactcagacgcttatgtgatgaacaagggcgcactgtgattttagtcattcatgacatcaattttgccacgaattactcggaccatattgtcgcgctcaagaacggcaagcttcatttcagtgggttaacggaacaagtgattacagaggcgcaattaaatgatctgtacgagcttgattttgaaattacatacagtgagcgtggctgtatgtgtaattacttcaactcatctggagcttga

SEQ ID NO: 41894 - DNA, 969 bp, Acinetobacter baumannii
atgaactggaagaaaaagtatgggggagtagccctcatcatagcggcagctgtcactctacaagcatgtgatcaaaaagttgcagataccactcaggcttctcagaagctagcagaaccgattacggtaaaacatgcgcttggaactacggtgatagatcatttaccgcaacgcgttgccgtacttgatatgaatgaagctgactttctagatcaactgaatgtcccgattatgggaatgccaaaagattatattccacactttttggaaaaatataaaaaagatgcacaaattcaggatttgggtgcaattgtacagcccaatatggaaaggatatatgcattaaagccagacctgattttgatgacgccattacacgttaatcagtatcaggaactgtccaaaattgccccgaccattcactacgatattaacttcaacaacagcgagagtaatcatattggtctggttaaagaccatatgatgaccttaggaaaaatatttaataaagaagacttagctcgccagaaagtttctgaacttgatgaacaggtgaagcaagtacaagccgtaacggccaatcgcccagaaagagcattagtcgttcttcataataatggggcatttagtaattttggtattcagtcacgctatggctttatttttaatgcctttggggtaaagcctgcaagtggtgtggtggatacaagtctacatgggcaacctatttcgagtgaattcatcaaaaaagcggatcccgatattctttatatcgtggatcgaactgctgtgatggaacatcgctcaaacattaatgctgccagtgttgaaaatccattattacgtcaaaccaaagcatggaaaaacggtcgtgtcatttttgtcgatgccgatgcgtggtacaccacggctgcaagcccaacctcactcaaaatagtgatggaagatgtgaaaaagggctatcaataa

SEQ ID NO: 41895 - DNA, 2301 bp, Acinetobacter baumannii
atgaacaacgttagctataaccgtaattttaaaactgggaatgatcaaagaattaatcaccgttcttttgtattaaatggtgttgcatctgcacaaatggcccttcgattaggctatgcattaggcaccgtatttgttctatgtgcatcaaacacctatgctactgttattgataattcaacaaaaactctagaacaacaacaggctgctcaaacaaatgtagcagctttaccagcaattaccgtaaaagctgaacaagacgatacttatgcaggtggacaagtttcgtcgaaaagctcagttggctttttaggtaataaaaccgctatggaaaccccgtttaataccattgcgtatacagaaaaatatattgcagatcagcaagcgaaagatatcaccgatgtgattgcaaaaacggatccatctattttttcaactggcgcttacggcgtaattgcagaaagttatgctattcgtggatttagatcaagttctgtggctgctggccgcgatacttctatgggcggattatatggtattgctcctttataccgcgcttcaccggaaatgtttgaacgtattgacgtgttaaaaggcccttcagcaatgttaaacggaatgcctccaggttcaactttagggggaacagttaacttggttccgaaacgtgcaggagatgatcccttaactcggtttacaacgacgtatatgtcggattcacaattcggaggccatctggatattgggcgccgttttggtgaaaacaaagagtttggtgtgcggttcaatagtgtatatcgagatggtgaaggaccgattaaagagcaggaaaaaaccactcatctattttcacttggtttagattggagaggcgacaatgcacgactttcagccgatttatatactagccgtgaccatgctgacggtataaatcgtggtttaaccattttaccgggtgtcaatttacccaaagcgccaaatccagatactttattgaacccgacgtggacggtctataacacgcgtgatacgggaggtatgatccgaggcgagtatgacttaaatgataagtggatggcgtatgcaacggcaggtatgagtaaaacagaatataacactttaggtgctgctaaaactgaaatacaaaacgaagcgggagatataaagtttaatattgcacatttaggtttcaaatatgaacgtaaatctgctgaagtgggtttacgtggtaaatttgatacaggtgctgtcaaacatgcactggcattaaatgcaacacattaccgcgaaacggatgacgaagctggtattagacaaggatttcctgagggagatcgtgtaactaatatttataatccgaattggggcagtaaaccgaatcgcgttcctattgcccctatttttagtaataaagaaaatttaacaagtgttggattagccgatacgatgtcggttcttcaagatcaagtccaattaaccttaggactgcgttatcaaaatattgtcaccgaaagtttaaatgggcagggcgtccgaaatattaacggccgttatgataaaaacgctattacacctgcagctgcaattttggtaaaagcaaatgatcatgtttcattatatgcaaactatattgaaggattaagctcagggggaaccgtacctaccggacaaaactacgaaaatgaggggcaaatattttctccttttaaaactaaacagatggaaaccggaattaaaattgacagcggtaacttcaccaatacgtttagtgtatttcagatcaaatctagaaattcgtatgtaattaaaagtaccgatgaaaaaatcaaatctatttatggcgctgatggagaacaacgtaatcgcggagttgaatggggcttttatggttcacctgttgacagtattcgtgtaatgggaggattaacttatattgatcctaaaattacaaaaaccagaattgcaagtgagttaggaaatgttgttgccggtgttccaaaagtacaagcgaagcttggtattgaaggtgatgtgtcgtatatcccgggcttaactttgactgccaatgcgacagctgcgtctaaacaatatatttataatgataattcaacctcagtgcctggacgtgaagtgtacggaattggcgcacgttataatacgaaaatagctcaatttcctgtcactattcgcgggaatattgataacctcaccaataagtcatattggtcaatgcctcaatttacaagtttaatgcttggtgcaccacgtacttatttattatctgccacaattgatttttaa

SEQ ID NO: 41896 - DNA, 1311 bp, Acinetobacter baumannii
atgaaaaaaatagatattaccggaattggtattgggccattcaacttaggtttagctgctcttttgtctcatcatcccgaaatcaaaagcgtatttttagaacgtaaaccagaatttcgatggcatgaagggttgctattgcaaggtacgacattacaagttcctttctttgccgacttggttactatggccaatccttgccatcccttaggctatattaattatttacatcaacatgatcgcttacatcagttttattattacgacagttttttaattccacgccgtgaatatgaccattattgccgttgggcttcaaaacaattaccggattgtcgatttggagaaaacgtaagccatgtggaatatgacgccaagctggataaatttattatagaaagtgaatcagcctcgggcgaaaaacaaaaatatataagccaaaatctggcgattggtattggaactaaacctcgaattcctaaatggctggaaacatgcaaacaccctttggtaaaacattcagcggagtttgcaaaaattcaggaacaactcaagcaatgtaaacaggtcacggttattggctcgggccagagtgcagcagaatgtgtacttgctttatttaattcacttacaccagaacaagtaaaagcaggtgcatctattcgttggatcacacgttctgccggctttcacccaatggaatattctaaacttggacaagagtgctttacccctgcatatatgcaatatttccaaagcctgcctagagataaacgccgcgatattgctgctagtcagggcctgatctataaagggattagcttctcaaccattggcgatatatatgatgtgctttatgagcgttcagtggctggtgaaaaatccggtttaagcctatacacaagctgtgaggttgagtcggttaaagaacttgaatcgggttctctgcgtttaacttgtttgcatacccaactcgatcaacgttgcgaattagaaactgatgcccttgtcgcagctacaggctatgttcatgattggcctgaatggttccaaaatatgaagggttctattttagctgttgatgataaaaatgattgtattgttcaagaagactttacggctttacgttgtgatcagggacaaggtcgaattttcattcaaaatgccgagatttttcagcaaggcgttggttctcctgacttagggattggagcaactcgaaactcagtcattattaatcaattactggggcgtaatgcatatcgaattcctaaacagtcttctttccagcattatggtttaccaaaataa

SEQ ID NO: 41897 - DNA, 2943 bp, Acinetobacter baumannii
atgcaactggtaatcattttcatttgtttgtatgatgctgaaacaagattaatttgtcaaccgagttatcgttcaatgtgtgaattaacttcgatgcaagcggcctgctggtttggtcgctctggcaacgcaactttaggtggggttgctgcccatctctatgcagaatttgacggtcaatttattgatctacaaaaattacatttagcacttcaacgactttataaagaacaccctattttgagattaagtttgagtgccgatggcatcgcaaacatcatggctgagaaggctcaacagatattagaagtcgatgatttttcaaagcttagcgatcatgaaattgagcaaatgctcatgcaaaaacgggagcaatggacccatcaaaaacttgatttaagtcagggccagactgcaagattttctgtaagtgttcttaaaaataatatttttcgttttcatgtagatacggacatgattgctatagatccatccagcttcttgaatttaatggaagatctttctttgttttatgaagacccagaaatatcattctcccgtccgcctaatttttttgactggtatcaaaaagtacggacggaccctgacctaaaaaaattaagccaacgagaccgcttatggtggaaagaacgtctgcctcagattagccctgctccatctctacctttcattcatcaagaattcaaaacagcaaaaagtgatcgtttaagtacttggctatcgccaaaagaacgaacagcattacaacaacttgctagagaacaacgcattactgtgaccaatctgatattaggtctatttgcctatacgcttggtcatacaaccaaagatcacagcttccgattaaatattcctactttttggcgtgagccggttttaaaaaatgtcgaaggcactattggtgattttgctaatctagtcatccttgatgtcgatatgaaaggaataactaccttagccgcattctgcaaacaaatagcaaatcaaatgcttgagttattagagcattcacattattcgggtgtgaatgttctacgtgacctgtcccgttatcatggtagtgcacagattgctcccgtggtatttacagccgcgctcgacttagaaaatgataatttactttccgaacgtgtccgccgtgtttttggctcaatgaattgggtcatttcacaagggccgcaagttgcacttgatgcacaagttgctcatgtagatgacggtattttagttaattgggacatccgtttagatgctctccccaaagaatggatcacgaatttatttgaatctttcattcatttacttaaaaatcttgccgcacatcctgagcaactgaatacacaaattataagcccagcacaaaatacctcgtcagatcgtacgtctcaaaaaccattaaatgcattacagcaagcctacctattaggccgaactcaagcccttcctttaggtggtgttgccatgcaagagtttaggcagtatcacggcaaaatggatattgttttattaagacaacgattggcagaaatggtacggcggcatgacagcttacgaacctatattgataaaaataggttaatacaatatgtaagcgatcaagtgagtgtcaatttaaaagaaatagacctaactacatgggaacctgaacgtgcttctcaccacatccagtcctataaaaatagttatacgcatgagctatttgatttaaatcagtcgccttggaatatcaccgtctttttattaaaaaataatctactaacgatttttgtccgctttgatgcattaattttagatggccgatctatagcttcacttatgttagagctattcgatggacaacaacatgatatccaaacgcaaatagaagaaaatgaagttgaaaatagcctgtctgttcatcacgcagatatggcttactgggaaagaaaattttctaaattatcggctattcctgcgcttccgtggaaaacacccttacagcatttaccgacttcacgttaccaacgtaacagtctggttatagaaaaagatcaatttaaacagttgtctaaaattggcgcaaaacattcactgtttaaaaactcagtcatcatggcgattattttggaagtgctatctcattggaacactgacaaatctctatgtgttgctgttcctacacttcccctctatgccggaccattttccaatagttctacgtttattgctgttgagtggaaagcttcagatcaatttgctgaacaagcaaaccgtttgcaaactgaagttttagagggtttacagtatctttcattttcaggcgttgatctcgctcgactattatttgaaaaagttggcactgctccagtattaccgattgtaattacaaatggtttgtcatggccggtattatctgaatctcatcctattcagcaactagatggccttactcaaacacctcaagttgcaattgatattcgctttagcacaagaaatgacggcgctttgattttcgatattgattatgcccaagaagcatttccacccaacatgattgacgatttcttggatgcactgcaattagcaatcaagcaaattattggttcagaaatattcagttttgatctcagcaattttttcagtgagcttcaaaataaacgactatattttaaaaataatgagtccgatcattcatctataccaattgaaaataatgctaaacagcaaaatcaactactcgacatttacttagaagtgataggccacccgccaaatatggaagtggacaactcaactcattttactcatctcgggctacgtccacatcatttaaaggtcgtttcaaaacgtattaatgaaacatatgcgattcagctctcacctgttcaacttattcaatgtcgcaatattgctgatgtagagaaactactaacaccacattaa

SEQ ID NO: 41898 - DNA, 1629 bp, Acinetobacter baumannii
atgaaaaaacagttgattgagtttgttcgctggtctccagaaagagcgcaacactatcgaaataaaggttattggattgaccaacctttgacgcgcattttaacggtaggggttcaatcgcatccgcattcgccggcaattatttgtggtgagcgtcagttgagttatatcgagctggaccagctatcaacaaatttagcttctcgactagctgaaaaaggcttgggcaagggtgatacagctttagtacagcttcccaatgttgcagagttttatattgtcttttttgccttgcttaaggcaggcgtggttgtgctcaatgcgctatatagtcatcgacaatatgaactaaatgcctttattaaacagattcaacctaagcttttaattggttcacgtcagcatgaagtctttagcaataatcaatttattgactcacttcatgaagtaaatttaagtcctgaaattattttgatgctcaatcatcaagctaccgatttcggtctattagactggattgaaacaccagcagagacctttgtcgatttttcatctacacctgctgatgaagttgctttctttcagttgtcaggtggaagtacgggaacaccaaaacttattccaagaacgcataatgactacgactatagtgtgcgggccagtgccgagatttgcggtttaaactcgaatactcggttattgtgtgctctgccagctccgcataactttatgttgagttcacccggtgcattaggtgttttacatgcaggtggatgtgttgtgatggcaccaaatcctgaaccgctcaattgtttttctattattcaaagacatcaagtcaatatggcatctttagtgccgagtgctgtcattatgtggctagaaaaagccgcgcaatataaagatcaaattcagtctttaaagttgcttcaagtaggtggagcaagtttccctgaatctttagctcgtcaagttcctgaagtcctcaattgtaaattacaacaagtatttggaatggctgaaggcttggtcaattacaccagactcgatgactccgatgagcaaatatttacgacacaagggtgtcctatcagttctgatgatgaaatcaaaattgtggatgaacagtataaagaggttccagaaggtgaaatagggatgcttgcgactcggggaccttataccttctgtggttattaccaaagccctgaacataattcacaggtctttgatgaggacaactattactattcgggcgatctcgtgcagcgtacccctgatggtaatttacgtgtagtaggaagaattaaagaccagattaaccgtggtggtgaaaagattgcttcggaagaaatagaaaaacttattcttttacatccggaagttatacacgcagctttggtcgcaattgttgatgaacaatttggtgaaaagagttgtgcctttattgtttctcgtaatcctgaacttaaagctgttgtgctcagacgccatctcatggagttaggtattgcacaatacaaacttccagaccagatcaaattaatcgaaagtttgccactgaccgcagtcggtaaggtggacaaaaaacaacttcgcagcattttaaatacatttacaacatcttaa

SEQ ID NO: 41899 - DNA, 870 bp, Acinetobacter baumannii
atggctatttcaaaaatttctacttatctcatgcccgaaagagagagttatccaaataataaaacagactggcaattagatccttctcgagctgttttattaattcatgatatgcagcgttactttttaaatttttacgatgctgaaagtgaattaattaaaacggttgttaatcatttagttcaactaagaagttgggcacatcagaacaatgttcctgttgtctatacagcacagccttatgagcaaccagcggcagatcgcgcattactgaatgcgatgtggggaccgggtttgccagcctcaacaatcgatcagcaaaaaattattgatcaactttctcctgctgaacatgacattatcttaacgaaatggcgttatagcgcgtttaaacgttcggatttgcttgaaagaatgcaaaactggaatcgtgatcagctcattattggcggtgtctatgcccatatcgggtgtatggttacggcaattgaagcctttatgagtgacatacaaccctttttggttggcgatgcagttgccgatttttcagaagaagaacaccgcttagctttgaaatatgtatcttcacgttgcggtcaggtcgtggataccgaatctgtagtggggcaggtggcaacaggcattacacgaccttggctagagcaaaaggtccagcagcttattgaagaagatgaattagatccagaagaaaatctgattctttatggattggactcattacgaattatgcagttttcttcggaactcaaagcgcagggaatcaatattagttttgaagaattaggacgcacacccactttatcaaattggtggtcattggttgatgcacggcaaaggattgcagggtag

SEQ ID NO: 41900 - DNA, 1152 bp, Acinetobacter baumannii
atgattttatcgcctgctgatcaagagagaattgagacattctggaattactgtttaaaacatcaatacttcaatattggatatcctgaatctgcagattttgattattccgctttattccgttttttcaaattctctattaataattgtggtgattggaaagactatagtaattacgcattgaattcttttgattttgaaaaagatgtgatggcgtattttgctgaaatttttcaaattccttttgaagaaagctggggatacgtaaccaatggtggcacagaaggtaatatgtttggctgctatctggcgcgtgagctatttcctgattccacattatattactcaaaagatacgcattattcggttggaaaaatcgccaaattattgcagatgaaatcttgtgtgatcgaatcattagataatggtgaaatcgactatgatgatttaatccataaaataaaaaccaataaagaaagtcaccccattatttttgcaaatattggtacgaccatgaccggcgcaattgatgatattgaaatgattcaagagcgcttagcgcaaatcggaatcatgcgccgagattattatattcatgctgacgctgccttgagtggcatgattttaccttttgtcgatcatcctcaagcgttttcctttgctcatggcatcgactcgatttgtgtgtctggccataaaatgattggctcaccgattccgtgtggcattgttgtggccaaacgccaaaatgtagagcgtatatcggtagatgttgactatatctctacacgtgatcaaaccattagcggttctcgcaatggccatacggtcttgttgatgtgggcggctatacgtagccaaaccaatttacaaagacgacatagaattcaacattgtctaaaaatggcccagtatgcggttgatcgctttcaggcagtgggcattcctgcttggcggaatccgaattcaatcactgtggtatttccgtgtccttctgagcacatctggaaaaagcattatctggcaacttccggaaatatggctcatttaattactacggcacatcaccgagatacacgtcagattgatagcttaattgacgacgttatttttgatttacaaggtgcctctaaacgtacagttggcttttag

SEQ ID NO: 41901 - DNA, 156 bp, Acinetobacter baumannii
atgcaattaaagtttttaaaaaaatactttttatatgattttcttattcatgcttttttaaagccgaaaatgacaattcttgctggtcaattgaagcgagattttattttaagtaccgctttttctatgaatataaagagagataagcatgtctga

SEQ ID NO: 41902 - DNA, 1611 bp, Acinetobacter baumannii
atgtctgatttaaagttatctcatctgatgacagactcttccttggcacctgcactcaagccagcatttcctaaattatttgcaggaacacttgctgccgtattttctggtttagccattttaactgctctgtggggcatgattcagttgattggttatttatcttcttattgggtgatcttttcagcggttttttggatagtcggggcggctctggcagcactggcttcatggttagtgcatgatgcagaggcgggattttcggcacgattacgtcgtcaaattgctcatcatttaattcggttacctaacacaaccctatcaaaacagggtgaccaaaacctaaaacgactggtttcagacgatatcgcaactttacatcatatggtggcgcatttaccgtcggaaattgcaatttttgctgtaatccctttagtttctattgttttattaattgctttggttggtccgatggccctttgggtattattacctggggcaattgcttcactctattatttaattattgttccccatgtatcaaaacgggatggcgctgcgcgtatgcaggtcatgttagatattattggttctgctgatgattatgcgcgcggcattcgtgataatcgaatatatggacaacaatcaggcgctttaacagcctatactcaatcagcacaaaatttcactcaaaatatggtgtcttgggtgagtaaagtcgcaacactcgctgctgttgccactgccttactacaagctgttgcaacctttgccatagcctatctcgtagcttatcaatacgacagcatgaccttggctgcaacacttttctttagcttggccatcgtgacaccttcgctacgtttagggcatggtcttgattatgtcgctgctgggcgggctgcagctactcgtttatctgctttcttaaaagagccagtactctcatcgggcaatctacaacagattgaggaagatgtaacacttgaaatagttaatgcaagctttgcaattgaaaatcaaaaagtatttgatcgattaagttattcatttccaaaaaattcaatgactgcaattacagggccgagtggagttggcaaaacaaccttactgcgagcacttgctggattagccgtattgcaagaaggtgtcgttcaattagcaaaaacagatattttgcaattacatgaaaaactaaggcatgaaaaggttttgtttattccacaaggtggagatgtattaccgaccacagtaagagaaaacttgtccttatctgccattaatgtaagtgatgaacaacttgagcaggcactactcaaggcacaactcaaagtagatttaaatgcagatgcaactttactttcaggcggtgaaaaacagcgtataggaatagcgcgtgcgtttttatcctcagctcctattattttattagatgagccaacgagtgcactcgaccagaccaatgcgacaagaataatattggaattaagccacttagctaaaaaccagaataaaaccatcgtcatggtcactcatgatcttgccttagctgctcatgccgacaacaggttagtgcttaaaggcccaactgactcagggaaatctttatga

SEQ ID NO: 41903 - DNA, 1596 bp, Acinetobacter baumannii
atgaatactgctgctaaattaaataaagatcagattttttcgatgcttcctcgtgcggccaaacaaaaattaattattgttggtattggatggatcattgttgcagcaattgaagcaatcgcatataccgtattggcatttgcaattgtcaatcaatggtcaccaagctgggttctcatcagtgcaattgcagcaatattagtgacagttatagtcactcgtgctggcttccttactggtgtgcgtttagcaggggacctatttgctgagttaggcaaatctttagctcgtgccaagctttcttggtttaccaatgaacagcgtgctcagattaagacaattgctggacagggaattcctgggtttatgagtatccctgctcatcaattgcaaacctttttacatgcgccttttatgcctttatttctaacaataggaataggcctgcttgctggagcaggcgtagcatttgtcgctttaggcttacttttactctctttatttgctcaattcctagcacaacgtgcactcatgcatattgataaaaaacgtaatactgccgatttagctgcttcacaagcaacgttggaattggttgatcatgttgagttattacgcacagccgcgggaccagaacatgcggttcaaaggctggaacatcgttgggaagagcaagaagagacattagtacggatcaaccgtgctgctgcatttgcaagttttattgcaaccttggcaagtgttttaccgattgctgggatggcaacttatctggtacttgctggtgtcaatcatgctgctttggtgttggcattactcatcttaattggacgtgcagcagcgccgttaggtgaacttgctactgcagggttgcatatcaatgatttatttgctgcactgcgcaactttaatcagatcacccatccacctgagttgcctgagccattacaccctcaaattcctactggccatcatatttcggtacaaggcattagctatgcgccagcacttgaaaatatatctctcgatatcgcattggggagcagagtatgggttaccggaccaagcggtagtggtaagagtactttacttgaattgcttacacggtttgatgatccacaaagaggaaaaattacccttggtggcatagctcttgatcaaatgaaatatgaagatttggtttcgaatatcgcttatgtcacacaagaacctattttgttcacaggaacactggctgaaaatatccgtttaggaaaacctgatgcaactgatgatgaaatagaaaaggctgcaagagatgcagcattaggggcaatgattgaccgtagttcagaaggaattaatcaatcggtgggtaaacaaggcaccgcattgtccggtggtgaacgtcagcgggtcgcaattgcccgagcattactcaaaaatgcgccgattttaatacttgatgaagcaacctctgccttggatgaagagactgagcaggaaattgttacaacgatacgtgctctttcttctacggttatttttgtcacgcatcgtgattcagctatttggcaaccgactcaaactatcaatttagcttcaatttctgtttaa

SEQ ID NO: 41904 - DNA, 735 bp, Acinetobacter baumannii
gtgaataaacatcaatataatatgttctgtttaccgcctgcggggagtagcgcgagtatttatcatccatggaaaaagcggatctctgacaatattcgtattattcctattgaatattcgggtcatggtataaaaataaatgaaccattaattgatgatcctgatctattggctatgcaaattgccaatgaaatacaagcttactcagacacgccgtttattttatttggacatagtgtaggaggtggcttgatttggaaagtactcaattatttgaatgaaaaacctattattgatcagttgagattaattgttataagtagccgacctgagcatcactatattcaacatatgcggtacaagcatgagctaactgatgaaaaaattattgatgaattaaagcgatacaataattttcctgacgaaattttaaataatcaggatgcactcatattctttctcaaaatcattcgtaatgatttctatcttagtgatcaattacttagcgagaagattcacaagactgaggttccgatcgttgcattttatggcaaacaagatcctgatattcctaacaaaagaatgatggacgcatggcaacaacacacagaaaattggttaggaagtattgagtttgaaggggaccatttctactttctcaatcccgagactcgagtaaagatgcttgaaaatattgctgccatcgttgaaacattgactgtgaatattgaataa

SEQ ID NO: 41905 - DNA, 756 bp, Acinetobacter baumannii
atgaatacgaagaagcagttaagtagaggggctaattcatgtctggatgaaataaatattcaatatgaaaagctaacagctttcgggctagatatacataaagtccagctcagccaaatcaaagaaatacctcagcttgatcatatctatcaggagctgaatatatttcttccaccgaatataaaaagctcacgcttcattcgtcaattagagttcttgacggggcgcttagcagcaaaatatgcattacaacgcttcaatttacaagactctattgtccatcaaggtaaacagggagagcccctatggcccgaaggagtgatgggtgggattagtcatgttggatcaaaaaaatcatgtcatgccatcgcatatgttagaaataacacgcttaaagaaaaaatatttggaatcgatatagagtctcaaaaacatcatattttttttcaaaagaaagatgaattttatgatgtttttctccataaaaatgagcaagaagaaattgaaaagctactaaaagatcaagcatatttatatttgataatattctccgctaaagaaagtatcattaaggcattttatttaaaatataagcaaattattgattttaagaatataaaatttaaagcgctagatggcacgtttctttatttttaccttagacaagaaagtttaatcgagataactctagaggttaaagtttatttttttcatacaaataacgagataattacaatttcttgcattgaaaactaa

SEQ ID NO: 41906 - DNA, 1170 bp, Acinetobacter baumannii
atgatgcagactcaaatatcagtagagcaaaatttagatcatatcggtcaaaagaaattttcatgtttttctacgaagaattattatctcgaggtcaatgaattcgttaaaacgttaaatacacctgctgcaaataccgcactattgaatgaagagattgcaaaatgctttgaagaaattaaaaagcaaggccatcaaaatccagttttaattggtgctataccttttgatattacaaagaaaagtagcttaaatttttatgctgatcataaaaaaataacacaagcatcttctacgattaattcattaaaaaatcgtaataacattgagataattaataaatcattactcattcaacgacaaaaatttgaaggtacagtacagctagctttagatgcttttgagaaaaagaaggtagaaaaagttgttctctctcaggctgttgaatatgagtttaaccgtcatcaagagcctgaaaatttattggctgctttattaaaacaaaatccaaatgcttataattttgtgattccagtcgagcataataattatattctaggtgcaagtcctgaactgcttttatcaaaacaagaccgtattgtaaccagtaatcctttggccggttctcgtcctaaatctcaaatttctgaaaaaaatttcgtcagccaacaagaattaaatcattctgagaaagatcaacatgaacatcgaattgtggttgaaaatattattaaaaatttagctactcattgtgtagagcttaaggtttctgaatttccagatattttagaaacatcaacgatgttgcatttatcatcagaattccaaggtgtgcttaagcaacaggctcccgatgccttaaaccttgcattagaattacatccaacaccagcagtttgtggctcaccaactcatgttgctaagcagtttattttagatcatgaaggttatgaccgacattattacacggggttagtcggctggatggatgcggagggtaatggtgagtgggtagtgacgattcgatgtggtctacttagtgaaaataaaatgcgcttatatgctggtgcggggattgttgaagggtcagatgctgaagctgaatggttagaaacagaagctaaaatgcaaaccatgttaaatattctaaatacaaaaattgctgtgtaa

SEQ ID NO: 41907 - DNA, 1248 bp, Acinetobacter baumannii
atgtttgttcgctcattactcgctatgagtttaagttgtattattgctaatgttgctttggctgcgtcaacaactgagcaaccactgaaccctaataaagtatctgctcctgtagaagatccgattgatccgcttgctgtagatgctgcttcaactgtaaaagctcaagctcagactcagattactgcacaagaacaaaatgacctaaatagagcgtcaacaacattacaaaatttacaaaaagctgaagaccaaaatgctgattcaggtattgccgcttcaacaccagtagctacggctaaaaccacaacagctactgcgtctacagcaacttctgcgccagcggttacatggacattagatagcttaaacaacgctgagtggtatgaaaatattggcaaaggccaacttccagtttatgcacgcgctcacgttatgcttaataatgcacatgcttcaccgggtgctatcgatggcatgagcggtaaaaatacattaaaagcaattgcatctttccagcaaatgaatggtttatcgcctactggcgagttaactaaagagacttgggatgcgcttgttgctaaacaaaacaaaccagcgtttattgaatacaccattaccgatgccgatttaaaaggtccttacgcacaatcaattccttctgactatgctttacaagcaaaaatgaaaggtttgtactacacacgcgtaagtgaaatgttgggcgagaagtttcatattgatgaagccttcttaaagaaaattaacccgactgcgacattcaaaaaagttggtgaaaaaatcattgttccaaatgtacgcaatgacttaccagaagatattcacttgattattgcgcataaaggtgcgaaacagttgtatctgtttaacagccgtaatcaaatgattgcgtcatttcctgcaacaattggcagtactgatacgccatctccgaccggtacttacaaggtagtaggtgtagcacgtaacccttggtacagctactctccttctaactttgtacaaggcaataacttaaaaccgctttcattaccaccaggtccaaatgctcctgtaggtaatatctggattggtttaagcaaaaaatcatttggtattcacggtacaccaaacccgtctttaatttctaaaactgcatcacacggttgtatccgtttaacgaactgggatgctaacgatttaggtaataaagtacgttcaggcgtaactgttaaattcttagaataa

SEQ ID NO: 41908 - DNA, 1074 bp, Acinetobacter baumannii
atgacgacacttaaaaatgatcgtttcttacgtgctttattacgtgagcctgtagataccactccaatatggatgatgcgccaagcaggacgttatttgcctgaatatcgggaaacacgctcaaaagctggtgactttctatctttatgcaaaaatacagaatttgcttgtgaagtgactttacagcctttgcgtcgctacgatttagacgcagcaattttattttcagatattttaactattccagacgcattaggacttggactgtattttgaaactggagaaggtccgaagtttcataaaacggtacgtactgaacaagatgtggctaacttacctaagcttaatgctaaagccgatcttgattatgtcatgaacgcagtaagtacgattcgttctgctttaggtggtcaagttccactgattggtttttcgggtagtccttggacactggcgacttatatggttgaaggcggctcaagtaaagagttccgttttaccaagcaaatgatgtatgcgcagccggaagttttgcatgcgttgctcgaccatttagcagattcagtcattgactacttaaatgcgcaaattgatgcaggcgctcaggcaattcaaatctttgatagttggggtggggctttagcacaccgtgaatatgtagagttctctcttaactatatgaagaagattatcgcgggcttacaacgtgagaaagatggccgccgtattcctgttattgtgttcacgaaaggtggcggtcaatggttagagccaatgattaccactggtgcagatgcattaggactggactggactactccgcttaataccgctcgaaatgttgtctctgggcgtgtagcgttacaagggaatcttgaccctgctgttttatatggctcggctgcttccattgaaaaagctgtaaaggcaatgttagacgatgcttacgcaaacggtgagaagaccggttacgttgctaacttaggtcatggtattacccaatgggtagatccggcacagccaaaaatctttgtagatacggtacatgagtatagtgctaaatatctaggatag

SEQ ID NO: 41909 - DNA, 795 bp, Acinetobacter baumannii
gtgcaatatctgtttttacctcttcaatttattggcaaggctgtttcggcagccttgtttggtatttttcttctcatcgcttttgccctaactgcgtcgatgggaagccatgaatatatgggtttttatcgttatgattatttactcatatatgcactgattattcagatatgtctcttatatttaaaacttgaatcatgggcagaagccaaagttattgctttatttcatgtcatggcgatggtcatggaaatattcttgactcatcctgcgattgcttcatggcaatatccgcagcctgcggtatttaaaattttgactgtgcctttatttgcaggctttatgtactctgccgtaggtagtttttttgcacgctcaatacgtctactacaagtttcatttgaaaaacttccgagttttggaagtatgcttttactggcatttttctcatatataaactttatgagtaaattttttgtacccgatattcgctatattttatttgccatcagtgtttttattttttggaaaacaaaactttatttccaattaaatgagcataaatttaaaatcccgatgttgcctgtattgtttacactcgcttttctgatctggattgctgaaaatattagtaccttttataaaatttggctttatccaagtcaggtagaggcttggcatatggtagggtggggtaaacttggatcatggtatttattattgcttttgagtttagtgttagtacttaaaatattaggtcatcgagataatcaaggtaactggaatttaagataa

SEQ ID NO: 41910 - DNA, 471 bp, Acinetobacter baumannii
atgttaaaaaaattagctttagctgcgttattagcggctggttcaagtgttgcaatggctgacaacgacgtcggttgtggtgtgggtacacaagtatgggctggcaaaaaaggagtagcgcctaaaattcttgctgcaacaacaaacggtatttttactaaccaattattaggtattactttcggtactttaggttgccgtcaaggtggaacagttacagcacaagttgttactttcacaaatgaaaatgcagaagctttagcgcgtgacatggctgtaggccaaggtgaaagcctgaatgtacttgctgagttaatgcaaatcaaaccacaagataaagaccgtttcttcaaagtttcaaaagcaaactttggtgaaatctattcaacaaacaaccaaaacacacttcaagtattagcatcattacaaaacgtaatggctaaagacgaagttttaaaagcttacgtataa

SEQ ID NO: 41911 - DNA, 1884 bp, Acinetobacter baumannii
atgaaatcggttgttttaatttttgcctctttggcagtgaatattgcgtattcagcagaaacgaatccatctattcaaaactactggtccattgcagaacaaaaaaaattagaccaagacattacatggcaaaggctcatgtatgccaataaaaaccagaaaagtgaggtcacttatgctggctattttctatcagaaaatggaaacaataatttaaaagaagaactgaaagcagacatctcggcattatttatacctacgcaagataaccagtcaattcgctgtaaatttccggcacgcagtcagtggcttatacagcaattaggcattcaagaaaatgagttgccgcaagtaaaatgttcagaatttgaaaactggattgggcagattaagccttacaaagcgaccctaatttacgccacagattttatgggcaatccaagctcaatgtttggccataccttattgcgtctagatcctaaagatcaacagcagttaaacctcgtttcttatgccgtaaactatgcagcaactgtggcaggcaatgacaactggtcatatgcatggaaaggcttaacagggcaatatccgggtgaatactcacttatgccttactatcgtaaggtaaaagaatatggtgattttgagagccgtgatttgtgggaatatgaattaaatctatctccagaagaaacgcgttttttggtgagtcatatttgggaaatgcaacatgtaagcttcccttattactttgtgagtgataattgtgcatatcggttattaggcttagtcgatttagttaaacctgaatctcatctacaagaaaagtttaactacgcttctattccaatggaaaccattaaagcgatgcaacaacaaggactcaccaaagctcctgtgtatcgacctgctttagaaactcaattattggcccaagctcaccagcatggcgcatctttagctaaagttgctcatcagttagcaatgaagccaattaaagagtcttcggaaacacttaaatcatttagcccatcagatcaggccaaaattcttgagatggcttatgatgatttatatctacagtttattggtcgcaaagttgaagaaagctttgctcagccacagcttagacagcttttagcactacgaagtcagattgatttagacaaacagcgccaagaacctaaaagaccatcaacccagccgactcaaggccataatgcacgtaatgtctcgctaaaactgggcgaggtgcaaggtgacaagttcatcgagataggtcataggcaggcttatcatgacttaatagatccacagggcggataccgtgctggtactcaattattatttttaaatggtaatgcacagtggcgagatgatcatttaaaactagaacgtcttgatctgttagaagtgaactcttataacccgattcaaccatttaaaactcccctgacttggggatttaacttaggctggcgtcaggaagcggttcatgacggtgtttatagtgatgaaaagcagcatggcgtcgcgagttttaatgctcaggttggttacagtcttgcagattatgagcgtaaacatatttgctatgggcaggtacaaacttatgtccaagcgggttcaaatttagataaaggctggcgtgtgggagtagggccgacattaggatgtatgaatcagtggcttgaaaaatttaacactgtggtacaagttgagctgccatattgggaagaccaaaaccaatggaacttacggctaaatacacagtggcaatatgccattaatagtaataatgccattcgctttaattgggattatgaaaaacaaaatcatctggactggatgaaatcaagcttaggatatgtttggttcttttaa

SEQ ID NO: 41912 - DNA, 1152 bp, Acinetobacter baumannii
atgcgatttaaaaaaatttcttgtctacttttatccccgctttttatttttagtacctcaatttatgcgggcaatacaccaaaagaccaagaaattaaaaaactggtagatcaaaactttaaaccgttattagaaaaatatgatgtgccaggtatggctgtgggtgttattcaaaataataaaaagtatgaaatgtattatggtcttcaatctgttcaagataaaaaagccgtaaatagcagtactatttttgagctaggttctgtcagtaaattatttaccgcgacagcaggtggatatgcaaaaaataaaggaaaaatctcttttgacgatacgcctggtaaatattggaaagtgctaaaaaatacaccgattgaccaagttaacttacttcaactcgcgacgtatacaagtggtaaccttgccttgcagtttccagatgaagtacaaacagaccaacaagttttaacttttttcaaagactggaaacctaaaaacccaatcggtgaatacagacaatattcaaatccaagtattggcctatttggaaaggttgtagctttgtctatgaataaacctttcgaccaagtcttagaaaaaacaatttttccggcccttggcttaaaacatagctatgtaaatgtacctaagacccaaatgcaaaactatgcttttggctataaccaagaaaatcagccgattcgagttaaccccggtccactcgatgccccagcatatggcgtcaaatcaacactacccgacatgttgagttttattcatgccaaccttaacccacagaaatatccggctgatattcaaagggcaattaatgaaacacatcaagggttctatcaagtaaataccatgtatcaagcgcttggttgggaagagttttcttatccggcaacgttacaaactttattagacagtaattcagaacagattgtgatgaaacctaataaagtgactgctatttcaaaagaaccttcagttaagatgtaccataaaactggctcaactaacggtttcggaacgtatgtggtctttattcctaaagaaaatattggcttagtcatgttaaccaataaacgtattccaaatgaagagcgcattaaggcagcttatgctgtgctgaatgcaataaagaaataa

SEQ ID NO: 41913 - DNA, 555 bp, Acinetobacter baumannii
atgtcaatgcagcaatcgtacgcaaatattctgactgccgtcggtgaagaccttaatcgtcccggccttaaagatacgcctgtgcgtgcggctaaagctttttcatatttaacttctggctatagtaaaactttagaagaagtcaccaataatgctgttttcccatcagataaccatgaaatggtattggtgaagaatattgaattttattcgctctgcgaacatcatcttctcccattctatggccgtgttcatgttgcctatttaccagaaggcaaagttcttggcttatctaaatttgcacgtattaccgagatgtttgctcgtcgtttgcaaattcaggaaaacctgactcagcaaatcgctgaagctgttgcagaagtcactggtgctcgcggtgtcgctgtagtcatcgattcagcacatatgtgtatgatgatgcgtggtgtaggtaaacaagaatctaccacccgtacagtttcatttgtcggagattttaaaaccgataaagaagtgcgccgtgaattcttaagtgcagtaccagaaagctactaa

SEQ ID NO: 41914 - DNA, 1500 bp, Acinetobacter baumannii
atgttagaacgtccaatcaccttctttttccgtggtggtcagcagcaagtagaaaatatagtacccacaatgacggttttacaatttctgcgagaatatactcaaactggtaagactaggcagactggtacaaaagagggatgtgctgagggcgattgtggtgcatgtacagtagtgattggtgagttggtcaatgacaacctgcaattacgtagtgtgaatgcgtgtattcagtttttaccaactttagatggtaaggccctatttacagtagaagaccttcatagcttattgccagtaccagatggcacacttcatccggtacaacaggcgatggtcgatatgcatggttcacaatgcggtttttgtacacccggttttatcatgtcgttatggtcaatgtatgaaaatgaacaacagtctccaagcaaagataaaatcagtgattatctttctggaaacttatgtcgctgtacaggctatcgccctattttagatgcagcacaaaaagcttatgactatccacgtgtggtattacaacgccaaaaagtaattgatgtattaaaagagatcaaagcattacctgcattgcatttaaataatcatagtcagcaattttttgcacccaagactttgcaggattttgccgtattacgcttacagttgccgcaagcacgtattgttgcaggtagcacagatgtcggtttgtgggtcacaaagcagggccgtgatttgggcgatatgctttatatcggtcaagttgaagagctgaaaaagattgtagtcacagaccatgctttaacgattggggcaaatgtaagtttgagtgatgcactcattaaaatttcagatttttatcccgactttcaagaattgcagcgccgttttgcttccatgccgattaaaaacgcaggaacgctaggtggaaatattgccaatggttcgcctattggtgattcaatgccagcattaattacgctaggtacacgattgattttgcgtgtaggtgagcagactcgtgaaattgctttggaagacttttatttagactatcaaaaaacagcattacagcttggtgagtttgttgaggcgattgttattccgcttcgtgaagggcagacacgttttaaatttgccagctataaaattgccaaacgatttgagcaagatatttctgcggtatgtgcagctatttcttgtgagttagataatgatgatgtcactcacaatgtaagaattgcttttggtggtatggcagctattcccaaacgtacaaaatatgcagaagccatattagaaggccagcaaattacagcagaattgatcgttcaggcacaagaggcattgtcgcaagactatcagcctttagatgatggacgtgctagctcagcgtatcgtttacacgtcgcgaaaaactgtttacagcggttttatgtagaaaaaattctgtctcaaacactcactcgtgtgaatgacttgattgctatggtggagatctga

SEQ ID NO: 41915 - DNA, 2376 bp, Acinetobacter baumannii
atgaatcaaaccattgacttaaatatttctaaaaaatcagctaaagcaggcgactcgattccacacgaaagtgcacatttacatgtaacggggcaggcaacttatattgatgatttacccgagcttgaaaataccatgcatttggcagttggattttcaaattgtgccaaaggcaaaatcagtaagtttgatttggatgccgtacgtcaggctgaaggtgtttatgcagttttttcagcaaaggatatagaggttgaaaataattggggaccaattgtaaaagatgacccaatttttgccgaagagcaggtcgaattttatggacaagccttatttgtggtcgttgccgagagttatcagcaagcccgtcaggcagttcgcttagcaaaaattgagtatgtgcccgaaactccaattttaacgattcaagatgcaattgaaaaagaatcgtgggtgttgccgcctgttgaatttagccatggtgaagttgagcaagcatttcaaaatgcagcccatcaactttcaggtgctattgagctgggtgggcaagagcatttttatcttgaagggcaaatttcctatgcgattccacaagaaaatcagagcttaaaagtctattgctcgacacaacatccaaccgaaatgcagttactgatttgtcatgcattaggcatgaatatgcatcaggtcagcgtggaaagccgccgtatgggtggtggttttggcggtaaagagtcgcagtcggcgcagtgggcatgcattgcctctttggcagcaaaaaaaacaggccgtccgtgtaaattacgcttagatcgtgatgatgacatgagtgctacaggcaaacgtcatggttttgcttatgagtggtctgtggcttttgatgacactggtattttgcaaggcttaaaggtacaactggcttcaaactgtggtttttcggctgatctttctgggccagtgaatgaacgtgcgatttgccatattggcaatgcctattatctaaatgcagttgagctacgtaacttacgttgtaaaaccaatactgtttccaatacggcatatcgtggttttggtggaccgcaaggtatgtttgtcattgaaaatattattgatgacattgcgcgttatttaggttgtgatccagttgaaattcgtcagcgcaacttctttgccgagcagcccggtggtggacgtgaccgtatgcactatggggcagaagtccgtgataatgttgcgccaaaattggtagccgaactattgcaaagtagtgattacgcgaagcgtagacagactattcatgcctttaatcagaacaatgacatcattaagcgtggtattgcgttaaccccattaatgtttggtatttcatttaacgccgtgcattacaatcaggcaggtgcactggtctatgtgtatatggatggtactgtcgcgattacacatggtggtacagaaatgggacaggggctatataccaaagtacggcaggttgctgcacatgagttgggtttacccatcgatagcgttcgtttaattgcaaccgatacttctcgtgtgccaaatacttcggcaactgcagcatcgagtggcgcagatctaaacggtaaagctgttcaaaatgcctgtattaaaattcgtgagcgtctggcaaaacttgcagccgaaataagtcaaagtgaagctgaccaagtccagtttgaagatagtatggtttcaacagcgaatggtcattcatggacatttcctgacttggttcaacgggcatatatggcacgtgtacaactatgggatagtggtttttataaaacgccagaaattcactatgatcaggtcaaccatttagggcgtccatttttctattatgcctatggtgcagcggttagcgaggtcgcaatagataccttaactggggaaatgaaagtattacgtgctgacattttgcatgacgttgggcagtcaattaaccctgcaattgatattgggcaaattgaaggtgggtttgtgcaagggatgggatggctcacgacagaagagttgtattggcagccgcagggtccacacgcaggccgattatttacccatgcaccttcaacttacaaaatcccgaccagtgtggacattcctcatatttttaatgtcaaactatttaataatcaaaatcaggcagacaccatctatcgctctaaagcggtaggtgaaccgccatttatgttggcattatcggttttctctgcaattcgtcaggcagtacaggcggctattccagaaaatgcaccgctcgtactcaatgctccggcaactcccgaggaaattttacgtgcaattgctattggacggggacaagctttggctgctcgcccacaggctaaaatgtag

SEQ ID NO: 41916 - DNA, 984 bp, Acinetobacter baumannii
atgcaacatttacaatggtggactgattttgtagcgtggcaagccgatgcgttgcctatggtattagtcacagtggtccgtgctgatggttcaacaccacgagaggttggtgcaacgatgttgttgcgatttaatttgcaacagcaatggcagcagtcagatacgatcggtggtgggcatttagagtttcaggcgattgatattgctaaagcaatgttaaaagaatcggaaacttgtgtgaggcgtattgaacgctttaacctcagtgctcggcttgggcagtgttgtggcggagtaatgtggttattgtttgaaaaaatattacccgctgaaattgcgtcggatttatctgggagtttgcaagcatggcgagctggaaagcatatatggcgtaatgcctcatatcaatatgcatccacttggcaaacgatggatatggaacaacaaccaagtttcgagtttcattctggcagcagtgaagaatggcaatttagccagcagattcaaccaaataccatgcaagtgctgatttgtggcgcggggcatgtggctgaagcaattgtccgttgtttattacctattggtgtgagggtgaaatggattgatccgcgtgatgatattttcccatccgatttactggaacaggcgtactgtataacaactgataccttagacgccgagatcgaacattttgaccgttcaggtgcagttttaattttaacgcacgatcatcaactagatctgcaactgtgttttacagccttaaaacctacggcaaaaccatttgcttatgttgggatgattggctcaaaaagtaaaagggccatttttgaaaaacgtatgcaggtgcgaggttatacttcggaaacattacaacgtttggtttgtccgatcgggatagacgggatttcatcgaaacgacctgcaacgattgccgttgcagtagttgctcaattattacaggtatttgatgtaaaaaaatga

SEQ ID NO: 41917 - DNA, 696 bp, Acinetobacter baumannii
atgagtaataaagattcatcgctttctaaagagcaacaaaagttattgaagcaatttaaaaagcaaatctccaatcctcattcaagcaaaatcgcaaatcagcctgagtctaaaaaatctcaggctgagtctgaagaattggaagacacacatctatttaagcaggctgttgcaggcgttaaacccatcaacaatagtaatattgccgatgtaaaaatcccacgtgccaaaaaagttgatgcacaaactctggcgaaacgtgcagctgccgaaggtggtcgtgataccgaacatgccgagctatcagatacacaagctgctttaaatccggtcgcaagccaagcaacgttaagctatcgcattgcgactcttcaacataaggtttttgaagacttaaaagcaggcaagatgcgttggtttgaagctgtagatttacacggctgtaccattgaacaagcacgtgatgcagttttacaaatcatccagatggcaaaagatgaaaatcaaaatgtcattaaaattgtgcatggtaaaggcccagaagcggtcttaaaaacctatgtcaacggatggctacgccaacatcgtgatgttttggcatttgtaagtgcccctgaaaaccaaggtggcacaggtgctgttctcgtactgcttaaacgtgcagaaaaaaatccaaaatttgaacaaaaaaaatga

SEQ ID NO: 41918 - DNA, 807 bp, Acinetobacter baumannii
atgattaatattcaaaataccattttaggtaaaattgttgaccgtaaacatgaggaacttgctgcgcgtttaaaacaacgtaatttgcaagatgtagaagagcttgcaaaagcagcgactccggtgcgtggctttgcaaatgctttacaacataaacgtccgggcgtgattgctgaaattaaaaaagcatctccatcaaaaggaatcattcgcgcagactttaatcctgccgaaattgctcagcaatatgaacaagctggagcagcatgtttatcggtattgaccgatgttgatttctttcagggtgcagatgaaaatattgcgattgcccgtaatcattgtgccctacctgctttacgtaaagactttttggtcgacccatacaatgtagttgaagcacgtgctttgcatgctgactgtattttattaattgttgcttgtttgtctgaccagcaactcgaagaaatgtctaaaactgcgtttgagcatcaacttgatgtattggttgaagttcatgacgaagaagagttggagcgtgccttaaagctttctgagcaatgtttattaggcgtgaataaccgtaatttaaaaacctttgatgtagatttaaatactactattcggttgaaaaaattacttccggcctcacgtttattgatcactgaaagtggtattgcgacaccagatgatgtacgtatgatgcaagagcatgatattcacagtttcttggttggcgaaagttttatgaaacaaccacgtccagatcaagcttttactgccctttttggacaacctcaaacggtttaa

SEQ ID NO: 41919 - DNA, 1056 bp, Acinetobacter baumannii
atgactatgaatatccaacaggcgctcaaccacattaccaagaacattcatttgactcagcctcaaatggaagaaattatgcgcagcatcatgcaaggtgaggcaaccgaagcacaaattggtgctttaatgatgggcctacgcatgaaaggtgaaagcattgacgaaatgacagcagccgcacgtgtcatgcgtgaatttgcgatcaagatcgatgtgagtgatatcaaacatttagtggatatcgtgggaactggcggtgatggacaaaatttatttaatgtctctacagcatctagctttgtgattgctgcagcaggtgcgaccattgcaaaacatggtaatcgtggcgtttcaagtaaatcaggttcatcagacctacttgagcaagcaggtattcatcttgatttagatatgcaacaaaccgaacgctgcatccgtgaaatgggtgtgggtttcttgtttgctccaaaccatcataaagccatgaaatacgctgctggtccacgtcgtgaacttggtattcgtagtatttttaatttacttggcccactgaccaaccctgctggtgtaaagcgctttgtcattggtgtgttttcagatgaactttgtcgcccgattgccgaagtgatgaaacaacttggtgccgaacatgtcatggttgtccattcaaaagatggtcttgatgaaatcagtcttgcagctccgacaactattgctgagcttaaagacggtgaaattacggaatggacccttaatcctgaagatgtcggaattgagtcacaaacattaaatggtttggttgtcgcagatgcaacggcgagtctaaagctcattaaagatgctttaagcaaaaataaatctgatattggtgaaaaagctgcaaacatgattgcgcttaatgcaggcgcaggtatttatgtagcgggcattaccaagacttatgctcaggctgttgcattcgctcaagatattatttacggcgggcaagcattagagaaaatgagtgttttagctgaatttactaaaacattaaaacaatctcaggcagattaa

SEQ ID NO: 41920 - DNA, 2733 bp, Acinetobacter baumannii
atgtatttaaataacttgaaatatgtaggggctttaaaaaataagcgctcatttatttttgtatttgttgcactgtttcatccattagaaagttatgcgcaagaagccttagagcaaccacaaaaccaagcgaaaccagataaagtagtccgtgttgcagtaacaggctcaaggatttcaaaagcacaaaaagatggcccgactagtgtgaccgtcattaccgcagccgatattgaaaaacaagggtttagtaatgcatttgatgcactcaataacctgacgcaaaacacgggttttgtgcaaggtgccgattatggtaatacttttacacctgcggctaatgccattagtttgcgaggtctaggacccaatcatactttgactttaattaatggacatcgggttgcagactatcctgtaccgtacgatggttctgtcaatttcgtgaacttagccaatattcccactgccattattgaccgtattgaaatattaaacggtggcgcttctgcaatttatggttcagatgcaattgcaggtgtggtgaacattattctgaaaaagaaaacagatggcacacaatttaatattaaggcaggtggaactaaagaaggtggtgaaaacttacgtttacaactaagtggtagtaaaactttagacaagcttagtcttgtttatgggattgaactcagcggccgtgaaccgatatgggcagccgatcgggattttatgaagagccgaactcgtttgggagaaaaaccagacacgattgtgggccgtaaaaatgctgatacgggtaaatacctttctattggtggatgtcaggcctttaatggtttatttaacggatcagtcaataatattggacaagcaggggcggacaattgtgccagtggtttggcacggccaacttattggacagttcagacccaaaaccgcagccaaaatggttatctcggtttagattatgagttaaatgataaaactcaattatttgccgattttttgattggggcaaaccaaattgaaaataatacccgtagtccgatatggacttctttagctgcaacgagtggttatttcctaaatcaagattcgggaaattatgaaatttggaatcgccgttttgcacctgaagaattaggtggggtagaacgaataaataaaaaatggaaagaactttcttctaacttaaattttggaattcgaggcgatattggagagacgagctggagttatgaagcagcctataatggttccatttatactagtcagctaaaccgccaaggcttattacgttcgaatgtggatgaatatttcttaggtcagcaacttggtacagatgcagatggtattcctatttattcacctcacttagatcgtttaagtcgaccactaacagccagtgaatttgaaagtatttcgggcacaacaaaagaaaaagataaatcgtgggcacaaagtttaaccttaagtgcgaatggtgatgtgtttaagttacctgcgggaactgccaaacttgcagcagtggctgaaattgggcgtcaaggcttttcgattaagccagatcaggcagttgaaaatggtgagttttataatacgagttctagtggagaatatagtggtactcgtacacgccaagcacttggtacagaattattcttacctttagcaaagcccttaaatttaaccttgtccggacgttatgaccgttatgctttgtcagataacagtattgataagctaactttcggttcaggccttgagtttaggccacattcgactttattggtgcgcggtaactacgcgaccagctttcgtgcaccagatatgaactatctgtttttaaataaacaaaaaggttatttcgaaaagaccaccgattatttacgttgtagccaaacgggacaatctttagataaatgtacctttaaagattatgcacctggggcgaactacactttaaccggaaacaaagagcttaaacctgaagagggtaaatcttatggtgcaggttttgtttggtcgccaaccaataagtttgacattagcgtcgattactgggatatcaaaattgataatcttgtgagaaatttgagtgatgacaaaattctacgtttagaagcagattgtcgtttaggcaaccaagatattaactctgcggcctgtattgatgctttggcacgtgtagagcgtaaccctgcaaatgcagttgtcgatccaaatgtaattaagaatattaatatcgttccgattaatgcagcatcagaccatacccgcgggattgatttcactagcagatggcgctggaaaacagacagctttggtaactttctctggacgatcaattatagccgtgtactagaacatgaatatcaacaatcaaaagatcacgagaaagatgactatttaaaagatttaagtagtctggattggcgtgaccgttttaataccagtctcagctggagctttggtgattgggcatcaacagtattagttaatcgttatggcaaaattccaaacggcgaccaaactgcttacctaagtccaacgtatttggtgaactggagtggtacttatcaaatctctccaaaagcttctgcttcaatcattattaataacctgtttgacaaagtgaaacgagatgacacgggcggttggccgtattatccagtaggatcatattcaccattcggccgtcaaggttggttggagtttaactataaattctaa

SEQ ID NO: 41921 - DNA, 2700 bp, Acinetobacter baumannii
atgctggtcaagccttcatttaaaaaaagattgctacttacaacattattatctttatcggcaacacagatttttgcatcgaataacagtgaacaaatcccgattggtaaattacccgagtgggtcgtacccgaatcttatgatttagattttaagattgatcccgcacaaaaaggctataccggtaaaactactattcatttaaagctggctcaagccacagatcacatctggattcatggtaagtctttaacggttaaagatgtgaatattacatcggcacagggtactaaaaccaaggcaaaatatgagcaagcctctgaaatagatggggtgagtaaaattaaatttgccaaaaccttgcccgcaggacagtatcaactcgttctagattttaatgcagcgtatgaccagcagctcgatggtatttataaaattgagtttgagggaaaaccttatgtgatgacgcaaatggaagcaattagtgcacgccagtcatttccgtcatttgatgaaccacgttttaaaacgccgtttaatattcgtttgacgattccaagcaaatattcaggttttgccaatacccaacaaacatctgagcaaatagagaagtcagggtggaaaacactcagttttgcacaaaccaaaccactaccaacatatttacttgcattggctgtcgggccgtggcaattacaaaaaggacctgatattggagcaacttcatggcgtaagcagccgatccagttacgtggtattgcacccgatgctaaagctgaaaaaatgcagcaagccttatctgaaacgccagccattttaaaaactttagaagattattttgcctttggctatccatttgacaagctagatttactggcagcaccagactttgctgctggggcaatggaaaacccagggctaattacttttagggactatctaatgttgttagataaggactcaccagtatcttttgtacagaattcatttaatgtcaatgcacatgagcttgcacatcaatggttcggtgatgtcgtcacgatgccgtggtgggatgatttgtggctaaatgaatcctttgccacatggatgcaaagtaaaatcacccaaaaattacatcccgaatttaatgctgatctagaacgtattgcagacaccgcagatgcgatgaaaagtgacagcttagtgagtgtgcgccgtattcgccagcctattttaagcaatgccgatattcaaacggcttttgatggcatcacttatcaaaaaggtgcagctgttttaaatatgtttgaaagctatttaggcgaagaaaaattcaaacaaggagtgcgtaattatattaataagcaccaatatggtaatgcgacagctaatgatttaattagcgctttagcagagcagtctggacaaggtgagcgctttactagagcgatgaaaagtttccttgatcaaccgggtatacctttactcaatacttcactacagcaagaaggcaataaagtctttttaaatgtgaagcaaagccgttatttacctgtgggctcaaaaggtgatgcaagaagcctctggggtgtaccattatgtgtacgttatgaagttccaaatgcaggtagtaaagtgcaatgtgaattggtagaccaagcagaagccaaaattgaactcaaaggtgccagccttggcagttggtatataccaaatgcagatgcggcgggatactaccaatttagtttgccacagaaagaatttactcgtctgactgctgctacagaaaagctttctaatactgaacagttggcctacgcctacgcgatttcagctgcttttaaccacggtgatattaatttattggctgtcgtagatgctgcgaagaaatttgccaattcgaatagccgacaaattagtacagcgctgttttcccagttaagtaccattcatcgtcatgtattgaaaacagaagctgaacgtgaacatttcagaaaagtcttagctaatttatatttacctaaattaaatcagttgggttatgtcagcaaaacaggtgaatcagctgaagacagtttatggcgtagtgagttggttagatttcttgctttagatattcaagttcctgaagttcgtacccaactgttaaaacagtcagatgctctatttgctcaaaagcagcttaattttgcgcaagtaacacctgaattattgccaaccattttagctgtacgtgtacaagaaaaaggtcaaccagcttttgatcgattgtctggagagttacaacgcgtgactcaaccgacacaacgtcttgcgattcttacagccctaggttcagcaaatcaagaagcaacgcgccaacaagcccgtcagttgattttaaacccgcgtgttaaagttggtgaagttcgtaccgtggtcaactcaatcaataattatggagatgaacaaggtggcttatggtcttggtttaaggtaaatcatgacgctgtgtttgatcgtttaggtaaatcttcagctgggcgtttccctgcaatgtttagtggggcagcatgtacccaacaacaagcggcacagttaaatgacttttttgcaccacgaactaaagaattggttggggtagaaagaggattgaaacagactaaagagcgtattcaactctgcgaatcgctggtagcaaaacaagatgggtcaattgtgcaacagttaaagttgtaa

SEQ ID NO: 41922 - DNA, 585 bp, Acinetobacter baumannii
atgcttctaatgatcgacaattacgactcttttacctacaacatcgttcaatactttggcgagttgaatcaggaagtaaaagtagttcgcaatgatcaagtcacattagaggatattgaacgatggcaaccaaaatatcttgtgattggtcctggcccttgctctccaagcgaggcaggtatttcaattcctgcaattaatcattttgctggaaaaattcctttacttggggtgtgtttaggccatcaaagtattgggcaagcttttggcggaaaaattgtaagagccaaaacggtgatgcacggacgtttatctgatatgtaccatagcaataaaggtattttcagtaatcttcctagcccattctcggcaactcgttatcattcattagtgattgatcaggaaacgctacctgactgtcttgaagtaacatgctggaccaatgaagcagatggctcaatggaagaaattatgggcgttaaacataagacacttcctgttgaaggcgtacaattccatcctgaatccattttgagtcaacatggccatcaaatctttaaaaactttttagacatctacgcataa

SEQ ID NO: 41923 - DNA, 1803 bp, Acinetobacter baumannii
atgaacgacttaactgttccagaaaaactagcgaaacttcgtgaactcatgaccaatcaaagtattgatactttggttgttatgagtgcagacccccatatgtctgaatatttaccagactattggaaagcaaggcagtggttaagcggttttagtggctctgttggcactttagttgtgacccaaaactttgcaggactctgggctgatgggcgctattgggtacaagccgaacaacaactcgctggaactggctttcaattacaaaaactgaccagtgatgaatcttctacacatctcgcatggattgagaaaaatctaccggctggttcggttatttcagtaaatgggcaaacactttcaatccagcaatttaaagcgttggaaaatacagcaaagcaacgtggctttaagcttgaaacacagcaagatttaattggttcgatctggtctaatcgtccagaacttcctttagagcagattcatttaatgcctgaagggttaaatgccctatctcgtaaagaaaaaattcaggcaatacgcgaaacgttaaaaactaaggcgattgaaggacatttcatttcatctttagatgatattgcatgggtcttaaatgcacgtggacaagatgtagaatataaccctgtatttctttcgcatttatatatcagtgctcaacaggctgttttattcattgatagtaacaaagttgatttaactacccaacaggcttttaaagctgatggcattgagattcgtgactacgaagatacagctaagtttttatcgaatatttctgatgcctcagtacttttagatccagccaaagtctcgatttttcatgaacaagccatcgcaaaagatattcaggttgtctacgacatcaacccaagtacactttttaaatcgcgtaaacatgaaagcgaaattgctcatatccgtcatgccatggtgaaagatggtgttgccctttgccatttcttcaactggttagaaaaagcacttcatcaaggtcaacgcatttcagaactcaccattgatgaaaagattacagccttccgtgctcaacaagagggttttataggcccaagcttttcaacaattgccggctttaatgccaatggtgctctacctcactaccgtgcaactgaagagcactattcatttatcgaaggcgatggtttattgctgattgattctggtggacaatacgtagacggcactaccgacattacccgtgttgttcctgtaggaacaccaacagagcaacaaaaacgtgactatactctggttttaaaatgtcatattgctttggcaaaaacgatttatccagaaggtttagccgctcctctactcgattcaatttgtcgccatactttatggcaacatggtttagattatcgccacggcacaggtcacggcgtaggctttgcgcttaacgtacatgaagggccgcaagtgctttcttattacgcacctattcatgcctatagtaagttgcgtgaaggtatgattctttccaacgagccgggcttataccatgagggacaatacggtattcgtattgaaaatctggttgcaaacaaacttcactcagggtttgagaaaacctacggcgatttcttagagtttgaaacgctcacactttgcccgattcatttagattgtattgtcgttgacatgctaacagatgaagagaaagactggttaaatggttatcatcaaactgttcaagaaagactagctgaacacttgtctggtgatgttttagattggttgatttataacacgcgtaagatttaa

SEQ ID NO: 41924 - DNA, 1542 bp, Acinetobacter baumannii
atgaaatatgactttgaacaatcggataaagcttttttcggccatcctaaaccattacaaacgctattttttacagagctttgggaaagattttcttattatggaatccggcccttactcgttctttatatgattgcgatggtcaatgacggcggtctagcacttgatcgaccaactgccgcagcgattgttggattatttgcaggctccatgtatttaatgaccgtttttggggggtgggttgctgataactggttaggccaagcacgtgctgtctggtacggttcaattattattgccttaggtcacttatcaattgcccttacatctgtatttgatcaatctttcttttacttaggtttagtactgattgttttaggtaccggattatttaaaacatgtatttccgtgatcgtgggaacactatataaagccaatgatgcaagacgtgatgcaggtttttccattttctatatgggaattaacatggggtcatttattgccccacttattacagggcttttggcgaaagaccatggctggcatttaggctttggtattggtggcattgggatgttaattgctttattaattttccgttttatggcaatgcctcagctccaaacatttaatgagctacgccaagaagctaatagctgtagcaaacctgttgtagaaaataaaaatgcgcctaaaattgtatttagctttttattcgcagttgcagtcgttattgcgctaaccttcctcggtatcattcacatcaatcccgtcgctgtcgcaacctatttaaccgtaggtattagcattgggattattgcttattttgcatatttactacttttcctgaatttagagcaacatgaaaaatttaaaataattatttgcttcgttttattagcagcctctgccctattttggtcagctttcgaacaaaaacccacgacttttactttatttgcgcaagattatacggaccgtattgttttcggatttgaaatcccaactgtatggtttgaatcaatcaatgctctttttattattatctttgctcccgttgcagcttggctatgggcgaagctaggtaaagcgaataaagatccaagctatatcagcaaatttattattgcgttgttattcgcagcaggtggctttttacttatgtctctagccagtcattttgctattcatggcggagtagtttcaccattttggttagtcggtactttatttcttcttaccataggtgaactttgcttaagcccaattggcttatcaaccatgaccaaacttgcacctgatgtcatacgtagtcaaattatgggtttatggtttacaggtacagctcttggcaaccttatggcaggtttaattggcgggcaagtctcggcagatggtattaatcatttacctagcctatttatgcgctgtgtattagccttggttattggcgcaatcgtgttatttttattaaagaaaccaatgaataaattaatggacaaaagtaccaacaaagttcaacctgatttggaaacgatatga

SEQ ID NO: 41925 - DNA, 1410 bp, Acinetobacter baumannii
atggcgaacaaggtccttcaactcatacaagaaagtggcgcaaaatgggtcgattttcgctttactgatactaagggtaaagaacagcacgtaacttacccagctgattctattgatgaagatacttttgaagacggtaaaatgttcgatggttcttcaatcgctggttggaaaggtattgaagcatctgacatgattttacgtccggatgcagaaactggtttcatcgacccgttctttgctgagccaacagtagttgtgacttgtgacgttattgaaccttcaactggtcaaggttatgaacgtgacccacgttcgattgctcgccgtgcagaagaatacttaaaatctacaggtatcggtgatactgcattctttggtccagagccagaattctttgtatttgacgaagtgaaatgggacatcgatatgtctggcgctcgtcatacattaatcgctgaagaagctgcttggtctactggtaaagattacgagtctggtaactcaggtcaccgtccacgtgttaaaggtggttacttcccagttcctccagttgactctgcacaagatatgcgtgcagaaatgtgtgcaaaaattgaagacatcatgggcccaggtcgtgtagaagtacaccaccacgaagttgcttcttgccaattagaaattggtgtgagcttcaatacccttgttcgtaaagctgacgaagttcaacagttcaaatatgctgtttggaacgttgcacatcaatatgcaaaaacagctacgtttatgcctaaaccaatggtaggtgataacggttctggtatgcatgttcacatgtctatctctaaagatggtaagaacttgtttgctggtgatgaatatgcaggcctttcagaaatggcgttgtacttcatcggtggtatcatcaagcacgctcgtgcattgaatgcaatcacaaacccatctacaaactcatacaagcgtttggttcctcacttcgaagcaccaattatgcttgcttactcagcacgtaaccgttctgcgtctatccgtattccttacgtttctaaccctaaaggtaagcgtatcgaagctcgtttcccagacccaatgatgaacccgtacttaggtttcgctgcgttgttaatggctggtatcgacggtatccaaaacaagatccatccgggcgaagctgctgacaagaacttgtatgatcttcctccagaagaagaagcaaaaatcccaacagttgctcatagcttagatatggctcttgaagcacttcaagcagatcacgaattcttgttaaaaggcggcgtgttcactaaagaaatgcttgatgcatacatcgaacttaaaactgaagatgtacgtcgtcttaacacgactactcacccagttgaattcgatatgtactacagcctgtaa

SEQ ID NO: 41926 - DNA, 510 bp, Acinetobacter baumannii
atgcgtaaacgacaaccagtacttaagcaggaaaagactttaaatcctgaattgaaaacatggttgtatgcgtctggttctctgacacaacaactcactgagctgggtggggggaagttcagcgtaaagcctttcaaagaacatttccagcgtttaacttttgccgacagtcaatggatgaacatgccccatactcacacttcttgggtaagggaaacctatttatatggcagtgatgtagagccttgggtgaaagcaaaaagtatttttccaattcaaagtttacaaaaaaaagcccgtatatttcagcatattggttctaagccgataggtctttttttatttcaaagaacaacaccactttgtgatcgccgggttattcgtttacctgaaggctggacgcgacaaagttgctatacttggcatggatgtaaatttattgttcaagaaacattcttaccggcttttgaagcttttttatatcagcagcacgacaaggaattactatga

SEQ ID NO: 41927 - DNA, 879 bp, Acinetobacter baumannii
atgacgactgcaacaggtacaacatggcgtcagcgtttagaagcttattattatctatgccgatttgataagccaattggtactgaactggtgttttggccaaccatgtgggcactttgggttgcatcaaaaggaataccgaatttaggtattttattcgtcatgattttaggcgtcatttttatgcgcgctgctggatgtgccattaatgactttgctgatcgtaaagtagatggtcatgtagagcgtacaaaaacacgtccgttagcaacaggggttattcgagccagagaagcagtatatgtattcttgggtcttgttttagcaagtgcatgtttattgttctttttacccatagaaactttctactggtcatttggagcattatttttagctttcatttatccatttatgaaacgctataccaacttaccgcaagtttttttaggagcagcattttcatggtcaattccaatggcctttactgcggtaggtaaaactccggatctgacttgctggttgctctattttggtaatttggcttggacagtggcttatgacactcaatatgcaattacagaccgtgaatatgatttaaagattggtgtgaaatctaccgctattctttttggtcgatatgacatccagattattgcgcttttacaagcaataagtcttgttttgattggtacagcgctatatttagaaaatatcttatttccttgggccattattgctttagttgtagtggcattcgattttgtatatcaaacaattaaaaccaaagaccgcaaccctcaggtatgtttttgggcattccgtcacaatcgttgggttggattaatcatttttctaggaatatttttaaatttcatatag

SEQ ID NO: 41928 - DNA, 1458 bp, Acinetobacter baumannii
atgaaacggtcaaaaattgctttagctataacattatcaatttcagcactatttcttacagcgtgtaatgacgatgatgataattacactgggatagataccaataaaacttatgtctctgaaagtaattatgctattgataaagttgataatgcttcatcaattaaagtcatgacttataacatgacaaatgttcaaggaaaaaccgcaactgctacagcaatggtactgtttccaaaagcaatacaaccgaaagatggttatcgggtagtggtatgggaacatggaactgttggggtgggtgatggttgcgcaccaagtaaaaatgcaattaatccgagatttaaaatccttgctgagactttgttggcagccggttatgtcattattgcgccagattatgaggggctaggcacgccaggcgtacatccgtacttaaacttatctagtgaagcaaaatctgcattagccgcagtcaaagcagccaaagagcattatgggactcagttaaaaggcgattggatgtcaattggtcagtctcaaggtggacatgcctcattgggtactgctgagtttgctaatacggatataagttataagggtgctgtagctggagcacctgcttcaagcttaggaacaatcattcaaatttatattgatcctgaaatgaatcaagacagtaattttgcagttagtaagctagatcaggcaattagagcgcgtagacagattgatgcagcgattgctgcaggtcaaatgtctccaaatgatccactagcacttgctgtacctacaattgataaaactgcagaaggatatgccgaattattagcatatgcagcattcgctagtgcggggattaaagcacagcaaccagactatgacttgaaggcaatttttacatcgggagcagctgacattgcagaattggcctatggtcgtactggcgatgatggtgcttgtttaagttatcctgcgcctgatactgcaaacggcctgcaagagaaatttaaagcgggaatattagctttcttggctgaccctacacatcaaattactcagtacggtatcgatctgaataaatttaagacagatcaagttgttcaaaactttttgaaagcgactcaacctgcgacgaatgctacagccgagaaagttattaaaacaccagtatttattattcagggcgaaaaagatcaagcggtattgcctgtggtgacgcaaggcttatttgccaatatgaaagcgaatgctttgaagtttttccctcaagcaggctacgataaaggctatcaattaacaattgtaccaaatgcaactcatactcaagcaatcgtatgtcaaaatgccaatgctgtagatttcattcaagctaaaatgtcagcggatacaggtattgtgttaactgatgcgcagaaagatgctagccaaagccctcactgtacaggtaaattttaa

SEQ ID NO: 41929 - DNA, 201 bp, Acinetobacter baumannii
atgagccagcaatctgttgaaaaaaaatctgttccttggttattaatgggattaggtttacttattccttttctaattattggaatactttttttggctgcaaaaagtgatgctcagaataagaaacaatatgaacagcagcgtttagaaatggaaaaaagaatagctgagaaagaagctgccaattctgacaagaaataa

SEQ ID NO: 41930 - DNA, 444 bp, Acinetobacter baumannii
atgttcgaatcgagtcacttattttttattattttaggttgcttaagcacctgtatttttcttcttgtttgtttacgcccttatttatttccaaaacaaaagttctttgcccgtcctgttattactaattttgaaactcaaatgtttatacgcttaaaacagagtttcccaagttatcatgttctagcacaagtggcttttagcgcattaataaccagtaatgattataagattcgtagtcagttcaaccgtaaagtcactgattttgttttgcttgatgaaaacatggaagtaatagccattattgagctagatgaccctactcaccttgagaaagtagaagaagatcgtcttcgtgatcaaatgctcatagaggcaggttatatcgtaagacgctatacaagtatcccgagtgtacgccagctacaaaaagatatttattaa

SEQ ID NO: 41931 - DNA, 354 bp, Acinetobacter baumannii
atggttaacactgcccaagcacaaagtacttcaactccttatcgagtaacacttaccgatccttcgggtcatcaatggtttgcagatgaacccaccgataaaggtggacgagatacagctccaaatccggttcagcttctattatcggctttaggagcttgcactacaattacactagagatgtatgcaaatcacaaaggcatcaaaattgagcatgtacaagttgatttagcattaaatccaaatggtgatccagaagcaggtcaaaataatattgagcgtaaaattactctaaaaggtgaatttactgaggatcagcataaaagattattaaaagttgcgggactgttctaa

SEQ ID NO: 41932 - DNA, 591 bp, Acinetobacter baumannii
atgcatcttaaaacattaagcttcggtttagcagtagcattggcaagtacagttacattagctgcaccagtggactataaaattgatccaacacacacagctacagttttctcgtggaatcacttcggcttttcaactccaagtgctaacttctcggacatccaaggtgtaattaaagttgataatgctaaaccagcaaactcatctgtaaatgtgaccattcctttaagcagtgtgaatacaaacgtacctgctttagataaagagttccaagaagaagcttggtttaatgcggctaaatacccaaatattactttcaaaagtacgaaagtagaaacgaaagacaaaaagcatttcaaaattactggtgatttgactgttaaaggtattactaagccagttgtacttgatgctgtcttaaataagcaaggcgagcacccaatggcaaaagttccagcgattggttttaacgcgacaacttcgttcaagcgctctgactttggtttaggtaactatgtgccgaatgtaggtgataagatcactgtaaacattacaactgaagcaactgcggctagtgcagctaaaaaataa

SEQ ID NO: 41933 - DNA, 591 bp, Acinetobacter baumannii
atgcaacaaacaaataaacgctaccctttaggggctcatcttattgtaaaacatctcggctatagccatcatggtatctatgctgggagaggtcgagttattcattattcgggcctcgcacatttcatcaaaaaacggcccattgaaatcacttccctagatgccttttctcatggcaaaaaaattcatgtacgttcttatgatgcaccacgctacagaggaaaagttgtagtacgacgtatgcgttcacgtatgcatgaaaaccattatcatttgattattaataattgtgagcatttatgcagttgggcgattactggtatcgaaagtagtactcaagttgagcgaatgatgcatcgtttaaccaccattggttacgtgagctcaatcatgagctatatgaatggcatgatgctaaccgtagcaaccacctgctttgctcttgttctttatataaaaaagaaattacgtgatcaggcaaaaatgaatattccgacttatcaatttctaagagaaaaagccgaaaaaagaaatatagacccaacctcacctttagtctttatagaaccagataaaaaagaaactatctaa

SEQ ID NO: 41934 - DNA, 747 bp, Acinetobacter baumannii
atgaaaatactagtactgtgtatcgtgaacttcataatctttacacaatccgctttagcactagagtatcgacagattagaaatactactgatgatcagtttgaggtaattgaaatttctaatttagaacaattacgcttatttttgaaaaatccgcaaactgatcaatattataaaagtttcgacaatattcaatatcaacttaaagcatgtgaacagcttacttttgcgatgaatggaggcatgttccattccggtttttctccagtaggactatatattgaaaacggacgagagaaccaacctttaaatgaagataaaggctggggaaacttctttttgcagcctaatggagttttagcatggaatgacaaacaagccgttatattgacaactgaacaatataaagcaaaagtttttcaacccgattatgctacgcagtccggccctatgttagtgattaatggcaaaataaatcccttattcctagcaaatagtgattcaaagaaaatacgtaatggggtaggtataaaaaataataagttgtattttgtgatatctaaaaatagagtgaatttctatagttttgctcagttcttccaaaaaaatcttgaagtcgagcaagctctataccttgacggttctatctctagtttatatttgcacaagaataatcgaaatgataaaagatttaatatgggacctattattggatgggtggatcaggcagattgtagacccaagtaa

SEQ ID NO: 41935 - DNA, 231 bp, Acinetobacter baumannii
atgagtttttggcaaaagctgttcttggcagatcaacagcataacgagcataaaaaccaaactgcttgtgttgaaaatgactgctcatgtaaaactaatgaacaacttctaagtgcgcttgcgcaagcgactgatgaagatgtcattaagggaatcaagaaagttcttatttcccgtggttatagccgaaaagagttaaatgaactcactcaaaaaccatctattcattaa

SEQ ID NO: 41936 - DNA, 1086 bp, Acinetobacter baumannii
atgacttcttcttatcgtcaacaacttcaagctaaaattgatcgcattactactcaattttctgaatttacaccgcctacattagaagtgtttgaatcgcctgaacaacatttccgtatgcgtgctgaatttcgtatctggcatacagaaaatgatatgttttatgccatgtttgaacgtaatgacgatggcaagcaaaaaaccgttgtacgcatagatgagtttcctattgcagataaaagcattaatgacttaatgccacttcttttagcagaacttaaggccaactctttactttctcagcgtttatttgaagttaactttctcgcaactttaagcggagaaatgttagttaccttgatttatcaccgtaagcttaatcaggaatgggaacaagcagctaaagcacttgctgaaaaattaaatattaaaattatgggccgtagccgcggccagaaaattgttattggcgatgactttgttgtagaagaatttgaacttttaaaccgttcatttaaatacaaacaaatcgaaagtagctttacgcagcctaatgcacaagtttgcaaaaaaatgctgcaatgggcatgtgatgcagctgaaggatcaaaaaaacacctattagaactttattgtggtaatggtaatttcacgcttccactctctttaaaatttgaaagagtacttgcgactgaacttgcaaaatcatcagtttatgcggcgcagtggaatatcgaacagaaccagattgataatattcaagtagctcgcctatcggctgaagagttcactcaagcctatcaaggtgaacgtgaattccgccgtctacaagaagcagatattgatattcaaagctacgacttcggtacggtattcgttgatcctccacgcgcaggaattgacgatgaaactttaaaactattgcagggctttgaacgtattatctacatttcatgcaaccccgacactttatatgaaaatttaaaaacgctcactcaaactcatcgcgttactaagtttgctttatttgatcagttcccttatacgcatcatgtagagtctggtgtcttacttgagaagatttaa

SEQ ID NO: 41937 - DNA, 474 bp, Acinetobacter baumannii
atgattttttttgaaccagaacaataccaaaaaagatgcactcagctttttaacttataccgaaaacaaatttccgctctgctaccatctgcccaaattgagcatataggttcatctgcaatacctaatgcattctcaaaaggtgatttagacatttatattgaggttctacccgatcaatttgagtttgcaatagaacagttaaaaacgcttaattttatagaaaagcaaaatacattaagaacaaatgagctttgcatgctcgagtcactcaacaacgatgatgttgcctttcaagttgtagtaaccggttcaatattcacatttttcttaacctttagagataagcttatagcttctccaacattagttaatgaatataatcaattaaagttacagtccacccacttagatcatgaccaatatagagcagtaaaatctaattttattgaacgcgttttaagtcactcctag

SEQ ID NO: 41938 - DNA, 3753 bp, Acinetobacter baumannii
atgaacacaatggatacttttcatcaaatggataaatctcaccaaggctatatcaccgaattcaacgataaaagtgagtttgaacaacgcattaatacagcttggcgacgtgccgaacctgaagctgtagaagagctattacaagctgctgcggtatctgatgatttagatcataaaatttatgaccttgcatttaaccttgcccataatttacgtgaacgtaagacctcttcaggtaaagcaggtattgttcaagggttattacaagaattctctctttcttcacaagaaggcgtggctttgatgtgtcttgctgaagctttgcttcgtattccagacacagcaacacgtgatttgctcattcgcgataaaatcaatcaaggtaactggaaagaacatgttggccaaagcagcttaatgtttgtgaatgctgctgcatggggtctcatgttaactggtaagcttatggaaacaccaaagcaaaccagtctttcaagtgtacttactggccttttagcacgtagtggccgtggcattattcgtaaagcagttgacgttgcaatgcgtatgatgggtgaacagtttgtgactggtgaaaccatcgaagaagctgtcgaccacgcaaaagtacttgaggataaaggtttccgctattcttatgacatgttaggtgaagctgccttaaccgaccatgatgctgaacgttactttaatgattacacacaagccattcatgcaattggtaaagcgtctaatggtaaaggcgtatatgatggccctggtatctcaattaagctttcagctttacatccacgttaccaacgtgcgcaaattgaacgtgttcacaaagaactctacggcaaagtatttgaactcgctcgtttagctaaacagtacaatattggtttaaatatcgatgcagaagaatcagagcgtttagaaatttctcttgagttacttgagcgtctttgttttgagccagaacttgcgaactggaaaggcattggtttcgtaattcaagcttaccaaaaacgctgcttctttgtggttgattatattattgaccttgctaagcgtagccaaaagcgtctgatgatccgtcttgtaaaaggcgcatattgggatagcgaaattaagaaagcacaaatcgaaggtatggatgactaccctgtctttacacgtaaagttcatactgacttgtcttatatcgcttgtgctaaaaaattacttgcagcaccagagtttatttatccacaatttgcgacgcataatgctcaaactttagcaacgatctatcatttagcagatccaagcaaatattacgctggtcaatatgagttccaatgcttacatggtatgggcgagccgctttatgaacaagttgttggtccacgtgaacaaaataaattaggcgtgccatgccgtatttatgctccggttggtaaccacgaaacattgttagcttatttagtccgtcgtttacttgaaaatggcgcgaatacttcatttgttaaccgtattgccgataaaactcttaaagttgaagatcttatccagtctccaatttatgatattcgtaatgcagctaaacttgaaggttcggttggtttaaaacatccatcaattccactacctttagatatgtacggaacgcttcgtaaaaactctaaaggttatgacttagcaaatgacaccccacttgcagctttagatagcacagctcaagaattacgtaatcgtatttggcaaagccatccgttgttggctaatgctgattctttagaacaaggtcattctgttgcaattacaaacccagcacaaaatgatgaaattgttggttatgtacaagaagctgatcttaagcatgtcgaaatcgctcttactgcagctgaacaaacccagtcagaatggtcaaatacgcctaaggatcaacgcgctcaatacttaaaacgcgcagctgacctcatggaaagccgtattcaagagttgatggtattactttgccgtgaaagtggtaaaacttatgccaatgcgattgcagaagttcgtgaggctgtagatttcctacgttactatgcaacccaagttgaaaatcttcctgcaaatacagttattcagcctttaggtactgtactttgtattagcccatggaacttccctcttgcaattttctcaggtcaaattgctgcggcattagtcagtggtaactgtgttattgctaaaccagctgaacaaactccattgatcgcagcccaagcagttcagattttatgggaagctggtattccacatggtgctgtacagctacttcctggccgcggtgaaacagtaggtgctcagctcagccaagatagccgtatcgatggcattatgtttactggctcgactgaagttgcaaaaattttacagaagaccgttgcaaaacgtttatctgaaaatggtcaatctattccactcattgcagagactggcggtcaaaatgcaatgattgttgactcatctgctttaactgaacaagttgtattagatgttgtaagttctgcttttgatagcgcaggtcaacgctgctctgctttacgtattttatgtgtacaagaagacagtgctgcaaccgttattaaaatgcttaaaggtgcaatgcaacagttgatcgtaggtaaccctgcaattttaaaaactgacattggtcctgttattgatgacgaagcaaaacagacgattgaccagcacatccagaaaatgaaatcgaagggttatccggtacatcaattgatgtttggtgcaacaagccaaacagaattagataaaggaacttttgttgtgccaacagcaattgaacttcctaatcttgatgacttacaacgtgaagtttttggtccggttttacacatcattacctataagtatggtgaacttgagcaactcatctcaagaatcaacgctaaaggttatggtttaactatgggtctgcatacccgtattgatgaaaccatccaaaccgtaattcaacatgctgaagtgggtaacctttatatcaaccgtaatattgttggtgctgttgttggcgtacaaccattcggtggtgaaggtttatctggtacaggccctaaagcgggtggccctctttatatgtatcgcttaatgcagcattgttctaacaaagtattagcaactccatttgcggtaaaaaatgagcaaaccgtttttgaaggctttacccgtgaggtttatcaaagcttacaaaactgggcgaaacaacatttaccacaagcaaaccgtgaaattgaaccttttggtgttggaaagttttatgagttacaaggccctactggggaaagtaaccaatatattattttgccgcgccatcgtgttctttcaattgctgatacagaacaagatcaattgcatcagttacttgcaatctttgcagttggcagccaagctgctgtaatgccaaatagtccattattggcaaaacataaacaaacgttgccaaaagatgtacttgatgcgattactaccattaaaaacatcactacagatgattttgatgcagttttacatcacggcaaccgtgaagaaatcttctcattacagcaagaaattgctagccgttctggcgcaattgttggtattactcatgttgaaccaaatgagtcgattccacttgaacgtttggtaattgaacgtgcaattagcgtaaatacagctgcggctggcggtaatgcaagcttaatgacaatgtctgaataa

SEQ ID NO: 41939 - DNA, 489 bp, Acinetobacter baumannii
atgaatggcccattattaagccttgatcgtaccgatttaaaaattttggatattcttcaaacagatgggcgtatttccaacagcagattagctgaactcgtcaatttgtctccaacagcagttatggcacgagtgcagaagctcaccaaagatgaattcatcttaggttatgaagctaaattaaatccggttaagttaaatgcaaattttttggtttttgttgaagtcttactcgataaaaccacacctaatgttttagatgagtttattgacgcagtcgtgcattatccagaaatcgttgaatgccatatggtcagtgggggatttgattttttaattaaattacgcagtggaagtatggaggagtttcgacgtatcgcagggcaagtgctatggcaattacccggtgtaaaagagacccgtagttatcccgtgatgcaagttgtgaaagatagttcaaaaattaaaatcaaaactaaaaataaataa

SEQ ID NO: 41940 - DNA, 1491 bp, Acinetobacter baumannii
atgagttattttgatcccaccctcatcatgtttatggtgtacatcgtagcaatggtacttatcggcttatttgcctaccgtgctacaagcgacttctctgattatattcttggtggtcgtagtttaggcagtttcgttactgcattatccgcaggcgcatcggacatgagtggttggttactcatgggcttaccaggagcgatttatctttctggtttatctgaagcgtggattgcaattggtctaattatcggtgcttggcttaactggttactggttgctggtcgattacgcgttcatactgaaatccaaaataatgcactcactctgccagactattttacaagtcgatttgatgaccagaaaaagatacttcgtattttctctgccgttattatcttggttttcttcgctatttactgtgcttcaggcatggtagctggtgcccgtttatttgaaaatttattcggtatgtcatataccaccgcaatctggttaagtgctattgcaacaatcagttatgtttgtattggtggtttcttagcaattagctggactgatactttccaagcgggcttaatgatttttgccctcttgctcactccaatagtgacttacctcgcaattggtgatacaactcagtttgtgacgcttattgaaactgctcgtccacatgcatttaacatcatttctgatttaagtgtggtggccgttttatcttccatggcttgggggttaggctattttggtcaaccgcatatccttgtacgtttcatggctgccgactctgtaaaatcaattcctgctgctcgccgtatcggtatgacctggatgattttatgtttagtcggtgctgtcggtgccggtttctttggtattgcttacttccagcaacaccctgaacttgcaggtgtggtaagcaaaaaccctgaaactgtatttatggaattgactaaaattttattcaatccatggcttgtcggtatcattctagctgctattttagctgcggttatgagtacattaagctgtcagcttttggtatgttcaagtgcactaactgaagatttgtacaaaggcttcattcgtaaaaatgcatctcaaaaagagcttgtatgggttgggcgtatcatggttcttgcaattgccgttctagcaattgtgcttgcggggaatcctgacagtaaagttcttggtcttgttgcttacgcttgggctggttttggtgctgcatttggaccactcatcatcttgtcattgttctggaaacgtatgactttagaaggtgctttagcaggtatgatcgtaggtgctgttgttgtaatcggttggaaaaaccttttcgcaagcactggggtttacgaaattattccaggctttatctgtgcatttatcagcatcatcgtagtaagcttgatcagcaaagcgccaaactctgatgtgactggtcgctttgagcaagcagataaactctataaagaaagtacataa

SEQ ID NO: 41941 - DNA, 699 bp, Acinetobacter baumannii
atgacaaaacttgtggtattttccggcgccggtatgagtgcagaaagtggaattagtactttccgcgatagtaatggtctctgggaaaattatgatatacaacaagttgccactcccgaagcgtgggaaagaaatccagctttagttcaacgcttttacaacgaacgtcgtaaaaatattttagaagcccagccaaacgaagctcatcaatatattgctaaactacaagactattatgatgtacaagtcattacacaaaatattgatgatttacatgagcgtactggaaaccaaaatgtcttacatctacatggcaatattcgactagcgaaaagttctgggccagatgcacaatatacaactcaattttatgaagttaatggttggaagctcgatttagaacaggacttttgtccagatggttacccgcttcgccctcatgtcgtttggtttggtgaagctgtacctgcttatgaagaagcaattcgtttagtacaaagttctgatatttttattgtaatcggttcgacattaagcgtatatccagttgccgccttggtccatgagattcctcattataccaaagcgtattatatagatccccaagcagatcattctcgtgttccacctcaatataaattattaaatatgacggctacagaaggtatgcacgagttatttaatcaattgacgagttaa

SEQ ID NO: 41942 - DNA, 375 bp, Acinetobacter baumannii
atgaaccatccttcagaattgaagtatgcacgtacacatgagtgggtaaaaattgaaggagaccttgttattacagggattaccgaccatgcacaagatgagcttggagatttggtctatgttgaaactcctgaagtgggtagccaagtaacagctggcgaacaagccggagttgttgaatcagttaaaactgcttctgatattcatgcccctgtctctggtacagtagtagaagttaatactgatcttgaagatgatccggattttgtaaatgaagatccatatggcaaaggctggatttataaaatcaaaccagacaatattgcagatgttgaaaaacttttaacaaatgcagagtatgaagctggtctataa

SEQ ID NO: 41943 - DNA, 1026 bp, Acinetobacter baumannii
atgaaaattacctcagctcgtcaagatcaaggtattccaggagtctatggcttattgctattagatgtagtttcacgttggggatacaacgatgaaacattatttgctccttttcatcttactagtgagcaattggccgatcctgaatatcgtatttcaacacccgtagcaaatgagctggtcaaacatgccttaaatcttaccggtgaaagtacactgggttaccatattggcactcaaatgcgtatttccattcacggatttattggctacgcgataatgacagcaaaagatattacagaagcgattgctctcgctgcccgttttatccaattacgcttaccttttttacaattatatttttctactttcggaccaaaagccacattacaattgcaatgtgatattgagttagaaccacttcgtaccgaaattgttttaggcttaaccattggcatcatgaccatggctaaagctatgacaggtattgaagatttagcaggcgatgttgatttagactttccagaaccagcaggctttgataaatataagagcaaactaagcagtactattcgctttaatcaacctcatttaatttctagttttgataaaaaatatttaggtcttaaattaattaattcagatccaatcgcaagtcaaattgctattaaccaatgcgaggctgaactctctgctttaggtgaacgccgacgtctagccatgcgtgtacgtgatattttaagtaattcggaacaacattacttaagcatagaaagtgtagcagaatatttacatatgtcagatcgtaccttaaagcgacaattggcagccgaaggtacttcattttctactttagtagatgaagttcgatatcgtcatgcgacctctctgctttcgcgtacagattatagtcttgaacaaattgcagatgaacttggttactcggatgtcgcaaatttcagtcgcgcttttaaacgctggagcggtcgtagtccgagcaactggcgcaaagacccctatttataa

SEQ ID NO: 41944 - DNA, 441 bp, Acinetobacter baumannii
atgctttatttagaagatttaaaaattggtgatcgttttatcagtcgtgagtatgaaattacactcgatgaaattaaacaatttgcaagccactatgaccctcaacctttccatacagatgaagagttagccaaagaagatccaatctttaaaggtatcgccgctagcgggtggcatacctcggcaattactatgcgcttatggactgaatgcatgccgattcatggtggactagtaggctcagaatctagtctacgttggccacgccctactcggcctggtgaccgtattcatgttgaagctgaaatttccgccattacgccatccaaaacaaaattggatcgtggtattgtaagctacgttacgcaagccttaaatcagcatggggatgttttacttatttcaacgacaaaaatcgttgtctttaaaaagaatgtttaa

SEQ ID NO: 41945 - DNA, 1848 bp, Acinetobacter baumannii
atgctgaagtggtttgaaaaacttgtagatccttatccaaccaaaggcttggatgagcccttaccaacacgctttttcccatttgtttggcaagctactgaaggtgtgcgtccatatttattgctacttattatatgtacagctggtgcagctagctttgaagccctgctcttttcaaaaattgggcaacttgtagattggcttagtaatagtcagcctgaaagtttcttgagccaacatgcttcaaacatccttattctcattagcgtgttatttgctaatattttatttgttaatattcaatctattataaaacatcaaattttatatagtacttttccaatgcgcttgcgttggcgcttccataaccttttattaaaacaaagcctagactttttccataatgattttgctggtcgactttctgcaaaggtcatgcaaacagctttagctgtccgtgaattctggattattttaggcgacatgttggcttacgtcagcatttactttattaccgtaagtattgttcttggtgcaatctcacccacattacttattccacttatggtttggttagggttatttttattaagcgcatggttctttattccacgtttaagcaaagtatcacaacaacaagccgatgcacgcgctgtaatgactggccgtgtaactgacgcctacactaatattcaaactgtaaaactctttgcgcatgctgggcgtgaaagccaatatgcaaaagcgtcaatgaaagagtttatgaccacagtctatgcgcaaatgcgtctaggcactctttttgaagttagcattaatttactgtctgctgttttatttgttggggtaattggtaccgcagtttggttatggactcaaggtttagcagcgttaggcgtaattgctgctactactgccatgattttaaaacttaatagcatggctgagtttatgatgtggcatatgtcagcattatttgaaaatgttggtaccattcaagatggcatgcaaacacttggtaaaaaaatcaatattcaagacaagccagatgcaaaaccacttgcagtcacacaaggtgagatcgtatttaaagatgtgacctttgcttataacaataaaaatgtcatcgatcactttaatctacacattaaagcaggtgaaaagattggtatcgttggccgttcaggtgcaggtaaatctaccctcatccaattactgttacacttttatcatctcaaagaaggtgcaattttaattgatgggcagaatattgaagatgttacgcaagatagtttgagagcaaatattgctttagttactcaagacacttctctactacatcgctcagttgccgaaaatattaaatatggccgtccagatgcaacagatcaagatatgcaaagtgccgtgcataaggcaaaagcagctgaatttattcctcaacttgtcgacttaaaagggcgttcaggttatgaagcacaagtgggtgaacgtggtgtcaaactgtcaggtggtcaaagacaacgtatcgctattgcgcgtgttttcttaaaagatgcaccaattttaatcttagatgaagcaactagcgctttagactcagaagttgaagcagctattcagtctagtttaaatgacctaatggtagataaaacagttattgcaattgctcaccgtttgtctaccattgctcaaatggaccgtttaattgttcttgatgaaggtaaaattgcagagcaaggtactcatgaagaattaattgctaaaaatggtatatatgcacaattatggaaacgtcaaacgggcggttttcttattgagcaaaaagtagtacagggtcaagattaa

SEQ ID NO: 41946 - DNA, 537 bp, Acinetobacter baumannii
atggttaaaaatgccttacaagctcagttactcaaagctggtttagtagacaataaaaaagcgaaaaaacttaccaaacaagctcagcatgagcagcgtactggtcaaagcaatgaagcagaaattaaagctaatattgaaaaagctcaaaaagagaaacaagcaaaagatcaagctttgaatctagaaaagcagcagcaactcgaagaaaaagcattaaaggcttcaatcattcaaatgatcaagcaacacaaaattgtagattttgccggagatgtggcttatcaatttattgacgagaataagattaaaaaggtttacctatctcagcaagtttataatgcacttgttacaggcagtttagtgattgctaaagatcaagatcaatatgcttaccttccaaaagctttagctgaaaaaattgatcaaaaaatgaaaggatttattttgatcaataattctgagaaaaatgaacaaactactgatgaagaagatccatatgcagcatatgtaattccggatgacttaatgtggtaa

SEQ ID NO: 41947 - DNA, 681 bp, Acinetobacter baumannii
atgccatttcaaagtttaccaaactggttccaacttggcgcctttttactggcaataaatgccggaatgattaatgtattagggcttatcacccttttacatcaatcggtgtcgcatatgactggtaatgtcagtatgctagccatgagtttggtaaactggcagtttgaacacatcatatatttagtactagttatactatgttatgtatgtggatcattttacagtggttttattttaggcaataaccatttcaaattaggccgccggtatggccttcctttaagtctagtttcactatttatttttctctgttggttactgctgccttattttccaaaatatggtctattatgggcttgtgtcgccatggggctacaaaatgcaatggtaagtcactataaaggaaccattattaggactactcacttatcgggtgtcttaacagatcttgggcttgcacttggttatatagcacgaggtttaaaagtagagaatcgccgcattattttgcatctacttatttttataggttttctatctggcggtataattgctgctttagttcacccttatttaaaattgcaatcatttttgcttccagcaattttaagcttaactctcagtatttcgtattgggcagtttactttcatagttcttcctcttcaaattcggattaa

SEQ ID NO: 41948 - DNA, 1203 bp, Acinetobacter baumannii
atgcttgaattcttttctcgattaagcttagtcactaaaattattatcgccattattttagggataggcgtcgcactattatttccaaccgttacgccgtacttaagcttgtttggtgaactatttattaaagcattaaaatcggttgctcctattttagtctttgtactggttctctcatctattgccaacttccaagtcggtcatagtgcaaatttacgcccagtattactactctatgtagtaggtatgttattagctgcttttagtgctgtgatcgctagcttatcttttcctagcaccctttatctcaacactgtttctcataataatttgcaagcgcctggtagtctcgctgatatattaaaaaatctgcttttaagttttattgcaaaccctgttcaagcaatcagtgaagcgaactttattggtattcttgcgtgggcaattggtctcggcttagcaatgcgccatagctcggatacgaccaaacaagtaatgcaggatgtttcacatgctgtaagcgctattattcataaagtcattgcgtttgcacctgttggtattttcggtctagttgcagtaacttttgcagatgctggactagcaacacttgaaagttatgcacaattacttgctgttctattaggaacaatgctgtttgttgctctagtgattaacccaattctggtaggtttaacaattcgcggtaatccctacccattagtatttaaatgcttaaaagaaagtggtatcacagcgttctttacacgcagctcagcagctaatattcctgtaaaccttgatttagctgaacgtttaggcgtaaatccttcaactgcgagcgtttcaattcctttaggtgctactgttaacatggctggtgcagcagttacgattactgtacttactttagcaactgtgcatacgttaggaattcatgttgatttggcaacaatgattatcttatctgttgtagctacaatatcagcatgtggtgcatctggtgttgcaggtggttccctacttctaattccagtcgcatgtagcttatttggtatttcatcagaaattgcaatgcaagttgttgcagtgggtatgattattagtgtattacaagattcaacagaaacggcgcttaactcatctaccgatgttttatttacagccgcagttgatattcgctcaagacaaaactcatag

SEQ ID NO: 41949 - DNA, 309 bp, Acinetobacter baumannii
atgaaagatggactccaaattgaagaaatgaaaaatgcggcggattcagtcgtaggaacattaaaatctttagctaacactgaccgtttattaattttatgtcacttagcccatgaggagttaaatgtctctcaaattgaagagaaaacacaaatcacccaacccaccctttcacaacaattgatgatgctacgtaaaagtgatgtcgtttcaacacgtcgtgatggcaagcaaatcttctattcgatcaaggatgataagatgcattcaattttaaatatgctttaccagttatactgcatagaataa

SEQ ID NO: 41950 - DNA, 567 bp, Acinetobacter baumannii
atgtcaaaaaaagatgacattattaccactgctttaagactttttaattcatatagttataattctataggggtagatcgtatcatcagtgaatctggtgtagcgaaaatgacattttataaatactttccttcaaaagagaaacttattgaagagtgtttattattaagaaactcacttttacaaaattctcttactgcggcaatctctaaagaagacgaaaccaacccactagctcgtattaaggccatctttttatggtattcagattggtttaatagtgaagactttaatggttgcatgttccaaaaagccttagaagaagtattaaaacaatacccttcaacacatcaaccagcaactttatataaaatctggttaacacaattaatgcaagatcttcttattcaatatgaaattgaagagtctcgacctttggcattgctgttggtcaatattttagagggtatgaccattcaggctcaagttgagcatggttcagtaaaaattgatgactattggaagcgtgtagagaaactcattgaatttgaaaaaatcgcacattaa

SEQ ID NO: 41951 - DNA, 1164 bp, Acinetobacter baumannii
atgacagaagctttaaccgttttaggcggtattactgctgaacagtttttaacagagtattggcagaaaaaaccattacttgtacgtaatgctatgcctgaaattgtgggtatgttagagccgaatgatgtaaaagaactcgctttagaagaccatgtaactgctcgtcttatccgtcaaaaagataaaaatccaaatgaatggcatgtaaaatcgtctcccttaactaaaggtgattttcaaaaactaccaaagttatggacacttttggttcaagcagtagaccattattcatttgatatagctgaattgtggaagaaatttccttttattccgcaatggcgccgtgatgacattatggtctcttatgccccaaaaggtggttcagtaggaaaacattttgacttttatgatgtttttcttgttcaaggatatggtcatcgtcgctggcaactcggccaaatgtgtgatgcaagcactgaatttgtacctaatcaacctttaaagttgctaccagaaatagatattcattttgatgaagtattagctcctggcgacttattatatgttccacctggattatcacattatggcgttgccgaagatgattgtttaactttctcctttggtttccgtatgcctaatatttcaggcatgatcgatagaattagcgatcaatttgctactgatgaattacttcaaaatcctgttgtcgatattacccgtaagaatcctcctcaaattggggaaataaacacggaagagttggcttatttaagagatttagtgctagctcaattgaaaaattcaacagtacttgatgctgccctcatgtcgtacatgagcgagcctaaatatccagacaatattccagaaccagatgaaatagaggtcgaagacctaaatgctattttgtcagaaggctatgagctgctactcgaacctgcttcacgtctactttatacagaacaaaatggcgttttaaagttttggggtaatggagaagaattaccgactgtggaatcttttgccacccaactcaaatcgattgccgatgggaaaagtattccttttaatagtgagcttaacaatacagatattttagaaaacattgttcaattattgaataattcaattcttatgttgttacctcctgcagagtaa

SEQ ID NO: 41952 - DNA, 594 bp, Acinetobacter baumannii
atgaaacaacccaaaattattttggcatcaagcagtcagacacgtaaagatttaatgaatcgtttaggaatcgaatatatctgcattagtccagatattgacgagagtccttgtggtgaaatgcatgccgatgatttagcaaaaagactggcatttactaaagcacaagtaattgcacaaaaaaatcgtaaagcaattgtaattggatcagatcaggttgcatggcgagagcatgctcctcatgattttattggcaaacccttaacaattgaaaatgccaaagctcaattagcagcaaactctggccgaacagtcttttttagtactgctttaagtgtgcagtgccttgaaaaaagttttgaacatacgcttgttgagcattatcaagttaagtttcgcaatttaagcgcgcctgaaatcgaaagatacgtcgacttagatctgcccttacaatgcgcaggaagttttaagtgtgaaagtctcggcattagtttatttgaaaaaatgataggccaagaccaaaccacgctgatgggtttacccatgattcagctttgtcagattttaagacaactcaatctccaaattccttaa

SEQ ID NO: 41953 - DNA, 384 bp, Acinetobacter baumannii
atgtctattcatccagatccacaaattaatcgtttaaatgttttaggtgaacccttagcaagctgttgttttgaccctattactggctacttccggaatggtttttgccatacagccgtaacagatcttggtcaacatacggtatgcgcccaaatgacttctgagtttttaaatttttcacaaaaagtcggaaacgatctgatcactcctctacctgaagcaggcttccctggcctacaaccgggagacttctggtgcatttgtgtaactcgttgggtagaagcttatcaagctggtcaagcacctcctgttaaacttcatgcttgtcatcaagctgtattgagctatgttccattagatgtattaatggaatttgcagtgtaa

SEQ ID NO: 41954 - DNA, 1188 bp, Acinetobacter baumannii
atgaattttcagcgcatgactgaccttaatttagcaggtaaacgtgtccttattcgtgaagatttaaacgttcctgttaaaaatggtgtgattaccagcgatgctcgtttacgtgccgcacttccaacaataaaagctgctttagaaaaaggcgctgctgtaatggtattttcacatttaggtcgtcctgtggaaggtgagccaaagcctgaacaatcacttgcactagtggctgcatatttaactgaagcattaggtcaagaagttaaattatttactgattatttagatggtgttgaagttgaagcaggacaagttgttttgcttgaaaatgttcgttttaatccgggtgaaaagaaaaataatcctgaacttgcacaaaaatatgcagctctatgtgatgtgtttgtaatggatgcttttggtactgctcaccgtgcagaagcttctacagaaggtgtagcgcgttttgcacctgttgcagcggcaggcccattattggctgctgaattagatgcacttggccgtgcaatgcaaacacctgaaaaaccaatggtggcaattgtcgctggttctaaagtttcaacaaaacttgatgtattaaattcattatctggtatttgtgaccaactgattgtgggcggtggtattgcaaatactttcttggcggctgctggttacaatgttggtaaatctttatatgaagctgacttggttgaaactgcaaaacaaattgccgctaaagtaagtgttccacttcctacagatgtagttgtagctgatgcttcacaaattaacttcgaagatttcttaggttctttggcagcagcgcaagcagtaattaagaaagttgaagatgtcacagcaaatgatatgattttggatgttggtcctgaaacagctaaagcatttgcaaatattttaacaacttcaaaaacgattctttggaatggtcctgttggtgtatttgaagttgatcaatttggtgaaggtactaaagcactttctcttgcagttgcacaatctgatgcattctcaattgctggtggtggtgatactttagctgcgattgataaatataatgtagctgatcaaattggttatatttcaacaggtggtggtgcattccttgaatttgttgaaggaaaaacattgccagcagttgccgttttacttgaacgtgcttaa

SEQ ID NO: 41955 - DNA, 243 bp, Acinetobacter baumannii
atgaatttaaaacttacctttgctgctttgttaattgtcccaatgatgttgactgcttgtgcgaaaaaagaagaggcggctcaagcaggccaagatgcggcatctacagctgttgctgacaaagtaactccggaacaacaagctgcaatcgatgcgcttgataagccagttttagatgaaaagaatacagatgtggttgaaggtagtgcatctagcgagacggctgcttcagaaacgcattaa

SEQ ID NO: 41956 - DNA, 1038 bp, Acinetobacter baumannii
atggcactcatttcaatgcgccagctcttggatcacgctgcggaacataactacggcgtaccagcatttaacgtaaataacttagaacaaatgcgtgcaattatgcttgccgcagatgctaccaattcacctgtaattgttcaggcatctgctggagctcgcaaatatgcaggcgctccattcttacgccatcttattttggctgcaattgaagaatggccacacattccagtggtaatgcaccaagaccatggtacaagccctgatgtatgccaacgttctattcaacttggttttagctcagtgatgatggacggttcattaggcgctgatggtaaaactcctacaacttacgattacaacgtagatgtaactcgtcaagtggtagcaatggctcatgcttgtggtgtatctgttgaaggtgagatcggttgcttaggtagccttgaaacaggtatggctggagaagaagacggtgtgggtgcagaaggtgtacttgaccattctcagcttttaacctctgttgaagaagcaaaacaattcgttgctgatacaaatgttgatgctttagcaattgctgtaggtacttcacacggtgcttataaatttacacgtccacctacaggggatattttagcaattgaccgtattaaagaaattcatgcggcattgccaaatactcaccttgtaatgcacggttcaagctctgtaccacaagaatggttaaaagtaattaacgagtttggtggtaatattggtgagacttatggtgtaccagttgaacagcttgtagaagcgattaaacatggtgtacgtaaaatcaatatcgatactgacttgcgtttagcttcaacaggtgcaattcgtcgtttcatggcggaaaacccagctgaatttgacccacgtaagtatttcgctaaaactgtcgattcaatgaaacaaatttgtatcgatcgttatgaagctttcggtacagctggtaatgctgacaagattcgcccaatttctttagagaaaatggttgatcgttataaataa

SEQ ID NO: 41957 - DNA, 1311 bp, Acinetobacter baumannii
atgaagacaaaacatcttaaacagttttttaaagcgacgacccttgctgtattaatatcttcatcaatgcatagttttgcccaacctactgatgaagttgtggcaattgtggacaatagcgtaattttaaaaagtgaccttgaacaaggaatggctgaagcagctcacgaattgcaagcacaaaaaaaagaagttccacctcaacaatacttacaatttcaagtattagaccagctcatcttacgtcaagcacaacttgaacaagttaaaaaatatggcatcaaacctgatgagaaaagtctaaatgaggctgtacttaaagttgcaagtcaatcgggtagcaaaagcctagaagcctttcaacaaaaattagatgcgattgcacctggaacttatgaaaacttacgtagccgtattgctgaagatttagcaattaatcgtctgcgtcaacagcaagttatgtctcgcattaaaatcagtgatcaagatgtagacaacttcttaaagtcaccacaagggcaagctgctttaggtaatcaagctcatgtgattcatatgcgaatttccggagacaaccctcaagaagttcaaaatgtagcaaaagaagttcgttcacaacttgctcaaagcaatgatttaaacgctcttaaaaagctttcaaccgcgactgtaaaagttgaaggtgcagatatgggattccgccctctttctgatataccggctgaacttgctgctcgtattactccactgcaagatggtcaaacaactgacttaatctctgtacgcgatggcgtacatgttctaaaacttttagaacgtaagcaaaatgaacagaaagcattagtaccgcaatatcaaacacgccatattcttattcaaccttccgaagtggtaagccctgaaaatgcgaaacaaattattgatagcatttacaagcgattaaaagcgggtgaagatttcgctactcttgctgcaacttattcaaatgatacaggttcagcacgtgatggcggcagtctaggttgggttacgccaggtatgatggttcctgagtttgataaaaaaatgcaggaaattcctgtaggtgaaattagtgaacctttccaaactcaattcggctggcatatcttacaagtgacagacaaacgcgaaaaagatatgacacatgaatatcaagagcgtatggcacgtcaaattttaggtgagcgtcaatttaacactgaaattgatagctggttgcgtgaagtacgtgcaaatgcttatgtagaaattaaagatccaagcctcgacaaaaagaacttacaaaaataa

SEQ ID NO: 41958 - DNA, 2439 bp, Acinetobacter baumannii
atgaagcatcagtttaaatttaatcctttagcgaccgctatttttacgctcttatgtagtggctccatacaatcaagttatgctgagtcagctggtgttgtctccaacatagacaataatcaacttaaggcgagtattaaggaagcctatccagggcaggaattctttcaacaatattatgttgataaatctgctcctgaggcgcaattgcgcaataataaatatttgagttcagcattctgccaaggaacttggattacaccaattaatcctgaaactaaagcgttagatgcagataaagctacttcagttgtaacggctgattatgggcactacaaccctgccggcgactctgtgttggaaggaaacgtggtgatagatcaggaaggccgtacagttcgtgccgataaagtcaccatcgataaaactcaaacatttgcacatgcacaaggccgagtacagttagctcaaggcggcttactctctcaaagtgatgaaattgattacaatctaaagactcaaaccggaaatttagataatagtttttatatttctgaacaacaacatgcccatggtcatgctgggaagatcgagagaacctctccgaatgtaatggttctcaatgatgcgacttacacaacctgtccgccaggccagaaaccaggttggaaaattcaagccaacaaaattgagttgaaccaagaaactgggcgtggtgttacgcgcggaacaaaactatatgtaaaagatgttccagttctagcagttccctactttaacttcccgattgatgaccgccgcactacaggtatcctcaacccacaatttggtttctcaaacgatggtggtattgaactttcggttcctgtttatttaaaccttgcacctaattacgatgcaacaattacgccacgatacttagcagatcgtggtgcaatgttacaaggtgaattccgatatttgacggatgggtttggtgccggacagatttggggcggcattttgccatctgataaagaatatgatgataaagaccgtaaagatttccattttttacataattgggatatcaatgaccaatggtctaccaaccttgaatacaattacgcatcagataaagactacttctctgatttagatagtagccctatctctaaaacagatcttaacttacgtagagcttgggaacttaactatcaacatggtattccgggtttaaaagcacagcttaaagtcgaagatttccagacccttgatcctcaagttaaagatgcagacaagccatatgcacgtttgccgcaattcttgttgaattatgtcacaggtaatccattaggcttacaatacgaattcaataacgatactgcatattttaagaaatcaattaacgataattctgcacaagaaagtagcggtacgcgtatttataaccagtttgcaacacgttataactatcgaacaccagcagcctttgtaattcctgaggtttctgtacgttctattcaaaccttctatgataaagatactcagttaaataaccctggcggctctgaaaacaaatcagtcgttgtgccacaatttacattggacactggtttgaattttgaacgtgaaggcaaatatttacaaacacttacaccacgtgctttctatgcctatgcgccatacaaaaatcaagatggctaccctaactttgactcaaccactgcgtcaattagttacgatcagttatttaacccttaccgcttctatggtcatgaccgccttgaagacaatcactttttatcgttaggtgtaagttatagtctttttgacacagtaggtttagagcgtttacgtgcaagtgtgggacaaagctattattttgaagatcgccgcgtcactttaaaacaaggccaagatgaatttgacaccgagcgtaaaactggccctgttataagcttatcaagccaacttaatcaaaactttaccattgctgccaactcggcctggatgtcaaatggcgataatgctcagcgtgacttccaagtttactatacaggtgataaaggaaatctatataacttaggctatttctatcgtaaagatattcctggtcgtcaagatacatacgatcaagttgttgcatcgtttatacaaccaattaaagacaactggcgtattatgggccacgtacaatatgacatggacaatgatgttgcccgtgaactcttgctaggagttaattatgagtcatgttgctggggtatttctgtctatggccgttcatactataacgatctagatgatccgaaaacttcagatgttagtgaaaagcgcgcgatcatggccgaaattacacttaaaggtttaggtggtttaaacaataaactcgcgtctttacttgaaaatcgcgttttaggttttaacaaaattaatcaatcttggacacaacgttaa

SEQ ID NO: 41959 - DNA, 1014 bp, Acinetobacter baumannii
atgaatacacaacgtgaacaattgatacatacatggcttacatctgttcttgaaaatgatcaatttcagatcgcttatttagcaggggatgcaagctttcgacgttatgctcgcatccagttacaaaataaaacgtatatgcttatggatgcgcctcctgaaaaagaagactgtgttccgtttgtgaccattgacgagttttttgcagggcatggggttcgggtacctcagatcgttgcaaaagatttaaatcaaggttttttattgttagaagactttggtgatgtgctgctgtctacattgttaaacgatgaaacagttgatcaatattatgaacagagttttaaacagcttattcatttgcaatcgattaatggggctgaacatttcccggcttattcttatgaaaagcttttatcggaaatgcagttgttaacagattggatgttaccgtcactcgatatccatccaacagctgagcaaaagaaaactattgatgatgcatttgatttcttggctcaggcagcattagctcaaccgcaagttattgtacatcgtgattttcatagccgtaatttaatgaaaattgctaatgaagaagaattgggagtaattgacttccaagacgcggttattggtgctgatacatatgatttaatctcgattacacgtgatgcatacgtgcagtggaatgctgagcgtgtttatcaatggtttaaagtgttctatgagcttttaccagcatctgctaaacaaaaccgaagctttgaccaatttaaacgtgatgctgatttaatggcaattcaacgccatatcaaaattttaggtatctttgtccgtttgttcgagcgagatggtaagtctggttatttgaaggatttaccacgagtcatgtggtatttacttgaagagagccgtggctatcatgagcttgatgactttatggcgtttattcacagttcagtaatgcctaaatttattgaaaaatatggcccttatgaggttgcagcataa

SEQ ID NO: 41960 - DNA, 690 bp, Acinetobacter baumannii
atgaaagcaatgattttagctgctggcttgggcaatcgtatgcgtccactcacattatatacaccaaagcctctgcttgaggtgggtggtaagccacttattgtgtggcatattgaaaaacttaagaaaattggtgtgaccgaaatagtcatcaattctgcgtggttagccgacaaactcatcagtagcttgggagatggttctcaatttggtgtggatatccgttggacacgagaggaagaagggctagaaaccgctggcggaattattaatgctttgccactgcttggaaccgatcctttcattctggtgaatggagatgtatggactacaatggattttgaagctctacgccatattaagttaaatgatgatttggcacatcttgtattagttgataatcctaaacagcatcctgatggcgactttacattattaaatggacgcgcttttacatttgatcaagatgtgaagggcgagaacctcacttttagtggtgtatctgttatccatcctaagctttttgatggattggaagctggtaaacgtccgttagccccattgttgaagcaagcgatgcacaatcaaaaaatatctggtgaaaagcttaaaggtgcatgggtagatgtgggaacgcctgagcgtttaatggagctagatttgcaaattcgtgaaggcttctacgattaa

SEQ ID NO: 41961 - DNA, 633 bp, Acinetobacter baumannii
atgcatccgttttttcaagagttacaacagggtagtcaaaaattaggtttatcgcttagcgatgaagctttgacattattgttgaagtatcaagatgctttggtactttggaacaaagcttataatctaacagcgattcgtgatcctaaagaaatgttagtaaagcatttgttggatagcctaagtattttgaaagatttgccagcaggtcgtttgctcgatgtaggtacaggtggtggcatgccgggcatgatcattgctttatgtcagccagaacgctcttgtgtattgcttgattcaaatggtaagaaaattcgttttttgaaacagtttattgctgaccttaagcttaaaaacgtaatagctgtgcaaacgcgtgttgaaaatcaagatacaattgatgaacttggccaatttgatgtaataacaagtcgtgcatttgcatcattaacagattttgttgaggctgcacgtccatatttacatgagcagagtataattgccgcgatgaaaggactgattccagttgaagaaatggaagagcttaagcaggaattttcatgtaaagtgattgaactgcatgtaccgagacttgatgaacaacgtcatttacttttacttcaacgaatttaa

SEQ ID NO: 41962 - DNA, 783 bp, Acinetobacter baumannii
atggctcaaattattgcgattgcaaaccaaaagggtggtgttggtaaaacaacgactgcagtaaatcttgcagcgtcactagctgtattgaaaaaacgtgtgctacttgtcgatatagattcgcaaggtaatgctacgatggggtctggtattcaaaagaatgatctactttattcaattacggatgtgttattgggtgaagtgccaatcgaaacggcaattcaaaaagctgaggttggatataaagttttgggttcaaaccgtgaactttctggtgtcgagcttgccattgccgagcaagaaggtcgtgagttcattttaaagaatgctttgaatgaaattcgggactcattcgattacattattgttgattgcgcgcctagcttaagtttaattaccgtgaatgctttagctgcagtagatggtgtaatcattccaatgcaatgcgagtactatgcattagaaggtttggcagatttaactcaaacgatcgatcgtattcaaaaagcgttaaatccagatttggaaattattggtgttttacgcaccatgtatgatgcgcgtaatgccttaactcgcgatgtatctgctgagttggaacaatattttggtaagaaactctacgacactgtgattccacgtaatgttcgtttggctgaagctccagcacatggtttgccagtgatttattttgaaaaaagttcgaaaggtgcagttgcatacttaaatcttgcggctgagatgttaaagaaaagtaaagtgaagaaaggaagtaaagtatga

SEQ ID NO: 41963 - DNA, 888 bp, Acinetobacter baumannii
atgagcatcaaaaaacgcggattggcgaaaggtcgtggtttagatgcattacttggttcaattcaaaaagaaaaattacaactagaagctcaagcgcttgatcatggtcagttaaagcaaattgatttgaagttgttgaaacgaggtgaatatcaaccacgtcgttttatccatgagcatgatttgcaagagttggcatcctctattgaaaaacatggggtaatgcagccaattgttattcgtcctgtagatgatgaagctcatccttacgaaattattgcaggtgagcgtcgttggcgcgcagctcaaattgctggcttaacggaaatccctgcaattgttcgtgatttaaatgatcaggttgctattgctttagcacttattgaaaatattcaacgtcaagatttaaacccgattgatcaagcgttggcgctacaacgattccatgatgaattcggtttaagccatcaagaaattgctgatacagtcggtaaagcaagaacaacggtaagtaatttattacgtctgttgagcttggctgatgatattaaggagtttatgcagcaaggccagcttgatatggggcatgctcgtgccatcttaactttaaagggcaaagaacaacttgaagttgcaaaaattgtaattgaaaaaggattatctgttcgtcagactgagcagttagtacgcgattggaacgagcctaaacaggaaaaggaaaaagctcctgttgcaccagacattgagcaactaactcagaaattatcagaacgttttggtgccaatgttaaaattgatcataaccagaaaggtaaaggtaagcttgttattcactatcattcactcgatgagttagatggtattttgaatatttgtttaccagattaa

SEQ ID NO: 41964 - DNA, 636 bp, Acinetobacter baumannii
atgtgggaacttgtgaaagcgggcggctggttaatgctgcctttaattttgtgttcaattttaaccgtcgcaattagtattgagcgttttgtacgtttaagacgttcacaagttttacctaaagtactaatgaatgatggcagtgcagatatttctgttgtcataacaaatttggagcaggatactaatgcgcaaagcacggcattgggcaatattctaaaagctggttttgagcatcaggaacatggcgaacaatttgcgcgagcacaaatggaagctatggcttctcaagaaatttcttatttagaaaaaaatattaacttcttagggactttaagtgctatagcgcctctactagggctgcttggaacagttgtgggaattattgagtcttttttggttattgattttggttcggcaggtagtcctagtttaatgattcccggtatttccaaggctttgatcacaacagcagttggtatgctcattgcaattcctgcacttatttcctatcgatattttcaaagagtagtgcaagattatattgctgagttagagcaacaatctacgctatttcatgcctcattgttttacaaacgttcttcagtcatgcaagaacatcgccgcgttggttga

SEQ ID NO: 41965 - DNA, 429 bp, Acinetobacter baumannii
atgaagtttaaacgttctcaagttgaagacattcatatcaatttaacacctatgattgactgtttattgttcattctagtgtttttattgttatctaccacttttaatcagccaagtcgcatcaatttaactttaccagatgcacaaggtgttccaccaaaacagtacgatcataaaattgaagtcgtggtagactctagcggacattacgccgtgaatggtcaggcgctatctaccaaagatgtggctgatttgagcactgcaattaagcaaattgctcaagagcgacgtgactttatgtttatcattgctgctgatgcaaaagcatcccatcaggatgttattcgtgttatggatgtagcaggacaactcggttttgttaacatcaatattagtaccaaagttccttctagaggtttttctgagtga

SEQ ID NO: 41966 - DNA, 1728 bp, Acinetobacter baumannii
gtgaatcaagattttaaggtttatttgcgtctcatatcctatttaaaaccttattggggcgtggccttattagttcttatcgggttcggtatgaactcagcaacggaagtttctgttgctaagctcattaaatttattattgatgcaattcaaaatgcgagtagagcggatctggattggttccctttattaatcattttattggtattcttccgtggccttggcctatttatgggggggtactatacggctgtgatctcgcgtagtttggtttttagtattcgccaagaagtttatgcaaaacttctaagactgccggctcaatattatctcgataactcttcgggtcatattactgccaaaattatgtataacgtcgagcaacttacagctgcttcatctgaatcattaaaaaccattgttcgagatggcatgattacgttggggttgttaggttatttgttctataccaattggcgtttaacaatttgtattatggtgttcttacctgtaattgggattttggtgcgtaaagcttcaaaaagaatgcgcaaactctcgatgcaagttcaggatactatgggtgatgttaaccatgtagtgcaagaaagtattaatggtaatgcagttgttaaaagtttcgctggtgaagagtcagaacaagagcgtttctataagtcatcggaagaaaacttaaaacgtggtttaaaaatggtgattgtgcaaaacctaaatagtcctgttgttcaagtggtaatggcttgtgcaatggctctaattgtatggttagcattaagaccacaaattttagggaatacaactgctggtgagtttgttgcatatattacggcagcagggttactttcaaagcctgttaaaaacttgacagatgtgaatgaaaagttacagcgggggttagcagctgcacactcagtttttgaattattagatttacctgaagagcaaaatagtggtgaacttaaaccgcagttgcaaggtgcaattcgttttgaccatgttgtacttaactatgctgacggtacgcaagcgattaaagacttttctttagatattcgtccaggcgaaactgttgcattggtagggcgctctggtgctggtaaaacttctttagtgaacatgttggtacgtttccaagaagtctcaagtggtcaaatttatttagatgatttgccaatacgtgatattgagctttcaagtttgcgtacacaaattgcaatggtaaatcagcaagttgttttgtttaaccgaactgtacgtgaaaacattgcttatggtcagttacataatgcaagtgatgaagacgtaatagctgcagcaaaggctgcttatgcccacgactttattatgaacttaccaaatggctacgatactgttttgggtgctcaaggtctaaatttatcgggtggtcaacgtcaacgtattgcaattgctcgtgcaattttgaaaaatgccccaattctcattttggatgaggcgacaagtgcgcttgataatgaatctgaacactttattcaacaagcatttgatgaagctatgcaagatcgtacaacgattgtgattgctcaccgtctatcaaccattgaaaatgcggatcgtattgttgtgatggaccgcggacaaattgttgaacaaggtactcatcaagaattacttgctaagcacggtgcttattatcaattacatcagcgtaattttgaggaccattaa

SEQ ID NO: 41967 - DNA, 1011 bp, Acinetobacter baumannii
atgtctttagcccagctgatccaaaatgcatggaataagcaatcaagttggttgattgttttacgtcctttgtcttgcttgtatcgtgctgggtttttactaaatcgttatctttatagttcaggctttaaaaaagtttataccgcacctgtgccggtcatagtaattggcaatattacggtggggggaagtggaaaaactccattattaatagagctggtcaattatctaaagcagcataatgtaaaggtaggggtaattagtagaggctatggtggagctggcccttttcctatgttggtaacatcggccagtcaagcagctgaagcaggagatgaacctgctttgattgttcagtcaactggcgtacctatggcagtaggacccaatagacaagctgcaatcgagttattattagcatcgactaaactagatttaattattagtgatgatgggttgcaacattgggcattaggtcgtcaaatagaatggatcgtacttgatcaaaatcgtggccttggaaatagaaagttattaccagagggatatttacgtgaacctgtggaacgtttaaaaactagtacggtaattgagcatactttcacaccaacaactgcattgcatatgcatcttgatgcaggccagccttacttattgaatccttcttcggcaactgaattatcattcaatattcaaaataattaccatgcagtagtcggtattggttttcctcagcgcttttaccaaacacttaaaggtttaggggtgaaacaatttcaagagcatgcttttcgtgatcatcatgattacagtattgatgaccttctatttaatgatgaccaacctatcattacaactgaaaaagatgcagttaagttgttaccattacttgaaaagcatccagaatttaaacgacctatttgggtcgtgccagttaaagctgttttgtctacagagtgctatcaggttttaaatcaacaattgcaaaagcttgatattcaaatatcttag

SEQ ID NO: 41968 - DNA, 762 bp, Acinetobacter baumannii
atgaaacatatcgtcattccagcacgcttctcaagttcgcgtttgccaggtaagccattgttacttattcatgatcgtcctatgattttacgagtggtggatcaagcaaaaaaagttgaaggtttcgatgacctatgtgtagcaacggacgatgaacgtatcgctgaaatatgtcgtgcagagggcgttgatgttgttttaacaagtgcagaccatccatcaggaacagatcgtttaagtgaagttgctcgtattaaaggatgggatgctgatgacattattgtaaatgtacaaggcgatgagccattactgccagcccagcttgttcagcaagttgcaaagcttttggttgataagccaaactgttcaatgtctacattatgtgagcctattcatgcgttggatgaatttcagcgtgatagtatcgtaaaagtagtcatgtctaaacaaaatgaagcattatattttagccgtgcaacgatcccttatgatcgagatggcgctaagcgagatgaaccaactttacatactcaagcatttcgtcatttaggtttatatgcttatcgtgtgagcttattacaagaatatgttacatgggaaatgggtaaacttgaaaagctcgagagtcttgagcaattgcgtgttttagaaaatggacaccgtattgctattgctgtagcagaagcgaatttaccaccaggtgttgacactcaagcagatcttgatcgtttaaataatatgcctgttgagtcttttgagtaa

SEQ ID NO: 41969 - DNA, 981 bp, Acinetobacter baumannii
atgaatcagaatgtgacttctaaggtttatccgtggcaacagacaatgtgggaaacgttaacaacacgttttcctaatattgggcatggcttattattttatggtaaacaaggttgtggtaaacatgcttttgctaagcatttcttagcgtgggtactttgtttaaataaacaacctcaaggtgcttgtggtgaatgtagtagctgtcaatggttaaaatcagatacgcatccaaactatgttcatatcacgacagatgaagaaaataaaaaacagaatgcaaaaattaaaatagaaaaaattcgagatttattgccatttgtacaacaaactggtgagggatggcgtgttgttgttattgagccagctgaagctttaaatcttgcgtcatcaaatgcactgctaaaaaccttagaagagccaggtgaacgcgtcgttttaatcttgttggctgatcattatttgaaattaccggcaaccattcgaagtcgcttacagcattttgctttagaccgtatttcatatacagaagccacatcttatctaaatgaacatttagcggaaacagcatcagtaccagctgaattattgctaggtctttctaatgatatgccgttgcaagcggttgaaattgcgactagtgattggtttgctaaaagacagtcttttttagaagactggactaaagttgtaaatcaaaaaaatatgcctttattttattcggctaaatggcaaaaagaactcaactttagtgattttatgatgcttcttgaatacttgttaggggatttaatttgtgtcaagctcaatcaaccacagaaaaatattgatttacagttcgatcaattagcgcaaaactataatttagaaagcttattcagtctttatgaggaattacagcaatctaaaagattagttgaacagaatgtacaaacacaactcatcatagatcaactttttataaaattaatgaacgtttaa

SEQ ID NO: 41970 - DNA, 342 bp, Acinetobacter baumannii
atgcaaccacaaatgggtggaattattcaggtcaatattccagatagagcaacattgcaagcaagttatatgggatatgtacaaggtgggggcttgtttgtaccatcaaagcaaaaagtgaagatgggccaggaaatttttattttagctacgttaccagaacaatcacaaaaaattcctttaactggtaaagtagtttggatttcacataagcaaagtggatttaaaccgcaaggtttcgcaattcaattgagtggtgataaaggagtttactataaagctgaagctgagcggattttagctggtagtatgtctttagatcgcccaagttataccatgtaa

SEQ ID NO: 41971 - DNA, 774 bp, Acinetobacter baumannii
gtgtttgttgatacccattgccatttaacaatgttagatttaacgccttataacggtgatttagatctcgcacttgctgctgcgcgagcagagggtgtttctaagtttatggcaatttcagttgaccttgatgatcatattgctttagctgaaatcgcaaagcgtcatgaagatgtggggtatacggtaggcgtacatccgtgtgaggatgttgatactatggctcgagcaacgactgagtatttgactgaattggctcaatcggaaaaggtgtgggctttaggtgaaacaggtttagactattaccacagcactgactttattaacgagcaaaaagattgttttgctcgtcatattcaagcctctaaaaatgttaaaaaaccagtagttgttcatacacgttcagcaaaacatgatacggtggatattattcgagctgaacaatctacacatggtattttgcactgttttactgaggactgggaaacagcaaaagctgtattggactgcggttactatatttccttttcaggaattgtttcatttaaaaatgctcaagatctacgagatgtagctaagcaagttcctttagatcggcttttgattgagacagatagcccttatttggctcccgtaccatatcgtggtaaaacgaatgaaccaaaatatgtaccttatgtagcgaaagcactaagtgaggtatatgataagccagttgaggaaattgcaagaatcacctcgcagaattttgaaaatttacttaaagcgatttaa

SEQ ID NO: 41972 - DNA, 609 bp, Acinetobacter baumannii
atggaccgtcaagctcagttccgagcaagagaagcattaatatttcaagttgcggaacagttgttgttagaaaatggcgaagccggaatgacacttgatgtgctggctgctgagcttgatttggcaaaaggtactttgtacaagcactttcaaagtaaagatgaattgtacatgctgttaattattcgtaatgagcgcatgttactggaaatggttcaagatactgaaaaggcttttccagaacatttagctttctttatgttgcatcatttgcaccatccagaaagaacagtgctgtttcaccaaattgaagaaaagctttcaattactgcccaaggtgtgcaccatctttttaatgaactttaccaagtgagaaagcagcgcttacgtattattattcgtatgactgatcattatttagagtcaatccagagtcatatgactacacgagattacttagcttcaatttggtcactcactcatggagctgctgcaattctgaattcaagcttttatcaacgttatttgggttcaagagatactttgcgagtagcatacattgaccaggcattagccttacccaaacaagcagttgagcagtacgcttaa

SEQ ID NO: 41973 - DNA, 555 bp, Acinetobacter baumannii
atgaaatcgaatctaccatttcaatcacaaaaaggctttaccctcatagaagtgatggtagtcattgtgattatgacaattatgacttctctagttgtattaaatataggtggcgtcgaccaaaaaaaagcaatgcaggcaagagagttatttttactcgatttgcagaaaattaataaagaatcgctcgatcaatcacgtgtattggctttagaaactcatggtgagacagatgtctcaccattttcttatgaactttatgaatatcacgatcaaagcactttacaagtacaagatataaaaaaccgttggcagaaatatactgagtttaaaacacggcaacttcctgcccatgtttctttttcagtacaacccttggatgaccagaattattctaaagctaaaaatacagatttgattggaggacaaacgcctcaactcatctggtttggcaatggagaagctaaaaccgttaaaatacaattttatttagaacaaaaaccgattggttcagaaatacaaatagatcacttgggtaaaataaatgaaatctaa

SEQ ID NO: 41974 - DNA, 381 bp, Acinetobacter baumannii
atgaaatctaaaggctttaccctcttagaagttatggttgctttggcaatctttgcagtcgcagctgtcgctttaactaaagtggcaacgcagtacacgcagtccacttcaaatgcaattttgcgaaccaaagctcagtttgtggcaatgaatgaagttgctatgatggagattaatcaagaatggttgcaaggaactcaaagtaagcaggtaacttcccaaggtgaaatttggcaaattgataagtcagctcaatctacaattagcccaaatgttcaaaaaattgatttacaagtgagtttgtatgatccggataagggaaaagtacaaaatggcattactcatatggttttttttaattatccagtgaaagcaaaataa

SEQ ID NO: 41975 - DNA, 702 bp, Acinetobacter baumannii
atgataaaaaataaatatattcatatccgaagcattgcttctcgtcttgcggcgcgatcgagcagtgctcgattaactcgcgcctcaggatttactttggttgaattgttagtcgcgatcgctatctttgcggttttatctttattggggtggaaaattttcgattacttgctcaaagttcgtgatcgtaatgccgaacatgaagtgcatttatttgaattacaagatgcttatcaacaaattcttcgtgatactttgcagattatccctttatccgcaaaccaaggtggtcaacttcatccagctttagaaatcgataatcaaattttacgttttagcaaagcaggcgtaacggatcctttaaaacaaggcttatcaccatttgaacgaattgaatatcgttatgatgcagaccaaaaaaagttatatcgtcttaaatatacaaatttgaatacttcgaacagagagcaacctttatcgagtactttgttaaatcaagtcgaccaatatcagattatggttttgactccgcaagaagtcacaaaatggcccgaggttaatattgatccaacgaaacctaatgagttaaaaaaattaccgaaagggataaaaatccaacttacagtcgctggtgtaaattatgagtggatttatagcttaaatcagggtgacttatcgctttcgcaggaaggtaattcataa

SEQ ID NO: 41976 - DNA, 960 bp, Acinetobacter baumannii
atggccgttagttacaaacaccaacagggtgtcgctttactgacaatacttattatggttgccttggctacaattttagcggcttctattgccaagcatcaaaataatactatggaaaatacagcctacttaatgcgccaaaatcaatctttgctttatgcaaaaagtgcagaagcctttttttcagaattattaattcaagatgcaaataatgcaggtggagtagatcatttaaaagagacatgggcacaacctatgccgccgttttctattgaagagggttcagtatctggtcgtttgcttgatgagtctggtaaatttaatttaaataatctaactaacggggaaggtattgtaaatgaagatgctaaaagttggtttgaacgcttattggtacgtgtgggattaccagccgaattaagccaagctgtgattgattggcaagatccaaatgatgagccaactgggccaatgggggcagaaagtagttattatgaaggtttggatccaggttacatggctgcgaatactaaattccatcgtattgaagagttaaagctagtgagaggctttgatggaaaaaaatttgatctaattgctccatatatttctgctttaccagaaaattcgaagttaaatattaatactgcttcgccattggttttagcaagtatggatgaaaaattagatataggagctatcgaaagagaattacagacacgccaacaaaatttaaagttcttccaaaatgtagatgaattatggcaattgaatgctttttcagcggttgatagtcaaaagaaaaatcaagtaaatagccttattgatgttaaatccagcttctttcaagctcagattgaagttgttctaaataataggaagcgacagtttactagtgctttaatgagaaaagataagcaagtatatgtttattcaagaagcatggctccatttaactaa

SEQ ID NO: 41977 - DNA, 597 bp, Acinetobacter baumannii
atgttaattcgtaagttatttaagtttgaaaatgcacacgttgtacgtaactgtacatcggatcgttgtaagcgatccattcatgggcatagttataaagtcgagttattacttaaagcttcgaaattagatcatggacaaatggtatatgattttgggctgttaaaaggcgtaattaaggaccttttcgatagctttgatcatgcgatttgtttctgggaaaaagatgatccacaatatattgatgcttgtaagacttttagcgcgcgttggatctctttaccagtttcgccatctgctgagcaattttctcgaatcttcttctatttagctcagcaagtcttacaatctactgttacccaaaatggggaaggtgatgttgaagtctattcagtgattgttcatgaaaccgatacaggttatgcccaaagttttcttgaagatattcaaaatgaacaaatggggctgttaaaccttgagggaattattttttcagaacaagtccaatccgaatgggctgatccaaatatgtatgaaaatttaaaacaagggattaagtttcataatccgcatgttaacttacaagtagaagtgtaa

SEQ ID NO: 41978 - DNA, 714 bp, Acinetobacter baumannii
atgcaattaactgagcaacagcaagacaaactcagtaaagttcaattagaagaaagctggaaaagatcattaactccatttttactgagtccttatatggatagtttaagagactttttgtttcaacaaaaacaggctcaaaaaaccatatatccaccaagtaaacaaatatttaatgctttaaatattacgccgttagatcatgtgaaagtcgttatattagggcaagatccatatcatggtccaaatcaggcaaatggcttaagtttctcggttcaaagaggggttgcattaccaccatctttacgtaatatttttcatgaactacatacagatttaggtgtgccagtttctcgtcatggtgatttaaccaaatgggctgagcaaggcgtacttttattaaacagtgtacttactgtagaagcagggcaacccacatcacatcaaaaacaaggttgggaagagtttactgacgcagtaattgatgttttaaatgaacaacgtgaacacattgtttttattttatggggtgcttatgcacaacgtaaaggacaacgtataaatagagaaaaacacttggttttaactgctgcacatccatcgccacttgcggctaatcgtggtggtttctttggatgcaaagtgttttccaaaacaaatcaatatttgaaacaacatggcattgagcccatagactggcaattggacgcatga

SEQ ID NO: 41979 - DNA, 1122 bp, Acinetobacter baumannii
atgaactctcccaatgtaaatagctatcatccggatttggtagttgaagaagcgaaaaatggttggcgtattgtacgtttgaatcgacctaaatcattacacgctttagatgaatcaatcgtaacggctctattacgagtatttgaagactttcgtgatgatgagcaagtaaaagcaatttggttggactcgactacaccaaaagcattttgtgcgggtggagatgtacgcaaattacgtcagctggtaattaatcaggaagtagaaaccgcaaataaatttttccagcaagaatatgctttggatttattgttacataactatgctaaaccagttgttgtttggggcgaaggctatgtaatgggtggtggtttaggcttgtttatggctgcacctttccgtttggttacaccatattcacgtttggctatgcctgaaattaatattggtttataccctgatgttggagcaagccgtttccttgctgaccgtgggcaaattggtttatttactggtttgacaggttctattatgacggctgctggggcatatagcattggttgggcgacgcatatttgtgaagcacaacgtgataatgttctacaaaaagtactcaatattaattgggctcactatccggcaggtgatttccgtgcgatcgatgatactttaaatagtttacatcgcccggttgcagcagggccattacaaaattcgttagacgttatacatagtgtttgccgtggttcaagctttgaacaagactatcaagcgatcgtcagcttgcgagatgcaagcagtgactggttgcgtcaagcgagtgaaaacttacaaaagggttcgcctagtacagcagcaattacttggttgttatggcaatggggtaaacaagttcattcttgggatgaagtttttgatctagaagcgcaaatctctgaatggaaaattcgccatcctgactttgtggaaggcgtacgtgctcgtttagtcgataaagatttatcgccagaatggaaagtatgtgaagaccttacattacgaggtattttagccgatgatccaccgatcacgactattgatagctggaatgcattacttagacaatatggtgtagtgtcataa

SEQ ID NO: 41980 - DNA, 477 bp, Acinetobacter baumannii
atgcagcttgcttacgagcaagctgaattagcagccgagcagggggaaattcctgtaggagctgtaatcgtgagccaaaataagttaattggagctggttttaatgctccaattggtttatctgatcctacagctcatgcagaaattcaagctattcgtgcggcttgtgagtcattgaaaaattatcgtttacctgaagatgcgactttgtatgttacgcttgagccgtgcacaatgtgtgtgggagcattagtacatgcaagaattaaacatgtcgtatttggaacaacagaacctaaagctggctcactcgtgagtgcacgtcaattattagaaaatggttattacaaccataaatttacttttgagcatggatgtttacatgaaaaatgtgctcaacagttaagtcttttttttaagcaaagacgtgaacaaaagaaacaagagaaacaacaaaaaacgtccttaaatgattaa

SEQ ID NO: 41981 - DNA, 444 bp, Acinetobacter baumannii
atgcgtaatgtaattactatacaaaaagaatttaatgctcctcttagtgatgtctttaacctgctttctaaacatgcagcttacaacactgcatttgctccactacaagttgtgcgtgttaaagattcggcagatcctgaaagacctgatggcgtgggttctgttcgtcgtatggggtttggcgtgattaaaccacttaaagaagaaatcacgcatctcgaagaaaacaaacgtattgaatataaactgattgataatcctctagtgaaacatcatttaggtcgaatcgagttctcagaaattactccttatattactttggttacgtatcgtatcgaattaaccgcaaaagctcctgttgtaagtaaattaattcttgcacagctaaaactagcgattacactaggcttttcgagattagctaaagcatttgcttcttcgtga

SEQ ID NO: 41982 - DNA, 687 bp, Acinetobacter baumannii
atgacagttcaaattattactattgatggtccgagtggttcgggtaaaggaacattagcggcgaaacttgctgcgtattatcaatttcatttacttgattcgggtgccttatatcgtttgttagggttgtcattacataaacatgatttattggaaaaattagatagccatttagatgagtgtgttaactatgctcgtcagcttaatattaagtttgaaacctcggcagagggaacattagttttcctcgatggggaagatgtaacccaaactatccgtacagagcgtgttggagaatacgcatctaaagttgcagcaataccagagctcagacaagcactctttgaacgccaaagagcatttgcacaaactccgggattagttgcagatggtcgagatatggcaacatcaattttcccggaagctaatgctaaaatttatttgactgcttcagctgagtcgcgtgctgagcgaagagtaaaacagttgcagggtatggggctagatgctaaaataaacgacattttagctaatatacaagcgcgtgacaaaagagatatggagcgagaagtagctcctctcaagccagccgcagacgcttatattattgatagttcggaattaacgatcgatcaagtatttaagttgatggttgattacgtcaatagccgtactgttagcaactaa

SEQ ID NO: 41983 - DNA, 1674 bp, Acinetobacter baumannii
atgaccgaatcttttgcagccctctttgaagaaagtgaattaaacctcaacgttgaaaagggtgcagtcatccaaggtgttgttgtaaacatcgatagtgactgggttactgttgacactggccttaaatctgaaggcattgttgaccgtgctgaatttttaaatgaacaacgtgaacttgaagttcaggttggcgatactgttgacgtagttgttgaagctcttgacaacggtatgggtcaaacagttttatcacgtgaaaaagctaaacgtgctgaaacttggactaaacttgaaaaaatctttgaagatggcgaaatcgttactggtgttatctctggtaaagttaaaggcggtttcactgttgacatcggtcctgttcgtgcgttcttaccaggctcattagttgacactcgtcctatccgtgacacaactcaccttgaaggtaaagagttagagtttaaagtaatcaagcttgatgctaaacgtaacaacgttgttgtatctcgtcgtgctgttatggaagctgaatcttctgctgaccgtgaagcattacttgctcaacttgaagaaggtcaaacagttacaggtactatcaaaaaccttactgattacggtgcattcgttgatcttggcggtattgatggtcttcttcatatcacagatatggcttggaagcgtatcaagcacccttcagaagttgttgaagttggtcaagaagttactgttaaagtacttaagtttgaccgtgaacgtaaccgcgtatctttaggccttaaacaattaggcgaagatccatggttagcgatcatgagccgttaccctaaaggttctatcgttaaagcacgtgttactaacttaactgactacggttgtttcgccgaaatcgctgaaggcgttgaaggtttagtacacgtttctgaaatggaccacactaacaaaaacatccacccatctaaagttgttcagatcggtgacgaagttgatgttatggttcttgaagttgacgaagaacgtcgtcgtatcagccttggtatcaaacaaactcgtgctaacccatgggaagagtttgctaagtctcatgagaaaggcgaaaaagtttcaggtacaatcaagtctatcactgactttggtatcttcattggtttaaatggcggtatcgacggtctagttcacttgtctgatatttcttggaacgaacaaggcgaagaagctatccgtcgttacaagaaaggtgacactgttgaagcagttatcttgtctgtagacgctgaaggtaaccgtatcagccttggtatcaagcaattgaacagcgatccgttcaatgatttcttagctgctaacgaacgtggtgctttagttaaaggtactgtaactgcagttgatgctcgtggcgcaactgttaagttagctgacgaagtagaagctactcttaaagcttctgaaatcaaccgtgaccgcgttgaagatgcaactaaattcttagaagttggtcaagaagttgaagcgaaaatcatcaatgttgaccgtaaatctcgctctatcaacttgtctatcaaagcgaaagacgaagctgaagagaaagaagcagttgctaacttgcgtacagcatcagcttctcaagacaatggtcctaagactattggtgacttgatcaaagcacaaatgaagtaa

SEQ ID NO: 41984 - DNA, 303 bp, Acinetobacter baumannii
atgactactgaagctcttaataagtctgatttgattgaacgcattgcgctaaaaaatccacacttggctgaaccattagtggaagaagcggttaagattatgattgaccaaatgatcgaagctctttcgtctgacaatcgtattgaaatccgtggttttggtagctttgcattacaccaccgtgaacctagagttggtcgtaaccctaaaacaggtaagtcagtagatgttgcagcgaaggctgttccacattttaaaccaggtaaagcactccgtgatgcagtgaatgaatctggaaaataa

SEQ ID NO: 41985 - DNA, 366 bp, Acinetobacter baumannii
atgcgttatattctaattgcattactcattattgtatttggctattctttagcacttgttttgcagaacccaacagaacttcctgttgatttattatttactcaagttcctgcaatgcgtttaggtttattattgttgcttaccttagcgcttggaattgtagttgggcttttattaggtgtacaagttttccgagttttccaaaaaagctgggaaatcaaacgtcttcgcaaagatattgatcatttgagaaaagaacaaattcaaagtgctcaattggctgcagcagaagcagctgcaaatgtaagacacgaaaaaactgttgtagatatttatccgcaagataaaaactctactcctttataa

SEQ ID NO: 41986 - DNA, 699 bp, Acinetobacter baumannii
atggaagaaagtctcttgagtatcattgttgcgttggacgctaaaagccaatatgacgctttaaaaattgttgaacaacttgatcctactttatgtcgcgtaaaagtaggtaaagagctttttactcatgaaggcccatctgttgtaaaaaaacttcaagaagaaaatttcgaagttttcctagatttaaaattccatgatattccaaatacgacggctcaagctgtatgtgctgccgcagacttaggtgtatggatggttaacgtacatgcatcaggtggccgtaaaatgatggaaacctgtgtggagcgtttaaaagcaggtaattatcaaacacaattaattgcggtaacagttttaacttcaatgggccgtgaagatttaaaagatatcgggttagatattgaacctgtagaacaagttaaaagattggcgaaacttactaaagaaagtggtttagatggtgtagtttgttctgctcaagaagctaaaattcttcgtgagttaatcggacaagatttctctttagttactccgggaatacgtcctgagggtagtaatgcagatgaccaaaaacgtattgtaactccgaaacaggcaatgcttgatgggtctacacatttagttattggtcgtccgattactaaagcagaaaatccaactgaaatgttgaagtcaattcttgcttcaattgcttaa

SEQ ID NO: 41987 - DNA, 912 bp, Acinetobacter baumannii
atgcagtccattagtctcattattcaaatttttcttgtattagcatttggttattttctaggtcctaaactctcactaaatattcggcattttatttttaaaatcctgccttatttttcttatattttactaaccagtgtagctttagaactaacactcgcccttgaccaaattgataatccttctactatacttccacctgctctattaattgcattaaccacttctcttggttctttttttacttgcttattcgcctatacaatttttgataaagaaagtgttaaagggaaaatttcacttcaactttttatgaatgcattaaaaaatattgccaaggcatttctagctttaacaataggcgtgattttaggaattcttcttacccaattacatacccatattccctttaatagttggtatttactattactttttatttttttaatcggaatagaacttgcttttactcattttaatcgcacatggttaagctggaaaattcttattgtacctttggccgcctttataggctcgtgcttagctgggtttctcaactattccttacttggtcatgagtttacacttaatgaaatattagctttgggccaaggctatggttggtattcaatgtcaggtattttatttacacagctacattcagctgagttaggtgggattgccttgctcacagatctatttagagagatagttgcaattttactcatgtataccatgggttggcggtttccacgtccagcaatttcaagtgctggcgctacctcaatggatgtaacattagcaatggtaaaacagtcatgtggtacacattatgtaccacatgccatgatgagcggcttactcttaagtctactcgctccacttttaattactgtgtttttaaacttttaa

SEQ ID NO: 41988 - DNA, 1509 bp, Acinetobacter baumannii
atgctaaacgcaaaacaacatgctattcaaaaaactaaaatcgcaattattggtgctggattcggtggccttgccatggctattcgtctgttacaaagccaacaatcagatttttttattttagaaaaatctaatgatgttggtggaacttggcgtgaaaaccgctatccaggagctgcgtgtgatgttcaatcacatatgtactctttgtcttttgcacctaaaactgactggtcaaaacgttatgcagaagctcctgaaattttcgattatatccaagatataaccaatcaatatcaaattaaaaactactgtaagtttaaccatgaggttactcatgtacagtatgatgaagtgcgccatatatggacactagattttgcaaaccaaccttctctcgaagcacaatttgtagtttttgcatcaggtccactacatattccacaaatccctcatattcaaggtattgaaaagttcaagggtaaagtttttcactcttcccaatgggaacatgactacagtctagaaggtaaatcagttgcttccattggtactggtggtagtgcaattcaatatattccagaaatcgcaaaagacgttaagcaattatatgtattccaacgtacagcagcttgggttatcccacgagatgagcgtaaatactctaatttgagcaaagctctatttaaaaaatcaaacttatatcgacaaattcatcgcagccgcctttattggagtaatgaatctcgcgttgttcctatagttcagccgcaaatcatgaaatatgggcaaaaattagctgaggcatttatacgtttccaagttaaagataaagatttagccaagaaacttacaccagactttgtgatgggctgtaaacgcattcttatttcaaataaatacttccctacttttaaccgtaaaaatgttgaattagtgactgagggtattcaagaaattaaagagaacagtattattacaaaggatggaaaagaaagaccaattgactgtttaatctatggaactggttttgttaccgatccacgtatttatttaaaacattttacatgtattggtcgcaatcaaattgaattgaaacaggcttggaaaaacggtgcagaaagttattatggaattatgaccaagaattttcctaacctatttcaactggtcgggccaaataccgttttaggtcataattcgattatatttatgattgagtcacaagttaattatattttacagcttattgatctagttgaaaaatctggacagcacgctatagaaattaaaccggaagttcaggattccttcaatgaaagaatacaaacacaacttcaaggtactgtatggcaagctggcggatgtagcagctggtatcaagctgccgatggaaagaacttttctttatggccaacttatacatggaaatattggctagacactcgtaaagttaatcctaaagattatttgttattaaataaatgctcacagagctatgcagcataa

SEQ ID NO: 41989 - DNA, 1020 bp, Acinetobacter baumannii
atgaaacgatcggcacttggtttaatctatttaattcaaggaatgcgcaatgcgggcattgatgtcgactcacgtttggcagatataggtattaaagtagattccttggacccaagctcaacaattcatgacagtttggaatgggatatacagcaaattattagtgagaatgttgacccagagaaaggattatttattggacaacattacgcattggcaggttatggtcctttactcatgttacttgtgaccagccatgatatacaaacagccttagaaaaaggcatacagtatcaaaagcttacgcatttatttggtactttgagcttacaagaaactgaaaatcacatcattttaaactatttaccggtcgatttaaaaacagaaatcggtttactccgtgcccaatgcgaaatttcgggcacttataagtttattcaggatatttataccatgatgggcttaaaaatgcctgatatgcgtatagatttaccatttccgaaaccctctgatccagataccgttgctcaatattacgcatattatggagatgatctacattttaattctacacatgcagcatttagcctaagtaagaatgtgctggaaataaaaattccttcagcagatattattactcatcgtatctatgaggctaaatgtattaaagaaatagaaagattaaatgaacaagatcatcaaataccgcctattattcaatatgtgcaagattatttagagctacaacaaggaattatcccgagcatggcggaaaccgcttttgctttgaaaatgcctgaaaggacattaaggcatcaattgcagcagcttaatacgagttataaacaaattcgtgaacagattattaagaataaggcgcttaaacttatggaatataaagagtattcaatagaagttattgcagaagcacttggttattctgaacctgccgcttttaatcatgcatttaaaagatggtttggacagagtcctcggcaatatggaaaagagttttactga

SEQ ID NO: 41990 - DNA, 1143 bp, Acinetobacter baumannii
atgttaaatttaaaatcttctcatagtactgcatttactccgtcttccccagcagagcgctatgctgaggcattggcttcaggccagtttatggcagatgaggcacaagcacaggcagtgcaagaattagatcgtgtatggaaagaacttttaaatcgttataaggcttctaaaaaagctttccgtcgtttccgccgccaaacttctccaaaaggtgtatatatgtggggcggtgtaggacgtggcaaaacttggcttatggaccaattttatgagtctgtaccatttcgccgtaaaacacgtatgcattttcatcactttatgcaacatgttcataaagagttaaataaactttcgggtcaacgtaatccactcgatatcgtagctgatcaaatttataaagatgctgtcgttatttgtttcgatgagttttttgtctcgaacgtaactgatgcaatgattttgagtgacttattccaaaagttatttgttcgtggtgtaacactcattgcaacttcaaacattgcaccagacggtttatataaaaacgggattcaccgtgatcgctttattcctacaattgaaatggttaaaaagaactgtgtcgttttaaatgtagatgcaggagtggattaccgtttacgtgttttaaaacaggctcaattgtttaaatcaccattaggtaatgaagctcaaagctggatatcagagcgttatactgctttaactcatactcaaacaaattctcatgaaccgattgtgatcaataaccgtgttgttgaaaccctagggcatacggaagatgttttatggtgtgagttttctgaactttgcttaaagccccgtagtccagcagactttattgaaattgccaatatttataatacggttttagttagtaatgttcctcacttaacagacttcctgtctgaaggcacacgtcgttttatttatctagtcgatgaattttatgatcgtggagtgaaactacttttaacctctcaagatagtattattgatatctatcaaggcgagaaattggcttttgaaattgagcgtactcgttcacgtttattagaaatgcagtcagatgagtatttgcattctgaacatcgacatattgatgcgactaaaacttcttaa

SEQ ID NO: 41991 - DNA, 960 bp, Acinetobacter baumannii
atggcgacctttcaaaaacgcaatggtagagtgacagctaccgttagaattaagccgcatccggctaaatcaaaaacatttgatactttgcgcgatgcaaagaagtgggcgcaagaaacagaagtaagattaaagaatgaaaagttagagattttcgaccatattatatttaaagatgccttaattgagtaccgtgatactgtctctattaataaacgtggctatgaaaaagaacgaagaaaaataaactttttattaaaagccatgtatgtagatcagccgctcattcaagttaataaagacttcttaacagaatggcgtgagcaaaggcttttaaatgttaaaggtgccacgattaggcgtgagtttattttgctgtcagcttttttcacttggtgcattgaggtcaagcgatggctatcagtgaaccctctacgtgaaattaagttcccttcagaatcaccgcatcgagaacgtgtaattagtgatgaagaaatagaaattttattacctttcttatctactgagatgcgctatatctttttaatcgctttacaaactggaatgagactttcagaaatttgcaatctgaaatgggaaaaaattagattgagtaaaagctatttaattttagaccttacaaaaaatggtcgtgcaagggaagtgcctttaagttcccaagcggttgaaatctttaaatccattggtccaaaaaagcaagggtatgtatttagcataactagcgatgatgcaaccgatgaatttcgggatgctaaattagaagcgggtttagaaggttttactttccatgatagtcgccatactgcagcaactaaaattgctttaaaaatcccgctgcttgatctgtgtaaaatgtttgggtggagtaatccgcggcgtgcgatgatttactacaatcccacatctagtgagattgcagcgcggctttcacagccgtaa

SEQ ID NO: 41992 - DNA, 252 bp, Acinetobacter baumannii
atgacagaggttaaatttgtttctatgcctgcatctgaattggctcaggttatcgaaaaggcatgtgaaaatgcagtaactaaagttttagcagcccaaggcgatgagctgcttaacattacgcaattatgtgaacgtataccgggcttatcctaccattcatttaagaagttagccaaagagcatagattcaaagatattaaaggccgttattcgcttacggctgtgaaagccgcgctgcaatctcactag

SEQ ID NO: 41993 - DNA, 576 bp, Acinetobacter baumannii
atgagtttaacacctgatgagttccggcagattgttaatccattggaacgccccacaagaacttggcactgtagtttttcttatcttgaaacgtggttgcattgtgaaagtgaagatattccgcatggtgtagaactggtacccgattttcaacgtgggcatgtatggactaaaaaacagcaaacaaattatatagaaaatgtcttgaggttaattgtagatgaaagcggattaacaattcgtttcaattgcccttcttggagaaaagagagagcaaaagattgtgatcttcttgatcaaatggtgtgtattgatggcttacaaagattaactgctatcagaaggtttattgcaggtgaattaaaggtctttggtcttaagtttgatcaattacctaaaaggcaaatatttagagatttgcagattgtggtgaagatgtatgactttcaatacaaggcagatttactaaagttttacttagatattaatggtggcagtatagctcacagtagatctgaattaaagagagttaaggcaatgctggaagaagttaaagcggaaagtaaggaggggtga

SEQ ID NO: 41994 - DNA, 402 bp, Acinetobacter baumannii
atgacagatttgaataaggaaggcaaagtcaatctaagctttgagcaagacaatggtgctgtttgggtatttgcaggtgatagtcaatttggtactgaaattagccatttgatgatgatgcatgcagatgaatataacgaagatgaattacgtgttatttgtcaccatgcagcatgtgaaattgacagacttagagtagagcttgaaaaagccaaagctcaggcggtgccagaaggctacgttttaatgccattagaacctactcaagaaatgcttggcgctgcaaaccttgcaccaatgcctatggtccatattgacagcatatctggcagagaaaagcttcgtatatctactcaatacaaagcaatggttaatgtttgcaaatcgggagctgagggatga

SEQ ID NO: 41995 - DNA, 168 bp, Acinetobacter baumannii
atgcgaagtttaattgaaaaagacaccgacgatttaccagaaggattacaaatcatcattatccgcgtctttgctaaagacttggcaattgaagcattagaacaagatgttcgcaagttcaaccaagctatagatgacgcaattaaaacattgaaggtggcagcatga

SEQ ID NO: 41996 - DNA, 1392 bp, Acinetobacter baumannii
atgcctcttaaagtcgtttttaaaccataccaatacgacattatcaaccacattcttgataatgaacgttgtgcagtgtttgcgggcatgggacttggcaaaactctttctaccctcaccgctttagaaattctcgaattgtttgaaccggggccgactcttgtggttgcccctttgcgagttgctgcaaccacatggcctgatgaagctaagaaatgggaacacctgcaagattataaagttgttgccgtggttggttctcccgaagaccgtgtacgtgctttaaaacaaaaagcgaatgcgtatgcaattaactatgagaatttaccatggttaattgattttctaggtagcaaatggccttttacaaaagtggttgctgatgaaagtacaaagcttaaaggttttcgtttaagacaaggttcggtacgtgcacgcgccttaggtaaagttgcacatactcgagtcaaacgattcattgaattaacgggaacacctgcacccaacggacttaaagacctttggggtcaactatggttcattgatcgtggtcaaagattaggcacaagtttcagttcttttacagatcgttggttccaacaaatacaagtgggcgtagatcgtaatgccgttaatcttgtgccatttgatcatagtcaaggcgaaattcaagcacgaattaaagatgtgtgtttgagcattgaagctaaagactactttgacattaaagagccgattgtttacccgattgaagtagagcttacaggcaaagcacgtaagacatatgaagaaatggaaaaagaaatgttcgttgaacttgctgaaaccttagaagttgaagcattcaatgcggcatcaaagacaatgaagtgtttgcagattgcaagcggttctatttacaccgatgaaaacggcacttggcaccctatccatgatttaaaaattcaggcgcttgaatcagtaattgaagaagctgcgggcatgcctgtgttggttgcataccattttaaaagcgaccttgagcgtttattaaaagcattcccaaaaggtcgccatttagataaagacccgcaaacgattcacgattggaacgcaggcaaaatccctgtgctatttgcccatcctgcaagcgcaggtcacgggcttaatctacaagacggtggaaatatccttgtgttcttttctcactggtgggatttggaacagtaccaacaaattatcgaacgtattggaccaacacgccaagcgcaagcgggctatgaccgccctgtttacatctatcacatcattgcaaaaaacacgatggatgaaattgttatggaacgtcgtgagtcaaaacgcgaagtacaagatttattaatggaggctatgaaaaagcgatgcgaagtttaa

SEQ ID NO: 41997 - DNA, 453 bp, Acinetobacter baumannii
atgacagagaaaatttgttcatttgagaattgtaataacccgattagatgcaaaggtgtctgcaataagcactatcacaccatcaagcagttagaaaagcaaaagccatgtgcatgcggttgtggtgaaatgacttcatatacttacaagcacgggcatcacactcggatgttttcgtctgaagaacaatcccgccgtgggcgaatgaacgatggctccgcgctcagaggaactggacaaaatagggcctatcgcaaatttagacaacgtcatgaacacagagttgttgcagaaaagaaaataggtagacccttagcaagaggtgaaatcgtccaccacatcaatggcaacaaatttgataatcgacctgagaatttagaagttatggctcaaagcgaccacataaaacatcatttaccaaaaatgttggaggcaagaaaaaatgcctcttaa

SEQ ID NO: 41998 - DNA, 264 bp, Acinetobacter baumannii
atgcgcgaatcagtaattgaaaaataccttgtggacaaggtcaaagccctagggggtgaagtccgcaaggttaaatggattagccgcaactctgcgcccgaccgtctagtaatgctaccagacaatactttttgggcagagctaaaggcaccaagagaaaagccaaccgcagcccaagcacgtgaacatgaacgcatgcgcaagatgggccaacgagttgaagttatagacagcatagagcgaattgaggagttattgggatga

SEQ ID NO: 41999 - DNA, 579 bp, Acinetobacter baumannii
atgattaaattttcaatacctttggcaactttaaaagctgctgttatttgctcagctaaaaaagacgtacgtcaatatttacagggcgttgctattgaccacgggcatgttgtttcaaccgacggtcacagaatgttttacgcagaagttgaaggactagatgccaaacttcaacaagtcattattccacgtgatgctattgagtttcttgcaaagaaagctacaggaattaaagacattaaaaaattagtaaaagtaaccttagatggacttgacggcactttggaagtgtcaggtacagatataaatgaacgttttcgagcatttgataataaattccccgcttggcagcgtgttattccaaaagctaaaggcgatgaatataaaggcgaataccctactttcgattggaaatacttagtcgatttccaaaaaattgcaaaaacacttggcgataaaagtttggtaccgcaagtcaaagtaaccccaacagtcggaccttcaagcgctgcgcatattgattttttaagtacagaaattaaaaacgtgcgcgccgtgcttatgcctttacgggcataa

SEQ ID NO: 42000 - DNA, 2076 bp, Acinetobacter baumannii
atgcaagacatcctttggcttgaccttgagacatattgcgaagtgccaattaaaaacggcacacacgcttatgcagaacaagttgaaattaccgtatttgcttgggcgttaaatgacggccctgttcatgttgaagacgttgcatcaaatcctttatcaaatgaactttgcaaattactgaatgatccaaatgtaaaacttatcgctcacaattcgcattttgaccgtaccgttttacgccatgctttaccaaaaatgggccttgatattgttctaccaatcgaacgttgggaagacacaatggtccaagctttgagccattctttgcccggttcgcttgattcactttgtgaaattttcaagatcgatcaagacaaggcaaaagacaaagcaggtaaacaacttattcagcttttctgcaagccccgccctgctaatcaaaaattacgccgcgctacccgtcaaacgcatccgcttgaatgggcgcgtttccttgactatgccaaaagcgatattttggcgatgcgcgagttacataaacgcattccgaagtggaattatcgtggagctgaattagcactttggcaccttgaccaaaaaattaatgaccgtggcgtttgtattgaccttgatcttgttgaatctgcaattgaagcagtagacaaagcgcaaaaaggattggcaaaacgcacggtcgcattaacagatggcgaagtgcaagcagctactcaacgtgacgcaatgcttaaacatattttagaagcgtacggtgtttcgctgccagatatgcagaaatcaactttagagcgccgtattaatgacgactctttgccacttgcagttcgcgaattgcttgccatccgtttacaggcttcaactaccagtacagcaaaatacaccgcgctcgctaaaggtgttagctcagacggtcgattacgcggaactttacagtttaacggtgcatcgcgcacaggacgatgggcgggccgattattccaaccgcaaaacctaccccgtcctacgctcaagcaagatgtaattgacgaaggcatcgagactttaaaaataggctgcgcggatatgttctatgaaaacgtcatggaactaacaagctctgcaattcgcggttgtatctgtgcgccagaaggcaaaaaactcgttgtagccgatctatcaaacattgaaggccgcgccctagcttggcttgcgggtgaaacatggaaactcaaagcgttctatgactttgatgcaggcgaaggccatgacctttataaattggcttatgcaaaatcgtttggtgtatcacctgaagacgtagacaaagaacaacgccaagtcggtaaggttcaggaattggctttaggttacgaaggtggtgtaggtgcatttttaacgtttgcagctgcatacggcttagacctagacgacatggccgcacaagcttttgacagcattgacccaagcataatgaacgaagcaatccgcgcttgggaatggcataagaaagaaaagcgcaccactttcggtttaaagaaaaacacatggttagtgtgtgattcgttcaaacgctcatggcgttatgcacatccaaatattagtgcatggtggaatgagcttcgcgtggcagcgattaatgccattaacaaccctgataaaccctttccatgtcgcaaagttattttcattaaaaaaggctcttggctttacatcaaattgccaagtggtcgtttcctttgttatccgggtgcaaaagcggacgacaacagaatttcttacatgggcaataaccagtacacacgtaaatgggaacgcctttacacctatggcggcaagtttgccgagaacattacgcaagctgttgcccgtgatgctctcggacacaacatgcctttaatcgagagttcaggttacgaaattgatttaactgtgcacgatgaggtgattacagaagccgatgacgtaccggaatacaaccatgaacatttatcaagcctgcttgctaccaatcccgaatgggcacttgatttgcctttagcggcagcgggctttgagtcatatcgctataagaaggattag

SEQ ID NO: 42001 - DNA, 846 bp, Acinetobacter baumannii
atggaacaatcagtagacaaaatcgcagcgctagcaattgcggctcaaggcaacttacctgtacaggttgataaaaaagcttcaattgcaattgtgcctgaaggttttaaggttcatagcactgaaaaatttaacgctttgcgtgaccgtttccgcggaactttcaacacaaacaatatcgattcattcgttgaatatgcaaaagctcgcggtgtggcaggtttaaaaaatttcattaatacccgtagcacgcttaaagccgaagcgttttttaatattggtaatgaagccgacccgggccatgctgacgatacagccgttttagtcttggataaaaagcctgaatttattgcttttgaaactgccaatattcgccgttataaccaagaagatttaatcgatctattagacgattgggccgagttcgtaacccttcaaggtaaatctactggtgaagatggttcaaccttgaacactattatcccattcgataaaggcattcgcgcacttcgcaaagtaaaaattgccaaaaacgctgaactaaatagccatgtaaatgaaatgggttatcaacgaagcgccgcagaaagccttgaagcttcaggtattgatgaaaacttacctactgcaattgttttgaacactgaaagctacaaaggcttaccagttgaatcaatcgtaatttccctccgtatttcggtaaaagactctgaacctacattcattttacgttttgtaggtaaagacaaccacgaccaaaaacgtgccgaccaatttatcgaaatcttgaaagaaaaattagccgaacttgaaggcgaattctaccaaggtgttttcgaagcctaa

SEQ ID NO: 42002 - DNA, 327 bp, Acinetobacter baumannii
atgaataatttaaccgatgtacctcaattccttggcgacctaaaaggcggtgtagctgaaaagcaattaggtcttttcctttcaactgtagcgggcgctgttatcacacacggtaaagcaggcaaagttactttggagttaaccgtaaaccaaatttctgacagtagccaagttgaagttgctcacaagatcagtttcaaagccccaaccgaaacaggtgacaaaaacgaaaacgcaagcggcaaaacccctatgcatgttcttcaaggcggcaaattgtctttaatgcctgaacgcgtcaaagccgaagattatctaaacggctaa

SEQ ID NO: 42003 - DNA, 564 bp, Acinetobacter baumannii
atgaaaattcgtttaaacaatgtacgccttgctttccctgctttatttgaagctaaaaccgtaaatggcgaaggtgaccccgctttctcagcgtctttcattcttgctagcgatcatccgcagcttgatgaaatccgtaaagcgatggacaaaatgggtgctgaaaaatggggcgctaaatggcctcaagttaaaaaagaaatcgaaaccaaagaccgtatggctttacacgatggtgacactaaaggcgattacgaaggctatgcgggtaactactttatttcagcacgtaataaaacccgtccaacaattttcgaccgtgacggtaaaacaccgttagttcaagcagacggtcggccttatgcaggttgctacgtgaatgctgcaattgagctttggtgccaagacaacaactacggcaaacgtatcaacgcatcacttcgcggtgtgcaattcctgaaagacggtgaagcatttgcaggcggtggcgtagcttctgaagacgatttcgaagacttaagcgcatctgatgaaacggaagaccctttatttgcaggcgcataa

SEQ ID NO: 42004 - DNA, 1293 bp, Acinetobacter baumannii
atgacagcacatgcaaaattaagtccttcttcggctcaccgttggatgcgttgtgcaggtagcgtaattcttgagaaagacctacctgacagcagctcagagcatgccgatctaggcacggctgcacatttccttgcttcggaatgcttagagcaaggtaagaatgcagcagatttcgaaggccacacaattgtcattatcaaaggtaatgccctttggattgatgcagttactgaaagccccgtttctagtttcttcacagtagacgctgaaatggttgagaacgtccaaatctatttagatgcggtgcgttcccaagctgaaggcaacgagttgcttgtagaacagcgtgttgatttttccgagttcattggtgttgaaggttctttcggtacaagtgatgtcgtaattcttactgaaacagaaattcaggttcacgacttgaaatacggtaagggtgtaaaagtagatgctgatgaaaatgagcaaacatcgctttacggattaggcgctttagcgacatttggaatgttcggtgactttaaacaagtgcgaatggtcattcatcaaccacgcttaggctatcaatctgaatctgtattaacagttgaagagctttacgactttgcagataaagccaaagcctccgcttctcacatccgctccttagaagagggattagatgaaggcgatatgggcgcgattgccgacctagacagttcatttaatcctggtgagaaacagtgccactggtgtaaagcaaaggcaacttgccctgcgctacaaaagcacttggtagaaaccattgcaggcgagtttgaggatttaacccaactcgatttgcaagaagaaatcaccaatgcaacggcacaagttccaagtttagagaacgaacaacttagccgaatgtatgcagttatcccccttctcgaaggatggattaaagcggtcgattcagcggttcaccaaaagatgcatgcaggtgaagcgatacccggcttcaagatggttcaaggcaagaaaggtagtcgcgcttggactgatgcagaagaagcagaaaaactgcttaagagcatgcgccttaaaaccgaacagatgtatgacctgaaattaattagtccaacaaaggcggaagctctcaagaaagatgaagctatcggcccgcgccaatggacaaaaattgaagcccttattactcaggcggacggtaaacctactgtcgcacctgaaagcgacaaacgtcccgctttggacatgaaaccacaatttgaagatttaacagtatcggagtaa

SEQ ID NO: 42005 - DNA, 135 bp, Acinetobacter baumannii
atgaacactcaaacccattttttaaataagcgaattaaagccgtgtttacagttcgtgagctaatcggcttcacccttgccctgctaatcatcatctttttagcagttgcagcaggctttacggcagctcaataa

SEQ ID NO: 42006 - DNA, 459 bp, Acinetobacter baumannii
atgacaacagatatccatgcatggcgcagcgaaatttgcgcacaactaatccgcacaggcaaaaccgacattgaagacgtaattaaagatgcaactcgtcttgaaacatatgtgttcggtagtactaaaactgcggatatcaaaaacgcagaagttaaaacttctaactctgcaaaaactcaaacggttaaagaaaccaaagcagaaaaggttgaagaagtacaagaaaccaaatctgaaactgcaccagttgaagagccaaaagatgaagttgttgaagaaacaactaaatcagaaatcactgaaaaagaagtgaaagacgcttgtttagcagtagctaaaaaagaccgtgctgcacttttaaaaatcttaagcgatatcggcgttactacggttgcaacaatccctacggataaatacgcggctgttattgaagcttgcgaaaaagcacttgcataa

SEQ ID NO: 42007 - DNA, 627 bp, Acinetobacter baumannii
atgaaaactgaaatcgggcaagcaatgcgtaaattgagaaaggctaagaaaatgactcaagatacacttgcagaaaaattaggcgttgcacccgcaaacatttcccgatatgagaaaggtcaacaaggaattgaaattgataagttacctacattagcggatgcattgggggtatctgttcctgaattctttgctatcgcatcaggtgctgaagttgataactttgaacccgcccctgaattaaggaaagttcctttaatttcatgggtccaagcaggaaaatgccaagaagtgtttcacgagccccacgccctagataatgttgaatgggttgaaactacctaccgtgcccgccgttacacctatgccttacgagttgtaggtgatagtatggaaactaaatttccagaaggatgtatcatcatcgtcgaaccagaagagcaagcgcataataaaagccatgtcattgcgctaatgcccgatagcaataaagctacctttaaacaacttattgatgatgaatctggtacatacctaaaaccattaaacgataagtacccagttatagcagtcccaccaggcactactttctgcggcgttgtaaaacgcatggaaatggatgtttaa

SEQ ID NO: 42008 - DNA, 252 bp, Acinetobacter baumannii
atggcctctccattagcaagaaaacgcaaggaactaaagctaacagttgagcaagtggcctcaggtgttggctgttctgcacctaattattggcgaattgaatccggggaacaacagccgcgcaagaatcttctccaagcaattattcgctatttcgacaatcaagttaccgaaatggaaattctattccctgaacagttcgcaagtgaagatgatttcgaagacctcacacaagaggagaatgccgaatga

SEQ ID NO: 42009 - DNA, 405 bp, Acinetobacter baumannii
atgactgaaggtcaaaaatttgataacgcgaagccgcgtttctcgttaattccaaaaggttcgcttgcgcccgtaatcaatgtacttgaattcggtgcgcgtaaatattcagaagacaattggcgcaaagttgccaatgcagaaacacgttatttcgatgcagctcaccgacacctaaacgcatggtgggatggacaaacggcagaccctgaaacgggtgaatcacatttagcgcatgcagttagctgtttgcttttcattttgtcattggaacaagaaaagagcgtaccgcatgcaatttgtggtacttgcggatttgctccatgtgaatgtaagcaaactcttgcaaacacggatacctaccgaccgttacgaaactcttattcagttgaatgggggcgttga

SEQ ID NO: 42010 - DNA, 495 bp, Acinetobacter baumannii
atggatgctaaacaatttattcgtgagtatggtcttgtgaaggctaataaagttgttgatggcgcgcctagtaatgctgagagttttcaagatggttactacttcagaactaagccgcaatttgaatttcacaacggttttcaccctgtttggaacataacggataacgatggtgcgtatttcaaaaaacggggggtcgatccggtagggattaatgatctgaaaatggcgcttgaaagtattcgcatcgttgatcaattcggtggaatagaaaaagctaagttcaaatcacgaaccaaagacgggatgggttatttaaaagagtgcatcgcggatgttgaagcaatttatgctaatccacagtttacctacacggttttaactggcgcacaagttggttcagtgcttcagctcacgccacaaattgatgacatgggcgacgatagtaacttagatcatcacgtttcacctttctgtgaggtgcgtgacgtatga

SEQ ID NO: 42011 - DNA, 2610 bp, Acinetobacter baumannii
atgagctatttcaaggaacacggtaaaaccttacttgctcatcactacatgattgtaccgatcaagcaaggtttaaaacgtcctgtaatggacggatggcaaaacgttcgacttactgcaagtgacataccgcgctttgcaaatcaaggcgtgggcattttaacgggtcaagggcctttcccaatttgtgcagttgatattgacgtaactgatgcagatttatcacaccagtttgcagaatggtgccgtgataatttaggtgtgagctgtgagcgtgtcgggaatgcaccaaagatattactggtgtatagagctgaagattctgattggggtaaatcaacttcggcgtggtttgccgatcctgccgaagtagataaaccttttaaagaaatacacaaacatcgtatcgaagtgcttgggcgcggtcaacaattcgtcgcgtaccatgttcaccccgatacgaataagccgtatgaatgggttgatttcttcggtggcctgactgaatttgctgctaacgctttgccgaccattaccaaagaacaggtcgaagaagcggtaaaagcttttgaacgtatggctgaagaacacggctttgtgcgtgtgaaaaacagcaagtcgcgtattggcgctttgacatctagcgaactcgcggatgaagaagatttattaatgacgactacggcaacaatcggttggtcgttggatgaagcgaaaaaatatttagaacatatagacaatgaagattatgacacttggcttcgcgtggggatgtctttacatcatgagtttgacggcagtgacgttgctctcgaactatggaatgaatggagttctaccgcatcgaattacgttagctttgaagagctcgaataccgttggggtacgtttagcggtaatggatcaacaatcgttacggcgcactggttacttaaaacaggtcgtgaatctaaacaagcaaaacttagattagagaaacggcagattcttgctgacattaaaaatcagattgctgattgccgtgaccaacaagagcttttgcaggttgtagccaaagaagcaggcaaggttgcaggtactgaccttgctttgcgtactgaactatcgggacttatccgtcagcgcttcaagcaattaacaaagatcagcatttcagcgcgtgaagtgaatatcgcaatgggcggtcgaaaagtgcaaattgcacttgatgatgcccaaaagcgcccgatgactgaatttggtaatgcttcaagaatgctagacgcgtacggcaatgaaattatgtttattgccgaaacaaatacctggtaccgatggaatggtgtttattgggaatcgtgcgtgaacatggtcatcgagcagtatgcaaagcaaactgttttggctatgggtgacgaagctaaaaagattgatgacgatgcgcaacgtgccgagttctatcaattctgtgcaatgtctcaaaaggcgttcatggtcaaaaacatggtgacgcttgctcaatccgatccacgtgtattggttccgatcaaagaattagacagtgatatttatttactgggctgtgcaaacggcgcggtgaatttgcgtgatggtgaattggttaagccaagtcaagaattgctaatcacatatagcactggtgttgaatacaaccctaaagccaaatgtcctctatttgaaaagactgttcttgatgccttttttggcgatgaagaaatggctaattttttccgtcgtttaatgggctacgcaattttaggtaatccaaaagaaaaccttatggtcatcccgttcggtgatggctctaacggtaaatcaaccgtactcacaaccattttcaaagcacttggtgattacgccaagatgacgcccgctgaaacattcttaggtgaaggccgaagtaatgcaggcggtgcgcgtgaggatttattgcgtttacgtggtgcccgttttgtctatgtcggtgaaccggaagaaaacaaggaattaaaagaaggcttggttaaatccatgacaggcggtgaatccatcacggcccgcggtctttattcgcgagtttctgttgagttcaagccaacgtggaccgttgtaatgccaacgaaccataagccaatcattaaaggcggtgaccatggtatttggcgtcgcttaatgatgattcctttccaacgaaattatgacgctgacaagtctcttgttaaagacccgaaccgatctgaaaaacttcaggctgaacttgaaggcgttttagcttggcttgtgcgtggtgcgcttgaatatcagcaagaaggcctgaacgagccgaacaagacgaaacaagcacgtgacgaatatcgcgatgaaatggaccttttaaaggactggattagtgagtgttgtgagcttggtgattatcgcgaaacgtctcaaaacctttgggtaagttgggaagcgtatgcaaaagcgcgtaacgaattgcgctatatcccttcatcaagggcgctaggtcgtcggcttagtagcaggtttacctctgcgaaaggtacaggtggcaaaaggctttttgcaggtattagagtttccgtaactcctgattccgaattatttgcggatgagagcagtaagcagtga

SEQ ID NO: 42012 - DNA, 210 bp, Acinetobacter baumannii
atgcctgttttggcttttctccctgaatttgtagtgaaagacaaagtaaagcgtagctctgagccaaaagttacagaggaagacgtgaaaaacattcgagcactacataaatcgggcatgtcttatagacaacttggtcataaatacgaaatttcccacgaaatgtgccgacgtatttgcgtggggtattgctataaggaggttttctaa

SEQ ID NO: 42013 - DNA, 732 bp, Acinetobacter baumannii
atggctttacgtggaaaacagcaaagatttgttgatgaatacctaattgatcgtaacgcaacgcaagctgcaattcgcgcaggatattctgcaaaaactgcgtatgcaattggtgaacagaacttgaaaaaacttgaagttaagaaagccattgaagcaggcgaagctgaacttgcagaacgcaacaaaatcacgcaagacaaggtactaaatcgcctgtgggaaatggcaacggccgaccctaacgaattaatgcgatacacacgtgttaattgccgattctgttggggtattgaccacaattaccaatggacagtaggcgaatttaaaagagcaattcaacacgcgcacgacacgaatgcacctgaaccaaaatgtgaaggcggtttagattttgatcgtctcaaagcgcctaatccagattgcccagaatgccgcggcgaaggcgttggatatacgtatatcgcagatacgacacgtgtaagtgaccaagccaaattgctttatgcaggtattaaagaatctcagcacggcatagaaatcaaaatgaatgaccaagtcgctgctttgattaaagcaggtcagcacattggcatgttcaaagatcgtgtagaacttggcaacgacccagaaaacccgctaaccgatccaaaagcagcaagcacacagctacgtctacttgccaagttgaaaaaggctaaggccaaaaataaggagaagggcgatgcgtga

SEQ ID NO: 42014 - DNA, 210 bp, Acinetobacter baumannii
atgcgtgaacagcacaattacaaaatcggacagcaagtctatttgcccacgagacgtaagtattactacatcaacggcattcatgcaaacaaagactattggttaacaggtattgaagatttcactttgtcattgaatgcagaaccaaacaaagcaaccaagcacgataagacatttcgtgttcaaccttggcaagtggaggctatttga

SEQ ID NO: 42015 - DNA, 1623 bp, Acinetobacter baumannii
atgaacaagcccaacgatgacgaactactcgcattaattgcggatatgagcgaatcggaaattgagcaatttattaattcgcttgatgaagatgaacgtgcagttattagcaggattcttgcaaatgcgcctgtatggttcccgcttgaaggtccgcaaatggctgcttacacatcggatgctgacattatcggttacggcggtgcagcaggtgggggcaagactgacttgattgcaggcttgtcactcaatgtccataaacgcgtgctgattgtacggcgcgagaaggcacagacagacggcattgtgcaacgtatcgaagagatcgtagggcacaagaacgggtacaacacgcaaaagtcagcatggcgctttgacaatggccgtctcttagagttcggcggccttgacaacatgggcgatgagaaacgttggcagggtcgtgcacatgacttgaaggcattggatgaagcaacagaaatccgtgagtcacaagcaatgttcgtaatgggttggaatcgtactagcgacccaacgataaaaccaaagtgccttttgacatttaacccgcctactacagccgaaggccgttgggttttagatttctttgcaccttggattaagaaagggtacccgaaccctgcacaacccggtgaacttcgttggtttgcccgtatcggaggcaaagatcaagaggttgagagcaataagccgtttgtacttattgacgaccaaattgtttatgactttgacactaacgactacaagcccgaactcatcattaaacctaaatcacgcacgttcattccggcacgtgtgactgataacaagtactacatggaaacaggctacatgagtaccttgcaagcgctgcctgaacctttgaggtcacaaatgttatacggcgatttcggtgcgggtattgaagacgacccttggcaagttattcctacagaatgggttgaagcagcacaagcacgttggaaaccacttgaagacatgcgtattttgcatcgtggtgatttcaagatggattcttacggattggacgttgcacgtggtgggggcgataacacaattggctttgcgcgatatgcacattggtatgacaacccgaacgtacttgaaggtaaagattcaccagacggaccaacaagcgcctcgtttgctgtttcacatgttcgtgaccatgcgcccattcatgtcgatgtcattggcgttggtgcaagtacatacgatttcttaaagcaatcaggcattcacgttgtacctgtagacgtacgcaatgctgcaacttctttcgaccgttcagggcaacttagtttttacaacttgcgttctcaactctggtggcaattccgagaagcattggaccccgcatacggcagcacagttgctttgccacctgaaccaaagcttttagcagacttaactgcaccacgttgggcgttgcaaggtaccaaaatcaaagtggaatctcgagaggaaattattaagcgtattggccgcagtcccgattacggttcagcaattatcaatgcgcaaattgatacgcctaaacgccacattatgcaggcgatcaatgcatcagctgctagacgtgattacgacccatacgcgtag

SEQ ID NO: 42016 - DNA, 255 bp, Acinetobacter baumannii
atgtgcgtgaaaaatattcttgacggcgtaaccaatattcttgggatggatgcaccaaaggcgcaagtcattgcaccgccaaagcaaccaacgcgccaagattctaaatctcctgattcatccgcgaccattgaccgtgtacagcaagcacaaaattccatgtctggtggtattgcaaatacgctttataccgatgctcaaggcgtgagtgacgaagatttgcgcttaggcaagaaaactttattaggcggttaa

SEQ ID NO: 42017 - DNA, 1692 bp, Acinetobacter baumannii
atgactgaagacgatatcagagcgctgaaaaaacggtttgatgctgtttggcaattacgtgtaaatgatatggacgattattgtgccgaattagcattacacgttttgcctgctgccatcaaaacgattaaagaccaagaaaagcatgaccgatctgcatggtccaaaattgttgataacactggtaaagactcgttgaaaacccttgcagcgggtatggtatcgggcacttgttcgccaagtcgtaaatggttcaccttgcaagccgcagatgaatcattgcaaaaggatattgaagttcgccaatggcttaaagctgttgaggatgcttgttatgttgctttttcaaaaagcaatgtttatcgaactgtacatcatatttacatgcaagaaggcgctttcggtatcggtgcagcattagctcctgaacatggtcgcaattcaaaagctcaactcatggatttaataccgcttactttcggtgagtttgctatcacaacggacgagtttaataaaccgaacggcgtttatcgcaaattcaaattaacctctatcaacatggttaaatattttggattggataatgtttcggatgctattaagagtgcgtttgaaaataaaaactacgaacaagagtttgaagtttgccatgcaatttatgaacgagtagatgcaaaagggtatggacctaaaaacatgcctttcgcttcaatttactatgaaccaagttcatcaaataaattgctacgcgaaagtggcttaatgagttttcaggttatttgcggacgttggactgtttcaagtagtgatgtgtacggtgaaggccctgcaagcgattgtattggtgatttacgtgcattacagaaaggtcatcaacaaattgcagtaggtgtggactatcaagttcgaccgcctttgcttttacctgattacttgaaaggtcatgagcgtgagacattgccaaacggtattgcattttaccaagcgtcaccaacgagccaagttgcacaagttcaagcaatgttgaatgtgcaattcgatttgaacggtgttatggcgcagattgcacaatgtcaagagcgtgttaaacgcgcatttcatacagatttgttcatgatgcttgatgcttttgataaaggcaaaatgaccgctacagaagtatatgaacgcaaatctgaaaagatgctcatgcttggtccggtagtagaacgtcaaattgatgaattattgcgtccactcgttgaaatctgcgttgagcgtgtattagcaaacagtgaatacctacgccaaattgcaccagaagctattcaaaacgccgatgtcgaaatcaatttcgtatccatacttgcacttgcacagaaatcttctggttcggcaattcttgaacgtgcccttgccatgattgggcaagtagcccaagtcgacccgcaagtacttgataaagttgatacagataaatttatggatgaatacgcagagattaacggcgtatcgcctgatattttccgtcctcaacgtatcgttgaccaaatccgtagtgaccgtgcagcacaacaacaaattgcacagcaacaagcccttgctgcccaacaagcacaaacgcaaaacactaacgccaatacggttaagaccgtaagcgatacagatgcagaaactttgtctgacatgttcttgcaaggcggtggcgcatga

SEQ ID NO: 42018 - DNA, 333 bp, Acinetobacter baumannii
atgagcgatttagaaaccaaagctaaagaaaataagagtgaacgtgaccaggaactaaatgacctgcgctcaatcttggaaacggaacacggtaaacgttttctaatgcgattaattgatcgggcaagcatatttcaacccacctatggcggtgggtcacaaatcagtgattttgctttcatggaaggccgccgagagtttggcctatacatccttggtgaaatcacacaagccaattcagatgcatggctagacatgcagaaacaacgattttcaaaacttaaagagaaggtgaaccatgagcgaagtgacaacaactacgacagcaactga

SEQ ID NO: 42019 - DNA, 663 bp, Acinetobacter baumannii
atgagcgaagtgacaacaactacgacagcaactgatgcagcaactaccgctactacaacggatacacctgctgtaactacaactgctactgaaacaggtgggggcaatcctgctacaactcaggttgaaaccacacctactacaagcactactacagaaaatactgaaacaaagcctgaagttttattaggtggtgaagaaccgcctgcagaacaaccaattcaatacacagatttcactatgcctgaagggtactctctgaatccagaagattcaaaaacccttcaggaacttgggcagcagttcaaaatgccgcaagaagcggtgcaaaaacttgtcgatttaggcgtgcaaatgcaacaacgacaagcgcaggaacagcaaaaagtgattgcttcttgggttgatgcagctaaagcggaccctgaatacggcggggaaaaattgaaggaaaacctgttgacagcacaacgcgccttcagcttaccacgtggcgctgaaatctctaagattctctttaagagcggactcggtaaccatcccgctgtaattggctttatgacagaagttggtaagttgttagaaggtgacaacatgacacatggaaaaggcacaaatacagcgaacgtggcaccagcggccgtatggtatgacaaatcataa

SEQ ID NO: 42020 - DNA, 1023 bp, Acinetobacter baumannii
atgcctacgattgtacaaacaaacccaacattagccgacgttgcccataacattggtacgaactctaaagttggggcgattatcgaagtactcaacaaacgtcaagacttacttgacgatgctgtagtgcttgaagcaaatagtggtacccacaataaaactagcgttcgctcaggtttaccaaaaggtacatggcgtaaattgaactatggtgtgcaacccgaaaaaacatcacgtgttcaagtctctgatagtactggtcagttaacttcgtattcagaagttgataaaaccttgtacgaccttcaaggcgaaaataaaaaacaatggcgctctgaagaagatgcaggcttcttagagggtatgtcacaagaggtaatggaaaacattatctatggtgatgttgcaggtgatgtatctacctttaacggtttagcaacgcgttacaaccatcttattgaccctgaaacaggcgtagcacctgcaaacgctgtaaacattctggatgcaggcggtacaggcactgacaatacgtcaatttacattgtgcagtgggggcgtgaaaaaactcacttgttctatccgcaaggtacgcaagcgggtcttgatattcaggacaaagggcaacaaacggtacttgatgcgcaaggcggccgttatgaagcaatgcgaacatacttccaatgggacgtgggtttatctgtacgtgactggcgctcggttgttcgtatcgcaaacattgatgtttcggacctttcaaaagatgcatctactggtgcaaatcttattgatttattggacgaagcactttctctcttaccacttgcaggttcagcacgtacagcaatctacatgaaccgtactgttaaccaagcgcttaaaggccaagtcaatcactttaaaaatgtgcgcttgactcttgaagacttccgtaaagacggtagccgcaaaattcaagcatgggatggtgagccgattcgcatctgtgatgtgattcttaacactgaagcccgtgtagtttaa

SEQ ID NO: 42021 - DNA, 405 bp, Acinetobacter baumannii
atggcattagttgataaattactacagttctccgataagcaagctattgcggcgggtgctagtactttcactttggacacagtgcataaatctgttggtacagcgggtttacctatctgccttcaagggcatgtagtcggacctgcaaacgctaccgttacagtgacacttgaagaaagtgcggacggtacaacttttacagcggcagccgcgtcaaaagtgtttaaagctgctgaactgaacaaaggtacgttcttttacgtgaacagtgcgacaaaacgttttatccgtttgtcttatgcagttgccaatgcgcccactggttctatttcggcttggttgggcaatgaagcggatatccgtacaaactacgacgctgtaagcggcgcaactgttccagtttaa

SEQ ID NO: 42022 - DNA, 186 bp, Acinetobacter baumannii
atgtcagaccaagtattagtagttgctatcaaaaaaggtttttaccatggtattcgtgacgtaggtacagaattctatgtgcctgcgggtttagtgaacccaaaagtaaaaacttggtttaagccagttgaagaaaagccgaaagcatcaggccgcggcgcgacaggctcaacacaagctgagtaa

SEQ ID NO: 42023 - DNA, 555 bp, Acinetobacter baumannii
atgagatcaattgttgatctttgcaatttagccctgtcgcatctcgcgcagggctatgttgtaaatgaactaaccgaaccgacaaaacatgcaagattgtgtaataccttttacccgatttgccgtagagagctgttggacaacgaacatcaatggacgtttgccattaagcgcgttcgattgaatgtcgatgcagggtatgagtttggcacggcgtatgttctaccgagcgacaaggtccgcatatttcagcttgaatcaggcagccgattctatgtagaaggcaatcttctattcacagaagataccgcaccaatcttacgctatgttcacgatgtgaaagacttggcattaatgcccgattctttcaagaccgctctatcttatttgttggccgcacgaatagcaggccctttgacacagaatgagcaaaaacaaatctccatgatgcagctttatgaaattgaaaagaacaaagcaattttcattgacctgcaacaacatcggattgaagcacggcctgagcatacaggctcaatgtttgaggcacgataa

SEQ ID NO: 42024 - DNA, 2037 bp, Acinetobacter baumannii
atgcaatattcgtttaatggtggcgtaatttcgccggatatgtttggccgcattgatcaggcgaaatatcagactggtgtagctaaatgcaaaaacctttatgtcgaactgtttggcggggttgtctatcgtgcaggcttccgctacgtacaccattacccgaaaacaatgggcaaaatgcgtttaatccgttttgtttttagtgaagagcaagccgttgttttggctattcgtgcaggcgctataaatttctttgctgacggcggtatgctgctgaatgaaaacaatgaacctttagaagttgcggtaccgtatgccgaagagcatttaatgcaactccgctatgctcaatctgcggacgttgtgacaataacccatcctaactatccacctagaaaaattattcgtaagagcgcaacggaatggataacagaactggttacagtgggatacggcattggcacaccgcaaaatgttgccgcaactgcccatattgaagataagtataaacccggtggaagtatgcacgactcatacattgagcgtgattattcttaccaagtcaccgcagtagatgaacaaaatgaatctgctgcatctttaaaggttgttgtacaaaacgacttaacactagcggggaattacaacacgattacatgggatgcggtaacagttgcgaaccgttataacatttttaaactacgatctggtttagcaagctttattggtgaaacaactgaaacaagcttcacagacgataatattgagacaaacggttcaatcacaccgccattaattcgtaatccttttgaattttacccgaccgcagttgcatatcacgggcagcgaaaagtgtatggcggcggttataaatcgccccaatggattcgcatgtcgcgtacggcaacggatgataatttcgggtaccacattcctactcaagatacagattcaattcaaatacggtttgctgcccgcgacggtaacggtgttaaacacctagttacaatgagtgatttacttattttgacaagtggggccctttggaaaatgtcagcggatggagccgtaacagctgctagtgtgaatatgaacaagcagtacagtacaggtgcaaatgatgtgacacccgttgaagttgacggcgctacaattttttcctctgatcaaacagggcacgtacacgaaatatcattggcaagcggatacaacgcatctttttatcaaacaatcgacttatcaataatgtgcccacaactttttgatgggcaaaaaattattgattgtgcattattgcgtaaccctttgaatattatatattttgtacgtggtgatggtgttttgctttcattaacatatgagccaaaacaacaggtttgggcttgggcagagcatcacaccaacggtaaatttttgtctatagcagaaataccggaggaagatcaatctgttttatatgcgtttattgagcgtgacggtttttataccattgaacgtatgcttacaaggcagccgttagatatgcaggataagtgctatttagatagcagcattcagtacaagggcaatcctacatcaactttaaccggcttagattggcttgaaggtcaaacagtatctgtgtttgcagatggtggcgttaaacccaatgtcaaagtagaaaacggcacaattaaactgccacgtgagttatctaatatttgggttggtctgaattacgaagctgaactacaaacattgccgatttttcaagaacaaaaaaatcctgttaaacctaaagtcgtgaataaggttcacctaagagtaagagagtctcaaaacattttggccggtgctaatcaggatattgaggatcgcacaccaattgatgagtttaaaccgcgtagcaatgaacgctatggtagcccccttaaattgtattcgggtttggtagaagtaccagttgacagcacttacgaaagagacattcaaattactgtaaaacatgataaacctttaccaatgaagatattggcccttgaggtagaaatgacatga

SEQ ID NO: 42025 - DNA, 471 bp, Acinetobacter baumannii
atgagacgaaataatattgaaattcgtaagccgactgagcgcgatattcgtattcttgttgaaaacctgcgtgatgccgataaagacgaaatgaaagcgtacttcaatgacaattttcattggatgatcaaaatgtctatcaagcattcaagcgatgcttggactgtagtagttaacggtaaattgctttttatttgtggtgttggaatgtcaagtttaataggtaacgttggttgcccatggttacttggcacaaatttcataaaacaatatccgtttgaattttacaaacaatgccaaagtattttaaaggaaatgcggtcggagtatgccgttcttgtaaatcatgtgtatgaaaaaaacgagaatgctatacgtttcttaaaaagactaggctttgatttaaaaaaagcggaaccatacggcgcgaacaataaaatgttccatccgttcgtgatgggggcgttatga

SEQ ID NO: 42026 - DNA, 630 bp, Acinetobacter baumannii
atgacaaatccatatgcatatgcagcggttaaaggtgtagaagcgctttccaattacgcaaaaatgaaggcgcaaaaacagtcatttaaggaccaagaaaagctcgccctttacaatgcaaccctttcagataatcaggctcggcaagccatcgaagatggtaccaatgccgtaactgattatcagcgtaacgtttcggcctttaaatcaagccaaatcaacgcccttgcggagaatggtattgatgtaacacaaggttcagccattgatttacttgcttcaacagagatgctcgctcaaggagatattgattcaattaaatacaatgctgcgcttcagtcttgggggcacaaggttcaagccacaaattaccgcaataaagccgaaaattaccgtgttgctgcgaagtccattagacctgtattaagcacgatactaaaccttagcggtgaagctgcttccgcttttggttcaagtatgggtaaaggcggtttaggtggagggcttgaaagaggttctgcatctagtggcggttctgactttgcttcaagcctttatgatataggtggcagtaattcgcaaggtgcatcatggcaaaattataattggaattggtttggagctagttaa

SEQ ID NO: 42027 - DNA, 2295 bp, Acinetobacter baumannii
atgcgtatcccacaatttaatcgacaagtttcggacaatagtgttccaaatgtacaagtcagtggcggcatgtcagcaggcgaagccgctagcttagttggtaataaaaccgatagtttagttggtgcccttaattctggtttgaacgcgtaccaagcataccaagatgaagcggaccgcgtacgggttattgatgcccaaaacaaactcgctgaattaaaactccatttgcaaaacaatgatgtcgatgggtacggcaacaaaaaaggggtagatgttgtaagttttgatgatggcaacggtggcgggtttgtagactactatacaaaagcatatcaagatggagttgggcaaattgcaaatactttaggtaatagtcgtcaacgtgccttgtttaaagaaatgtcagaacgtgacgcggtgcagttcaaaggctcattacaaaattactttgtacgtgaaaatgatacatatcaacaaagcgtttattctgcggcgacagacagacttgtccgagaaataggagagaaccctttagatttttctagtaacgatgaaaaacttttaaacctaaaagctgcgattggtaaaaaagttcaattagaagggaaatcggcacttgaaggtgaaaaccaatatcttaagatggcatctatagcacacacaacaaatttatccgttttaacagagtcaggaaatttaaaaggggccatagcataccgtaataaatataagaatgagatttctttaaaagacagctttaaagtcgaacaacgtatccatcaaaaattagaagaacaacaggtggagcaacttgctaaccaagtaactacaggtactcaagaatacagcaaccctgcattaaatgccccacctcaagcttcagaagcaattgcaaaagaactcaaagctttgacccccgaacaaatgaaaagtattaaatataatgatcaacgtttggatgtttataccgtctatgccggtagggaacgcggcttagaaaattttacccccttggttctaggacttcggctagcaggtgaaaaatcaaataactgggaggtctctgaagcaggcgcacgttctgtaatgcaattcatcccctctacttgggaaggaactccgggacagaaaaatgggtacaaatgggatcgccgcacaggaaaagaacgggatattaacaacccagcagatgtgattgatgcaagctatgattacgtttcggatattagtaaacaatataaaactaaagaccctatggttattgctgcccactacaacggaggggacaaagcagcaagggctgttttaaacggacaacaaccccctaaaccagaaacacaaaaataccttcagcgtcttgataactggatggtaaacggttttggagattatgctaaaaaacctgcaaaaactcgtgagcaagcttatgaagagattcaaaacagtaatgtatctgtcgatgttaaacaaaaagttttagcctatacagatagatactttaacgggcaagataagattaaaggtgaaaaacaaaatcaagtctacgattactattttaagggtattaattcaggtcaatttacatacgaacaaatacctgctgtagatattaactctttagaacctaaccaaattaagagccttgaagcggttagtaattctaaatataaaaaggatattaagacggacccaaccatctatagcatgatcatgttgaataaagatgagctgtttaaagggaaaccgcaatcagtactacatcaatacgctgataagttgtcaccgacagattatcgtgcagttactaaaatgtatatcgatgtgaacaacccaacaaaaggagataaaaaaggcgattttgttgaggtgaatccgaaaaccgtttctgattatttaaacccgtatttaccaatgctcggtatcactaataaaactaataaaaagcaaatagaccattatgcagctgtacaagcagatgttactcaaacgttgcgtgaggctgaggcacgcaagggaagtaaactaaccaaagacgaatatagtcgaattattttaaaaacaattggattaaacacaaagatcacaacttcgcggtctttccttggtgtttcaattggcgattctgaaagcaatctaaatagaatatactcggttaaaagtaaagacgatattgctcctaatactcaaaagaaaattgacgacttatttaaaaagcaaggtcgtgatttatcaaaagtaactctggcagaatatcttaacgcttactactcaatggctagaagagggttttaa

SEQ ID NO: 42028 - DNA, 333 bp, Acinetobacter baumannii
gtgaaaaaatttattttggggttgatacttatattatcccctgtaattatttttgaaattatcttaacggttttagcctctttaggaatagcagatacctctacaataaaggttatcgtcgccgcggtttactctttaatatctgtcctactcattgttatcgtttacgaaaatacaagccccgtaaaaaataggtttttaacggttttattggatattttaactggcagtgcgttgttctttttggtgcatcccgcttgggttcccgtattctatttattaataagtttgttcgtactgttttattggcacaaaaggcaaaaaggcgcgtaa

SEQ ID NO: 42029 - DNA, 144 bp, Acinetobacter baumannii
atgaaaaaatttctgttaattctaactttatctatacctttttctgcaacctttgcaggaagttgtgatcatagctggcaaaatgctaaagatggttcttcttgtggagatcgcgcagcggaccaacgtaaaggtggtcgctaa

SEQ ID NO: 42030 - DNA, 873 bp, Acinetobacter baumannii
atgtggtcagccattttaaaatatgaaaacccaatcactttaggttcaattgtaattcgccaagataaccaagggcgtttttgccttaacgatttgcacaaagcaagcggcaatgcggataagcataaaacagctaactttcttcgtaatcaacaaacaaaggatttaatcgaagaaattaagtcttctgcaaatttgcaacaggggtgctcaattttgagcatccccctaaaagtaatcaatgacggtatccgcaacggcacctatgcagtcaaagaactggtctatgcatatgcaatgtggattagtccctcattccatctacaagttattcgtgcgtacgacgaaatgatcgttaagcaattagagaaggtccgtaataattcaatggggatgcttcatatccctgaacctatttcacctgatacaactcgttataccgtagttaaaagagacggcgttaccactttacgggatgcaaaggacgtatcttttgtaaacgctgcacatgtttccgatttgcgtcgtgatttaggcacagtaattcgtgcattagaagagttgcgttatcgaacaaaaattgtggatggtgagctgagcgccaacgagttggcattgcctttaatttgtgaattgagcgaaaatggtcagcaatttgaacgcacagtttcagatgatgaaattgcaagcatgaccccgtctcagaacaaaaacatgatgagggataaggttgcaatcgctatctctatgcttaaaacaacttatcatcctgatgatattaatcggatgtgtaaagagttcggtatccatcgagatacagcaaaacgtattttgagtaagctatatcagcaagcgacaatgttggcaggttga

SEQ ID NO: 42031 - DNA, 6522 bp, Acinetobacter baumannii
atgtctgatcaaaatacaaatctgacaattggtcaattattcgaattaaaccaaggcaagaacccaacacaaattgcggatacagaagcccgtgcgcgtaaggctgcacgttcgttgggcttagactataacaagttgacagaaacgcctgaacagatcgtttctgttgcggatgaggtaaacactcaaaagcgcgtcaatgaagtggttgcaagtgaccctgtattgggtaaatacgcacttaacccaaatcaagccgctgtttcacttgatgactttgaaaatctaaaagacattagcgacaaagtatccttattgggttcgagtttgaataaaccgtatgaacctgtttcatatcaagacatacaaaatgttttgtctaaaggtacgtcaccagaacaaaaaaagagactgaaagaactaggcatttacgaagaccctcaaaagcaggtcaagccgaatgtaaaccctaatttattggatacgctaagcacatctttagtgccccaaacatcagaccaagttttcaaagaacattacgaccgcatcaagaaaacagcaggcgtaatgtctgccgaacggtttaaaaaatactatgaaaaccaagtctattggatggagcacacggcgactgctgaacctaccagtccacaagaacaaggcaatcgatatgtaaatgcagctattcgtgctgttgcggctattggtcagacagaaggcgcagtaattagcgcgacaacaggaaacgatagccttcttaacttggcaacacgtgttaaaaataaagctgccccatcacaagaaatgacgcaagcgctttaccaagcacaacttgcagcacagacaaatgatgcaggtgtattgggcgctgcacaagaactggttagcaatgctgatgcaggtttagtgggtgagtttttaattgaacaagcaccccccgcattagttgggtattatacaggcgcgggggcaggcggtgttttaacaaattcacttatccgaaatacagctaaatatgcccctatggtgatgaacctagaaaaggcagctaagttagtacgtggcgtaacaaccgcaggtaatgcggcacaaggcgcattaggtgcaggcacggccgatgctctggtgtcatatgggcagaacatggcagaagcccgtgagaagtttttaacccgccaagaacagattgattatgcagctgcaaagacatggggttcagccaaatactcagcgttgggcggtgcattaatgcctgtaacttttggcggtcctttgcgtactgttggtggtcaagcggtcattcaatccgctgcgggcatgtattccgttaaaggtgcggctgatgcagttggtgaaaaggctgatccagtcgaaatggctttagaaggtttgttagaagttgcaacagctgcgcctgaagtagcgattacatctgcggccaaagttaaaaaccaacgcacagcacaatttgcattagaccaattgcgacaagatcaacagcaagatgctgttcgttcaagtacatttgccgcagtacttaataaccttatcgaccgcaataaagaaagtaagacggcacaacgcgatgactctgccagccaagcgtttatcaaacaggcagttgaagaacacggtgcggttgaagaagtttacatagatggtcagaccttcaaccagttattgcgtgaccgtaatattgagccaaccgatttatttgaacgtgcgccaagtcttcaagatcagttgggcacagcggaaacatttaacggcactgtgcagataccagtaaatgaatttgtttctgcaatgtcggttgttgaacgtccaactgattttgttgaaaacgttcgttcaagtccggatatgcctacttaccgagaagcacaagagaaccttgcaaaaacaacggaacaaatgcagcaagaagccaatacatatatggctgagcaagcccgttttgaaagtgctgaagatgcaaaagagttggttgcaactgaagtacaaaaccaattggctaaagtcggaacatttacggctaaatacaatcgtgcagcgggtgaattaacttcggctttctactcaacgttaggcgataaactcggtatttccgcaaaagaagcctttgaccgttacccaattcgtattgctgacgactctgttcaatcagaagttaaggtacctgaaagcgttgataacaatgtaacacttgatcagatgcaacaaccaaaaacagaaccaaaaggccaaaggtaccaacaaagtaaagggggcacacgcggctcaattacttttaatattggtaaggatggttcaacaatcatactaagcaaaaatgctgacttttcaacctttgtgcatgagcttgggcatcacttcttagaaatgaatatgcaactcgccctaagtcctgatgcacccgcacaagtccgtgcagatatggaaacggtaatgaagtgggcttcaccagaaacaactgatctgggcgaatgggattttttcaccgatgcagaaaaaacagaagtacacgaaaaatttgcagaaacttttgaacagtatgtttttacgggtaaagcaccaagcgcggcattaaagcaagttttcaaccgattcagacaattcatgattgccgtgtaccggaacattgaaaagtttatgggcatcaatgaccgtgcagaattgaactctgatatcacaggtgtaatggaccgtatgcttgcatcatcaagtgcaattgctgaagcacaagccgcatcaaatcttgaaatgctaattcatcaagatgatgcaatgcgccttggtatttcgccaaaagattatgacgaaatgcgccaagatcatgaaattgctacagaattatctataaatactttagagcagaaatccctgcgcaatatgatttggtaccaaaaacagaaatctaagtatctgaaaacattgcaaaaagaagctgataaaaagcgcgctgccgttcgcgaagatatggcaaaagaaattgcacaagaacctgtatatcaggctatggcatttctacgtcaaccgcttgaccaagttgctaagcgtgattcaacaaaggttgaacctgaacgcgataatctatttgaagcgattgctaaattcggcgggcttgatgccaatgaagtagaaagcacttggggcattgatgaagctgctaaaaccaaatcgggcgttggaaataaacctgtcgtacgttcttcaaagtcaaaagtaaaaggcctgtcaattgaatcgatggctgagaagctcagtgaagaagggtatttaactttagatgaacacggaaaatttgatacccgtgaacttgaagataaatttgcggaacagttgcgcggcgttaatcaatattcaacgcaagtggatcctgaattattggactattcgcaagacatggatttgctgcaacgctatgcagaaggtcgcacaaccaaaggtaagttatcactagattggattgaagctaaatatggccgtgatagtgatatttaccaacgcatatctaaaggcgcttatggttttgcacagcgcggtggagaaaaccccgacgtagttgctgaaatgttcggatatgaaagcggcgatgcattgattcgtgacttgcttaattcaccgagtcctaagcaaaaaattgatgagctcaccgatgcgcgtatggctgttcaatattctgaatttttcgatcaacaaagcattatagaagcagtcgaagccgcattacacaatgatgttcgtgcgcgtatgctttcagctgaaatggctgcactaaacggtttgcttggccgcaagtctgctttgaatgaagcagcaaagacagttgctcaagatattgttcaacgccaaaaaattaaagatattcgaccgcatgtacgtgcacaagatgatgctcgtttagggcgcatggcaaatgaagcatttagaaagggggagacggtcgaagctgcacgccataagcgcaatcaattggttcagttctatgcaaccaaatacagttacgatgcaaaagaccagattcaaaaacaccttgatttagtcaaaaaggtttttggaaataacgagaagttatctaaaaaccgtgactttgattttgtgaccgctgcccgcggcattttgggcaaatatgatcttggccgcgaatcaacaaattatgagcatcaactagaattgattcgtaaatatgacccgaccacatatgccgaaatacagaacataggcgcattgcctgaaaaccaaaactatcgcgaattaacacttgaacagttcaatgcagttatggccgcagtcgaaacactttggcatcgatctaaagaaaataagatttggcatacgaccaatgaagcctttgagcgtgaacaggtccgtgaagaactaatacagcaaacaggtggtaagaaaagtgttgaaaagattcagcaaactttattgggtagagataagaccgcagaacttaaagctaagttcatggaattaggcgcttcagcaaaacgtgtcgaccaggtggtgacttggttagacggcggcgcaagtggcaaattccgtacgtatctaatcaaccctatgcaagatgctttggctaaatatcgtattgagaaagccaagatgcttaaagatgtggtcgatatttttgaaggatttggcaaactcgataattcaaaaattgctgcacctgaacttaataactttactttcgtgggcaagcaatctttgctccatgcgattttgcatacaggtaacttaagcaacaaagagcgtcttgttttaggctatgggtggggcgcgcgtttagaagatggttcggttgatttcagtgcatgggatcaattctttagccggatggttaaagagggagtgattaccaaaaaagatatggataacatccaaaagctctggaatctttttgataaatacaaagagcaagcacaaatcacacataaaaaaattaacggtcgctattttgatgaattaccacgtacacctattagtacgccatttggtgagtatgagggcggttatgtgcctgccgcttatgaccgcattcgctcaaatgagcaagaccgcattcaagataaaaacttagccgaaaataacttagctgcattagatatcgccacgactggcgcgaactttaccaagtcacgtgcagatcgttaccacgatcagcttgagcttgatatgtctcggttaccaagtcatcttgataaagaattgcgctatatccatcttgaattacagattcgacaaatcggacgtttattgctgaacaaagattttagaaatgagattgagcgcgtattgccatttggggttaaacaagtctttaacccatggttgaaagcaatagcaaatcagaccgttgatgaaagctcaggcgttagtttactagataatattttccgcacacttcgccgcaatacgggtatcgcgattatggcgggtaacttaaaaaatgctgttgagcagttcacaggctttacacaagttgctgttgcagtaccgccgaaacaattgctaaaagctcaggcccattattttgcttcagttgctacccgagaagacatggcaaataacatcatggaaatgtctgacttcatgaaaacccgattcgaccgtgcagcggatgaataccgttatgcggtggatgagattgtttttcaaaagggcgcaattcaaacagtgaaagatttcacaatgaagcacgcgtatgtattgcaaacaacgatacaaagaccaatggaaatgatctcttggcaagcggctttcaatcactatacagaacaaggcatgactcaatatgaagcagtgcatgcagccgatgcagttattcgccaatatatgactgatatgtcgcctgaagggatttcaaatcttgaacgtggtacacctgctaaacgaatgtttttgatgttttacaactggttcaatatggtttggaacacatcaatgtcagaagctaagttagcgttagaggcaagcaacggctcatgggtgcaagcatcgccacgtttggcgtatgtggcgttaatgatgatctcaatcccttcgatgctgtctgaattgcttggggttatcttcgcaggcggtctaaaagatgaggatgatgatgataataaatgggatgacttatctgcaaaacttgcactttcacaattaaaaatgttggctgcttttgtaccgtatgcaggtaatgtggtaaatgccgcaatcagcaatacggacgataccattgtaaacgaccgctacacggcgtcacctgtattcagtatgggcgagagtggactttcactgattcaacatgcaagacgcgctttggatgaggataaggaagttaaccaaggtaaagcttcaaaagatttaatgaatacagcaaccctcgttacaggcattccgtttgctgtacttggtaaaccttctggttattggcttgatatagctcaaggcaagaaagatgcaccagacagtatttacgatgcaacacgcggtacgataacagggaaacatgcaccggaatga

SEQ ID NO: 42032 - DNA, 240 bp, Acinetobacter baumannii
atgaattatttagtcataaaaaatcttggtcacggtttttatttaggtaaaggcaacgttagacaagggggtaaagaatttgttgttttcaaaagtaacaaagaaatgtttataggggttgagacatataaatatgatgctgaaactaataaattactttgggagggtattcaagatttaggtttagtcgttgttggttttgctgacactgaagaagaagcattagatttagctttctaa

SEQ ID NO: 42033 - DNA, 2286 bp, Acinetobacter baumannii
atgacagttcaggttaccgaccggctcagtcaactatatgttggtaatggagtgaatacacggtttgattttacatttagggttttcgatcaagaagatgctacgggagtcgcggtacaccttttcgatggtgtagactttgaaaagatggacgaactcctttaccaagtctttatcaatgcggataagttgggcggctatgtagtttttaataatgcaccagattccgaaacatcattttatattgggggcgaaacaccagtcgatcaacaacttgatataaccaattatgataatttttaccccgattcgcttgaaagatcgctagataaattaacaggcatcttgcaagaatggagccatctattaggctttgaaaaacaggctcggattctttcaggtgttaaatatgatgaagatgcaaaaaaccgtgaagaattattaaaaaatgaactgcaaaataacatcgactttcttcaagaaaataccaacgcaatgcttgaagaagcaattgcaaacggcgctgttagtgcacttgccgtaactgttgttgaatgcctcgatgatttaataactgtaaaaaaatggcaaggccgtacagtgaatgtgcgttcggttatcagaaataaacatcttggtgggggtacttttgtatttaataaaaacagtacccgtacaccagatggctatattgttgttgctgatgttggtggtaactgggaaaaaatcacagttgcttttccaaccgttgacgattttggcggtctgggtgacgacccaaattatgacgatgcggacgcatttattcgatgtgcgttgagtccatacacaggttcgaatatttatcttgctaacagacaagttgaatatcgcatcaataaacaagttgattgcaagggtaaaggaattgttggaggtggatttagtagacaaaatgccactgcgtatgcaatgaactctctaaaggtaagaccaggtgattattcaaattcaaatacccttcttaataatgtggcatttattaacgtgggcgccgaagtaagagatttgcaattagtaagtgagggtgtttcagaaaatatttcgggtttaaaagttgatggttataacttcacactttcaaatgcaaatatttctgggttttacaatcaagtatatttatcgaatgcaacggtctcgttccgtgtccaaaatttgatgtcaattagtgcatcaaatgcagggttttatattgctgatgttgattctaaacaaagtactactgcatattttgacaactgctcatggcaatggggtaaataccctgtgctgtttgctaaagaagcttatcagtgcgtctttaataatattattcttgaatatatgcagtacggtttaacagcaggtatctggtcgaattgctcattcaatgcaatttgggcagagcaaacaagagatggtgtagctcgtgactggcttgtaaatacttcttatcaacaaacatttaattgcatcactaataatctatacattagaacgccttggctaaatcgagctgacacaactgctttggctgtatcagataatattggtggtgttgttatcgataagagccgcattaccttgggcggtgcgacgggtgcgaaaatacaactttccccatctggtttagcaacactttttgcaaattggtatggtggtactaatcgaagattattaattactactcaaccgaccgcggcagattctgggtataaaacaccaatccacatcaatgcacctaatagcgaattgtattttggaaatcaggatgaaacatcagtttcaagtgtagtatttaagcgagtaattggcgctactgctgcaaatacaccttatgttgcatctgatgcatggactaaaaaaattcgaaagtggaatacatacaatcacgaagtatcaaaagtcggtcgttttattgcaccgatgatgctgacttatgatgtcaactttactacccaacaaaataacgcaggctggtctatctcaaaagagtctacgggagtctatagattgcaacgagatgcgggcgtaacaactgaattagcaaatccgcacatttttgtttctggcattttttctggaacgggattaggtgatggaaaggctatattgccaccgacgctacaagcaattgaagcatacagtgggagttggtcgtcttacaaagttggatctggggttaaaatgttttttatagatttgacaggtgcattagttgaccctatgcgcttctcagtatcattcacactagaatcaggaatttaa

SEQ ID NO: 42034 - DNA, 225 bp, Acinetobacter baumannii
atgaactacgcagaaatgtatgtagagggtgcattgccaaagattgaggcagacattgcacaaaacggagtatgtactctttattcaaagatgactttaaatgaagaaacaacaacggccatttcagatctacttcgtgaaaaaggcttcaatacggaagtatcaattgaagatgatcccgatttcatcggtacgagattgaaactaataattaccaaagtatag

SEQ ID NO: 42035 - DNA, 372 bp, Acinetobacter baumannii
atgaatgaccctttaacaattaaatccctaccttggtttatcaagatttgggcggcggtgatgggcggcatttttgcgctcatgttgagtggtgatattgatgttgaaggaaagataaaaatcaacatcggtgtgattatcaaattcgcaattagcgtttctattagcttatacggcggttcagcatttattgaatatcaagattgggggcattactcacatatgacccaagggtttgtcatgctgatttttgcagtattcgggatgttgcttattggtatttggtatcaggcaattcaattactgaaaggtaaaaccattagtgaattgatctttgaaatcaaagaagcattcaaagccatattcaaatag

SEQ ID NO: 42036 - DNA, 543 bp, Acinetobacter baumannii
atgtcagtagataaatatattgatgaccttatcaagcgagaaggtggttatgttaacaaccctaacgaccgtggcggcgcaactaattatgggataactgaagcagttgcacgggtaaacggttggaaaggcccaatgcgtgatctgcctttagatttagcaaagcagatttataaacaacaatattggattaatccacgttttgaccaggttaataccttatcgcctttgatcgctgaagagttgcttgatactggtgttaactgcggtgtagcttttgcaaagcctttattgcaacgtgcattgaatctattaaataaccaaggtaaaggcggttggcccgatctagccgttgatggtatttatggttcagctacgttaggggctttaaaaatctttcttgccaagcgtggtaaagatggtgagaaggtgatgcttaaaatactgaatattatgcagggccaacgttatattgaaatatgtgaacgcaatcccacgcaagagcaattcttttatggatggattagcaaccggatcgcataa

SEQ ID NO: 42037 - DNA, 360 bp, Acinetobacter baumannii
atggatggattagcaaccggatcgcataaagtgattttgtgtaagagaaccaagctagcaacttttattactctactgtgcattctgttttcagggtgcacggcgcattcaatcaataacaatattcaagtatcattatgcgtaaaagcaatttgcgtttttaaaatggcgcaagtgatgatcaaggcatatgattttgcaaatacaaaagaagttgatcttttggctgatattgataagggcggtaatatccttaaagtttatgactacaatggcaatgaattaagcataaacatggatggtaccgtgacctttaatcgaaagcgctgggaacttcctgttaaagtagatttaaaataa

SEQ ID NO: 42038 - DNA, 2166 bp, Acinetobacter baumannii
atgactgcacgtattcaaaaaggcaagttagcgattgctaaagaactttacgattttatcgaaaatgaagctttaccaggttctggtttagatagtgaaacttactggaagaactttgagcaagttgttgtcgaccttagtccaaagaataaagcattattggctaagcgtgatgaattacaagcaaaaattgatgaatggcaccgcaacaataaatttgaattaggtgcttacaaagcatttttaactgaaattggttatttattaccagaagttgaagacttccaaattactactgaaaacgtagatgaagaaattgcattgttagcaggcccacaattagtagtgcctgtacgtaatgcacgttattgtttaaatgcagcaaatgcgcgttggggttctttatatgatgcactttacggcttcgatgtaatttcagaagaaggtggtgcagaaaaaggaaaaggatataaccctgtacgtggtgcgaaagttattgagtttgctaaaaacttcttaaatgaaattttcccgcttgcgcaaggatcacatgctgatgcaactaaatatgcaatcgagcagaataaactcgttgtgactttaaaagatggtactaaaactggcttagctcatgaagctcaatttgtgggcttcaatggtgaagaagcgaacccttcagaagttgttcttttgagtaatggcctacatgtcattattgaaattgatgcgaatagcccaattggccaaactgatttagcgggtgttaaagatctaacacttgaagctgcggttacaacaattcaggatcttgaagactctgtagcagctgttgatgcagaagaaaaagttgaaggttatcgtaactggttaggtttgatgaagggtactcttcaagaatctatcgaaaaaaatggtaaaacaattgttcgcgctttgaataaagaccgtgaaattaaaaatttgatcggtggcacaacaaaacttcatggtcgttcacttatgttacttcgtaacgtaggtcatttaatgacgaatccagcgattttagttgatggtgaagaaattttcgaaggtattatggatgcgttggtaacgccattgttatcaattgctgacatccgtagtgaaaacgaaaataaaaactctcgtaaagggtctatgtatattgttaaaccaaaaatgcatggtcctgaagaagttgcttttgctgttgagttatttgagcgtgctgagcaagccctaggattaccagcgaagtctttaaaaatcggtattatggatgaagaacgccgtacatctgtaaacctgaaaaactgtattgctgctgctaaagatcgcacaatctttattaacactggtttcatggaccgtactggtgatgaaatccatacttctatggaagctgctccagttgttcgtaaagaagcagttaaaacacaaaaatggattgctgcttatgaaaaccgtaacgttgcaattggtttgaaatgtggtttacaaggtaaagctcaaattggtaaaggcatgtggccaaaaccagatagcatgaaagatatgttagcaactaaagctgctcatccaaatgctggtgcttcatgtgcttgggttccatcaccaactggtgctgtacttcatgcgatgcattaccatcaagtaaatgtaaaagcacgtcaagatcagttaaaagctgaagaaatgttgtcattagatgacttgttaactcctccatttgcaactgatacaaactggtcagcagaagaaattaataacgaacttgaaaataactgccaaggtattttaggttacgttgttcgttgggtggacttaggtgtaggttgttcaaaagttcctgatattaacaatgtgggcttaatggaagaccgtgcaacattacgtatttcttctcaacatgttgccaactggttacgtcacggtatcgtgactcgtgaacaagttgaagaagtgcttaaacgcatggcaaaaattgttgatgaacaaaatgcgaatgatccattgtataaaccaatggcagctaactttgaaactaatattgctttccaagcagcttcagatcttatctttaaaggttgtgaacagccttctggttatactgagccattactacatgcggctcgtttaaaattaaaaggttatacaggtgactaa

SEQ ID NO: 42039 - DNA, 450 bp, Acinetobacter baumannii
ttgattaacttaaaaactctcgatagtgagaattggcttctatgcgcaaaattatcattagatgaatctcaaaaggactacgtcgcaccaaatgtatattctattgctgagtctaaagttgaggaacactattgcccaagagtgatctgttttaatgatgaggtggttgggttcttaatgtattgtgtggaaattgatccccctgatgagacattattttggttgtttcgatttatgattggcaaagatcatcaagctaaaggttatggtaccttagcgttgcaaatggcaattgatgaaatggctacaaaaggggctaaacgaatacgaacgatgtataaatcttctaataacattgctggaaaactttataaaaaaatgaattttatagaaactggggaatatgatgaatgtggtgatattattttagagttgggtatttctttttaa

SEQ ID NO: 42040 - DNA, 414 bp, Acinetobacter baumannii
atgggtatgaatgttggctcaaataatgatgacgatgtaatgctagaggtgaacatgacaccgcttattgatgtcatgctggtactcattattatgtttattattactatacctgcaccaaacaatgcgattaatattaatttgccaaatggcacaccgccaccaacaaatgaaaagccacctgaagtcattgatgtaagaattgatgcagcaggcaaagtattttggaataaccaacaggtttctgaccgcaaggcactagagactttatttcaaggtgttgtcgccaaaaaagatcaagaccaaatcaaacttaaaccagaccaaatggctgaatataaaaatgtagcgatggtcatggctacggcgcagcgtttaggtgtaactaaaattgggattgtgagtagcaattaa

SEQ ID NO: 42041 - DNA, 423 bp, Acinetobacter baumannii
atgggtatgagtgttggttctgaaaatgatgacgaaatgattggaacgattaacacgacacctctcgtagatgtcatgttggttttacttattatttttcttattactattccggtagttacacatacagttccggtgaaactaccagaagaaaaaaatactccgtacgcgaccacgcctgaaaatattcaactttcagttaataagaaaggcgatattttctggaacgagagttatgtaccgaataaagaaatattgttaacaaaattacaagctgtggcacaaaaaagaccgcagccggaagtacatattcgaggagatcagcttacccattttgaagcgatagatcaggtcattagtacgaccaaacaagctggtattggcaaaattgcctttgttactacccctccagcttccccgtaa

SEQ ID NO: 42042 - DNA, 879 bp, Acinetobacter baumannii
atgaaaaaatcaactcaaccactagtacatttcgcttctgcaagtttaatcgcagcttgctcgttacttccattaagctcagttttcgcagaagaaacgagcaatgctcctgtggcaacagcaactactgaagctacttcaaatacaactactccaactccaccaccaaagcctgcaacaagtgaaactgttaaaaatccatatggtctagaagccctttggcgtgaaggtgacttagtcgctaagtctaccttatttattttagtactcatgtcgattggtacttggtacatcatcatctctaaattattacaacaaggtaaagtcaaacgccaaggtaaagaagctgaaaaacatttctgggaggcaacttcgcttgataatgctgcagaaggtttagaacaaagtagcgcgtaccgttttattgcagaaaaaggcattaactcgactaaatcacacggcggctcactacttgaacgcattgactttaatacttgggtgagcatttcaatacaacgtgccatcgaaaaagtacaaaaccatttaggcggcggtctcgcttttttagcaacagttggctctacagcacctttcgtaggccttttcggaacggtatggggaatctatcacgctttaactgcaatcgggatttcaggtcaggcatctattgataaagttgcaggcccagttggtgaagctctcattatgacagctattggtcttgcggtcgcagtacctgctgtactgggttacaactggttgactcgtcgtaataaagcagtgatggaaaatgttcgttcatttggttcagatttacatgcagttttattaagcggagaaattaataccaacaattcaattaatcgcagcattaaataa

SEQ ID NO: 42043 - DNA, 717 bp, Acinetobacter baumannii
atgggcatgacttttacagacatagaaaataaatctgccaaacgcctaattggtattgctgcagtcatttttctgcatcttcttgttgcctatattctgatgtcaggtttagcaaacaatattcaaaaaccagcagaaaaacctgtggaattacaaattattcaggatattaagccacctcctccaccaaagccggaagagccgaaaccaaaggaaaaaccacctgagccaccaaaaatggtcgaaaaagttgccaaggttcctgagccaccaaaagaagtagagaaagtagcaacaccagtacaaaaaacgacgccagtagctcaaccgactaaagtcgctactccggctcctgctgcacctagtactccttctccgagccctgttgctgcacccgctccagtggcggcggctgcaccagcacctaaacccgctggtgtaactcgtggtgtttcagaaggctctgcgggctgtgaaaaaccggaatatccacgcgaagcactcatgaacgaagagcaaggaacggtgcgtatacgtgttttggttgatacatccggcaaagtcattgatgccaaagtaaaaaaatcgagtggcagcaaaattttagataaagcagcaactaaagcctacagcttatgtacgttcaaaccagcaatgaaagatggcgtgcctcagcaagactggtatgaaattgaatatccattcgtaattgaataa

SEQ ID NO: 42044 - DNA, 2700 bp, Acinetobacter baumannii
atgaaaaaaaaatacaatgttcgatctcaggtaacccccaagattggcaaaacaattcttaaattaagcacccttagtttaagcatgatgtgtcttaccatggcacaagcagcagaaaccgaacaatcaagtaccgataaaaaaccaacaaaagtcgtaaaagttgccgttacaggttcttcaattaaaggggttgcggcacaaagtgcttcgccaattaccattattaaaggcgaagatctcgcaaatgctggcgttactacagttgaagaagcattaacccgtgtaagttcaaatcaggcaggtttttcaactgaccagaatgtgggtgccagtaataccgatggttctactgctaaccttcggggtttaggtagcgataaaacactcgttttacttaatggacgccgcctcgcagcgaacccttttggtacttccaccgtaaacctaaatattattcctttagcaatgattgatcgtattgaagttttacgtgatggtgcctcagcagtttatggtgccgatgctgttgcaggggttattaatttcattacaaaaaaaacatatcaaggtgtaggtattagcgcaggtttattacaaccagaacacaaaggtggtgataaacaagatatttctatctttggtggctacggcgacttagatgaagatggttttaatattttcggtgttgtagattatcgtcgtactaacggcattatggcgaaagaccgaaaaatttctgaacgtggaggagtattaccagaactcggtcttgatggacgctcggctaatacctttacctcaaatttttatgaccctatatctggggtttcaggaaatccctatgcacaaaatggtcaatgtttgggcccagcagagtcagcagaaaagggtctctgttatgcaaatactcaagctttgataggtatcaaaccagatgtagaaaacgtttctgttttaggacgtggtacatacaaagttaacgataatttaaatgctattggtgaatatatttattcacgtagtgaagttatcacttctgttgcccctgacccatttagccgcggtaatctgtcaactcgcgtcacccttccaagtgatagtccatattatccaggcaatggtattgttcctagcgttaaagggttaagtggtgctccccttgaactctatttacgatcacatgcaggaaaccgtatagctaaatcaattaatgaatcacatcggctttttgcaggtttggaaggtgacgtctggggctgggatttaaacacaggtgttacctatgcaaaaagtgaagcctcagataatttcgttactggtcaattaaataagactaaattacaagatgccttaaataacggaacattaaacccatttggtgaaagtagtgatcctaatatctggaataatttatcagttaaagggaaatataatgaagcaactttagaatccactactgctgacttcagtattagccgccctatttttactttacctgctggtgagattggttttgctttaggaggcagctttactaatcaagattggaaacaacatattaatgcagatttagtccgtcaagctcctagtagtggtacagaccctagtaaacctgataattctggtgaccgagacattacctctgcatttgcagaattacaaataccaataaccaaaacgatcgaggcacaacttgcagcccgttacgatgactatagtgactttggcgatacttttaatcctaaattcgcgatccgatgggaaccattaaaacaactcatgttccgtacttcatatagcacaggtttccgtgcaccaagcctatatgagattaatgcagctcaaagcaaaacttatactggtgcaaaacataatgacccactttattgcccaggcggtgaggtcgtagaagggaaaaataaaaatgacttttgtaatactcaatttatgaaattacagggaggctcaaaagatttacaaccagaagaatcaaaatcatttactgccggctttgtttttgaaccaattaaaaatcttgtactaacggttgactatttcaatattaaaattgacgacctaattgctcaggtgggagaagccaccatctttggggaacctgaaaaatactctgctctttttgtaagaaatgctgatggtactatcgactatataaaaaccaacttattcaactctggtggtatgaaaacagaaggttttgatattagcctaaattatttaactccaatgacatccactggccgttttggctttggaattgatgggacttatgtatccaaactagattatcgcgactcaaaaggtgagccatggacaggacaggttggtctatatgaggaccctgctgtcgtccgatggaaacacacagctaatattaactgggcatatgaaaattggaaattagtttttgaacaacagtttgtacgtggttacgatgatcaaaatcagataggtgaagaacaatatgatcatcacaaagttagtgattataccctctataatatttctggtacctataaaggctttaaaaatcttgagctaacagcgggtattaaaaatattttcgacgaagacccatctgcttcaaacgttttagataatttccaatacggatatgaccctcggtatggtgacccaacaggacgtacatactatttacgtggtacatacaagttctaa

SEQ ID NO: 42045 - DNA, 1785 bp, Acinetobacter baumannii
atgaacttgaaattaaaattttttaagctcgccattttaagtctggctattacatcagttccttgtgcttacgcaattacgccagcgcaaccaaacaaaattttgcatgttgcctatgaggccccagatgatggtttcgatatggtcaaaaccaccaatttctatagtgctagtattgctgaggcaatttttgagcctttactcaaatatgactatttagcacgtccattacagttagttcccaatactgtagaaagcctgcccaaagtggaacaagacggtaaagtttatatatttaaaattaagccaggtatctattttaccaatgatcccgcttttaaaggtaaacgccgtgagctagtagccgaagattacatctatacaattaaacgtattttagaccctaaaaatagagcgccttctgtttcttttattgatggtaagttacaaggtgccgatgtggttgtagctcaagcaaagaaaactggaaaatttgattatgctgctccaattgcagggcttaaagcgattgatcgatatactctacaatttactctgactcgccaagactataattttccttatattcttgcctatattgcatttggtggtgttgctaaagaggttgttgattattacggtgatcgtattggcatgcatccagtaggtactggaccgtacatgttaagtaaatatgttccaagaagtaaggtcgagttggttgccaatcctgattatcgtggttttgtctggaattttaagtcaacaggaacgccttgggacaaccaacttgttaaggaaatgtctggaaagaaaatgccacaaattggcaaagttgtagtgagcattattgaagaacaacaatcaagatggttagcttttcaatcgggtcaattagattttgacaaacttacagcagatgccgttcctcaagccttagatggaaatcaacttaaagcttcttttcaaaaaagaggcattaaacactttccatataaagaacctgaaatgacctataccatgatgaatatgcgtgatccggtgattggtggttttagcccggaaaaaatagcgcttcgtagagcaattactttggcctatgaccaaaaagaaagtataaaacaggcatataaaggtcaggcagttagagcagaaatgtttatacctgaaggtgtaaatggatataacccgaagtataaaagtagcgtaggatataatccacggctagcaaataaactgcttgattattatggctataaaaaagcggctgatggctaccggaccttaccaaatggcaaacctttaattttaaaaatcaatacagaaaatagctcagcatcggttattcattcagaactctggaaaaaaaatctagatgcgattggcattcgagctgactttaaggtaagtaactttgcagataacttaaaagccgctactcaatgtaaatatatgatctggagcggtgcatggattgctgactatccggaaggagataattttgcacaattactatatggaccaaatgctgggcagggaaaccatgcttgttatcagtctaaaacctatgatgctctttatactcaggccattcatttaccacctcaacaacgtctaccatattacgaaaaacttaaccgtcagattgaagctgataatccttggattattcatgtaactcgaattcgcaattggttgatacgcccacaagttcagggttttaaacctcacccaatgatgaatacaaactggcaatatcttgatattacccctattaaaaaataa

SEQ ID NO: 42046 - DNA, 1821 bp, Acinetobacter baumannii
atgactgaaaatttaaaacaaaagctcaagcactgtagtgtcggcctattctttgccggaatggctttaacgggttctatatctatttttgcggaaagcccagccgatccaaataaagttttgcgttatgtattcccaacagctgaaacaggcttcgacccagcttatgtacatgacttatattcagcgcatgtactcacatctatatttgaaactttatatacctatgactatttggcaagaccagcaaaattaatcccacacgtggctacggctatgccagaagtgagtgcagatggtctgacttataccattcatattaagaagggtatttactttacagccgacccagcgtttaaaggtaaacctagagagttaacagcttacgattatgcatattcttttaagcggttattggacccaaatttacgctcgcccaatagttggttattggaagataaaattgaaggtatgaatgctttagtcaaagcagccaataaatccggaaaatttaattacgatcaaaatgtaagtggtttacaaacacctgataagtacactttggtgattcggttagtaaaaccagactataactttcctttattactggcccatgatccgacaggtgcggtggcacgcgaagtcattgagaaatataaagataaagctggttttgttatggggcatccggtaggaactggaccttatatgctcagtaagtggatacctgcctcacgtattgttttaaaagcaaatcctgaataccgaggttttacctggaactttaatgccagtagccccggggatgaagcaattgtaaagcgccttaaaggtaaacaaatgcctcaaatcggcacaattgatattcaggtcatggaagaaaaccagtcacgatggttagcattccagcgtggtgaggtagatatcattcagcttgaagggcaattagtttcaaaagcgattaaagacggtaaattaagacccgagcttgcaaaagaaggcgtgcaattatctcgtattgttgatccagaaattagttatatctattggaatctcaaagatcccgttgttggaggaatgagtaaagaaaaaattgccttacgccgtgctattgcgatgtcccgttcaatagatcaagagattaaattggtaaggaatagtgatgcagaacgtcttcatttcccagttccacctggtgtagtgggatatgacccacagtatagaagcagtacaccatattcagtaaaagcagccaatctgctgttggatcgatatcactacaaaaaagatgcttctggttggcgtacacaaccaaacggcaagccgctcgtggtcgaatataaagcgcgcaatgacagtattggccaacaaagtgctgaactttggaagaaaaacttcgatagcctacatattcgcatggtgtataagccaatgcttttttcagacttacttcgatcacaaaaacaatgtgagggaatgtttggttcttctgcatggatcgctgattatccagatggggataattttatgcagaatttttatggcccaaatactcatatgactaactggtcttgtggttcgataccagagttcgatgagttgtaccgccagtctcaacaagtgaagccaggcccagaaagagatgcgttatatcgaaaaatgacgcgcttgttagaggtttatatgcctgtgcaaatgtcttatgcacgctatcgcaatatgttggcccaaccacgaattattggatataagaagcatccgattttacatgctgaatggatgtacttcgatattgatacaaatatgaaatctaatcattaa

SEQ ID NO: 42047 - DNA, 2013 bp, Acinetobacter baumannii
atgaaaaataatacactgaaaatgactacattatgtatgttgaccataggtataagtcaatttgcatcggctgaagcgacgcgtgcgacattaccattactcaaagcagagcaactcccagcatggtgtgattctaatttaaaaaaaattcagcaagaaatttctagttttgaaaaaacgcctgttaaaaacgatgctgccgctgctccgatattagccaagtgggataaaatttttggtcatcttgaagatttttcgggacccataggtctatatagtaatgtagacccagatgcgaaattacgtaaggcagcagaagactgcgaaatcaaaattaatcaatttcatacggatatattccaaaactccaaactgtataacgtaattaaaaatacaaaagcgactgatccgattgaccagaaataccgtcaagatattctggatcaatttgaagacacaggggttcagttagaaccagcaaaacgcgcaagaatgaaggctattctggatgagttgactaaacttgaacaagaatataaccgtaatattcgtgataacccggaaaaacttgaatttactcctgaagagatgaaaggcttaccggaaagttatatttcggggttaaagaaaaatacgaaaggaaattatctattaggttttgagtatccggagtatcgccccttcatggagctagcggataatgatgatgccagaaaaaaataccagattgcctttacacgacgtgggactgaacaaaatttaaaactactcaaacaggcaatagatttacgttatgaacttgcacagttatttggaaaagcaagttatgcagattgggctttaaaagaccgaatggcaaaaacaccagaagctgtaaacaagtttttggcagaagtacaaaaaactgtagcaccacttgaacgtaaagaagtagaagagcttcgtgcctttaaagcacaaactttaaaaacaccactagataaaaccgagataacgcgctggagtgaagcttactggagtgaaaaacttcgtaagagtaaatatcaaattgatcaggaaaagcttcgtgattattttccaactttagctgctcaaaaatggttatttgccatttcatctgatctttacggtattgattttaaacctgtcaaagttaaagcatggcaggatgaagttgaatattacgatgtagttgataaaaagacaggaaaactccttggtggcttatatatggataaattcccccgtgaagggaaatatggccatgcagcagtttggggagtatatggtggaagcactttaaccaaccgattaccgatttcagtattggtgaccaactttaaccgtaaaggtttaaatagtgatgagcttgaaacttttgttcatgagttcggtcatgctttacatggcatcttatcaaacacacgctatgccagtcagtccggaacctctgtagagcgcgattttgtagaagcaccttctcaaatgtatgaagagtgggcacgccgtaaagaaaccttatctaaagtggccgattattgcgatccagcttgtccacgtgttgacgatgaattaattgcccgtttaaaagcagtacataattatggccgtggtttgcgttatgcgcgtcagacgctttatgcacaatatgacatggcacttcatacggcagatgccttaaaagtaaaacctttagaaacttggcaaaaaatggaagccgctacagccttaggatatgtgccaacaactgaattcccggggcaattcgggcatttaatgggtggttatcaggcaggttattacggttatatgtggtctgaggttttagcgctagacatgctttctgcttatggtgacaacctgaataacccacaagttggacaacgttatcgtcagacgattttatcgcagggtagccaaaaaccggcagctgaattggttaaagatttcctcggtcgtgatcctgacaataaagcattctttaacgaaattaccggacaacgggttaaataa

SEQ ID NO: 42048 - DNA, 939 bp, Acinetobacter baumannii
atgctggcatatgttattcggcgtttatggcagatgattccgaccatgttgggagtagtgctgcttatttttatcttatttaattgggtcggtggagatcctgcctatattctggcaggtaagatgtctaaccctgagcagattgaaaatatccgtaaacagttaggtgttgatcaaccttattatgttcaactttggatttttattaagcaaattcttacttttgactatggcgcaagttggagcacaggtgaatccgtttcacaaattatcttaacccgattaggaccgtcgctcacacttttaattccactcaccattttacaaacagttatttcaattattttagcattggctgtagcggcggtacgtggctctctaactgatcgtatggtcatgatgttatgtaccatcggtatgtcgattagtattttggtttacattattgtttttcaatatgttttggcttatcaactgagctggttcccagtacagggatggagcgatagttttaccgaaaatttatttaagttttccttactaccaattctaatcatgctggtggtgagtattgcacctactttacgtttatatcgtagctttgtgcttgatgaagtaaatcaggattatgtgagaaccgcacgtgctaaaggtgtaggtgaaagccgaattttaagtgtgcatgttctacggaatgcctcaattccgattattaccgatgtgatgtcaaatttaccggcattattgataggagcatttttaattgaacgcttttttggtattcccggtattggtcgtgaagtgattattgctgtagagcgtagtgattttcctgtcatcaaagccattactgtatatatcgcagctgcaactatgatttttaatttgattgcggacttggtctacaaagtggttgatccacgtgtacagttgaagtag

SEQ ID NO: 42049 - DNA, 1143 bp, Acinetobacter baumannii
atgctgagtgttttatcaaaaagaaagttagaaacccagacagctcctgcttcagcggggctatggcgacttgccatgcgtcgtctccgggccgataaaattgcaatggcatcgctcattgttgtgttgttctatttgatcgtattaatactatctctaacgggtgtgattgcatctgattggaataaagaagttgctgtcagttatgcgcctcctacatttataggtgcagataagacaacggaagctttgaaaagtacagctgctgtagatgaggaattaccggaaaatccagtcgatcccttaaaagatgtaattcaccaactcaaggctgaaatcaaacaagcaaagagctctggaagtgcaattgattattatggtgtagttgatccattagctgatgatatgaaagcaattgatcagcaactcggtggacatttacttgatcagcaaagtgaactaaaaagtaccctaatttttggtgctgacaaatggggacaagatgtccttaaaaaaactattaaaggcgctgaaacttcaattattgtagggcttgtttctgccttactggcagtcacattaggaacgcttttaggcgcaatttcaggttattttggtggttgggtcgatgatattctcaactggttttataatatttttacttccattccatatttattattagttcttgcgattgctgctgtactacaacaaaagggcattttatctattgttctgattttaggcttaacgggctggacaggtgtctatcggttaattcgtgctgaatatatgaaacatacggcacgcgaatatgtacttgcagctaaagccattggtgtcgggcattttcgccgtatgtttattcatatttttcctaacgtcagccatattgcattggtccaaatgtctattttggtggtttcttttattaaatcggaagttattttgagtttcttagggttcggtgtgccagtaggtgtagtgtcttggggcagtatgttaaatgaagcacaaagtgaacttcttttaggtaagtggtggcagcttgtcgcagcctctgtcgcaatggctgttttggttacggcattttcaatgtttactgatgcgctacgcgatgcattagacccgaaactaaaataa

SEQ ID NO: 42050 - DNA, 1731 bp, Acinetobacter baumannii
atgacagaacaagaaaaaaagaccccattacttcacattgaaaacttacgtgtaagctttaaaggtgaagataaacaatatatcgaaactgtgaaaggaatttcctttgatattccgaccaatacgactgtagctttagttggtgaatcaggtagtggtaagtctgttacttctttagcaactatgggtttattacctgtgggccaaagcaagattgatgagaaaagtaagattatttttgaaggtaaagacttgcttggcttatcgcgtacagagatgcgaaaaatctgtggcaaagatattgccatgatttttcaggaaccgatgtcatcattaaatccggtttttacggttggcaatcaaattgcagaagtgttgtgtttacatatgggtatgagccgaaaacaggcacgacaacgtgttttagagttgcttaaagaggtcggtataccgtcaccagaaacgaaaattgatgcttatcctaaccagctttcaggtggacagcagcaacgtgtcatgattgcaatggcaattgcttgtgagcccaaactactgattgccgatgaaccgactacggcacttgatgtcaccattcaaaagcaaattattgatttacttgaatcactacgtcagcgccgtcaaatgtcgatgctttttattactcacgatttggctttggttggtgaaattgcagatcaagtgattgtgatgcgacatggtgaaattagagagcaaggtaccgctgaacaagttttggaacagcctaaagatgtatatacccgagccttactttactgtcgtcctcaaatgtcacaaagaccttatcgtttgcctgtaaccagtgattttatgcgacaagaaaacaatatattggttgagcaaagctttgatgtttcagaaattcctgagcgtaaacgtggtttaaatggcgatgagcacattattttagaagtaaaagatctgaaaaaaagtttttatagtcgtaaagggctgtttggcaaagaagaatttcaggcagtaaaaggcgtttcttttaaattggctaaaggaaaaacgcttggtttggtaggagagtcgggctccggtaaaacgactgtcgggttattgctcatgcgcttacatcaagcctctggggggcaggctttaattgaaggtaaagatattctttctttaactgaaaaagagtttgccaaatatcaaaggaagatccaaatcatctttcaaaatccatatgcttcgctaaatccacgctttacgattgggcagatcttattggaacctatgcaaattcatggaattggtaaagatgatgcggaacgtaagcaaattgcgcttggtttacttgagagagtgaatctgcctgaacaagcttattatcgatacccacatgagttctcgggcggtcaacgccaacgtattgcgattgcgcgctgcttaacgctaaagcctgaaattctaatttgtgatgaatctgtttcggcgttagatgtttcagttcaggcacaagtacttaatttattacaagacttacaagatgagtttgggcttagttatatttttatttcacatgacttgtcggttgtgaaatatatctctgatcaggttatggtcatgaatcatggtgaagttgttgaaatcgccaactcggatgagctctatgcacatccgcaacatgactacaccaaacgactattgcaggccattccacaagggattcagcacgtttcgtaa

SEQ ID NO: 42051 - DNA, 735 bp, Acinetobacter baumannii
gtgcctttttatttggtttatagaataaatacttataaaataagagatgtaaaagtacagtattttattcctgctatgtgtgccaactttaagcctttaactcttgcccaattgcagcaacttcagttgcctgtggtcggctttagctatgccgatgaggtttatccgggtgggacaatgccattattattcaaatcaccgcaaggttttgagtggcgtgaagtcatgttcggtttggttcctaaatgggcagaagatacgaacatagcaaaacatacttataacgcccgtcatgaaacgattttccaaaaaccgagttttcaagaagctgctcttaaatgtaagttcggtgtaatacccgtcacggagttttatgagagtaaatatataaatgataaacctgagcggtggggcgtacgccgtaaagatgggcaggctttttttatcgcagcaatctatgaaatttgcaaaatgaatgacatgattgtccgttctgcgagtatgttaactatggatgcgattgatcatcccatgatgaaagacttccatgaaccgggtgatgtcaaaagatcggtaattgtgattccacatgaccgcttagatgaatggttaagtttagaaacaccagatatttccagttttattgaaggttttcctgttgaggaatttgaatgtttacatgttcctaaagagaagattataaaacatacacctcaattaagtatgtttgaataa

SEQ ID NO: 42052 - DNA, 369 bp, Acinetobacter baumannii
atgatgctatatggatatcacttctcaacaattgaaaataactgggaagacttaactccattaaatgagtttttacaaacatttgcagatgatgatggtgatgtctcccaaagagataaagaatcacttaaagaaattattgctaaatccgatacagctttggccttagctaaagaaatgggttgggatggtagctatacaggctgtccttatttattttggttaccaagtaaaaatacgcaatcttttgaatatggatttgtttttaaacaaacctcagataactcaacttttgtaatctcaccaattgaattggcttatctggcgcaagatgagcaggtacaaactttaagtaagaatattgattaa

SEQ ID NO: 42053 - DNA, 858 bp, Acinetobacter baumannii
atgtttataacaacaactcgccccaatgatgctttaattgaacagttactaccaatcttggaagaagctagccaaatcttattacaagaatatcaaaattattcggctggatatgaatttacgattgaagaaaaacatgatgattcacctgtaacgcaagcagatttaaaggtaaatcgttttttattaaagcatcttgcagaaattacacctgagttaccggttttatcggaagaaagtgactatagcgctcgccatgcttggtcttcttgctggatgctagatccacttgatggtacaaaagagtttatacatgagcgagatgagttcacgataaacttgagtttgattgaagggcgtgaaacgattttttcggtgattgttgtgccatgtgagcaagttgtttatttaggttatttaaaagatttaccttttaaatatagctttagccaacaacaatggtatcaatatcaaaaaacaccttattcaacacaagcacctgtacaaattggtttaagtcatagtagtaaaaatccaaaatatcagaaattcattgaacctattgaaaagattcgtaccgtaattcgacgtgaagcaggtagcgcttataagttttgtatgatgttagaaggcgagatcgatatttatcctagatttcatccgacatcagaatgggataccagctcaggtcaaggattattagaaagtataggtggaggtttactcactctaacaggtaaaccctttgaatataaccagcgtgataccgtattaaatgagggctttatcgcatttcgtgatcaggaaagcaaaaaaatagcatttgaagctttagctcaatcaggtgttttggattga

SEQ ID NO: 42054 - DNA, 735 bp, Acinetobacter baumannii
atggcactcgatttattgcctaaaagcatgtttgaagcaattgatttattgcctgatgcttcgacccctgtaaccctttttacacgtcactccttaagagagttggtagatgggcaaggcttggcaggatatgaccttcagcttacaccgcaaggacgtgagcttgctcaggaatggggtagctatttaattaaaaacacggatcgtgtaattcaacattgcatttctagcccaattcaacgttgtgtagacactgctgcacttatgattgaaggagcagatggagtgagtcctgagccgaatacacatacaattgaaatagttgaacaaggtttgttggttgaacctggaagctttgtactggatattcaacaggcggcgccttatttccgtaaacaaggggcacttggttttattaatagttttgtgaacaatgccttgccgggtatgaaacatccaattactggcgtattagatgtattagagctgatttatcaaactcatcctaaaacaaaaagtggtctaagtttagctgtaagtcacgacacaattattgcagcgattgttgcagtaatttcatgcaataaccaaatacaaaaagcagattggcctgccatgatggaagggctgtttgtatggtttgaaggtgatgaatttccaaattgtaaattaaagtggatttggagaggcaaaacttacgagttagatgtttctgagtttcataaagtacagtaa

SEQ ID NO: 42055 - DNA, 267 bp, Acinetobacter baumannii
gtggcaaactctgctcaagctaaaaaacgtgcgcgccaaaacgttaaagcgcgtaaacacaacgcaagcttgcgttctatggttcgtacttacatcaaacgtactttaagtgcaatcgctggtggtgattatgctgttgctacagaagcttacaaaaaagctgttcctgtaatcgaccgcatggctgataaaggcatcatccacaaaaataaagctgctcgtcataagagccgtttaaatgctcaagttaaagctttagctaactaa

SEQ ID NO: 42056 - DNA, 666 bp, Acinetobacter baumannii
atgactataagtacgaaaaaagcaattgtagtaggtgctacaggactcgttggtttagcacttgttgaacaacttgagcaaacaccagaatttgaggccattaccgttgtagtaagaaaagaatcacaactacttaatacatataagaaagttactcagctcgttatagacgattttttattactcaatgatgaagatgtgaatggtcatactcatgcatttagttgcttaggtacaactttaaaaatagcgggctcaaaacaaggcttttatgcagttgattatgagataaatgctcactttgcagacttaatccaagataaacatattcattttttaattgttagtgcacttggggcaaatgctaattcgccaattttctacaataaagtaaaaggcgaattagaagattatattcaaagtttaggaatcgaaaaattatctatttttagaccttctctactgattggtaagcgtagcgatgtgcgttttattgaagatttaggacaaagtctatttaaacttattgaaaataaatggactaagcctttcaaatataaaccagttacagcagagcaattggctcataccatggtcgtagcggcactaacgcaaattgaagcttttaaacgatatgataatctcagcatacaacaaactcgataa

SEQ ID NO: 42057 - DNA, 507 bp, Acinetobacter baumannii
gtgtcgacagtaccatttgtgacatgtgatttattagatgacaatccggaaaaagatttgcaagtggtcacgccatcaatggacggtaagttctttaaaagctatggcgcacgtcaaacttttggcggacaagttgtgactgtaaagtgttttgaagataactcgcgtgtaaaagagttattggctacagatggtacagggaaggtattggttgtggatggtggtgcttcaatgcgctgtgcacttatgggagatatgattgcggaatcggcagttaaaaataactggaatggtgtggttatttatggctgtgtacgtgatgttgatgcacttgcaacattagatttaggtgtacatgcattggctgcaattccgcaaaaaagtaaccgtaagggcattggtgaagtagatattcctttgtattttggtggagtcacaattcaatctggtgattttatctatgcagataataatggaattgtgattgctaaagaaaaactagtctag

SEQ ID NO: 42058 - DNA, 780 bp, Acinetobacter baumannii
atggtgaatcatcaaattaaagtactgcaagcattagcgtctgcaattgctgaaggtggtagaggtgttacaggtacagcatttcctaaacagcctgttagagctcttaaactttatgaatttgagggttcaccattttgtcgccgcgttcgtgaagtgattacacttttaaatttggatgtcgaaatttatccatgcccgaaaggtggattaaaatatcgctccatcgttaaagaaattggcggtaaattacagtttcctttttttattgatgaaaatacaggtgacaaattatacgaatcacaagatattattcatcacttatttaagtactatggcaagacagaccaaactcctgataagttttcaaattatccaaaaatgccatatctggcgtttgccggaacattattaaatggtgctcgtggggtctggattaataaaaaaatagtaaatagagctgcgcctgagcataaacttgaactatggagctttgaagcaagtccgtattcaagagtagtaagaagtgtattaagtgagcttgagctaccttacattttacatagtgttgccaaagaaagatggcaagatatgaggcctgcgattcttcggttaaaaccgggcaaatatgaacctttaaaagagggaaagcgagaaaaattgttgccgatcatgcaaggtaaaatgcaggtgccttatttagtggacccaaatacaggcgttaaaatgtttgaatcggcggaaattgtaaagtacctaaaaaaacaatatggcagttaa

SEQ ID NO: 42059 - DNA, 942 bp, Acinetobacter baumannii
atggaatgtatgagaattcagcctgtaacgagtcatcctggagaaaatgctttatttattgtattaggattagctcaaggtgattctgttgtagaaaaagtaaaagattttgctggtaaattctcagcgttaaccagaagtttgtctaaccgttatcctgaaactaaatttaatgccatattaggttttagctcaaacgcgtgggatattttatttccacagcaagcaaagcctcaagaattagaaacatttcaagaaatcaaaggcccaaaatacacagccgtttcaacacccggggatttattctttcatattcgtgctgatcgacaggctttatgttatgagttaggaagtatcatcaatgaacagttaggtaaagtaacttacccaattgatgaagtgcatggttttcgttatttcgatgggcgtgcgattattggctttgtagatggaacagaaaatcctgaacctgtaattgctgcacaatgggcattagtgggtaacgaagatcctgactttattgggggaagttatgcatttatccaaaaatatacccatgatatggaaaaatggcgtgccttaagcgatgaggaacaagaaagagttatcgggcgtaaaaagttcaacgatattgagcttgatgatgacgagaagcctttaacagcacataatgtagtaagtaaagcgcatgatgcagaaggcaatgaactaaaaattatgcgtgcaaatatgcctttttcgaatccatccaaaaatgaatatggtactttttttattggttactcacgtaaatttagtacgacacgtcaaatgcttgaaaatatgttcttaggaaatgagcaaggtaatcttgatcgattacttgactttagtactgcccaaacaggaactctatttttcgtaccgacagtagattttctagatagcttgggtgacgagtag

SEQ ID NO: 42060 - DNA, 357 bp, Acinetobacter baumannii
atgtttaaaaaattaacccaactttttcaaggttcgaaagagacaccagaacaaatttatttacaagagaatcagctcagttttgattcagagcgtggtccggttattaaagatgtcgtgattaatgaaaagtggtcagagcaccttgagtatttttcaaatcgtaaattacagaattttgataacttacctaagctatttcaaattacaccacaaattaatgaaaagattgatttagagattgcaacgcaacgatatgtggaaaggttaggtaatacacaagaaaagttacttgagcttaaagcaatcatacaggtattaaaccaatattatgtgatgtttttacgaggcaaataa

SEQ ID NO: 42061 - DNA, 3462 bp, Acinetobacter baumannii
atgtttcaacaagaaatctctcaattgaatttgcaacagctcaaggccggtgaaaagcgttgggtggggtcattattaggttcatcagcagctttattgcttaaagaaattgccactcagcattcttctttattggtattagttgctagaaacaaccaacatgttgctcaattagaaagtgaacttgagttttatggagttaagccgacaatttttccggattgggaaattttgccttatgaccgtttatctccccatcaagatattgtgtcagaacgtcttgctattttatctaatatgccccagcaaggcgtattactgatttcagcaagtaccttggctcaacgggttgcaccttactcatgggtattgggagaacactttgatataaaagtgggtcaaaaatttgatttagaacaacaaaaattaaggttagttcaggcgggctaccacttagtagatacagtttatgaccatggtgagtttgctgtacgcggtagtattatggatatttttgcatctgggcaagaatctccgatccgcatagatttatttgacgatgaaattgattctttaaaattctttgaccctgaaactcaaagaacaacaaccacactaaaaagttttacggttttacccgcgaaagaattccctttaaaagaaggacgttcggtatttagagatcgttattctgagttttttcctactgccaatcctaagaaaaatccaatttatcaggacgttttagatggtatagcatcgcctggtattgaattttatttaccgctattttttgataaagaacaaatgcagacacaaagtatgtttacaacatacttaccaaagaattgcattgtaattacaactaatgatattgatactgatttaacgagtttctggaaagaagttatgcgtcgttatgaagaccgacgccataatatggatcaacctattcttgctccagaagagctatttatttctccaaatcatctgctaagtgctttaaaccagtttccacgaatgcttgtaagcgcagaaactattgaagaaaaagctggtgcacttaatcttaaaactgaacaaccacccaagttgccagtcgatccgaaaaaagaaaaaccatttagtgccgtaaaaaaatatattgatgaagcaaatcatcctgttctattggttgcggaaagtgcaggacgtcgcgaaagcttaaaagatgcgttgcgttcaagtttaggtgagattccgaatgtagagaattttgaacaattccaaattagtcagttcgcaattgctattactaatgcacctttagatcgtggtttacttttaactgatcaattaacggttatttcagaaaatcagctttacgagcaccgagttgtacagcgtcgtcgcaagcgtcaacaggaagtttcagaagagtttctgattcgaagcttaactgagctaagcattggtgctcctgttgtacatatcgatcatggtgtggggcgttatgctggtttaattacactcgcgattgaaggacaagactatgagttcttacaactagattatgccgaagatgcaaaagtctatgttccagtaacgaacttgcatctaattagccgttatagtggtggcgacccggatttagcaccgttacataaaatcggaactgatgcttggagtaaagctaagcgtaaagcattagaacaaattcatgacgttgcagccgagcttttacatattcaggcacgtcgtcagtcaaaacctggctttgcttttgaactggatcagtcgctctatatgcaatttgcaagcggttttgcgtatgaagaaacccttgatcaggctaatgcaattgaagccacgctctatgatatgcagcaagcaaaaccaatggataggttggtttgtggtgatgtgggttttgggaaaaccgaggtggccatgcgtgcagcatttatcgcagtacaaaatggcaaacaggttgctgttttagttcctacgactttactagctcaacaacattatgagtcttttaaagaccgttttgctgattggccagtacgtattgaagtgctctcacgttttggttcaaacaaaacacatttgaaaaatattgaagacttggcaaatggtaaagtcgacattgtggtaggtacacataagcttctacaagagaatgttcagtttaaagatttaggcttaatggttgtagacgaggagcatcgctttggtgtgcgtgataaggagcgtatcaaagctttacgtgccgatgttgatatgttgacacttacagcaacgccaattcctcgtacgcttaatatggctttttcgggtatgcgtgatttgtcgattattgcgactccgccagcccgtcgattagcagtaaaaacctttgtacaagagcatacagatgcttcaatcaaggaagcgattttgcgtgagttacttcgtggtggacaagtttatttcttacataatgaagtagaaaccattgagcgagctgccgaaaatattcgtgtgcttgtacccgaagcacgtgtagcggtagcacatggacaaatgcgtgaacgcgaacttgagcaagttatgcagcagttctatcacaaagaatataatgtgctggtgtgctcaacgattattgagacaggtatcgatgttccaaatgccaatacaattttaattgaacgtgcggataaacttggtttagcgcaattacaccagttacgtggccgtgtaggtcgttcacatcaccaagcatacgcctatttgttagtaccttcgattaaacacttaaaaggtgatgccgaaaaacgccttgatgcgattcaacgtgcttcgacattaggtgcaggctttatgctcgctacggaagatttggaaattcgtggagcaggcgaattgttaggtgagcaacaaagtggctcaatgcaggcgataggatatggcttgtatatggaaatgcttgagaaagcgactaaagcaattcaacaaggtaaaaccccgaattttgatgctccattgtcgttaactgccgaaattaacttacatattcctgcacttattccagatgattatctgggtgatgttcatcaacgtctattattctataaacgtattagtaataccgatacacaggaaaaactagataacatccgtatggagcttattgaccgtttcggtattccaccgcagtcggttaagcacttgtttagcgtgcatcaaatccgtttgaaagcagaacatttaggtattacgaaaattgatattaatactcaaggtggaaatattgagttttcaccagatacgccagttcaagccattagtattattcagttaatgcaaaaaaatccgacctattaccgtatggaaggcggacaacgtttgaaggtgatggtgcagcttgaagagtatgaaaaacgaattcaatttatcaatgatttattgcaaaaattgatgagtgaactacatgcctga

SEQ ID NO: 42062 - DNA, 435 bp, Acinetobacter baumannii
atgtttagtttgcatccacaacttgctcaagatactttttttgtaggcgatttcccgctttcaacatgtcgtttaatgaatgatatgcaatttccttggttgattttagtaccacgcgtaccaggaatcacggaactatacgaattgagtcaagctgaccaagaacagtttttacgtgaatcaagctggttatctagccagttatctcgcgttttccgtgctgataaaatgaatgtagcagctttaggcaatatggtgcctcaattgcatttccaccatgttgttcgctatcaaaatgatgtagcttggccgaaacctgtatggggtacaccagccgtgccatatacaagtgatgttttagctcatatgcgtcagactcttatgcttgctctacgtggccaaggtgatatgccttttgattggcgcatggattaa

SEQ ID NO: 42063 - DNA, 1470 bp, Acinetobacter baumannii
gtgcaattagagaggtttatagatcgggaacctaagcagtttgcatattttcatcgtttgatgggatattcaattctgtcattaattttagtgatctatgcctttacctcaccgaatactaattatcaaatctatattcctcctttttttctttttttactttttgtcagttctaaactagaacactggttgcagtaccagtttgataagaaaactcaaaaaagtgtttttttcgcaatagatgcgattgtagtggctgttactctggcaggagtgcaccttaatctcgttccaacatttattgcactttttgcattgttttactcagcaattaatagtcgtatttcctttgcagttatttgtttaacgagtctgcttggggcgattattttttatttaagtacatttttcttatttggttttcatccatatttcgaagccacaagccaagaattaacagtaattaccttacttggtttggtaatgtttatcactatcggaaattattaccaacaccgctgggttaaaaaaattagtcagcaacgtcagcattattatgaccagatgacacgttatattgcttttgctaatcagttaagccgctatgctccattacaattatggcagtcgattatgcgtggggaagctgaagcaaaaatcgaatataaacgtaaaaaaatgaccgtattcttttctgatattcaggggttcactgaactttcagaaactttaatccctgatgacttagctttcttgcttaacgattatttaagtcatatgactgaaattgcaaagcaatatgaagcgacggtcgacaaatttatgggagatgcgattctcatattttttggagatccgaattcacaaggggttgagcaagatgccaaatcctgtgtagaaatggcaattgctatgcgtcagcaaatgaagttgttgcgcgaacgatggaagaaaatgggatattcagccttacatatccgtatgggtattagtacaggttattgccacgtagggaattatggtgcaacccatcgtatggcttatacgattgtaggtcgcgacgtaaatttagcggcacgtttacagtatgctgctgaaattgatgaaatactcatttcagatgatacttatcaattgatcaaaagtgattttctatgtgcgcctaagaccccaatttatttaaagggtattcaaggggaagtaaaaacatggcaagtcatggaaaaatacacaggaaataaatcagaccatcaacaatggtttgattatgaatataaaggtttccatttagttttaaatttagaagaagtacaaaactacgaataccctgagttggttgaagtgcttgaaaaaatgattcagcgcattaaagttcaacaaactttggttaatacgcaaggtgttgctcagcttagacttgaggatgaagttaagcctataaatatcgatgaagaacaagatcaggtataa

SEQ ID NO: 42064 - DNA, 339 bp, Acinetobacter baumannii
atgccacgtattaaagtacttcctcacgctcaattttgcccagaaggagcagaatttgaggttgaacaaaatgcaaatctttgccaaagtttgctcaacaaaggaattaaaattgaacatgcttgtgatatgtcttgtgcatgtacaacttgtcatgtgatcgttcgtaaaggctttgatagcttagaagaaatgaatgatgttgaagccgatcttctagaccgtgcttgggggttggagcctgactcacgtctttcatgtcaggttaaagttgtagatgaagatcttgaaattgagattccgaaatacacaattaaccacgcttcagaaaatcattaa

SEQ ID NO: 42065 - DNA, 1860 bp, Acinetobacter baumannii
atggcacttttgcaaattgctgaaccgggtcaatccagtgccccacaccaacatcgcattgcgattggtattgacctaggaacaacacactcattagttgcgacagtgttatcaggcaaacctaaagtactcaatgatgttcaaaatagaagattacttccttctatcgttcattatggggacaatacaactcattatggtgaagaagctaaaccgtttatcattgcagatccaaaaaatacaattgtttctgttaaacgatttatgggccgttcaaaggcagatattaaatttcaacacccttatgagttagtaggctcagaaaatgaaatgcctgcttttgaaactcgtgctggacgcaaaacaccagtagaaatctcagctgaaattttaaaacaattaaaagctcgcgctgaagacagcttacaaaatcctgttaatggagcagtaattaccgttcctgcatatttcgatgaagctcagcgtcaagcaactcgcgatgcagctcaacttgcaggtttaaatgtattacgtttattaaatgagcctacagctgccgctgtagcttatggattagatcaagaaagtaatttagcgaccgaccgtaattatgtaatttatgacttgggtggcggtacttttgacgtatctatcttacgtttttcacaaggcgtattcgaagttttagcgactggtggtcacactgctttaggtggtgatgacttagaccgtctaatcgtaaaatgggctaaaaaacagcttaatattgatgtattaagcgatgaagattatgccgtatttattgtggcagcacgtcaagctaaagaacaattatcaactcaagattcagttgaattaaagttactcgaagcaactctcacactagatcgccctacatttgaaagcattattcaagtagcattagacaaaacgattagtgtttgtaaacgtgtactgcgtgatgcaaaactcgagttaaccgatattcaaaatgttgttttggtaggtggttctactcgctcttatgctgttcaaaaagcagtacgggaagtttttgcccaagaacctctttgcacgatcaacccagatgaagtggtggcaattggcgcttctattacagccaaccagttaatcggtaatagccaagatggttctcttcttttagatgtaacccctctttctctgggtctagagacaatgggaggactcgttgagcgcctgatatctcgtaatacagcgattcctgttgcacgtcgccaagagttcaccacctatcaagatggccaaactgctatgttaattcatgtagttcagggcgaacgtgatttagttgaacattgccgttcattaggtagatttgtacttcatggcattccaccaatgactgcaggccaagctcgtattgaagtcactttccaagttgatgcagatggcttactcaccgtttctgctcgtgaagcaacttctggcgtgcaagctcatatcgatatcaaaccatcttatggtttatctgaggcagatacggaacgcttattaattgaaggtttccaacatgccgaagaggacaaaaatcttcgtcatttaaaagaaactaaagttgaagcagaacgtgagcttgaggctcttgagcaagcattaaaagtagatgcagatttacttgatgaaaagcagcttgaagcactcaactctgccaagggatcattaaaagctcagcttgaaggcagtgatatccaagcgattgagcaagcagttcaacaacttaaagtacatagtgatgcttttgcagcactacggatgaatcgacatattgaccatgccttaaaaggcacgaagctcgatgattggtcaaaatcaaattaa

SEQ ID NO: 42066 - DNA, 519 bp, Acinetobacter baumannii
atgaatcattttgagttgttcaatttacctgtggcactcgatatcgatttggcaagcttgaaatcaaatttcttaagtttgcaacaacaatatcatccagataaagccgcagataaagatcaagcattgatcaaatcaagtgaaatcaatcaagcttttaaaacgctttctcaagttgatagccgcgctgcttatcttttagctcttaaaaagcaagatcatcatcttgatcaatctattagtgatttcgaatttctacaatccgctttagaacttcgtgaacaacttgatgaagcgacatcatctgaacatttacgtactttaagattagaagtacaacaatggattgatggtttggtccgtgaattcaaaattgattacagtgaagaagattgggcagaagcacgcgataccgtacgtaagttacgtttctttcaacgtgttttaaacgatattgataaagcagaagatcaactgttagatgatgaagacagttttgatttagacgacgatttttaa

SEQ ID NO: 42067 - DNA, 321 bp, Acinetobacter baumannii
atgattcatttaactgaaaatgctgcgactcatattagcaattaccttaaaaaccgaggtaagggtgaaggcattcgcgttggtgtgaaaacttctggttgttctgggttggcttatgttctcgaatttgtagatgatatcgatgaacatgatcaaattttcgaacaattcggcgttaaggtttttgtagatcctaaaagcttagtttacttagacggcttagaaatggactatgttaaaaatggccttaatgaagggttcgaatttaacaatcctaataaaaagggtgaatgtggttgtggtgaatcattcactgtttaa

SEQ ID NO: 42068 - DNA, 387 bp, Acinetobacter baumannii
atggcttatagcgaaaaggtaattgatcattacgaaaacccacgtaatgttggtgttttagacaaaaactctgagaatgttggtacaggcatggtgggtgcacctgcatgtggcgacgtaatgcgtttacagattcaagtaaatgacaacggtgtaatcgaagaagcacgtttcaagacttatggttgcggttctgcaattgcatcaagttcacttgtaacagaatggttaaaaggcaagactcttgatgaagctcaagcaatcaaaaacattgatattgcaactgagctagctcttccgccagtaaaagttcactgttctgtattagctgaagatgcaattaaagctgcgattgaagattatcgtagtaaaaaatcaaaagcttaa

SEQ ID NO: 42069 - DNA, 1218 bp, Acinetobacter baumannii
atgaaacgtccaatttatcttgattacgcagcaaccactccagtagatccgcaagttgcagaacgtatgatggagtgtttaactttcgacggtacctttggtaatgctgcatctcgttcccacgcttatggctggcaggcagaagaaaaagttgaatatgcacgtgagcaagtcgcaaacttaattaaagctgacccacgtgaaatcgtttggacttctggtgcaactgaatcagacaaccttgctcttaaaggtgttgctcaattctatgcatctaaaggcaaacatatcattacaagtaaaattgaacataaagctgttctagatccttgccgtgaattggaagaacaaggttttgaaatcacttatttagagccagaaccacaaacaggtttaattactcctgaaatggttaaggctgcccttcgcccagatactattcttgtttctcttatgatggtaaacaatgaaattggtacagttacagatgtagcagcgatcggtgaattaacacgtgcaaataaaacgtttttccatgtagatgcagcacaagcagctggtaaagtcgatatcgacttatctacaatgaaaattgacctaatgagtttctctgctcataaaatttatggtccaaaaggtatcggcgcattatatgtacgtcgtagcccacgtgttcgtctaaaagcacaaattcatggcggtggacatgaacgtggtatgcgttctggtactttagcgactcaccaaattgttggtatgggtgaagcttttgaacttgcaggcaaaacaatgcatgcagaacaagaacgtattcgtaaacttcgtgacaaactttggaacggtttacaagaccttgaacaagtgttcttaaatggccacccaactcaaaacgttgctaactatttaaacgtcagcttcaactttgttgaaggtgaatctttaatgatgtcgcttaaagacgctgctgtatcaagtggttctgcttgtacttctgctactttagagccttcatatgttcttcgcgcattaggtttatctgatgagctagcacacagctcaattcgctttagttttggtaaatacacgactgaagaagatattgaccacgtgcttacaattaccaaagccgctgttgagaaattacgtgaactttctccgctttgggatatgtacaaagaaggtatcgatctttctacagttgaatgggcagaacactaa

SEQ ID NO: 42070 - DNA, 474 bp, Acinetobacter baumannii
atgcgccttacaactcgcggtcgctacgcagtgactgctctacttgatttagctttgcagccaactgaacaaacgatcacgctcgccgaaattgccgcacgtcaatctatttcagttgcttatttagagcagttgttcgcaaaacttaagcgtcatgggttagtttctagtgttcgcggtgcaaatggtggttatcatttggctcgaaacgctgatgaaattactgtgttagaaatcattgaagccgtaaatgaaaccgttgatgcaacgcgttgtgaccataaaggcaactgccaaaatggtgcaatgtgtcttactcacgatttatggcaagaactctctcatcatattgccgactatttagctaaaatcactcttgccaacctcattagccgagacaacgttcaaactgttgcattacgccaaaatgtaactggcacagattcagctcttttatcgggtacaggtatttga

SEQ ID NO: 42071 - DNA, 648 bp, Acinetobacter baumannii
atgagtgaaacgcaacaaagacaaaaacatccacgtctgttgctgaatattgttctaattattttagaaacttttttctcatttattctcacccacgatggtgttcttcgcttgcaagcgaaaaagtttatcgccaataaaataacaatccgtattaatagctatttgccatttttcgacttctatgtgcagtttacggaaaaaggattgctatttgatattcactcatatgaccgtcggattgatttagaaattaatagtactctcgttgaccttatcaaaatttttgttttttcaaatcaacgtagcctgaataacatgcgaattgatggggatgcagagactaaaaaagaacttatcgatttaatttcgcatctcactttacctaagcttctagcagactggaaacagtggttcaacgcaccagatgatgaagccgaagccctagcctctcgcaaaaaaattgctccattacttgaaaaaatcgaccaacaacgctcagaaataaattcgttgcatgtcgaaattaaacagtatcaaaaccgaattgcacgtttacaacagcgccaacggaacattaacttgtgctttggtataattagcctaatatttattgtttatttcatatataatttgtgggtagcttaa

SEQ ID NO: 42072 - DNA, 456 bp, Acinetobacter baumannii
atggataatgcaaacatagaaacacaagcagaagagcaaggagaaaaaaataaatcaaaatcaaaaagttctagaaaatctgcattagattttagaaagtatactaaacaaatctggttggcaggtttgggtgctttttcacgtgccgaagaagaagggaacaaactatttgactcattagtcaaagtaggggaagagttagaatccaaaacaggtgatttagcagatacaactgttggtaaagtaaccgaaaaagcaaaagagtcggtttctgatacaaaagacaaggtcgagaaaattttagatacgagtgtaaaccactctttaaatagaattggcttggtcactccgaaggatttacagcacattgaacaactcctagttcaactgcatataaaggtagatgctttaattgaagaaaatcagaaattgaaggcaaaattgaatgaaaagtaa

SEQ ID NO: 42073 - DNA, 273 bp, Acinetobacter baumannii
atgaataaatcagaattaatcgatgcaattgctgaaaaagggggagtatctaagactgatgcaggcaaggcactcgatgcgacaattgcgtcaattactgaagcacttaaaaaaggtgacacagtaactttagttggttttggtactttcagtgttaaagaacgtgctgcacgtactggtcgtaaccctaaaactggtgaagagcttcaaattaaagcaacaaaagtacctagctttaaagctggtaaaggtcttaaagattcagttgcttaa

SEQ ID NO: 42074 - DNA, 1866 bp, Acinetobacter baumannii
atggaatcgtttcgtacagtcattaagggttggctcggcaaagtccttttagttttgtttttgacccctttagcgcttgtaggtattgaaggatattttaataggggaaacaaggcagatgtcgcaaaaactgtaaatggacaggacatatcaaaaaaagaccttgaaactttaacgcaaaggtataaagaacaatatttagctgctgtaaagggtgatgaaagtttacttaatttaccggtaattcaagccaaagctcttgatatattggtatcccgtaatttgctcattcaacaagctgaaaaattaggtatttctttaagcgatgctcaaatcgagcaaatgttagctcagcagccaagtttgcaagaaaatggccagttttcacaaaaattatatgaaaattatttgcgttcgattggcatgacaagtgaaggtttaattgctagcttacgtcaagatcacgctttaaaaatgttgacttcaacttttgcagattattctttagtgagtaaagttgatttaatgcaaattgcgaatttgcaaaccgaacagcgtacattgcatttggctagtattaagttagacccttataaaactggtttaactgcatcgaaccaagaggctactgattactacaacaaacatcagaatgagtttaaacagcctgcttctgttgatgtagattatgttgttttatctccgtctttaatggctaagccagctccagccacagatgccgagcttaaacaagcttatgcaaagttcgtagaaactcagcaaaaagatgctaaacgcatagtgaaacatatccttattacgacagacgctcgtgatgatgcggcagctcaaaaacttgctaaagatgtatatgcaaaaattcagggtggactttcatttgctcaagcagcagctcagttctctgaagatccaacttctaaaacgaaaggtggattagttgaagcatatgcacctggtgttttctctgatgcatttgataaaactgttttaagcttgaaaaatggtcaaatttctcagccagtaaaaacacaatatggctatcatattattgaagcggagactcaggcgaaccaaattccttcatttgaagctgagaaaccacgtttaattgcagaagtcgaaaagaataaagttgcatctgtttattcagataccgtaaatagtttgaatgaaacgattgttggtaatgattctttagatgctgttgtacagcaggttaaaggtacaaaaatcgaatcattaaatggtgtaactttagctactcaaaatccatatttaagtgatcctaacgtaaaaattaaattgtttaatgatgatgtaaaaaatggcgatcgtaatgcttcatctaatattcaattagcgaacggagatactgtttgggttaaagtacgtgactatcatgcggctggtgttaaaccacttgcccaagcaatgaatgaagtaaaagctaaagtaattgatgagaaagcacgtaaagcagctcaagcgaaaatcgctacaatgctgacagaattcaaaactcagccagctgaacaagttgtcgcgaaaaataaagttgcttttgaatcagcgggtgtatttactcgttcacaaggtttaaaacgtgcaattgagcgtgcagcatttagtgttcctacgccaaaaccaggcatgtggtctgtaactaccgcgaacttaccaaatgagttagtggttgtggcagtttctaatgtaaattcagctgctgttaacgctatgcctgctgatcagttgcaacaattaaaacagctttaccgccaatctcgtggtcaacagatacttgaagattacagtgaatacttaaagtcacacgctaaaatcaaataa

SEQ ID NO: 42075 - DNA, 966 bp, Acinetobacter baumannii
atgattgatcacgtaaacatggatgcactaagtaaattttttgatgatatccacttaaataagtctgaatatatttatataaaagcacaaggtgaatgggcttttaaaacacaagatcaatctgctttactggcttatatcgttttaacgggttctgtatatatccaattaaatgtgtcagagaaaataacagcaagagctggagatattattttaattccttctggaaaagcgcatcatgctacagactcaaaagctactgcgagtaaacttgtagatccagtcgatattactccattatttaatggacatcgccacgatccaattgagttaggctcatcaacatctgaaaataccctattactctgcttgcgctgtcaagtcgatacttatatggcagggccacttattaacgcattaccctctattatgcatattcaacatgagaaccagaccactcctcctgaatggttgcaaataggtctctactttttagcggtcgaaacacaaaaaatccaaccaggtcatgacaaaattattgatcacttagtcagtattcttttaattgaatgtattcgtgatcatattcaacaaatgtcagatcaacaaaattggttaggcgccctcacacatcctgaattaagtaatgctttatccgcaattcatagtcaacctgaaataagctggactgttgaatcattagctgagcaatgctgcatgtcacgatctaagtttgccaatctttttaatagtattattggtgaaccacctcttacttatttacagcattatcgcttccgcttagctagccaatatctacgcacaagtaatttatcaatacaacaaatttcaaataaagtgggctattcttccgaaacagcatttagtcaggcatttaaaagagtatttgatttatcgcctaaacagtatagacaaaattatattggtactaatctcgatgaataa

SEQ ID NO: 42076 - DNA, 1224 bp, Acinetobacter baumannii
atgaatgcaccagtaaatgttcagcaagaacttatgccagtgccagcgtctatgcgtgagatagatcgtaagcgctatttatggatgattagtccggctctacctgtaattggtttaggtattttagctggataccattttggtccacgcccattaaagaaagtatttgctttaggtggcccacttttattacatgttgtgattcctgcaattgatacaattattggtaaagatgcgcgtaatccaaccgatgaagaaattaaacttcttgagaaagatccatattattcgcgtttggtaaaaagttttattccattgcagtatgcggcaaatatttatgcatgttatttaacaagccgtaaagatacttcatttattgacaaaattttgcttggtatttcaatgggtgccattaatggtattgcaattaatacagcccatgaattaagccataaacatgatcgtatagaccatattttatctcatcttgctttggtgcctacaggttacaaccatttccgtattgagcatccatatggccatcataagcgtgcagctactcctgaagatccggcatcttcacgtatgggtgaaacattctatgaattttggccacgtactgttatcggttcttttaaatcagcaattgaaattgagaaaaatcgtttaaaacgtaaaggtaaagagttttggtcactcgataatgaattgctgcaaggctggggtatgagtgctgctttccatgcttctatggtaggaatttttggtaaaggtacgattccttatttagcaacacaagcattttacgggattagcctattcgaaattattaactatattgaacattatggcttattgcgtcagaaaaaagaaaatggccaatatgaacgtacaatgccagagcatagctggaataataacaatgtagtgaccaacttattcttatatcagttacagcgtcactcagatcatcatgcttatccaactcgtccattccaagcgttacgtcattttgatgaagcaccagagttgccaagtggctatgcaagtatgctgctaccagccatgattccttcatggtggtttaaaatgatggataagcgtgtatttgatcactacaaaggggatttaaataaagcaaatatttcaccaaaacgtcgtgcaaaaatcttcaaaaaatttggtgtagtcgataagtccctagaagctacacaggctgaataa

SEQ ID NO: 42077 - DNA, 1206 bp, Acinetobacter baumannii
atgaatttacaaaatccaaaaaaattcaaaatgatgattgatcaggcacatgatgttgcgatcaatgtattacgccctatttcccgtaaatacgataaagcagaacatgcttatccgaaagagttggatatgcttgcttcactcattgatggcatgaatgaaggtggtgaaggaattaatgcaggtgctgccggtgcaggaaaacgtggtgaaactgataatgaaggagtccgtaatggaaccaacatgtcaacagcgttaggcatcattgaaatgtgttatggcgatacgggtttattgctcagcatgccacgtcaaggtttaggaaattctgcaattgccgcggtcgcaaatgatgagcagctagaacgttttaagggtacttgggcagctatggccattaccgagccaggttgcggttctgattctgctgcgatccgtactacggcaactaaagatggcaatgactatattttaaatggtgaaaagattttcgtaacttctggtgaacgtgcggactcggtagttgtatgggctacacttgaccgaaaacttggacgcgcagcaatcaaatcatttgtggtgcctaagggtacacccggaatgaaggttgagcgacttgaacataagttaggtatcaaagcttctgatacagccgttattagttttactgactgtcgtgttccagctgaaaacttgctcggtaaccctgaaattgatgttgcaaaaggttttgccggtgtaatggaaacctttgataatacacgtccattggtcgcagcaatggcaattggctgtgccaaggcttctttagagcgtattaaagaaatttttaaagaccagttagaccccaattactcgactccatatttgcaaacatccaaccttgctgcacaaatttaccgaatggaagccgaatgggaagctgcacggttacttatgctgaaagccacttggatggcggacaataagaaaccaaactcaaaagaagcttccatcgctaaagcaaaagcaggtcgtgtaggcaatgaaatcactttgaagtgtgtcgagttagcagcaagtgttggctataacgaagatgaactacttgagaagtgggcacgtgattcaaaaattcttgatatttttgaaggtactcaacaaatccagcaacttattattgcgcgacgtgagcttggaaaatcttcaagtgaactaaaatag

SEQ ID NO: 42078 - DNA, 1293 bp, Acinetobacter baumannii
atgacaaatatgatcaataaagcccaagggttgggtttatcgctgatcacaaaactagctggaagcgatgtacttgatcaactcaaactacgtaaatttcttgaaaggtctctttaccaaggttcaaaagctggttttagagcattaagtcagactcagaaagcatttaaacctaagcaaattccccaacaacgcctgcctcaacagaagaaaaacctatttgatttaagcctaactgaagaacaacaaatgacttcagaggcaatgtctcaatttgctcaagaagttttattgggattagctcatgatgctgatcagacagctcaatttccagaaagcctttggcaatatgtagaagatttaggattaaactattacgctcttccagaagcactaggtggtgtcgccgctgaacaaaatattgtaagtaacttattgattgctgaaaaactagctgaaggtgattttagtcttacagcagggctcttaagtacgtttagtgttattaatgccattacacgttggggttctactgaagttcagtcaatgtatttaccttgctttgcagaagactccgacattaccgccactttcgctgtacaagaagctactccagcatttaacccttatgttttaaaaacaaaagcttctcttgaaaatgatcaatattttatagagggcgaaaaaacattggtcattttaggagatttggctgatgtgttcttggtgagtgcagactttaatggcaagccggatgtatttgtagtacaagctggcgataccatttctattaaaagtactcctgctatgggtctcaaagcagcagagacagctacattaaaattcagtcatacacctgctctacgactaggtgcaacagattttgattacaccgcctttttagatttaggcaacttaatgtggtgtgcaatggctgtaggaacctgtgaagcagtaaaagcctactgtattaaatatgccaatgagcgaactgctttcggagaaccaatttcacatcgtcaaagtgtcgcattcatgattgcagatatggcaattgaaattgatgctatgcgcatgctaattctaaatgccgcaagtcttgccgaagcaggtaaacctttccatcgtgaagcatatttagctcgtcttctttgcgcagaaaaatccatgaaaataggaacagatggcgtacaaattttaggtggtcatgggtttacaaaagaacaccctgttgaacgttggtatcgtgatttacgcgcaaccgcaattttacattctggcctacatgcttaa

SEQ ID NO: 42079 - DNA, 1374 bp, Acinetobacter baumannii
atgtcaaatcagaacgataagcttaagagtttaaaaacttcttccatggatcgacgcttatcaatcgcgaaagcttctttactggcaggaacacgttgggctactgcaagtgcctcttccctcttttctagtgaagaagaaaaagagaagaagcgtaaaaaggcaatgagcgagcaagctaattatcttgtttctgaaattggcaaactaaaaggttctattgtcaagattggccaaatgatggcgctttatggtgaacattttttaccagaagaaattactcaagctttaaataccttaaataaccaaactgttgctttagactggccagcaattaaacctcatttacaagaacaactaggttctaagttaaatgatctaacaattgaccatgagcctatcggtacggcttctctggcacaagttcatcgcgcaacacgtaagtcagacggtttagagttagttttaaaaattcaataccctggtgttgcgaatgcaattgactccgatatgagtctgtttaaaaacatgcttaagcttacacgtatggttcctcaaactcgtgagtttgatcagtggtttgatgaagtacgtgaaatgatgcatcgtgaagtcaattatcacgtagaggcagccacaacacgtcgctttgctgagcgtttaaaagatgatgagcgctatatcgtccctacaattgtagatgaatactgtaccgatcaagtcttatgtatgacctttgaacgtggcgtgccaattaatagtccagtcatgctttcccttcctcaagaacgtcgcaatcaactcggtgaagcttcactagagattgcagttcgtgagatttttgaatggggtgaaatgcaaactgaccctaactttggtaactaccttgttcgtttaggtaatggccaagacattcaggataaaattgtactattagactttggtgcgatccgtcagttcgatgaacatttactctcagttgcgcgtaatcttatacaagcgggttatcagcatgataaacatacgatggtccaagcaatgactggatatgagtttttcgatgcaatgcctgaaagtattaaacccggcatggccgatgtgtttttacttgcgacagaagcattcagtacgcctgcaaataatccagatatgccagctggcctgatggatgaacatgaacgttatgactggaaaaagagccagttacatagtcgtgttatgcagcaagcaagcaaatcaatggcgtctcgatatttctcggttcctccaaaagaatttatgtttattagccgtaagtttattggcgcatatacatttatgactgttattgatgccaaaacaaatgtacgacgtatgattcgtaactttgcttaa

SEQ ID NO: 42080 - DNA, 303 bp, Acinetobacter baumannii
atgagttacaaacacaataatctgatggcaatgcgtcaccgtttttgggatgagacttcagatcatgtattaaatgaaaagcaatttttacagcagaccttaatcgaacaaggcatttttaataatgcgacttttgatgatgttaagtactttttctatacactgcctagcatcgttattgtaaaggctcatgcgcttggttttatgcatgattccgtcaagcaaatggttattcaacatattcaagctaatcgtatgcatttaatgcaaaaggctgaattgaaaattcagtttaaaatgtaa

SEQ ID NO: 42081 - DNA, 465 bp, Acinetobacter baumannii
atgactcctgcatgtagactgttaaaaagtaacaaaatcgaattttctatccatgaatatgaacatgacgcaaatgctaaaagttttggcttagaggctgctgaaaaattaaatcttaatgtaaatgaggtgtttaaaacacttctggttaccgatgagaaaaattattttgttgcggttataccagttaaccatcaactcaatttaaaaaaagtagctacggcagtggggtgtaaaaaactacagatggcaaatcctaaagatgccgaacgtttaacaggatacttagtgggtggaattagtcctttaggccaaaagaaacgtttgaagacagtaattgatgcctctgcacaagagctcagcaaaatttatgtaagtggcggtaagagagggttagatattggtgtaaatcctaaagatttagcacaaatattaacggcgcaatttgtagacgtacttgattaa

SEQ ID NO: 42082 - DNA, 1785 bp, Acinetobacter baumannii
atgcaagaacttgccaaccgattggcgatacaaaatttcgtcaacgcttatatgcaagagactggcaaaggatatttactttcttttgaccaacaaagttcaactcaacaagcgtttagctctggtttgacgctgttaactcttcctcttccttctatacaagcagaatgttctgtacctttatcttatgtgagtcgtgtaggacgccatcgtctcgctgctttaccgaaaatgtgtattgatggtcaatggcaaaaattcagtgcaggaaccattgttagtcttttacttgaagagttggttattgaatctcaattcaaattagatgctgcttcattgttagagaaatggatacaaagccgggacgcgctactacaattcttaaaacaacgccacaatgatttcgatgatttagtaaaggctgggcagaattttattgaaagtgaacaggcattaattttgggtcatagtatgcacccagcgcctaaaagccggaatggttttgttcatgaagattggttgaagttttcacctgaacatgctggaaaaacccagttacattattggcttgttcatcagaattatattgctgaaggttgtgcaactgagcagccaatttcagatcaagttaaagatgcaatccgttggtatttgtccgaaagcgatttaaacctcttaaagacccatgttgaatttaaattattgccactacatccttggcaagctcgttatttacaaggtaaaccttggtttgagcaattaaaacaaacaggacagttaattgatatcggtttacgtggatggcaattttcaccgactacatcaattcggaccttagcaagttttaacgccccttggatggttaaaacttcactatcagtcatgatcactaattcaattcgagtgaatttggcaaaagagtgtcatcgtggcgaaatttcttatcgtttatggcacagtgatttaggtaaaaaaatattaaaacagtgcccaacattgaaagcagttaatgatccagcctggatagctctgcaaatagacggcgagattattaacgagacaatttgtattttccgtgatcaaccatttgcagtacagcaacaagtcacttgtattgcatctttatgtcaagaccatccaaataaagagttaaatcgttttaatgctttatttgaccaaattgctcagaaaaatcaacaaacgaattttaaagaaattgctttggattggtttgatcatttcttgaagattggcttggctccgttaatgtatgtttatcataaatacggtatggcttttgaatcgcatcaacaaaatgtattgcttgagctagaagatggtttaccgaaaaatctctggttacgtgacaaccaaggcttttattatattgaagagtttgcaactgaaattgtagaagcattaccagatttactagaaaaagctcatgcggttggtcctaaagattttgtggatgaacgctttagttattatttctttggcaacactttatttggtttgattaatgcaattggagcaactggctatatctctgaagatgaactgttaatccatttgcaacaaaatttacttcaattattagagcaatatccagatagcacattattacagggtttattgtttaacgattctttaccgtataaaggcaatttacttacacgcttacatgaattagatgagcttattgcaccattagaacatcagtccgtgtatgtgcagctaccaaatccactgtacgttgaacagaaggatgtgagttatgcttga

SEQ ID NO: 42083 - DNA, 1434 bp, Acinetobacter baumannii
atgcttgattttattggaattggactggggccgtttaatttaagtctggctagtctgttacatgataaaagcgggctgcaatatcgcttttttgatcagcgtgagaaatttgactggcatgctggtatgcaattgccaaacgcgatgttacaagttccttttatggctgatttggttagtatggttgagccaaccagcccttttagttttttaaactatttaaaacaccatcaacgtttatataaattctattttagagaaaatttgtatataccgcgtcaggaatataatcattattgtcaatgggttgtagaacaacttaaccatattgagtttagtagccatgtgctggatattaaaccgattaaaggtggatttgatgtggaggtagtgtgtaatgggcaccaccaacattatcgtactcgacaattggtattgggagtgggtacaacaccacatttaccagaaagcttacaacagatttactcaaaatcaggaacctgcctgcattcatcagaatatttacagtacagctcccagaagttatcaggaaatgtagttttaattggttctggacagtccgcagcagagatttttttagatctatttgatcgtcagtatatgaatggtcgaactacaccagactttcatctttattggttaacccgttctgctggtttctttccaatggaaaatacaccattcggtttagaacattttagtccggattacatgcattacttttaccatttaccatcaggtttaaaggcagagttaccagcgcaacaagcaaatttatataaaggtattagcagtaaaacgatacgtgatatttatgagcgtttatatcatcgtagtatcggtggaatgcctacagatgttacgttggctggacatcatcaactgcaatatgcagagctcttagaaaaccagaaaacaaagttgtgttttgaacaccgtcagcaaaataagaattatattctggaggctgattgtgttattgcagcaacgggttatcgttatccaaaccctaagtttctacaaaatttacaatctttaatcatacgagatcaggccgaccattggcaggtgggttcaaattttaaagtcaattatcaaggtgagggatctatatttattcaaaatatggaagtttatcaccacggcgtaggtacgcctgatttaggcttaggagcatatagggcagccacaattgcaaatcaattggttggtgaagagttattcaaacttgatcattctcagtcgttccaacaatttggagtgaatgcatcagcgcaagaagaagtttctgttcgcaatattgcagcctcaaaaataaccgagttttcaagaactttaaataaatcagggccaatgcatcattctgctttgggagcgtatgcacgaagtaaattatctgagcatattgaataa

SEQ ID NO: 42084 - DNA, 1440 bp, Acinetobacter baumannii
atggaacgttcttctgtgtccgcggctcaacctcatgagcaaagtttacaacgctacgtacttctgacggttatgcttggtacaggtacagttagtttaaataacagtagtttcaaccctgcaatacctcatttaatgtcctattttcaggtaggtgaggtatgggcaagttgggtcgttgttgcctttttattagcaatgagtatcagtttgcctttagctggattcctaagccagcgttttggtaagcggtcaatttatttaattgccttattgggatttgctttggcttctacagcaggtggtttatttaatcagtttgaatcggtgttgattgctagagctctgcaaggcttttgtagcggattaatgattccattatctcttggactaattttttcagttacgccaagtgaacaacggggaagtacaacaggattatggggtgccatgatcatgctaaccttagcagttgggcccatgctcggagcactggttttggtatggcttaattggaaggccttattttttatcaatttacctgttgcttgtctggcattaattttaggctatgtttttctacctaaagagcaaggggacaataagcaagagtttgactgggcaggattcttttttctcggttcaagcatagttttattacttgggacactgagccaaatccatcaaattcaggacttatttcaacctctatatggtgcgcttttagttctaagtgtgctgctttttataaggtttatttttttacaaaagaataagtcgatgccattaatcgagccagctttgtttgctacgaagggtttccgctacagcttagtcatttgtgtggcacaaacagtaggcttatttattggcatgttgctcattccactatggatacagcaccttctaaagttaagcccgctttggactggttttgcgctaatgagcagtgcagtagttaccggtatttgtagtcaacctgccggaaaatatctagatcattacggtgctgcaaaaatcatgtctcttggactaatgattaccgtggcttcttttcttttgcttgcttgggcacctatacaaaatgtctggttcattgtgttttgtatgatattacatggcttaggaatgggactttcttatatgccatcgactacggcaggtttgaacagcttacgccagcagcaacagcatctagttactcaagcggccgctctaaataatttattccgacgtatttttgcagcagtggcagtcgttattgccgcgttatatcttcagctaagacaacaatcattgccgttaaatactcaagcaatatttacatcatttcacactatgcaggaaatctttgtgtgttgtgcaattcttatactttgcactttgcctttcgcatggcgttttcctgaacagtacagaatcgaccaattaaagaaatag

SEQ ID NO: 42085 - DNA, 1842 bp, Acinetobacter baumannii
atgggacaattacatccagttttatcaaatacacatgtgattcaaaatactttacaggcttggcagcatccaaattcggatcaggcaaaatatgttgagcaacgtgttattaaacaattacttcaagctttaatttttgaagatattattcattcagaatatgatggaaaaaattttattatagaagtacaaaatagtcagggccaaaccattcgttatgtcgctgcagggcaaagacaatatagttacaaactagtacgtctcgcccgcaatcaggatgtatttcgtcaagatgaaaacggtcattatcagattgctactttaaatttagttattgatgaaattcttagaaccataaccgatgcagcaaaagttgaagattttatttttgaattaaaacgaacatttattcatgatttacagtctcaagcatgttttgatcactatgctttgccggcaattcaatatccatatgatattttagaatcatatttaatggatggtcatccatatcatccgtgttacaagtcacgtgtaggttttagtttacaagacaatgtacgctatggtgtggagttcgcccaaccaatcgccttggtgtggttggctgtgcatcaggacattgttgcaaaaaaacattcagaagatatagaaccagattcattttttaaggagcaattgaattcacaagatcaagagctattcctgcaacatctctcagatcgtgatttgaaggttgatgaatatatttggattccggttcatccttggcaatgggaaaaccatttaatttctatttttgctgaagaaattctaaatggtaaaattgtttatttagggcaaagtcaggatcgctatttagcccaacaatctctacgcactatgactaacttgcagcatccggaaaagccttatatcaaactgtcgatgagtctaactaatacatcaagctcacgtgttctggctaaacatacagtaatgaatgggccaattattacagactggttgcaacgcttaattaaacagagcaaaaccgcccaagagcttgattttgctgtattacgtgaagtgtatggtttaagcgtggattttactaaattgccaaaatcacatgctcaacaggcctatggcacaattggatgtctatggcgtgagagtgtgcatcaatatttacgtgaaggtgaagatgcaataccgttaaatggcgtgagtcatatccaaaaagatgggcaagcattaattgcaccatggttacagcaatatggtgttgaatcatggacacgtcaacttttgaaagttgtaattactcctttgattcatttactttttgcggagggaattgcaactgaatcacatggccaaaatattattcttgtacataaacaaggttggccaacgcgagttcttttaaaagacttccatgatggtgtgcgctatagcccagcacatttagcacaccctgaattggctcctgaactcgatcagttgccgcctgagcatgcaaaaaccaacagtatgtcatttattttgacagatgatttaaatggtattcgtgattttagctgtgcctgtctgttttttgtcgctttaaccgatattgcaatatttttaaatcaagactttgatcttccagaaaaaaatttctggcaatgggcagcggaagtcatccaaaattaccagcagcaacatccagagcatgcttcacgttaccaattatttgatgtttttgccgaaaaattgcgcattgagtcattaactaaacggcgtttatttggtgatcgtagtatacaaattaaatttgtagataacccgttagctccttttaaattgcaggtgaagtga

SEQ ID NO: 42086 - DNA, 1911 bp, Acinetobacter baumannii
atgaatgcacttcagcccgtttatcaagtaatgaaccaaggaatcttacaggattttatcaatagccttctggttgaaacgattattcctgaacagtttatttttgattttgcgactgcccaaactgcgctaaatcaacatggcaaaaatcttcaagaagtatttaaaaacacgtctgaacaattttcttttgtgctattacacgaagagaatcggcaaggcttggtcatgtttgcggtaaaaaaaggtattactcaagcctggaagtttgctaatgaaacagaagtttttctattggaacgcacaaatgatcatgttcagatcaatgtgattgggataatagaactttttgagtttattcaagcgataggtctttttaatcattgtagtgctgataaagttcaagccttttatgagcagctgcaaaaatgtttaaagcaatatcatttattacaacagcatcgggtaaatgcacatgatttattgaatcaaagctcggcacatagattccgcattttagaacaatatgcaggttatcgggaccgcccatatcatcctttagccaaattaaaagaaggtctcagtcagcaagagtatatgcaatattgtccggaattcgctcaagaattatctattcattgggtggctgtacataaagataaaatgatgtttggtgaaggggtagaaaatattttcaaacaacagccaagcgaaatttttattcctcgtgctgagcgatatcaattaaaacaggaaatgtttcaacgtgggttaaatgaaacccacattgcaatgccaattcatccttggcaatttgagcatttacttcccaaattctatgcggatgatattgccgaaggcatttgtcatcctttgaattttatgtctaaaggaatgtatgccagtgcgtctatgcgtagcctcttatcaaaaaatgttttagaagaaagtctaaaattaccgataggaattaaagctcttggttcattaagatttttgcctattgtgaaaatgattaatggtgaaaaaaatcagaaattattacagcaagccaaggcaaaagatgctgtcttaaaacaaaaattatggctttgtgaagaaacacaatggtggtcatatttacccgagaagcaaaatgatcggacagcagacaatgagtggttatttgtagagaaacctacccatttggcagctcagcgccgtcatattccagctgaattattgcaagaaccttatcaacttataccaatggcaagtcttggacatacaattacgggtcagcctgccatttttgattatattttgcagcttcaacacaaggacataaactccaagcagatacttatcgagtttgagaaactgtgtacatgtttctttgatgtaaatttgcgattattccgcttaggacttatgggtgaaattcatgggcaaaatatatgtcttgtgttgaaaaatggcgaatttgatggattgatgttccgtgatcatgattcattacgtatttatttaccttgggtagagcaaagcggattgaaagatcctaattatttgagtccccatgattttagaaatacgctttatcatgaatcgatagaggctctgttattttatattcaaactttaggtattcaggttaatctagggtgtattgttgataatttagcgagtcattatcaaattgaagttaaggatctatggtctgtacttgctcatgcgttacagcaagttattcaaaatctaaactttcagccagagattttggcccagctccaacatttactatttgaagtgcctgaatggccatataagcagttactccgacctttgctagaacaagatacacggattggtagtatgccatcgggaattgggaaaacccgaaacccactttggtatgccttaaattgttag

SEQ ID NO: 42087 - DNA, 771 bp, Acinetobacter baumannii
atgaatacgtcttttaaaatacaggcagagaagtgcgcaactctgcctatattgcaacagcgtctgaaattaaatgttcaaatactacctgaaagttcaacaaccttagattgtctgttgaatgatgatgtatgtcgacaggtgttacaggattttgcaacacgtattcatgctaaaaatctaacttgtgcgacctcattatttgtcaaatattggtgtacaagttggatcttaccttttttatattgccatgtggctgttttgccatttgtaaaatgggatagttcagcattagttatagacttgccggaacaatggtattgggataggactttacagttaaaccaaacaagtttttattcttttcagattatacatttgcaagagtttaatgacttgatagaacaactgaatgtgctatttaagcagttagcgaaaataggtcgcgtaccttatgtattactctgggaaaatgtagctgttcgagtagtacagttttatcattcgtttacaaatcaaaatctaaatccggatatacagtctcggttagaacagcaaaaacaattctttaagtcaaaagctgccgaaagtttttatttaactgaaaatccatttgtgcgtttatggaatggatggcatccagaatttaatacttttatgagacaaaaatgctgtttctattttcagctcgaagaggctgagcagaccttatgccgtaattgtcccttacgtttaaaagaaatcggaaaatttaaagatgaatcaaattga

SEQ ID NO: 42088 - DNA, 618 bp, Acinetobacter baumannii
atgaatcaaattgatacttctaaagcacttgttacagcatataaagaaatagcaacctctactattggtcatgtacttgatcagggatatattcctcaggtattccccttaagacctgaagataaggtggtggggattgtacgtacagttcggattgaatcgatcaatgcgagtggtttaagacaagtcttgatgagttgtcaaccaaatgaagttctcgttattgatgcaagatatgatctacaacgtgcttgctggggagagcaaaggagcgtagctgctatacactgtggtctggctggggttgtggtcttaggtgctattacagatcggcaggctttacttaaactcaagcttcctatatttgctcatacaaccagttgtttaaccactcgtaatgaaggggaaagtctcgttgaaatagatgccaagattcatattaatcataccattgtacaaactggagatctgattgtaggggatgcagatggaatatttataataaaaatggatgtggcacagcaatatttaaaagaatttcaaaggcttgagcaaaatgaacaaaataagaaaaatgaattctttttaaaaaataagatagatgactattatttttaa

SEQ ID NO: 42089 - DNA, 2310 bp, Acinetobacter baumannii
atgaatgtaaacaataagattggggttaaatcacgtaatcacatacgttcaaaacaagtactttttaagatgacaccttgttgtcttgccatatcggctatttttgcacagcaggcttatgcagaaaccgtaactcaaacggctgaggtaagtgaaaatgcaacacaaaaaccagtagcccaattgcaaaagattgtagtaactgcgactcgtacaccaaaaaatattgcagagattgcaggtacagttcaatctattgatcagaaacaaattatccagcaagctacggcgggtcgtaaagttgctgatattcttgctcaacttgtaccatctcttgcatcaagtagtggaacaacaagtaattatggccagacaatgcgtggacgaaacgtattagtcatgattgacggtgtttcgcaaacaggttctcgcgatgtttctcgtcaattaaatagtattagtcctggtatgattgaacgcattgaagtaatttcgggtgcgactagtatttatgggtcaggtgctactggcggtattattaatattattactaaaagagcagatacatctaaaccacttagctttgaaacaaaagtaggcattacatcttcagatacattccgtagtgacggcttagcttatgaagtcggacaatctgtctcatttaataaaggcaatatagatggtttcttaggggctaattttacaagtagagggtctcaatttgatggaaatggcgatagaatttccttgagcccttggcaaggtagtacgatggacactgatactatcgatgtaaatgggcgtttaaatttcaatttaaatgatactcagacattgagctttggtgcccagtactataaagataagcaggatactgactacggacctgattactcttatttaccgacaacctctaagagtaatgatgctacaacgccaacttataaggcaattaaaggtttaaagcttagtaatccattatttaccgagcgttatgctgttaattcacagtatcaaaatcaagactttttaggccaaatactaaatgttgaagcatattatagaaatgaaaaatcacgtttcttcccatatggcctatcaaataaatccgtgacttctgtaaaccagtctcaatcagaaattgaagtagctggattacgttcaactatgcaaaccgatcttaatattgccaatcgggatatgaaaataacctatggccttgattatgattgggaaaaagataagcaatttgttgacattttggcgactcaatatccttatttagtatatacgccaacaggccaacgtaaaggttatggaccaaatactgaaattcaaaatattggggcatttgttcaaagcgattatgcagttacggataaattgaacttgcaagcaggtattcgttaccaatatattcaagcggataccgatgcttatattcctagccgagagacaacaatggttccggcaggatcaacacatgatgataagccgttatttaatttaggtgcagtttataaacttacagatgcacagcaggtatatgctaatttttcacagggctttagtttccctgacgtacaacgtatgttgcgcgatgtttctacttataccgtttcaacagcaaatctacagccaattacagtaaatagttatgaattaggttggcgtttgaatcaggatgatggcctaaatctgggattgactggtttttacaatacttcggataaaactgtccaattcaacaatcgtgcagcaaaggttgtagatacagatcaaagagtatacggggcggaagcaactattagttatccatttatggaaaattataaggtcggtggcactttaggatatacccgtggtcagtataaagacgtggcgaataaatggcatgaattaaactcatttacggttgcaccagtgaaaggaactctttttgctgaatgggataataatgaagggtatggtgttcgtgttcagatgcaagctattaaaggaacaaataaagcttataaagatgaccgtgaattagccgcatttgcaacaactcaagatgaagctttccaaaacgctgtaaagaatgatgcgaatagtgctgcgcaaatcaaaggttataccactatggatgtattagcacatttcccggcttggaaaggtcgtgtagattttggtgtttataatgtgtggaaccgtcagtatcgaacagtatttgctcagcaagcagccgtctctaatgctaatccgttgttagcaatccctgcagaaggccgtacttatggtttaagttatacttttaactattaa

SEQ ID NO: 42090 - DNA, 294 bp, Acinetobacter baumannii
atgagtcatctaaaaaaacaagaaaattttaattttacgtatagcaggatcttttttatctgtttagccgcttattgctacagttcatggctcagccttgttttggctaaatggttaccttttgctaaagcagagaatgtttatttttcggtatttatcagttttatcttttttattttttatattgtctttacgagttccattttatcaaaactatggttttggatgatcaatagcttaggtgtagtgttattagtgagctattggctattagctaaatggggagtggcttaa

SEQ ID NO: 42091 - DNA, 1524 bp, Acinetobacter baumannii
atgaattttcgtcaaattcaggcaatactacatagttggtttggaattattgttctttgggttatctttttcattttttttacgggctctattgcttattttcggacggaaattaatgtttgggcacagccagaagcaatcagccatattcaaacaatcccttctgcacaacattctgcgcaaactgcgtttaactatctcaaccaacatgcaccaaatgctaaaaggtggcgagtcacagtagccaatgagcggatgcctgtgaacctacttcaatggcaggataaaaaggggaaacatcaagagctacaaaaccctaataccggagagctattggggcctgtacggaagactttgggcggagatttctttttcaaactacattacacgctttatcctttgccaagtaagttcggtagtttagttgtagctgttgttgccttaattctattaattagtttaatcacaggtgtgattacgcataagaaaattattaaagagttttttacctttagggcttttaaaggacagcgttctttattagatcttcatcacataacaggagttatcacttttcctttttatttggtgatggcctttactggactgttgattttattttatctagttttaccgtggggattatcggaacaatatggtaaagctggtatacctaaattctataatgaaatgcagtttaccgaggtggcaaaacctcgagaaccttccttaacagaagcgatgcaaccttttaatcaattcatggcacaaatgcctaagcgaacagaatctggagctattttagataaatttgaagttcaaaagcctaatacagccgatggcatgattacatttgactataactataaaaatattattaccttaaatactcctcaatatatttttgcaacaaatacggctgaacgactcaatcagccacgaaatttaagtgcaatagcacaattaggttcatcaagttatgggattcatttaggttactttgcttctatctggatgcgttttattttggcttgtttaggaataataggatgtgtcatgttggttgcaggcgcattactatggcaaaaaaagcgcatcaaagaacaaaagaaatttgaatatagattagtacagcatttgaatttttttactttcttagggctgccttttgcctcagccttttatttaatggttggtcggattatacctgcttcatttgagccgagggaactatacgaggtttcagcattttatatagcatggctattaagcttattgattagctttagctgctcaataaggaagggaataatcatcatgctatatattacggctgctgttttattgcttattccagttattagtgtcgttctggtaccagaagcttctttattaaatagtttaaagtctgtgcattggtctcttgctggtgtcgatctggcgctcatactgctcgggctattctatttaatagtactacgcttctaccaaaccaaatttattacgttaggagaggctaaatga

SEQ ID NO: 42092 - DNA, 339 bp, Acinetobacter baumannii
atgagctttgcatcattattttgggctattgctgccatgatgcaagcatgcatgctcagccaatttggtcagaaaaagcttcaatatagctggcttacaagcacatctagacgagttttatatagagcaaccatattatttttgcttagttcattgtttttgaattgctcctttgaaggaagctcagtaggagtcttatcatggttttttgccatagtcacaaccgctttctttttgcaaattattgttttttatttttttagaaaatattttattcctatttggttaatggtaatcgtcgttgcaattattttctcgattgttgagtgggtaccttaa

SEQ ID NO: 42093 - DNA, 621 bp, Acinetobacter baumannii
atgcttacgctttcacaaaagctcccagattattttgaatatattgaaaatgatgttagctactcattacgtcaggttcagtatcctcaagatataccactattacaccgctggatgcatgagccacacgttattcctcagtggcaattaaataaaagcgaaatagaactcaaagtttattttgaaaaaatgctagctgatgatcatcaacgtttaatgattgtaggaatcaatggtcaagacgtggggtatgccgaaatttatgaaggtaagcgtgatcgcctagctcgttattataaaggtgaagacaatgatttaggttggcatttactatttggggagaaatctgcttttggtcaaggatttttgcgtccaacgattcgtttattgaatttctatatttttgaaaattccccaacaaatagaattgtaggagagccagatcatacagtgaagccttatgcggctgtagtagaagacatgtgctatgaagagcagggcttaattccaatgccggaaaaaacggcaatgttgtattactgtttccgtgaaaagttctatgacagattttttgagttataccaggcatcgcaacaaaaattacagcaaaaagcgagttaa

SEQ ID NO: 42094 - DNA, 2148 bp, Acinetobacter baumannii
gtgcttatttttcatggaaaacctgttcatggagctatcttcgatatggatgggacaatgtttgatactgaacggttgcggtttcaaacattgcaacaggcatctcaagaactcattgggcaggagttttcacacgaatatttaatgcaatgtttggggttaagtgcgactacagcggaaaagcttgcacaacgtttatacggagtagatgttccatataaggaaattcgaaaacgtgccgatgagatggaactagaacatattcgaaaacacggcgtgcctattaaaaaaggtttggttcaagttctagagcgtttaagaaaatctggtttaagaatggctgtggctacttcaagccgtagagcaattgccgaagaatatttaattaatgcgaatgtttataaattttttgatgtcattacttgtggggatgaagtagaacaagggaagccacatccagaaatctttttaaaagcggctagtcaacttcatttagacgctaaccagtgtcttatgtttgaagattcggaaaatggtttaacttcagcacatacatcgaaaggtctaacgattttattaaaagatattaaagaaccaaatgatgaaatgctggaaaaagcgcatttttattatgaacagatgtatgactttttaaccgaccttgaccaatttattcctgttatggatacgccagagatacaggaaccttttccgcaaagtctgaatcagcttactgttggaatacatggtttcggtgctattggcggtggttatatagcgcagatcttgtcgcattgggatggttatacgaaaccaaaacgtataattgcgtcaacacgaaatagtcttttccgcgaagctgtaaatgcgtttggaacctatagtattcgctatgggcaattttcttatgatgaacgtattgaaaatatgaccattgtggattctgacaatgagcaacaaatgttagagatgtatactcattcaagtttgattgcattatgtttgcctgagcaagcgatcgaacctgaatcaaagataattgcaaaagggttatatgcgcgttttaactcaccacttgaaacatgtatagaacctttaacctttctaattattttaaataaggttggtgcgaaatatttggttatgaagcatcttaaagaagctctactagagttaaccaacgatgaagatgtaaccgagcatattttaaaagagcattacttttgtgacaccgtagttaatcgcatggtttcaaaactttctaatcagaatttatatcgtcaacttcgtattaagcataattttcttgaacagcatttagaagatgtggagcaagaagaccaaatcgaaattgaagattgtaataaactaactccagatcaactaaatcaggcttctatctatgttgataacatgcgccgtaatttccagccgggacatatcttacaaagcatggatttaatcttgttccatagtgaaactgatatgccaatctatgtagagaaaggcagtcctttacttgaaaagttgcgtcaggtggtattggttgaccaaattactgacattcaactcattaaaaatcgtttatggaatggtgtacatgcgatgcttgcttggtatgcatctttaatgggttatgaatctattggtgttgccatgggtgatcatttagttaaagcatttgcagagaacttaattgcagaagtgaagcagggacttgctattgtattacctaactatgcaaaagatctggatcgaatgtcacaaagttttctagactcatgtgaatatgcatttaaagatccttgtcaacgcgtagctagagatccactacgcaaactcaatcataatgaacgtgtcatggcttcaattgctgtgaatattcgtcatgatttgccttataaaaacttattaaaaggcgctgctttaggttatgcctatgcgattcaatttttagaaattgaagagactaaagctgttgagcatctgcagcagcaaattcagaacctagacttgagtacaactcaaagaagacagtttgaagctgaattggttcaacttatccaatatttgttttctgaacaaggtaaacaacctttggacattaagctgaacaataccaaaactacatcaaatcaatatgtttga

SEQ ID NO: 42095 - DNA, 627 bp, Acinetobacter baumannii
atggtgccaacacctatacgggattatcccgaatggcaccttgggcgtcaaaattacgcattgtggtatctagaaattaatgatcagaaattagttcattatctagatcaattgcgtgcgcatttttcagaatatctagtagaacctaatcaccgtcaatatcatgtcacgctgtttatatgtggattcttgactcatgaaactaaagttcactgtgatgattttagttttactgaatttgagcagcataagaaagttctaatacaagaaaattttgcaccattccaattaaaaattggttcagttgatagctttagtagtgctttatttgtagaagtccaagacaccgaaaataacttatctctcatacggcaaaaattaggtatagtttctaatgaaattgccgctttagattattgcccgcacattacattgggtttgtataagaaagactatagtagtaatttgattttacaaaaaatttctcaattacctgtacaatacacacaggctgaatttgatcttaaagttgagcatttaagctttggctattatcaagctcaaattttacaaggtcagctgtatccgtatcagcatttgtttttaggtgattcatgttgcaattga

SEQ ID NO: 42096 - DNA, 519 bp, Acinetobacter baumannii
atgttgcaattgattttaggtggtgcccgttctggcaaaagccgattggctgaacaaacggccatatctatgcaattagctgtcacttatgtggctacggcgcaagcgcttgatccagaaatgcaaagccgaatcgtccatcatcaaaatcagcgtcctgctcactggtctttggttgaagaaccattatttttagcaaaaactctgcaagaaattgatcgacctaaccaaattattctggtggattgtttaacactttggctaaccaatttgttacttttagaagatcaaaacattcaacaatttgagtgtgagcagctgttaagagttttacccacactcgagtcagaaattattttagtaagtaatgaaacggggttaggcgttgtgccacttggtgaaattagccgccgttttgtcgatgaagcaggaaggctacatcaggctttaggacaaattgcagataaagttgtgttttgtgtggctggttttccaatgattttaaaaggtgataagtaa

SEQ ID NO: 42097 - DNA, 1056 bp, Acinetobacter baumannii
atgaactggtggttagaatccgtacagcaacctaatttagatgcaaaacaacaagctgagcaacatcaactccaacttaccaaacctacaggtgctttaggggatctagagcaaattgcaattacacttgccagtttacagtcaaatgtacatccacaagttagccatccatggatcacaatttttgcaggtgatcatggtgtagttgaagaaaatatctctgcatatccccaagctgttacccgccaaatgttgcaaaacttcacaactggcggtgcggcaattagtgtaattgctaaatatcatcaagctcatttgcaagtgattgactgtggcacagtaggcgaagcatacgaatatgcaggtgttgaacgtcattgtattcgtgccggcacagcaaattttgccaaacaagctgcaatgaatgctgacgagtgccgtgctgccttagagttagggaaaaaaagtgtagatactgctaaagcgaatggagcagatatttatattgcgggtgaaatggggattggaaatacctgttctgcctctgctttagcatgccttttattaaatgatactgccgagcaattgactggagtaggtacaggaattggtgctgatcagttaagacataaaattgaagtaattgaaaaagctattgaacttcatcataaacatgtcattggtgatgtcttcaaaacactatgtgctgtaggtggtttggaaattgcggcaattgtcggtgcttacattcgctgtgcgcaggcgggcttacctatcattgtcgatggttttattagttctgtagccgctttatgtgctgggcggatgaatcctcaagtgcgtgactggatgctttttggccatcaatcggctgaatatggacaccgccgtattttacaagaactcaatgctgacccaattttaaaaatgaatttgcgtttaggtgaaggtagtggtgctggcgctgctttggcattggttaaaatggcatgtgtcttacataaccaaatggctaccttcgctcaagcggctgtaagcgggaataaaattggctaa

SEQ ID NO: 42098 - DNA, 579 bp, Acinetobacter baumannii
ttgctcagacatggagaaagccagtatagccataccttacgtggccatttagatgatgagttaacagcaaaaggttggcagcaaatgcagtcaaccattgagcaagttacaaaccagacatgggatgtcattgtaagttcatcattaaaaagatgtgcttgttttgccgagcaactggccaaaacagcaaaactccctttacttgtaaatcatgacttaaaagaaatgtattttggtgaatgggaaggcgtctcaactcagcaaatttatgaaacttcacccgaattactggcaaacttttggcaaaaaccaagtcaatattgtccacctcgcgcagaaacattagaccagtttcaaacaagggttcttaaaggctttcaagatttgctggagcatatgcaaaagcaaaacttacagcatgctttagttgttactcatggcggtgtgattaagctattggcttgtttagccagacaacagcctctagatgacttacttaaaatgccggcagagcttggaaaattatattcactcgaattttctgaaacagatggtcaattaacttttaagttaagatag

SEQ ID NO: 42099 - DNA, 1569 bp, Acinetobacter baumannii
atgaatattttatttaaaacaactgtgcttgcagcatcattattactcgcggcttgtaataacaatgatgatcaagaagctcaaactgcaccatctacaaacccatcaaaatattatcaaacgaaaacgccttaccaacctcaacaagacttaaaaagctatgaacaagcgccgactgggttccagccagtttttacagagttagtggcacgtcacggttcgagaggtttatcaagtctgaaatatgatttagcactttataatttatggaaacaggcgaaagctgaaaatgccttaacgccactaggtgagcaattaggtgctgatttagaagcaatgatgaaagcgaatattttgttaggttatggtgttgaagggatccgtcagtacggttatggaaatgaaaccatgactggtattttagaacaccgcggtattgccgatcgcttattacagcgcttaccaactcttttaaatacgcaggcgtctatatgggtacaaagttctggagtagaccgtgcggtagatagtgctaaatttttcactgctgaactcattaaacaacaaccgcaactgaaagataaaattgttccattgtcttataccaatttatcaagtgaaaacgtgccgagtgttgaagatggcggcgttgatcgttttaaactttattttcatagcttgaatgcagacgaagacttagctcaaccactgagtgttagccaacaaaaaatttatgatgcaagtcaggcttatcaagattttgaagaaaataataaagatttagctcaaaagttagatgagttaacaaaaaatactcaggctgaaaaaactgcccaactggtactcagcccaatttttaaagctgacttcattaaaaagctcggtaccactggttatagctttagcaataccggatcatttacagtaacttcgccgaaaggtgagcaaattacagaaaaaggtaaggggaaaaatacaattgccagcgcagttgatgcagcggcttatatttatgaactctattcaatttctggtggtatgaaagatgagttaaaaggtattgattttgataaatatatgcctttggaagccgcaaaattttatgctgaatttaatgacgccaatgatttttacgaaaaaggcccaagctttacagaatcaaataaagtcaccagtgaaatcgctcaaggacttaaacaggatctgttccaacaagttgacgccgtagtgaataaagctcaaccttacaaagcagttttacggtttgcccatgctgaaattattattcctctggcaactagcttagatttgcataatatgatgcagccgttaccactacgccagacttataattactcgacaagtgcatggcgtggtgaagtagtttcacctatggcggcaaatgtacagtgggatatttaccaaaatagccaaggcaatactttggtaaaaatgctttataacgaaaaagaaactttgttcaaatctgcatgtaactatgcacgttatacaccaaccagtttttactacgactacatcaaattgaaacagtgctatcaaatgcaatag

SEQ ID NO: 42100 - DNA, 744 bp, Acinetobacter baumannii
atgacacctttttggatagcattgcaatttttaactgttctgcctattgagctaaaaacaataccaacggcgcaacaaaatggtcgagctattctgttttatcctctagttggtctgattattgggggcatactttttcttgttacctgtatttttgttaaattacccgctcttttacttgcggcaatcgtactcgctttatggatctggctaacgggtggattgcatttagatgggctagcagatactgccgatgcgtgggtaggtggtttcggagataaactacgtactttacaaatcatgaaggatccaagttgtggtccaattggagtcctcagcttagttatcatatgtttgctcaaatttgcactagtttatgtgttgattgaacagcatcaatctttatttttaatatgtattcctatccttgggcgtgtggtgccatctattttgtttttaactacaccatatgttcgcgaaaaaggcttaggccgttctttgacagaccatttacccaaaactgcttcatggataataactgggttcgttctgctattacctttgtattgggggtggcaagggcttattgccatcattggttttttaatcagtcttgtttatttaagacatgtgtttataaaaaggattggcggtattacaggggataccgtcggtgcagcgattgaaataggtgaaactgtactgatgtttacttttgtcgtaagttatttttatttagtttga

SEQ ID NO: 42101 - DNA, 1143 bp, Acinetobacter baumannii
atggtatattcagtacacaaaacaacctttagtatgatcgaaccagtgacagcaatgactacacattcaaattccgtttccaagccagatatcgacgacgttaacattaaaagcatccaaactcttgtaacaccagctgagcttaaatcagaacttccgttatctgatgttgcttcacaaactgttctaaaaggccgcgaaactattcgtaatattttagatggttcagataaacgtttatttgtcgttattggtccttgctctattcatgatccaaaagctgctcacgaatatgctgatcgcctaaaagcgctaagcgaaaaggttaaagatactttatatctggttatgcgtgtatattttgaaaaaccacgtactacaattggctggaaaggcttaattaatgatccggatatgaatgactcatttaacatcgaaaaaggtttacgtattggtcgtaaacttttgcttgagttaaatgaaaaaggcttaccttgtgcaacagaagcacttgaccctaactctccacagtactatcaagacttaatttcttggtctgcgattggtgcacgtacaaccgaaagccaaactcaccgcgaaatgtcttctggtctatcatcaccagtaggttttaaaaatggtacagacggcggtttaactgttgcaaccaatgccatgcagtctgttaaatatggccatagtttcttaggcttaaatgaagacggtcaggtttcaatcattaatacaaaaggtaacccttatgcacacgtggtattacgtggcggtaatggtaaaccaaactacgatgctggctctgttgcagaagcagaaaacgctttagcgaaagcaaaagtgagcaacaaaattatgattgatgcaagccacgctaactcgaataaagacccgtacttacagccgcttgttcttaaaaatattactgaacagattttagacggcaataagtcaattgtaggtattatggtcgaaagtcatctaaaaggtggtcgccaagatattcctgacaatctttgtgaccttgaatatggcaaatcagtgacggatggttgtattgactgggaaactactgaaaagaccttgcttgaaatgcatgaagctttaaaagaagttttaccaaaccgctaa

SEQ ID NO: 42102 - DNA, 888 bp, Acinetobacter baumannii
atgtctggtgcttttgaatttatcttggcaggtatgttagttggcttctgtgtaggtattacaggagttggtggtggatcattaatgacaccaattttaattggtctttttaggattgaaccgcatatcgcaattggtactgatttactttacgccgcgatctctaagttctgtggatcgatggttcacgcaaaaaaacttaatatcgtgtggccgattgttttatggttagcggtcggtagtattccggcatcttttggtactgcgtgggtacttgagcattatttaagtcagtcaactcattataaagctgtattaaccatggtgttaggctttatgttgaccttaactggtgtttccatcattttccgtactcggattgaaaagttctttaataaattccgaaataaagagaatactcaaactgaaaatgagcaattagctgttcaaaataaacgcacctatattgtgattatgggtattattttgggtgtattcgtaacactatcatcagtcggcgctggtgcctttggaattatggcacttgtaatcatgttccctaacttaccaatgattcgtattattggttccgatgtcgtacacgctgtactcttaaccctagtcgcaggtcttgggcatatgagtgccggtaatgtcgactttgtgctgcttatgtggttattagtaggttcaattccggcaattattattggaacattaattagctcacgtatgccagaacgtttaatccgtaaaattttgggtattacactatttgctcttggtgttaactttatggtccacccagtcaaagccaaaccaaaagcagctgtggtacaacaacaagcagtagttgctgaaaaaacaggcaactcgaccgaaagatag

SEQ ID NO: 42103 - DNA, 303 bp, Acinetobacter baumannii
atgatgttctttgtgtttatcctgactttactaggcatgtatttactattcatatcgactgaaaaatatcgctcaccgaaatcaactggtcatttcaaacctttagctcaaaaatattattcattgttgaggatattggcctttttactatttgcgttgagcgggtttattctcatcaaaaaatatggtttttcaattggttttgtcagctggtggatctttgcaaccccccttacctttttactcatactttggcttaatccgctcaagccatcaaaaacttcctctaagtcatcaatttga

SEQ ID NO: 42104 - DNA, 1557 bp, Acinetobacter baumannii
atgcataaaggtatacgtcaatctatggcatggctccactcgtggactggtttaatttttggatggctcgtatttgctatttttttaatgggaagtttgtcttattaccgccatgaaattaatttgtggatgcaaccaccccttgcacaatttgaaataaaacaagatgtggcaattaaaacggcatatcaatacttacaagaacacgcttcagatgctaaatcttggtatttaactgttgctacatctgaaagtccggtaaatacgatgtattgggaaaaaccagatggtagttatggaaatgcaaccctcgatgcaaacactggtcaagaattaaaactttctgcgactgaaggcggtgactttttctaccgtttccattatcaactttttggtgtcccgatattaattgggcggttggtcgtatctttagcagcttttattatgttgattgccttaatctcaggcattattactcataaaaaaatcttcaccgatttttttaccttgcgtacctttaaatcgcagcgctcatggttagattttcataatgtttcatctgttattgcactgcccttctttttaacagttacttttactggcttggctattttcttttatctatatttgccttggggaatgcaaaaactctatccagagaatccatatcaatatttcaatgatatacgtacaaaaacagtcacagaaagtacaacaccgcatcctgcacagaatttaccagttgaaaagctattagctcaacttaaacagcgttggggaaatcaaactttagcaactattagtgttaaaaatccaaatacgaatcaggctcaaattacgtttattcagcaagaagaccattctattacccgtaatcaagcacaaatcacattagatgctacaaatgctaaagtcttgggtgatacacgtaatcatagtcctattgccacactttatgcaggagtatatggcctccatatggcaacttttgctcagcctctacttcgcttaggattgtttttctctggcattttagggtgtgtgatgattgcctctggcttgttgctttggagccttaaacgtcaacttcaaaataaaaatagtcagtttcatttcgggcactatttagttgaccgtttaaatgttgctacctttgtaggtttgccttgtgcaactcttgcttatttgtatgcgaatcgattgtttactgtcacggccaccactgttaattatgaaatttatagtttcttcttcgtgtggctcatgagctttattattgcgctcatcactaaaaaacaatatttatggcaaactcagctaggtatttttattctactttgtattgcactccctatcttgaatataagttatttactgaaaaataattatattcaaaactttagtggttattgggattttgcacgtatagatatatttttctggttatttgcagctctagccttttttatatttcttaaaattaagcctattcaacataaagcttcagataaaattcaaaaaaagctgagtaagttaaatattgaggtgaattcatga

SEQ ID NO: 42105 - DNA, 276 bp, Acinetobacter baumannii
atgttatatcgcataaaagttttctatcgattcttaattgttttcggtatgggttatgcctgtatggcgtacttaagtcttggactaactgaaattttccatttgaacttagacaagccagaagctatctatttggcggccttcatttctattttgttttatgtatttttcgtgattgttggtttctgcatccaatcattattgcgactgaccattttatcaatcgcactatttgcccttttctttattgtgacacggacggtaggttatgcataa

SEQ ID NO: 42106 - DNA, 2136 bp, Acinetobacter baumannii
atgaatatcccacctcgaccatttaagttgtctgtaatcgcctgcgcgatttgttatgccaacctcacctatgcccaagatgcacaggtacaagctttgcaaacgattcaagtcaaagcatcagatgcagagcagtcttctgaacagaccaaggcatataatgttaaaaactcgagtagtgcaaccaagcttaatattgaggctaaggaaacacctcaaaccattaatgtcgttactcgtcagcaaattgaagattttggccttaccagtactcgtgatgttttaagaaatacccctggtgtaacagtctctaatcaagaaactgagcgaaccacttatatggctcgtggttttgagatttcaaatatcttaacggatggcgtaggcttccctctttcaggttataactataataatacgaatcctgatacttacttttatgatcgtgtagaagtagttaaaggagctgactcgttaactaatgcctttggcgatccgagtgcaaccatcaataatattcgaaaacgtccaacacaagaatttcaagcaagcggtggtgtaagttacggttcatgggatacgcagcgctatgaagctgacgtatctggctcaattctaccaagtggaaaagtacgtggccgtattatgggctatgaacagactggtgattcttacctagaccgatattctgcggaaaaaaacggctttgctggtattgttgaagccgatttaacagatagcactttacttaccgcaggttatagccaagaacaaaataaacctaatgcaaacaactggggtgcactacctttattagatgccaacggtaaacaaatttcctatgaccgctcatataatccaaacccagattgggcacattgggataatgagacacaaaatgcttttgttgaattaaagcaaaaacttaatgaccaatggaatgctaagctgacttacaactatcttgatacgaagcataatagccgtcttctctattactatggttacccaaaagctgatgggtccggtgtttctctaacaccttggggtggacaagaacatcaagaaaaacatgctgtagattttaatctcgaagggacctataagctatttaaccgagaacatgaagcaactctaggctacagctatgtacgtaatcatcaacaagataaacaatctacaggaacgattaacgatagtaacgttataaagtcaactactaccgattgggcaagttggacaccgcaatctataacttggtcagctttcacagaagcggctaactataaacaaaatattaactcaatttatgccgcgacacgtttacatcttaatgaagatttaaaacttttacttggtgcaaactatgttcaagctgagagtaaaggcgaaagttatagctcaccaatgtcatatagtgaaagtaaagtttctccatatgtcggactaacctataattttacacctgaatatacgggttacatgagttatacctctattttccgtccacaaactggtattgataaagataccaatcaagctttaaaacctattgagggtaaaagctatgaaatgggtgtaaaaagctcatggctagatgaccgtttaacaggcacactttcagtatttaaaactgaacaaaacaattaccctttacgtaactcggatggaaacccacttaaccgaaaagtaccaacgagtgatctagaatcgcaaggtgtagaagtcggtctatcaggtcaaattactgataacgtaaatctttctctcggctatgctcaatttagtattaaagatactaaaaatggtggggaagcaagaatatacaatccaaaccagacacttaacttgctaactacctatactccgccagttttacctaagcttaaagttggtgcaggtttacagtggcaagatgggataaagttatatgactcaaatgtaaacggtacgatcaaacaagatgcatatgctttagtcaatttaatggcaagctatgaagtcaatgatcatattacgcttcaagcaaatggtaataatatttttgacaagaaatatttaaatagtttcccagatgggcaggctttttatggtgccccagccaactatacagttgctgtaaagtttaaatattaa

SEQ ID NO: 42107 - DNA, 1176 bp, Acinetobacter baumannii
ttggcaaaccgaaaacttaaaataggcattgtagttggagaagtttctggagatacgctcggcgtaaaactcatgcgtagttttcgtgagcagggaatcgatgctgaatttgagggaatcggtggccctcaaatgattgcggaaggttttaacagttattacccaatggaaactctgtctgtgatgggcattgttgaggtattaaaagacttaaaaaaactattcgccgtacgtgatggcttaattaatcaatggactcagcatccagttgatatttttattggtattgatgcaccagactttaacctcagactttcgaaaagtatcaaagaaaagaatcttccaataaaaacagttcaatatgtgagtccatcagtttgggcatggcgccaagggcgagtacatggcatcaaacaaagtatagatttagtactttgcttatttccttttgaaaaagttttttatgaacaatatgaagttccagcggcatttgtaggccatccattagctaaacaattaccgcttgagaaccctattcaaattgctaaacaagaattgggtgttgatgaaaatcaaaaacatattgctttgttgcctggtagccgcaagggtgaagtagaaaggcttcttcctatgctattgggggcagccaatattttgcatacaaaatatccagatattcagtttttaattccggcaattaatgatgcgcgcaaacagcagattgagcagggggttgaacaattagcaccgcagttaaaagcaaaaattcatattttagaaaatacggatagcgaatcgaaaattggtcgtatggtcatgaacgcgagtgacattattgccttagcgtctggaacggcgacattagaagccatgctcatgcatagaccaatggtcactttctataaactgcattggctaacttatttaattgctaaatttttggtgaaaataccttattactctttgccaaatatcatcgcgggtaaaaaagtaattgaagagctgattcaggcagatgcaacacctgaaaatttagcggctgaaatagaaaaactaatgaatgtagaaaccgctcaaattcaagtaatgcaacatttaactatgcataaacagcttatttctggaaatacagaagatccggttcaagccattttgcaatgtttgaatagctaa

SEQ ID NO: 42108 - DNA, 648 bp, Acinetobacter baumannii
atgtccagatctagacgaagtgatggtgatttgacaaagactaaaattattgaggcagcaggacccttaatcgcccaatatggttttgcaaaaacagcaaacaaaacaattgccaaagtagcaaatgtcgatttagcagcaattaattatcactttgatggccgagatgggctataccaagcagtgttaatggaagctcatgcccattatctagatgaacaatacttactagaacttgttgaaagtacttactctcccgaagaaaaattgagtttattacttgaaactttattacataagttgacggaaaaagatgtttggcatggcaaagtttttattcgcgaactgttttcaccgtctgagcatttattaagttttattgaattaactggaatgagaaaattttttcttattcgaaagttgattagtcaagtggcgaacttagatgaaaatgatccggccgttttaccttgtattttaagcgtgatgaccccgtgcatgatgcttattattgccgggcctaatgctcaagcacctgagccacttaaaaatattgctcagatgccattacatgatttagttgaacactttaaaaaattttcattagctggattaaaagcaattagccaatcaaatcttaaaaattag

SEQ ID NO: 42109 - DNA, 1023 bp, Acinetobacter baumannii
atgaataaaaaagtgattgccggcattttagttgttatagctgtagttgccatcggcttttgggtatggggatataatcataaaaaacaattagataatgatgtattaactttatatggaaatgtggatatccgccaagtttcacttgcatttgaacagtctggccgtattcagaaacttttagttcaagagggcgataaagttcaagcaggtcaagtactggcgactcttaataccaatgcattacaaattcaggcaaagcaagctcaagcacaacttaaagctcaacaagaggcaattattaaacaagaggttggagctcgccctgaagaaatcacccaagcaaaagctcaacttgcgtctgcccaagctgagcttgataaaaccaataaaaacttgcaacgcttacaaattttggtaagtagtaccgatggtcgagcaattagccaacaagaactcgactatgccaaaagtaatcaacatagtgctgaggcagcggtccgtgaaagacaagccaatttagaattattaattaaaggtgcacgaaaagaagatcgtgaagcaaccagagcacaatatgaagtgactaaggctaatttagatttaattaagtataaccttactcaagcagaactaaggtctcctgtaaatgcagtggtacgagctcggttgcaagaagttggcgacatgacaactgctcaaaaggctgtttatacattagccttgaccaatccaaaatggattcgtgtgtatgtaaatgaacaagatttaagttcaattaaaatgggaggcacggctcaagttattcgtgatgcttatcccaatcagcctattaatggaaaaattggctatatatcttcagtggctgagttcacacctaaaacagtacagacagaagagattagaacaacacttgtttacgaagttcgggtgtatgtaaatgatccgaatgatcaattaaaaatgggtcaacctgtgacagtaaaagtcccacttgctttcagtgagaaagcccatgattga

SEQ ID NO: 42110 - DNA, 1758 bp, Acinetobacter baumannii
atgattgatagtaaagcagtggttcaagcccataatttattcatgacttttaaagccgaaaataaaaattcagcagatattagtgcaattgttgatttgaatatgcaaatcaaaaaaggagaacttaccgctttagtcggtccagatggtgcgggtaaaacaactttattaaggttaattgcaggattatataaagcgagttcaggttctcttcatgtgcttgggtttgatattgaaaaatatcctcaagttgtccaagaccgtattagttatatgccacaacgttttggactctatgaagacttaagtgtacaagagaatctaaatttatatgccgacttacacggcgttccaaaaaatgtacgtaaccaaagatttaaacgtttattggaaataacggatcttactcagtttactcaacgtctagcagggcaactttctggtggaatgaagcaaaaactaggattggcatgtactctagttcgttccccagagttactcttgcttgatgagcctagtgttggagtagatcctttatcacgacgggatttatggatcattattgaacaacttgttcaggaagaaaatttaagtgtaattataagtaccgcttatatggatgaagcagaaaaatgcgcttacgtgtatatcatgcatgaaggcaaaattttaagacaaggttcacctgagcaattaaaagcgttagtacatgagcaaacatggcaaataaagccttcagagcagattaagactcggattgtacaagcccagttgcttggaaattctggagagattattgatgcagtgccaagaggagagcaagtaaactttattagtcgccaaaaagaactatcaacaaatattttacctctggggctagtggcaaataggcgaccacctgaactcgaagatgcttttatgatgttgttacaacaaaatcaaaaacaacaaatctctatttctcagcaaacttttcgatcagaacaaaacaataattcgcaatccgaccaagcggtcattgtagttaaagatttagtcagaacttttggagattttactgctgttgccaatacgtcatttactgtacagcgtggagagatctttgggttacttgggccaaatggagctggtaaaaccacgacatttcgcatgttatgtgggttactatcggcaagtagcggttacctagaagttgcaggtaaaaacttacggacggcccgtgctgaagcaagagctaaagtaggctacgtctctcaaaaatttgcactgtatagcaatttaactgtgttggaaaacttaaagttttttggtggagcctatggtttatcgggcaaaaaactagatcaacaaattgataaagctttacagcaatatgatttagagccgcaaattaaaagtggtgatttacctggtggttataaacagcgcttatctatggcggctgcattattacatgaaccagaaattttatttttagacgaacctacgagtggaatagacccacttgcacggcgttcattttggtacagcattggtaaactcgcaaatcaaggcattaccatcattattaccactcattttatggaggatgcagaatattgtgaccgcattgctatacaagatgcaggaaagttactagccctaggttctcctcaacaggtccgcgaattggcaagtaaagataaacatattgttgatatgaatgaggcttttattgcaattgtggaacaagcacgtgcattaaggcatgcgggttag

SEQ ID NO: 42111 - DNA, 1125 bp, Acinetobacter baumannii
atgagctttgcattttggagtcgcttgaaagccttagttcggaaagaaactaaacagcttcttcgtgacaaaagcagtctcggaattggcctagttttgcctgttatcttaattttactgtttggttatggactttcttttgacttgaaccaagcacgagttggtgttgtagttgatcagtcctcgccgcaggtcaatcaggtcttagctggcttaaatggatcgcgatatttaaccagtctagaatttcataatttgcctgaagcagaacaggccattcgaaatggcaaaattgatgcgattttgcatttgccttccgattttgcaaatcaggcccaacaaggtaacgcaaaggttcaattgctattaaatggtagatcgaccaccatagcaactgctttagaggggtatgtcgcgggtgctttggctaccgcgccatcaatacaaattgatcgtagccccatattagcatctgcaagcgccgttaaaattgaacaaagaatatggtttaacgaatctggtaatagtacttggtttttagtgccgggtttaatggtactcattttaactttaattggcgcatttttaatgggtctgcttattgcgcgtgaaagggaaaggggaacattagaagccttatttgtcacgccagtacgaccatttgaaattgtgttggcaaaactcattccgtacgttgttgtcggcatgattgatatcgttatttgtattgttgctgcacattttatttttgaagtacctatgcgcggttcattattctcaattttatttgcttcatttctatatttaatcgtttcattattacttggtttaactatatctggctttgcccaaagtcagtttcaggcgagtcaaattgctttgttggcaagttttatgccagcactgatgctttccggatttgtttttgatacacgcaatttgcctttggttgtgcaaattattagccagttacttccagcgacgcattttatggttttaattaaaactttatttatgggaggtgatgattggaagctatggttaaaagagtgcggtattttattgggatatatcgttgttttgatatgtgctgtgaacttttcactgaaaaaacggttgagataa

SEQ ID NO: 42112 - DNA, 1119 bp, Acinetobacter baumannii
atgtggcagcaattaatcacgtggctgaaacaattaagttttttagtcaaaaaagaattcttaaccatttttagtgatcctgcaaatagggctattctatttgtacccgccctgatgcaagcacttttatttggctatgcggctacttatgacgttaacaatgtagattatgcaattttagatcagagcaacgggcaggtttcacatgagctgatctcgaagctcgatggctcgggtatttttaagcgtgttgcaacactggaatatactgaacaaatcaaacaagttattgataatcgtcaggcattgctcgtaattacgatccccaatgatttcgagagtaaattaaacaataaccaaagctctcctatacagatcattgttgatggtagaaattcatctacagctatggtcgcagggtcatatctaagtaaaattattggtcaattcaatcagcaaaagtttaattcagctttaccgattagccttgaaacaagaacatggtacaacccaaatcaggagtctcgttggagcttaatgcctgcattaattgcagcattaagtatgatgcagacattacttttatctgctttatcagttgcgcgtgaacgtgagcagggtacgtttgatcaattattagtgacaccctatacgccattacaaattatgattggtaaggctttgccgccgatttttgtaggtttgatgcaatcgaccattattttattgattattttgttctggtttaaaattccaatgaatggctctattggactgctttattttggattattcagctttaacgtggctgtagttggtgtgggcttatcaatttcagctttatctttaaatatgcaacaagctatgctttttacatttttattgattatgcctttgatgttactttcaggcttactgacacctgtagaaaacatgccaaaagcattacaagtagcaacttatgcaaatccattaagatttggaattaacttagtacagcgggtttatttggaaggtgcaagctttgcacaagtcaaattgaactttttaccaatgattgtgctggggatagtaactttacctttagcagcttggttattcagaaatagattatcttag

SEQ ID NO: 42113 - DNA, 870 bp, Acinetobacter baumannii
atggaactacaaggcatttgccataaaatgcatgcaggcctaaaagatgctagtgtaactgatcaacagacaaccaaggcaaatgttgaatacaaatttgtattagaccgttcagaaattgatcttccttttaatttaggacaagaactagaaatcgaatggacaggtaatatttattgcacctcttgtggtgctaaaacaccaaagtcttattcgcaaggccactgctttaaatgttttaaaacgaaagcggaatgtgacctttgcattatgaaacctgaaacatgccactaccatttgggtacatgtcgtgaagatgattttgcccacagcgtatgtttccagcctcatattgtctacttagcaaattcaagtgctttaaaagtaggtattactcgcgttagccatatgcctggtcgttggttagatcaaggggcaactcaagccttacctattttaaaagttggttcacgtcgtttatccggtcagcttgaaaccatgtttggttccttaattgcggataagacagattggcgtaaacttctcaaaggcgaagctgagcctctaaatctgattgaacaacgtgatcagttaattgaagagttcgcacctaaaattcaaactattcgtgaagaatttagtcaaaatcttgaatttaacgaaacggttgaattactagaaaatgaattgccacgtgagtttgtttatccagttgaacaatatcctgaaaaaattaagtctttaaacttagataagacaccaaaaattcgtggagtattgcaaggtattaagggccaatatttaatttttgatattggtgttattaatatccgtaaatatacaggttacgagctgattgtacgtgcataa

SEQ ID NO: 42114 - DNA, 462 bp, Acinetobacter baumannii
atggctgaacaaaatgtcatcacttctatgctagacgatttatcaaacgaacagcctattcatactgcactttgtattggccagaaaattgaccagaataacgcaattcaatggcactattttaccgtaactgagctgttaagtctgccttttactcagcgttatgatttgggttttgtattgtttgatactgatgaaatgcaggacatcagcgatgtgcaaaaatcacaattattagtaaagctaagagatttattagcaaaacgaattgttgtcgtgagcaaacgcagtgatgaacaacttctgcgttctttaggttttacccaacttattgataagacttcacatgatagtgattttgctttatggcaatttaatattttgacctataagcatgtaccagactggtttaattcaaaattttgggcaaatccagaaaattggaataaattccgttggtaa

SEQ ID NO: 42115 - DNA, 591 bp, Acinetobacter baumannii
atgacaaatttaagcaacattgtagaagttttggctaagcaagctttaggtgggaatcagcaagcgtcaggtcaaagtggtttaggtggaattttaggttctgtattaggacaaatgggtggtaatacttcatctggtgcccaaggtggtcttggtggagtattgggttctgtattaggacaagtcactggtaataacaacacacctcaagctggtggcggtgtacaaagtttattaattgcagtggtacctttaatcttaggttgggttcagcaacaaggtggtttacaagctgctcttgagaaattaaaaggcgctggcttaggtagccaagttcaaagttgggttgatccaaaccaaagtaatagtgaagttccaacccagcaattacaaagtctgtttaatccagcagacattgaacaagttgctcagcaagctcaagcaccaaaagagcaagtttatggtgcaatcgcttctgtcttacctcaggtcattgattctttaacacctcaaggtgagagtacagatcatcaagaagctaaccaagatattcaaaatgtgatgaatcttgtaagtggtttcttaaaataa

SEQ ID NO: 42116 - DNA, 1107 bp, Acinetobacter baumannii
atgaagaaattgcttctcgctgccgcagttgcaactttgagcgtaaacgcggtgcaagcagcgccaactttgtacggcaaactaaacgtttccatgaaccaagttgacaacaaaaatttcgatggtaaaagtgacgttaccgaagttaactcaaactcttctcgtattggggtaaaaggcgaagagaagttgactgataagctatctgctgtttatttagctgaatgggcaatttctactgacggttctggttcagatactgaccttagtgcccgtaaccgttttattggtttaaaaactgaaggcgtcggtacgttaaaagtaggtaaatatgactcttacttcaaaacctctgctggtagcaaccaagacatctttaacgatgacacacgtttagatattacaaatattatgtacggtgaaaaccgtttagataacgtagttggttttgaattagaccctaaattattagctggtttgacattcaatatcatggctcaaactggtgaaagcacttctgatagtaaaaaaggcgaaactggtaaagacagcaaaaatgatagcttcgattcagtttcgacttctctaggttatgaaaataaagacttaggtttagcaatcgctgctgctggtgacttcggtatcaaaggtaaatatgctgcttacggtttgaaagatgtttatacagacgcttaccgtgtaactggttcttatgacattgctaaatctggttttgtagtaggtgctttatggcaacatgctgaacctactgatgacttgactgcatatggtcaaacatataaatcagatggttcaatcgataaagctggtaaagcttaccgtggtttagaagaagaagcatacgcggtaactgctgcttataaaattcctaacactaaacttaaagtaaaagcagaatatgcttctgctgaaacacaagtaagtggtcaggcagatcgtaaaattgacttgtatggtttaggtcttgattatcaaatcaataaacaagctcgcttctacggtatcgttgctcaacaaaaacgtgactggttgaacgacgacgacaaacaaactgttgtaggtactggtattgaatataacttctaa

SEQ ID NO: 42117 - DNA, 414 bp, Acinetobacter baumannii
atggcatatgatgatcaaaatatcttcgcaaaaattttacgtggtgaacttccagcgataaaactctatgaagatgatcaagttctagcttttatggatattatgccccaagccgatggtcatgcattagttattccaaaaactcctgcagtaactttacttgatttacctcctgaagcggcagcttataccatccagatcgtgcaaaaaattgctaaggcaatggaaactgcattaaatttggatggaattgtgctcatgcagttatcaggagcagctgccggacaaactgtccctcatgttcattttcatctaattccgacaaatgttcaccaacttggcaaacatgcggcgcaattaggagaccaagataaaatcaaagctttggctgagaaaattaaagcagcactttga

SEQ ID NO: 42118 - DNA, 270 bp, Acinetobacter baumannii
atgaataaattaatggttgcggtattcgctggaatggtgacccttgccggtttcagtgctcaagctgcaacacctgagcaagaatgtcaaaaattgcaagatgattacaatttgatttatgcgtcaaaaggcttttgttttaaagaccaagatgctaaagaaaaatatggtaatgaaaactgtcatacgactaagccaaaattctctgataaagagcagcaacgtctagacgcaattaaagaacgtcaaaaagaattgaaatgtaaatag

SEQ ID NO: 42119 - DNA, 201 bp, Acinetobacter baumannii
atgatagatgaagaaaagcctttaaattttgaagatgatgacgagcctcttgattttgaagatgaagaattcatagacgataaaaaagaagacgagatgtataactcgattactaaggatggctctagtgtcgatcctgctgatgatgggacacgacatattcgtcctgaagacggcgatccgattgaaattgatgagtaa

SEQ ID NO: 42120 - DNA, 552 bp, Acinetobacter baumannii
atggctaaatattctcaagaatttaaacttgaggttgtccaatattacttatctggttttggcagacaccaagtaagtcataaatttggaatacatcatagcgatgttgctaaatgggtagccaattataataatcatggtgctgagggtctgagcaggaaaaacacaaatactgtatatactcctgaatttaaatttaaagttattcagtctgttcttgaacaaggtttatctgtacgtgaagctacaaatcaatttaatctgaaatcacacacacagttattaagttggttgctccaatacaaagaacacggtatagatggcttaaaagctaagccgaaaggacgacctaaatccgtgccaaagcctaagataaaaaaagtcaaaaatgctctgaatgatagagacaaaacccaagaacagctactagaagaacttgcatatctacgagctgagaacgcttatttaaaaaagcggagagccttgattcagaagcagaaagaacaggaacaagccgaacagcaacggttacaagattcatttctgaattaa

SEQ ID NO: 42121 - DNA, 1605 bp, Acinetobacter baumannii
atgactacatatcaaacagcgattgatgcagtacgtgaattaaaagcaaaattcggcaacacttgggcagacattagcccagaagatgctgctcgtatgcaacttcaaaaccgtttcaaaacaggtttagatattgctaagtatacagctgcgattatgcgtcgtgatatggctgaatacgatgctgattcaagcaaatatactcaatcattaggttgctggcatggtttcatcgctcaacaaaaaatgattgctaacaaaaagtatttcggtacgacaagcaaacgttatatctacctttctggttggatggttgctgctcttcgttcagaatttggtccacttcctgaccaatctatgcacgagaaaacttcagtacctgctttgatcgaagaaatctacactttcttacgtcaagctgatgcaaaagaattaaatgacttgttccgtgctttaaataaagcaaaagaagctggtgattctgcgaaagtagctgaaatcacagctcaaatcgacaacttcgaaactcatgttgtgccaattattgcagacatcgatgctggtttcggtaacgaagaagcaacttacttacttgctaagaaaatgattgaagctggtgcttgtgcgcttcaaatcgaaaaccaagtatctgatgcaaaacaatgtggtcaccaagctggtaaagtaactgttccacatgaagacttcatcgctaagatccatgcacttcgttatgcattcttagaaatgggtgttgaagacggtgttatcgttgctcgtactgactctgaaggcgctgacttaactcagaagatccctgtagttaaagagccaggcgatatcgcatctaaatatattagctacttagatactcaagaaattgatatctcagaagctcaagaagatgagatcttaattaaacgtgatggtaaattacatcgtccaactcgtttagcttctggtctataccaattccgtgaaggcactcagattgaccgtgttgtacttgactgtatcactagccttcaaaacggtgctgacttactttggatcgaaactccgactccaaacgtacaagaaattgcacacatggttaaccgtgtaaaagaagtagttccgaatgcgaagcttgtttataacaacagcccatcattcaactggactttaaacttccgtcaacaagcgtacgatcgttgggttgcagaaggtaaagatgtatctgcttacgaccgtgctaaattaatgagcgctgagtacgacaatactgaattagctgctgaagctgatgaaaaaatccgtactttccaagcagatgctgcgcgtgaagctggtgtgttccatcacttgatcacacttcctacataccacactgctgctctttctactcatgaattagcacaaggttacttcggtgaccaaggtatgttagcttatgttgctggcgtacaacgtaaagaaatccgtggcggtatcgcatgtgtgaaacaccaagcaatggctggttctgacatcggtgatgaccacaaagaaatcttcgctggtgaaaatgcacttaaagctggtgacgatgctaaaaacacaatgaaccaattctcagctcactaa

SEQ ID NO: 42122 - DNA, 990 bp, Acinetobacter baumannii
atgaatctggagcgggtagatcttaatctattaatatatcttgatgttcttcttcgtgaaaaaaacgttactcgcgcagccgaacagcttggtgttactcagcctgccatgagtaatattttacgccgcttgcgtaatttatttaatgaccctctcctgatccgctcatctgaagggatgacaccgacagaacgtgcacttgaattacaaccgcgtattcgtgatgctctttctgacctttcaatgattttggaaccgcgtaccgaattccgcccttataccagtaatcgcgttttccgtattatgacttctgactatgcagaagcaaccctagtccctcgtcttgttaaagccctccgctcagaagcaccaaacgttgtactcgattttcttactccaagtgatgtgtcatatagagacatggaacagggtaaagttgatctcgctattaaccgcttcaatgaaatcccgcaaagcttccaccaagttttggtttggcgcgatagctttagctgtattttaaatgacaaacaccctgctgtgactcatttaaatctaaaaagctatttagatgctcaacatatttgggtatctaaaactggtatgggtgttggctttggggtaaacccagataaacaaggtggcttgggctggattgatcaagcattagaacgtattggtcaacgccgcaaaatttctgtatttacgcgtcactatcagatgccggcattacttgctcaaaatgttgacttgattgccactcttccaactcgaatggcacgtttacaagcacaaaatccaaaattagttattaaagatccaccgttttacattcctgagtttgaacttaaaatggcttggtgtccattattgcaccatcacccagctcatcgctggttacgccaactcattctatttgttgctcgccaaatgatcgaagaggaaaatcgtgaattcctaaccaataattcacaattttcccactattaa

SEQ ID NO: 42123 - DNA, 1326 bp, Acinetobacter baumannii
gtgagtctctttcaaaatatcattatcatcgtactgctcatcatcgcagcaggctttttatctttaactgaaattgctctagctggtgccagaaaagtaaagttaaagattttagccgaagctggcgaagaacgtgctcaaaaagtacttgatttacaagaacaatctgcagacttttttgcagcgtcccaaattggcttaaatgctgttgcaatcttaggcggtatattgggtgaagctgcgtttcgtcctttttttgtaaacttagttgaccgtttctatgaaggaccttggacgcaaaccatcggatttgccctatctttcacattggtaacttctttgtttattttattcgccgatttaatgccaaaacgcttggcaatgatcgcacctgaaaaaattgcaattagtgtaattaaccctattcagatttttatcaaaatctgtaagcctttagcatggggaattaatgcaattgccaatttgctattccgcttgtttaaagtaaataccacacgcgaagacaatattacttttgatgatatttcagcagtgatggatgcaggtgctcaagcaggtgtactacaaaaacaagaacatcactttattgaaaacgtatttgagcttgaagaacgtaccgttccatcaagtatgacaacgcgtgaaaatgttgtttactttacgcttaacgaacatgaagatagcattcgccaaaaactggcagaatatccttattccaaatttctggtttgtaacgaaaatattgatcaagtgattggctatgtagatgctaaggatattcttgtacgtattttaaacaaccaatctttaacccagctcaatgaatcgactattcgtacggttctaatgatacctgatactttaacactatcagaattactcgatcgcttccgctcaacaaaagaaaagtttgctgttgtaattaatgagtatgcgcttgtcgttggggtaattacgctaagcgatatcatgattactgttatgggggattgggttacccctatggaagaagaacagcaaattattaaacgtgataataattcttggctgattgatggtagtacacctattgaagatcttaagcacgcgcttgaaatggatgaactacctgatgaagagaattatgaaacattagctggtttcatgatgtaccgtttacgcaaaatcccacgtccagccgactttgttgaatttggtggttataaatttgaagttgttgacgtagaccattttaaaattgatcagttattagtaacacgtgtactagaaaaaaatgatttaccatctccgcctgatgaaaattga

SEQ ID NO: 42124 - DNA, 1338 bp, Acinetobacter baumannii
atgctgacattacttggtgttggcatgattttatgcttcatgtatttaatcatgtccaaacgtttaagccctattattgctttaattctcatcccatttattttttctcttattgcctggggccttggtcactactttgaaagcttgagccatatcgagcttaaaggtctcagtgaaatgatgctagatggcatcaaaaaacttgcgcctactggcgtaatgctattatttgcaattttatattttgccttaatgatcgatgcaggtcttttcgatcctccggttaaatggattttgaaaaaagttaaaggtgatcccctaaaaattacattagggactgtttttttaactacattagtctctcttgatggcgatggctcaaccacttacatgatttgcgtggcagccatgctccctctttatcaacgcctcggtatgaatacactgatcatgacagcacttatgttgttatgtagtggtgtaatgaacctgaccccatggggtggccctactgcgcgtgcagcaagtgcactccaagttgacccaagtcatatctttgtaccaatgattcttccaatggtggttagtattggctggttattcttcttggcatatttatatggtcgctatgagcaaaaacgtttaggcgtgattgagcttgaaagtcaccatggtgacaacattacagtttcaaaagacccagaagcaactcgtccacatttacgtaaagtaaatatggtactcaccattcttcttatgattgcattgatcaaaggtattttaccaatgtcagtgttattcatgctagcgttctgtattgcaatgctcatcaactaccctgatgttgatatgcagaaaaagcgtatcgctatgcacgcagacagtatcttggctgttgtaggtttaatttttgctgcaggtatttttacaggtattttatctggtacaggcatggttgaagccatgtctaaagaatttgttgcaatgatccctacaagtatggggccatatctagcgccaattactgctctggtgagtatgccattgacgttctttatgtcaaatgatgcattcttttatggtgtattgccaattcttgctgaagcagcctcacattatggtattagcccagaagcgattgctcgtgcatcaattgtaggtcagccagtgcatttgttatcacctctcgttccatcaacctacttgttatgtggtcttgctaaagtcgactttgcagaccatcaaaagttcacttttaagtgggcatttatcacttgtatggtattgatgggtacagctttagtgattggtgttttcccactttttagtacgatgtaa

SEQ ID NO: 42125 - DNA, 513 bp, Acinetobacter baumannii
atgtttgagcaatctcctgaatctttaagcgatatcgaaattttagacattttacagtcgatgaaaaaagataagctagatacggaagcaaatgagatcatccgtaacgggggaaaagcaggacgtcaggaagcgcataagctggctttggtggcactaaatacaaattttgaagagaagtttgtagaggcagttactcttgcactaggtttaaatacagctcaagctaaaaaaattcgctataaaaaagatcgaattcgtattttaaaagcgcgtggtattgattatcttgctattgatggtgcagagacagcgcaagttttggcacaaatttcacaagcaattgtccgagaagatgcaatagttactcatgacttgcataatattttcccattttggaaagaaggctttccaatggtgcaatttgataatgcctataaaattttacaagaagatattagcttgcactttcatgcgttcttagatgccatgattgagtatgtaaataaataa

SEQ ID NO: 42126 - DNA, 549 bp, Acinetobacter baumannii
atgaatactaaaatcacctatactgctttcactggaagcacgcttattgcgagtgactcccttgttgaacttgcaaagaaactaaaagctcttcctaaaacaacagaaaatattctgatttttaatgatcaaacaggtcaacaaattgatcttgatctttctggttcagaacaagaacttcaacaacgttatgctgaaccggaagaaattaaaaaagttggacgacctaaacttggagtaatttcacgtgaaatcactttacagaaaaaacattgggattggttagatcagcaaagcgcgagtgcatcagcagtgattcgcaagttaattgataaagagttaaataacccaaattctgaaggcaatattatgctagccaaacaagctatcgaccgctttatgtctgctatgttaggcaatatgccaaattacgaggaagcaacacgcgccttatatcaaggtgatcgagatatatttttaaagatgattcagagctatcccaaagatgtaagggaatatttaactttaaaaactcaaaatattttctaa

SEQ ID NO: 42127 - DNA, 1614 bp, Acinetobacter baumannii
atgtctcatcaatcagacttaatcagccaagacattctggcgtatttaaaacaacatgaacaaaaagaccttttgcgctttttgacttgtggtaacgtagatgatggtaaaagtaccttaattggtcgtttactttatgattcaaaattgatttatgaagatcaattgcaagctgtaacacgtgacagtaagaaagtgggcacaacaggtgatgcaccagacttggcattacttgtagatggtttgcaggctgagcgtgagcagggtattaccattgatgttgcttatcgctatttttcgactgaaaaacgtaagtttattattgctgatacaccgggccatgaacaatacactcgtaacatggcaacaggtgcatcgactgctgatcttgcaatcatcctaatcgatgcgcgctatggtgtacaaactcaaactcgtcgtcatacgtttattgcgagtttgcttggaattaaaaatattgttgttgccattaataaaatggacttggttgaatattcatctgaacgttttaatgaaattcaggttgaatatgatgcgttcgtgagccaattgggtgatcgccgtccagccaatattttatttgttccaatttctgctttaaatggcgataacgttgtaaatccatcagctcatactccttggtacaaggggcaaaccttaatgagtattcttgagtctgtggaaatcaaccgcgagtcaagtaaacatgaattccgtttccctgttcaatatgtaaaccgtccaaatctcgacttccgtggctttgcgggtacagttgcattaggtgaaattaaagttggtgacgagattgtggcgttgccttctggtaagcgttctacagttaaggaaattgttacttttgacggtaaccttgagcaggcagttgcgggtcaagcagtcaccttaacgttaaatgatgaaattgatattagtcgcggtaatgtcttagtacgtgcaggcgagcaaccattaatttcaagaagtgttcgtgcttcagtggtatggatgaatgaacacccacttgtaaaaggtaagttgtacaatattaagattggtacacaaactgttccagcaaaagtaactaatattaactatcgtgtaaatgtgaatacgctcgaacacactcaagtagaagagcttgagttaaatgcgattgcagatgttgtggttgagtttgatgctccagtcgtgtttgaccgttatcaagattcacgttacacaggttcatttatttttattgaccgtttaagtaacgtaactgttggcgcgggcatggtagaagccgcggtagagtggacggctcatagtaatcctgttactgctgaagatcgtgctgctcgtttaggtcaaaaacctgctgttattggtgtttctgcacagttaattgaaaaagctcaagctttagaaagtttgctgattcagcaaggtgtagttgcgatcgcgaaaacaagcttaacagctgagcaattggttctattacgtgagacgggtgttgtcattatcacaacttctgtggatggtatagatacagaggtaactgctgaaacgattgaagaagcagtagagaaaattgtggaattagttcgtctttaa

SEQ ID NO: 42128 - DNA, 909 bp, Acinetobacter baumannii
atgactgaatcaagacttacacatctcaagcaacttgaagctgagagtattcatattatccgtgaagtagccgcagaatttgaaaatccagtcatgctttactcaattggtaaagactcggctgtgatgcttcatcttgcattgaaggcattttatcctgcaaaacttcctttccctttattacatgtagatacaggctggaagtttaaagacatgatcgcgtttcgcgataacatggcaaaaacacatggttttgatttaattgttcatcagaataaagaaggccgtgaagcaggaatcaacccatttgatcatggcagttcgaaatatacggatattatgaaaacccaagctttaaaacaggctttggataaatatcagttcgatgctgcttttggtggggcgcgccgtgacgaagaaaaatcacgtgcgaaagagcgtgtgtattcattccgtgatagtaaacatcgttgggatcctaaaaaccaacgtcctgaactttggaatctttacaacggtaaagtgaacaaaggcgaaagtattcgtgtattcccgttatcaaactggacagagttggatatctggcaatatatctatttagaaaatattcaaattgttcctctttatttctctgctgttcgtcctgtggttgagcgtagtggtacgctaatcatggttgatgatgaacgtatgcgcttaaaagagggtgaagttccacaaatgaagtctgtacgtttccgtacgcttggctgttatccattaacaggtgcagttgagtctgaagctgatacattgccagaaattattcaggaaatgctgttggcaacaagttctgagcgtcaaggtcgtatgattgaccatgatgaagcaggctcaatggaaaagaaaaagcaagaaggctatttctaa

SEQ ID NO: 42129 - DNA, 1443 bp, Acinetobacter baumannii
atgtttttaagaaaaacactttcgattgcattattagcaactgcttcatcggctgtttttgcacaaggtttagtgcttaataatgatgatttgcgtaccgacttaaactggttgaatcaacaaggtgttattaacatcagcacttctacttggccattaagtggtgatgaaattcaaagagcgctctctcaagctaaagtgactcatccagcacagcaaaaagttattaattcagtacttaatgcattaaaagcggataacaatacagttaaagtgggtgcttttgctgaatctgatattaaaaatattcctcaagcattcggtgataaccaaaaatcacagtaccaaggttcattagagtttaatgctggtggtgaaaattgggatgcaaaaatccgtgtaaacgcagaaaaagaccctcaaattgatagtggacatgacgttaatgtcgaaggttcatatgtcgctggtaaactctggaaccaatggatcgttgcaggtcaaattccaacatggtggggacctggacatgatggtagcttaatccgtggcgatgcaagtcgtcctgtgtatggcgtgacggcacaaagagctgtacaaaatgcttttgagacaaaatggttatcttggattggaccttggcaatatcaagcatttgctggtcaattagatgattataaagcggtcccggatgctaaattaatcggattacgtttaactgcacaaccattaccctatttagaactaggtgcttcacgtacaattcagtggggaggagatggacgttcggaaagttttagctctttatgggatgctattaagggcaacgataatgtctatggcgatactgaaaatccatcaaaccaattggctggatttgatgggcgtttattattgcaacctcttttaaatatcccagtaagtctttatggtcaatatgtgggtgaggatgaggccggttatttgccttctaaaaagatgtatttagctggggttgattattcgtcaagctacaatgatatgccatatcaactttatgcagaatgggcggacacgcgtactaatggggatgtaaagagtatctcttatacgcattcggtttataaagatggttattaccaacatggcttcccattaggacatgcgatgggtggcgatggacaaatgtattctgtgggtggtgatatccgctttgacgtgatgaaccgtttaagcggtcgtgctatggtggttaaagttaaccaatctaacttggcaattaataaagcattccctaaagatgatgaaattaaagcgcttgatctaacttggacacattacatcaaacctgatcttccattaaaaattaatggttgggtaagtgattctgacttagaaggtaatgatgcgggtgcatcaattggagtggaaattcctctagagcgtaaaatgtttggtttctaa

SEQ ID NO: 42130 - DNA, 1530 bp, Acinetobacter baumannii
atgacgcaacaaaacgctcaatcgacttctgaaccaactatttccgaaaacgatttaattgcacagcgtcatgccaaattaaagcaaatccaagatgttgcaaaggaaactggaaagagtccttggccaaatacattcaaacgtgaacattacgctgctgatttacaagaacaatttaaagatcagtctaaagaacaaatcgaaagcgctgaacatgtttatgtaaaagttgctggccgtgtcatgttaaaccgtggttctttcatggtgattcaagacatgactggtcgtatccaattatatgttgaccgtaaaggtttaccaaaagatacgcttgaaactattaaaggtttagaccttggcgatattattgctgctgaaggttatatcggtcgttctggcaaaggtgacttatatgtacaccttgaaggttttgaacttcttacaaaatcgcttcgtccattgccggataaatttcatggtttgaacgacacagaagttaaatatcgtaagcgttatcttgacttaattgtgaatgaagaaacgcgtaagacttttgaaattcgtgccaaagtcgttgcaggtattcgcgcatttttaaccaatgaacgtttcatggaagttgaaacgccaatgatgcatgtgattccgggtggtgcgtctgcacgtccgtttgagacgcatcataatgctttagatatgccattattcttacgtatcgcaccagagctttatttaaaacgtttagttgttggtggttttgagcgtgtgtttgaaattaaccgtaacttccgtaatgaaggggtatcaacacgtcataaccctgaatttaccatgatcgagttttatcaggcatatgctgattataaagacttgatggctttgactgaaaacatgcttgaaaagctagcaattgatattttaggtacgactgatgtgccttaccaaggcgaagtgtttagctttaaagggccattcaagaaaatctctatgtttgatgcgattttggagaataatccgcagttcacgcctgaaaatgtaggcgatcgtgaattccttgcaaaatttgttcgtgaggaattaaaagaagaagttaaacctggttttggtttaggtaagcttcaaacaatcgtatttgaagaaacggttgagactaaacttcgtcagcctacttttattactgagtacccagcagagacttctccacttgctcgccgtaatgatgataatccgcacattactgatcgttttgagttctttattggtggccgtgaattggcaaacggctttagtgagttaaatgatccgattgatcaggctgaacgtttccaagcgcaagttgctgaaaaagatgctggtgatgatgaagcaatgcattacgatgcagagtttgttgaagcacttgaatatggtttacctccaacagcgggtgaaggtattggtattgaccgtttggttatgctttttgcagatgcaccaagtattcgtgatgtgattttgttcccgcatatgcgtcgtaaagaaggttaa

SEQ ID NO: 42131 - DNA, 489 bp, Acinetobacter baumannii
atgaaaattctatttttacatggcttggattcttctcgtgaatcaacaaaatttcatgccattttacatcctgaaaaattttgtattgatgttgattatcgcaacctaagttatgcttcagttaaagacttttatcatcaagcgattaaaacaattaaacctgatttgttagtcggtcatagcctcggcggttattgggctttgaaaactgctgctcaacataaattagctgttattgttgccaacccaagccttacacctaattttcgtaatgattaccctcacctgtgtgacgaagatcttgaccactctaaccctaaaatggcctatttagagttaggagacgagcaacttgatatgtatcaagtacaggaaaaactgtcaccatatatgacaatagaaacttatgacggaggccatcatcgtcttgcttatccttctcgtcttaatgatctcattactaaaattcataaaaaatattttgcttga

SEQ ID NO: 42132 - DNA, 438 bp, Acinetobacter baumannii
atggaaactctaatatatgaagtagaaattaatgcccctatagaaaaagtatgggacgtactctggaatagtgagacctataatgcatggacgaaattctttgctccagattcttcaatgcgcacagattggaaagtgggcggtaaaacatattttctagatggagaaggaaatggaatggtttcgaccattgaagaaatgaaaaagcctgaagtactaatttttaaacatttaggaatgattaaagacgggaaagaagacttggaaagtgaagaggtgaaaggctggagtggttcgctagaaaaatattttttaagtcaaaatggggatactacaacggtaaaagtagaattagccaccttacctgagtacatcggtatgttaaaaagtggcttcgttcaaggctttgaagctgtaaaacaaatggctgaaaaataa

SEQ ID NO: 42133 - DNA, 165 bp, Acinetobacter baumannii
atgaaaaaatatcaatgtatcgtttgtggatggatttacgatgaagcagaaggttggccacaagacggcattgcagctggaacaaaatgggaagatatccctgatgactggacttgccctgattgtggcgtttcaaaagctgacttcgaaatgatcgaaatctaa

SEQ ID NO: 42134 - DNA, 1182 bp, Acinetobacter baumannii
atgcatccaatcgtcattatcggatcaggcatggcgggttataccttagcacgtgaattccgtaagcttaacccagagcaagaacttgtgatgatttgtgcggatgatgcggtgaactatgcaaaaccaaccttatccaacgcttttgcaggaaaaaaagccccagaacagattccattaggtgatgctgcaaaaatgagtgcccaactcaatatgcgtattgaaccttttacttgggtgaaagaaattttagctgagcgtcatgaacttgttctagaaaaagacggcgttatttctcagcaaccttattcaaaattaattttagctgtcggtgctaacccgattcgccttgctattgctggtgatggtagtgatgacatccatgtggtgaactcactcattgactatcgttctttccgagaaaatctagctcagcgcaaagataaacgtgttgtgattttgggtgcaggtttaattggttgtgaatttgccaatgacttacttcatagcgaatatgatgtaacagtaattgatttagcgcctcaaccattaggccgtttattaccttcacacattgcttcagcattccagcagaatcttgaagaagcgggtgttaaatttgccttaggcacaaccgttgaaaaagtaagtaaaatcaataatggtgaagattacgcagtcacattggcaaatggtcagactttggtcgctgatattgtgctttcagcgattggcttacaaccgaatatttctcttgctcaaagtgcaaatattcaaaccagccgtggtgtgattaccaatagtttacttgaaaccaatcaagcagatatttatgcgattggtgactgtgcggaagttaacggtaccctgcttccatatgtaatgccaattatgcaacaagcccgcgctctagcaaaaacattaagtggtcaacaaacaaatgtacattaccctgctatgccggttgcggtaaaaactccggctgcaccgcttacagttttaccggcaccggttgatgtggatgtaaattgggaaactgaagaattcgacgatggtatgcttgccaaagcaattgacaatgaaggaacattgcgtggtttcgtattgttaggtgcaacagcaggcaagcaacgtttaactttaactaagcttgttccagatcttattcctgcccaagcataa

SEQ ID NO: 42135 - DNA, 945 bp, Acinetobacter baumannii
atgaatagcgccttacaatttagtatttcaccgtacactccatttatgcaggaaaccaaagtcaatttaggcaatggtatcgagctacatgtagaagtaggtggaaaaccagaacatccgactattttgctgattatgggtttaggtgcccaaatgctattttggccggactttttctgcaaatcactcattgatcaaggttttcgtgttattcgttttgataaccgtgatattggcctttcttcaaaagtccgccatcaaggtaaacgtttaaataccatgaaattgatgggacgttttgctttagggctaagaaatcagggtgcaccttatacgctctatgatatggcagatgacgtttctatgcttctcgaccgtttaggagtaagcagagcacatgtgattggtgcctcaatgggtggcatgattgcccagattctcgctgcaaaatatccggaaaaagtagaaaaattaggtttgatgtttaccagtaataatcaaccgtttttaccgccgccgttccctaagcaacttttaagcttgattggcaagccagaatcacgtgatgaagaaggaattgtgaatcacagtttaaaattattccaattgattggttctcctggttatattaaccatattgaagccgttcaaactgcaagaaaactttatcaacgtagctactatcctgctggtgtacttcaacagtttttagcaatattatgtacaggttccttactgcaactggaccgtgaaattaagcaacccactttagtcttgcatggctctcgtgaccgcttacttccaccgagtcacggtaaggccgtagcaaaagcaatttccggtgctaagtttgaattaattgatggaatggggcatgatatccctgcccattttattccacagcttagcggtttatttgcgcatcattttaaatcatcatactag

SEQ ID NO: 42136 - DNA, 909 bp, Acinetobacter baumannii
atggctgcattaccctcactaagacagctatcatatttagttacgttgtcggaaactttgcattttactgaagcagcacgtcgctcttttgttacccaatcgactttatcgggcggcattatggagctggaaaggctactaggtggcgttctggttgagcgtgaccgtcagaatgtgcgtttaacgccattaggtgagcaagttgttgctcgagcccgtgtattgctagcagatgctcaggatttaatgcgtttaagccgtgaaatgagtgaaccattaactggtgatcttcatttgggtgttattccaaccattgcaccttttatcctgacacggttacttgatgaagtgcatcaacaattaccgaagattcagttgcatttacatgaagctcaaagtgagaagattgtagagcgcctagaacatggtaatttggacatgattgtccttgccctaccttttgacacaagaagtttaaaagtagctgaaatttcaaaagaaaatttatatcttgtttgtagtaagcaagatacaaatgcacttcaagcaaattcacttgatgatctcgatttatcacgtctcattttgcttgaagaaggccactgcttacgtgatcatgtattaagtgcctgtccaattggtgagcgtaaaaacgataaccgcttgaaagcaagttctctaccaacattggttgagatggtttcttccgatttaggctttactcttttaccagaaattgcaattgaaaatagtatgatcaaatttaatgatcagattactgcaaaaccaattgaagacgcacctagccgtactttagcacttgttacccgtaaaagtacgcctttgcaaagtgagtttgatgttcttctacaaatcatgcagaaaattaccacaaacttacatgaataa

SEQ ID NO: 42137 - DNA, 591 bp, Acinetobacter baumannii
atgcaaggctttattaaaagtttatttattagaatatttttggggttaatgccagtgactgcttatgcggatcagaagtgctatggagatattattgtatttcagaaatttgatgatcaaatgatatatccttattttatacatccttctagagagaaaaataagaagaatgaaacacaaaataagacaatcgtgattcagaaaagaaaacttactcaagaggaattgttagcacaaaagaaaattgacgataatcagttaaaaaaaattgaagaaaagaaaaatattgagaagaaaaagcaacttgatgcagcggtcgcgaaagaaattttagaaaacggtgaaaaaaaatggatggtgcaagttgctttggcacctaatcaaaataaagcgaatatgattcagtcccaattacaggctaaaggctataaagttgttaccagcccaactaccaaaggaatacgggtcatggtcgaccctgccaatgactatgcaattgcacaaattattcgagaaaaaataattgcagatgatagcttggatttgagatcggcttgggtatttaaatgggcttccctaacagcacagtaa

SEQ ID NO: 42138 - DNA, 2079 bp, Acinetobacter baumannii
atgaatacagcgattacagcaacgaccccaacagaatatagttataatgaccgttatattaatcgtgaattgtctattcttgactttcatttgcgcgtattggaacaggccgtcgaccctttacatccattactggaacgaatgaatttcttactcattttttcgcgtaatttagatgagttttttgaaattcgtgtggcaggtgttatggagcaattcgctctaggcaatgaaagtcgaagcccggacggtttaacgccaagacaagtcttacaaaaaatctctgaaactgctcatgctgcaattgagcgccaatatcgtattttaaacgaagaaattttacctaagttacgtgaagaagatatctgctttttacgtcgtggtgaattaacaccagctcaatcagcttgggtaaaaaaatatttccaggaacaggttgcgcctgttttaactccaatcagtttagatccagcccatccattcccgcgtttagtcaataaaagccttaactttattgtgactttagaaggtaaagatgcgttcgggcgacaaattgatttggccgttgtacccgccccacgttcattgccacgtgttgtacgattaccagatgagttaacgggtggtaaagaacatcatgtcatgttgtctgcaattattcatgaacatgtttcagacttgttcccaggcatgactgcaactggttgctatcaattccgtgtaactcgtaatgccgatttggcacttaacgaagacgttgaagatttggcaaaagcgttaaaaggtgagttaagttcacgccgatttggtcgtgcagtacgcttagaagtaacccaaaattgtccacagcatatttatgaatatctacttgaagagttcgacttaaacgaagaacaattatataaagttgatggccctgtaaacttggctcgtctggtttcgaactttaaacgtcctcatttgcgttacgattcacacacgccagtcgtaccaaaagtatttaaaaagaccgagagtattttctcggctatgcaaaagcaggatattttacttcatcacccatttgagtcttttgcacctgttattcagttactccgtgaagcagcacgtgatccacaagtactcgcaattaaacagacactttatcgtagtggcgcagactcggaaattgttcaagttttagcagaagccgcgcgtaatggtaaagaagtgacggcggtaattgaattacgtgcccgtttcgatgaagagtcgaatatcgaagtggctaacgttttacaagaagcaggggcagtcgttgtttacggtattgtgggttataaaacccatgccaaaatgattatggtggtacgccgtgaaaacaacaaactggtgcgttatgttcatttaggaacgggtaactaccatgctatgaatgctcgcatttataccgattacggcctgatgaccaccgataaagacttgtgtgaagacgtacaccgtattttccaagagctcacgggtatgggtaaaatggcaaaactgaaaaagttactccatgcaccttttactctgcatgctcagctcatcaactttattgatgaagaaattgccaatgcaaaggctggtcgtaaagcccaaattattgtcaaagtgaatgctttaactgaagttcagcttattaataaattgtatgaagcttctcaagcaggggtacaggtagatctcattattcgttcgatttgctgtttacgtccgggattaccaaatttatcggaaaacattcgggtacgttcaattgtaggccgtttccttgaacatactcgagtttattactttagtaataatggcgatgctcgtatttactgttcaagtgcggactggatggatcgtaacttatttaatcgtgttgaagcatgcttcccaattgaagatcctgctttgaaaaaacgtatttatcagcaaggactccttaattatttacaagataatcagcaagcttggttattacagggcgatggtacgtgggtacgtgcccagcctgccgcaggcgaaaaattgcataatgctcaaagagaattattagaaacttttaaataa

SEQ ID NO: 42139 - DNA, 678 bp, Acinetobacter baumannii
atgaaagcctttattgttcgcgtgttgttaatttttattggggcaattctctttattcagctttggattttctcaagtttggtttggtggcgtacgcatgaagttgataccaccatgtttatgcgaattgattattggtcagatacctcagagccgatcattcatgaatggcttgactatgatgacattagtgacaatttcaaacatgcaattttagcaggggaggacgcaaaatttattcatcatcatggttttgactgggatggtattcgttttgcgctagagcgtaacaatgagcaaggagaggtcgttgctggtggttctaccgtatctcaacaacttgcaaagaacttgttcttatataataagcgttcatttattcgtaaaggccaagaaactgtagcgacatggatgatggagcgcatgtggtcgaaacgtcgaattcttgaggtgtatatgaactctgttgaatttggcaaaaatttgtatggcgttgaagcagcggctcaatattattacggcaaaagtgccaaaaacttaacgcgtgaacaagctgcttttttagccgcgttattgcctgatccgaaatattatcaagatcatcgcaatgatcgtaaactacaatatcgaaaacgcgttattttacgttatatgaatagcacccagattcctgaataa

SEQ ID NO: 42140 - DNA, 810 bp, Acinetobacter baumannii
atgactcaatctcagcctccgcacattaatcgtaaactcaatgtacaagcttggtggctgaccgccctactgatctcgattaatgtaggtttattcatctggcaaattatatctggagtcgacattagtgacccagccataaaagatgcccttcactggggtgcagattttacaccacttactttttctgggcagccagaacgtctatttaccagcatgttttttcattttggtattgttcatcttatgctcaacatgggagccttatatattttcggcaatgttgctgaagttttgcttagcaggtcatatttcattattctgtatctgcttgcaggcgtatttggcagccttttgagtagttatatcaatattcaaaatgggtatgaattattacaacattttgatcagagcctgcttccccatgtaagtgccggagcatcaggcgccattatgggattaggtactgcattaactgttctttctttatttccacctctgccacatcaagtacgtatactcaataaaaaagtatatctggtaacaatggcgattaaccttattttcggttttgtcgcaacaggtattaataatgctgcacatgtcggcggtatgattatgggtgccttactcgcactcatttggtatttaagctaccgcactcaatttaaaagcctcctaaaatttttaggtctattgggaggacttttaataactgtcggcttctatgtttactgtaatcagcttaactcaccattacttccgctttggcatgaggttttaattcagaacccagaaatactcccctaa

SEQ ID NO: 42141 - DNA, 2460 bp, Acinetobacter baumannii
atgcgtaatcttctcaaaccacttttgttacaaagcttgcgtaccggaggcttatatttacttattattgcgctctcacttgcgatcagtgcaaccaccgctcttaagtttagcaatgaccaagttaaaaatgcggtaagtctacaagcagcgcaaatgttagcagcagatttggttctgtcgaataatgaacctatagacgcaaaatggcaaaaaagggcagatcagcttggcttaaagcagactaatgtgaccatgtttagttcaatggcacatactcaagatcagtttgtcatggtcaatgtaaaagcaatagaacctgcattcccattaagaggaaagcttgagattgaacctatagcgcgtggtatccaaccaggtgaagtatggttgagtcaaagggcagccgatttacttaaagttaaactaggcgatatggtatctattgcagatggggcatttcgctttagtggcgtgattgtgcgagattcaaatcaagaacttggtttttctggtttttcgcctactgtcattattcatcaagcagatattgctaaaactcatgcaattcaaactggtagtagaatcgattatcgactgttaatgtctggtcagcctgaacaggttcagtcattttcaaggcaatttaagcaacagcatcaacctgcaaatgaacaggaagaaaccatagggttacgtttacgcgatgccagtgaatcaaatagcagattattacgcccgttagaaaacctagatacctttttgcaattagccaatattttaacaattttattgtgtggtatcgccattgctttaacgagtcaaagatatgttcagcaaaaccaagatcacattgctttaatacgttgtttaggtgcgagtaagtttcaaattttatgggcctatatcgggttactttgtgtagtcagtgcaatttcgattgtgatcggtagtctcttaggaataatgatgggctatggcttgcttgagctcatgctacaactgattccacaactagagttaagtttctctgtggttggttttttacttggtcccttaccaattgccatttttaccagtgtaattgtgctacttggattcattttgccaagcatttgggagttgttaaatactcctcccatccgtgttattcgtgagcaagccaaatctagaaaatcgttattctttatgttctttgcgggtattaccagtcttgttatttttagcttagttttaagtgaaaatttaatgctcagtatttgggtactaacagcgattattctgctttgcattttactttacaccgttgtctggctattgcttcgtgctttaaaaaagatgaaaacccgtttgtctttttatattcgttcagcatcgcaaagtgccttacaaattacagcactggctttagggttaagtcttattacagtgttaagcgtgctcagaacagatttattagaacgctggcaacagcagttaccggagggtacacctaatcagtttgtttatggcctaccaccatttgatttaaaagcttttgagcaacagttgaagcaaaatggttggcaaagcacaccgttatatccaaacattcgtgggcgattagttgccaagaatgatgttcctttttcagaagaagccataaagcaaaataacgctttacgccgcgaattaaatttaactcagtcgagtgctttaccaaatgacaatgtcattacaaaaggtcaagcggaatttaatgcagtaggccaagtttcagttgagagtaaaacagcagaaagtttaggaatccagattggtgacaggcttacttttagtctgccagaaggtaccttgcaagctaaagttataaattttcggagcgttgagtgggaaagctttagtcctaattttttctttattttttcacctaaaactttagatgaaaatgctggtagctacttgggtagtttttatgtgcctaagcaagatcaacctaaaatgatccatacgattcagcaattctcaaatacggtttttattgatgttgaccgtattttggatgaagtaaagcgcttaatgaatgtcttggttaaaattgtgactgtgcttgcagctttagttggcttttctggaatacttgttttaattgcttgtttaaatctattaatggatgaacgccgtcgagaagtggctttgttgcgttcatttggtctctctaaaaataaaatgaagcagatgctcagcctagatattggttttttagggttgttagcaggcattgttgcctgctgttttgccgaggtaattagcgcaattgcaagttataaaatgaatatggctttacagtggcatattgaaatatggttgattttaccatttgccatgatgttgctttgcgctctgattggccgatatcgactcggttatctgtgtaatttaccaccactacaaagtttaagagagttgaaccagatttaa

SEQ ID NO: 42142 - DNA, 693 bp, Acinetobacter baumannii
atgccacaacctatcattgctgcccatcaagttacacaaactattcagattaaccaaaatcaatttacgattttaaaaaatattgatttagatatttatgaaggggagcaggtagcaattacaggacgttctggttcaggaaaatcaactttattgggtattttagcgactttagaccaaccctctgaaggtgaggtgtggttatgtggtcaggcggttcataagttaacagaagagcagcgcgctcaaattcgaatgcagcatattggttttgtatttcagtcttttcagcttttgccacagttaagtgcacttgaaaatgtgatgttaccgcttcggttacgtaaagattttgattataaaattgctgagaaaaaagctttagattggttgcatcgggtaggcttaagccgtcaagctgaacaaacgcctaaggtcttatccggtggagagcaacaacgtgtggcaattgctcgggctctcattgccgagccacaaattatttttgccgatgaaccgaccggaaacctcgatggtcaaaccgcccaagaaattgaaacccttctttttgatttaaatcgggagcttggtactacacttattttggtcacacatgatcgtaatttggcagcactttgccaacgacatgtggagttagatgatggccgactaaagacggtacagggtggttaa

SEQ ID NO: 42143 - DNA, 561 bp, Acinetobacter baumannii
atgttcgtctcggcaaaaactattttaattttaggagatagtattagtgccggttatggaatagaccctgaacaaggttgggtacaattactacaaaaacgtttagaccaacagtatcccaaacaacataaagtggtcaatgcaagtgtgagtggggaaaccactagcggcgctttggcacgattaccaaaacttttacaaacttataaacccgaggtcgttgttattgaattaggcgggaatgatggcttacgtggacaaccaccacaaatgattcaaaaaaatctgtctcagctcattcaattaagccagaagcaaaaagccaaggttattctttttggtatgaagattccgcccaattatggcacggcttatagcaaagcattcgaaaataactacaaaactgtaagtcaaaaatatcaggtgaaattgctaccattttttcttgatggcgtcgctgggcaaaagcaactaatgcaaaatgacttgattcatccaaatgcccaagcacaatcaaaattactgaatttagcttacccatacataaaaggtgccctatag

SEQ ID NO: 42144 - DNA, 615 bp, Acinetobacter baumannii
atgcctactgcgcaagaagttttagatcgtttgaaagcaggtaatcaacgatttgtaaatggaaatacttcccttgcaaaaaccttatcacatcatgaacgcgctgaaatggcaaaggatcaaaatccatttgcaattgtattaggctgttcagattctcgtgtaccagcagaaatggtattcgatcaaggtcttggtgacttattcgtaatccgtgttgctggtaatgttgttgcaccttcacaagttggtagtgttgagttcgcggcagaacgttatgactgtccggttgtagttgtattaggacacagtcattgcggcgcgattcaagcgacaattgatacgttgatgaaccctgagcacccaccatcttctaacttaatgtcgattgtgaaccgtgttcgtccatcagttgagattttaatgcagactgatttaaaaaatgacttgaaaaaactctcatgtcatgcggtgcgttcaaatgtatttgcttcggtaaaccaattacgtcatggttcggctgtattagaaaatctgattgcaaaaggtgaactgattgtcgttggtgctgagtattcactagaaactggtgaagttactttctttgatttctga

SEQ ID NO: 42145 - DNA, 1026 bp, Acinetobacter baumannii
atgacaaggctgtccgcatcaattaaagcctctatgaaaaaaactgctactgcactgactttggcttgtagcttattgtcagtcatgagcatttctcaagcgcaggcagccgataatattgatgtcagctttcaaacaatattacagcaggaacgtaactgggcaggactgcaaagcaaaagcctaaaggtgggcgatatcacttggtcatatagtgaaggtggctctagcacaaagccaactttactactcattcatggcctagcgggcagtcgagataactggaaccgagttgcccattatctcacgacaaattatcacgttattattcctgacttaccgggcagtggcgaaactatcgtttcgcaagactttgattattcggttcccaacttagctgaaaaattacgtcgctttgttgaagccgccaatttaaaaggcccaattcatattgctgggcactcactcggcggatctattgccctactctatgctggacaatatccatttgaaaccaaaagtctatttttagtcgatagcggtggtattttccgttctgccaacacaatttatctaaaagatccaacttatctaaaacaacttttagtctctaaaaaaggtgattttaattatttattaaaacaaaccatgtttaatcctccgtttattcctaaagagttcctgcaagctcaagaaaaactgatgattaatcaagcacctcaaacacagaaactggttgatcaactgattgcactcaataaagtctataccccagattcgtttgccgtacttactaaaacgattgacgctcctacactcattttatggggtaaacaggataaaattattaatgtagaagtagcaaatgagctaaaacggcttttaaaaaatgcccagcctccagttatcttagaaaacgtaggtcatatgccaattttggaagctgaacagttagttatccaacaatacgtaccatttttactgaaagtagaaacaaaccagtcgtcaaaaacgacaacaccttaa

SEQ ID NO: 42146 - DNA, 1008 bp, Acinetobacter baumannii
atgtctacccaacccattattgaaaaacttattgaagctcatctagattttctagatgagcaatttgctcaggctcaggtgatccaacaagagtttgagcagttttatcattggttggggagtcgacaattacaacacctttggacgtttgaacaggttcaacagctcattcaaaagcagattttagatacacccgcttcggattttcttattgaacagattgcggagcatatccgctttgcactgatccatcctgcaaatgacaccgcaactgttgaagacgttattcctgttttaaccattgatcgaattgcacaatacgttgccagtaaagaagagcaccgtaaaaaactcattaaaacaattgtgaataaccctgccttttcagcactgttgactcaattgattcagcaaacaatgcatgattatttagatgaatctatgtcaaaacgcgtacccggtgtaggtcgttttatgaagatgggcaaatctgtattagaaacagtaaccgactctaatcttgacaataccattaaccattacttgcaaaagaatattttaaaactcagccagatgagtgagcgtgttttaaaccaacattttgacaatgataagctctaccattttcaggcaaatgtttggcataaagttaaaacctcgccactttctgttttaaaaaactatatagaagttcaagatttaacaaaaactgttggcctaggacatgaaatctgggaccacattcgtcaaactgattatctaaaacagcaagtacatgatggtatctatacttggtatgtacgtaatcaggaacgtaattttgatttgttgctccgtgatcttaatatagacgaaaatttagtgaagcatgaactcaccgaattgcttgtacccgtactacaacaattagtcacaacaggacatttaagacgtcgtgcccgtgtgtacttagagaagttttattattctgaaaaagcattagagattttaaataataaaggcgcttaa

SEQ ID NO: 42147 - DNA, 2265 bp, Acinetobacter baumannii
atgtcgaagcgtattatccagtcagtgctttctgtttcagtactggcaagtatgatgtctatggcttttgctgcacaaaatgagcaagaacaagctgaacaaacattagaaaagcctgctgaacctgtgaaattggaaacaattttcgtaacagctgaagagcaagtgaagcaatcgctcggtgtatcggttattaccaaagaagatttagaaaaactaccagttcgtaatgatatttctgactatgtacgtcgtatgccaggtgtcaacctgacaggtaatagtgctactgggcagcgtggtaataatagacaaattgatattcgcggaatgggccctgaaaacacgcttattttagtggacggtaaaccaattaactctcgtaattcagtccgttatggctggaaaggagagcgggatacacgaggcgactcaaactgggtaccagcagaagccatcgagtcgatcgaagttttacgcggaccagcagctgctcgatatggttctggtgcggcaggtggtgtagttaacatcattactaaaaaagtgactaatgaaactcacggttccgtagagttttatacttcacagcctgaagactccaaagaaggttcatcaaatcgtgttggttttaacgtaagtggaccactaattaaggacgttttatcttatcgtttatatggtaattataacaaaacagaagctgacgatgttgatattaataaatcaattggtagtaccgcagcaggccgtgaaggtgttaaaaataaagatatttcaggccgtttagcttggcaggcaacagaccagcaaactgtcttgctcgatatttcttctagcaaacaaggtaatatttattctggtgactctcagttaaatgcaaatgctgaagcggatgcgattctttcgcagctcattggtaaagaaaccaataccatgtatcgtgatagctatgcattaacgcacgaaggtgattggtcttggggtaagagtaagttagttgctcaatatgataagacccataacaaacgtctacctgaaggcttggcgggaagtgtagaaggaaaaattaataatcttgatgataaagccacttcgcgtttagaaactcttcgctttaacggcgaggctaatattccttttgaatactatttaccccaagtattaactgtaggtaccgaatgggttgaagacagatttaaagataatgtctcgacaactcaaggtaaagacagcagtggttcaggttatggcgatcaattagcgaaaggtgatcgtagtaaaatggagtcacgtattgcttctgcatatattgaagataacctgaaagttacagacagcacagatgttgtattaggtttacgttttgatgaccatagtaaatctggttctaattggagcccaagcttaaatattactcaaagacttaacgattatttcactttaaaaggtggggtagcaaaagcttataaagcaccaaatatgtaccaaaatgccgaagggtatttattaagtacaaatggcaatggctgtcctgctaatattgagtcgcgttgtttattacaaggtaatggtgatttaaaacctgaaacatcggtaaacaaagagctcggtattcagttccaaaaagatatcgtgaatgcgagcttaacttggttccgtaatgattataaagataagattgttgcgggtactcatgttgtcggaacagttgatggctcaagtacaaatgcaaatacaggagctgtgacgaatacgaagtggaatattctgcgttgggaaaatacgcctaaagctctaattcaaggttttgagggaagtttaggattagacttcggtgatatccgctggactaacaactttacttatatgatggactcgaaagataaacaaacagggaacccattatctttagtaccaaactatacgattaactcaatttttgattatgacattactgatcaattggatgtaaattttgtatttactcaatatggtcgtcaaaaatcacgtcaatttgcagagaatagacttgaatccggtataggttcaggaggtgcgaattctgcgcttaagccaagtacggtaaaaagctatagtaccgctggtattaatgttggttataagttttcagaccaaattagtacgcgtgttggtgtgagtaatctgtttgataaacaaattttaagagacagtaattctattagccaaacttataatgaaccaggtcgagcttattacgcttctttaaaatattctttttaa

SEQ ID NO: 42148 - DNA, 639 bp, Acinetobacter baumannii
atgtcgactgagaacaccaacactgctgttgcagaagaaattccgaaccttttgattacaccatctgcacaagagtatttgcacgaattattggcgaagcaaaatactccgggaattggcgttcgaatttttgttgaacatccgggtacaccacgtgcagagtgctgtatggcatatagtgcaccagaagaagtggtgccgacggattataaacaggactatcctgatttccctgcatatattgatgcgccgtctatcccttatcttttagacgctgttattgactacaacaaagatcgttttggtggtcagttaactttccgtgcaccaaactctaaagtgccgcgcgtagggccagatgcatcaattgaagagcgtattacctatgtacttcaagcagaaattaacccgggtcttgcaggacacggtggtaactgtagcttagttgaagtgcaagatgaccctgaacacgggcttactgctgtattgaaatttggtggcggttgccaaggttgttcagcaattgatgtgactttaaaacaaggtgttgaaacaaccttgaaagaacacattcctgaactacaacgtgtggttgaccaaacagaccatacacaagcagaaggtgcttatttcaaataa

SEQ ID NO: 42149 - DNA, 618 bp, Acinetobacter baumannii
atgttgcatttgccgtttaatcacaccattactcttattattattacggtcattgtgtctttacttgcttttagcaatcaaaatgtcatgaaccgtctgatcttctggccgcctgcaatgcaacgtggacaatttgatcgattcattactcatggttttatccatgcagatggtactcatttgctctttaatatgattaccctgtttttctttggcagcatcatcgaaagtttttatcgccaatatttttatgacatgggttttgtgctgttctatttaggcggattaatttttgcgatcttgccaagctacctacaacataaaaatgatgcaaactgggcaagtctaggtgcttcaggagccgtatctgctgttctgtttgcctatattttatttcagccttggaagctgatttttgtatttttcatccctgtgccagctattatttttgcagttctctatgttgcttatagtatttgggcaggtaaacgtggcaatacacatattaatcatagtgcccatttatggggtgcggcttacggcgtaattgtaacgattttgattgagccaagagtgattcctcatttcttagatcaacttactcgcctacctttttaa

SEQ ID NO: 42150 - DNA, 1677 bp, Acinetobacter baumannii
atgaagtacaaagctcttctatctagtctttccattgctttatttagcttatctttagctggatgtaacgataatgattcacaagaaactgcggtaagtacaccaaagcagccgaatattttattcattatggccgatgacttaggctattcagatttaggagcttttggtggtgaaattcataccccaaacattgatagtttagcgcaagaaggtcgaattttaactgactatcacactgcacctacatgctcgcctactcgttcacaactcatttctggtactgatcaccacttggcaggcataggtgctatggcagagcttacccctgatcatttaaaaggacagccgggctacgaaggctatttaaatgaacgctcactatcgattgctcaggtgctcaaagataatggttatcgaacttatattagtggtaaatggcatttgggattaacacctgaaaccaatgcacatgctaaaggttttgatcattcatttaccttattacaaggtttagaccaccactttaaacaagctccaagtgcgtttaagcgaaattcaacctataccgaagatgggcaaattattcctgtttcagcattgcctgatgactttttctcgaccaattattttaccgacaaattacttagctatttagagtcaggtaaaaatagtggcaaaccattttttgcctatgcagcctacacagcaccccactggcctatacaggcaccagcagaataccgtgaaaaatatcgtggcgtttatgacgttggttacgatgctatccgtaatgcccgtattgcacgccaaaagcaacttggaattattccagtaaattttgaggctgccgaaccaattgcgactcaaaatgctccacaaaaatatgggaaatgggatgaattaacaaccgaacaaaaagcactagaagctcgtaagatggaaatctacgcaggcatggtagaaaatctcgacgccaatgtaggccgaattattcaatatctcaaacaaaataatctttatgacaacactttaattttctttgtttctgataatggcgcagaaggttttgttcgcggaagctatggtagtgaatcaggctttgataattctgtagcaaatgtaggtacccctacttcttatcattacattggtccacgttgggccgaggtcagtgcagcacctttccatttatggaaagatacagctggtgaaggtgcaactaccgctcctgctattgtgaaattaccaaaccaaaagaaagctgaagaaaccaatcatagctttgcatcggtactcgacgtttttccaacattattagattatgctcatattccagtacctcaagggcaatataaaggccgaaccattaatacgccaagcggttattcttggaagtctgtactcgaaaataaatcacaaacgatacgccctgccaatttcagttttgccgatgaattgcatggtaataaatatgcaaaacaaggcgaatggaaaattgcacttcaaggtcgccctgaattaggaacaggttcttgggagctctataacattgccactgatcgtggagaaaatcataatgttgcgcagctttacccggcaaaagttcaagagctattagcggtttatcaaaaatacactgaacaaaatggcgtacaggaatataacgccaaatga

SEQ ID NO: 42151 - DNA, 1008 bp, Acinetobacter baumannii
atgaaattgaaactggttttaagtactacaatcggcctgttgttcatcacaggttgtagcaagtctgaacataacgctgacactaaaacggttttaccaaagcatgccattcaatcggctgctttgggttccatcgaacagtgtaagagctatacaggacttcctactgactggcttaaaaatacaaccgcaggcatggtattcattccagatgggcattttaattttggttctgaaaaagcttatccagatgaacttaactttggaaaaaaacagcgggaagttaaaggtttctggattgatcaaactgaagtcactgttgctcagttcgcgagttttgtgaaggcaactggttatatcaccgatgctgaaaaacaaaaacaagctgctgttttttcaccagacccacatcatcctcagcaatggtggcaacttaagacaggatatacatggaaaacaccaaacggcaaaaatggtactcttcctaatcctcatgaacctgtacgctacgtgactaaaaatgatgctgaacattatgcagtttggttaggacgtgatttacccacagaacttgaatgggaatatgccgctaaagcaaactcgccaacttatactcctttatatcaagcacctaccgatgagcaccagcatccacaagcgaattactggcaaggtgcatttccctttgaaaatctgaaccaagatcattttactggtattgcgcctgtcggatgttttaaacctaacggttttaaactattcgatatgattggaaatgtttgggaatggacatcatctccttatcaaggtgcgcatgaccagcacatgggtaattattctgctttaagacaacaagaaatgagcagtactcaatatgtgattaaaggtggatcgtttttatgtgctgaaaattactgttcacgttatcgtaatagtagccgctatccccaagattttgatttagccgctacccatgtgggttttagaacgattttacgctctccttaa

SEQ ID NO: 42152 - DNA, 165 bp, Acinetobacter baumannii
atgaaaactttacttctttgtgccgcagcaattttcacaatgtcattatcagcctgtgcagtacatacacctgagggtagtattgtgattgatcccgactctccatattacggacacccaggaggtttttgcccacctggacaggcaaaaaaaggacgttgttag

SEQ ID NO: 42153 - DNA, 1548 bp, Acinetobacter baumannii
atgtccagccagagtccagccgaaggtctacaatttccgattcacgcctcgatcaaaaagcaaagcacgtctcttacaggccaagagattttgtcagaagctttatctattgtagataataaaactgctcaacagattttggctgaaaaaaattggcgaaaaaattatcctatttactttaaggcacttgttaagcacggaattactaacagcaataatccaattaccattgcaaaacagggattgcataaggctcatcatctttttgattattaccgcgatggtaaacactatcttttaaaagatgctctacacatccctacttctacacctttaaatacagtaaaatttaaaggcgaaagtgaagctgcaccagaatggtatgttccatataaaggtcaaaaactgagcgggcaaagcttacttgaccaaattcaaaaatgggaaaatgcaggtattattgaaccaagccatgctaaggctttacgcgaagctgctgctcatcctgaatggtttgatttatctgaccgtacgatggtgttatttggtgcagcctcagaagcaggaccattaccttggctagcaagatggaaagcgaatattgttgcaatagatttaccaaacccacgagtttgggggaaaattctaaatacaatccagcaaggaaacgcaacgcttattgcaccaagtattgaaaaaattgactcttcggcaaaagcttcagcattgagagataaattgggtgctaatttattaacgcaaataccagaaattgcccaatggttagttcaatttcctcaaaaattagacttggctgctattgcttatttagacggagaaaaacatgtccgtgtttctatggcaatggacagtattatgcaatatgtgagtgaacataaacctgataccagcttaatgtttatgtgtacgccaaccgatgtttatgcagtacctaaagaagttgcagaagctgctcaagagaaatttaaatctcgttcacaactacaaaaaatggctgtgaaaggtgtttctacactctcactcaaacgttttttccaagcaccttatcaagatttgattactagcgaaaatggcaaaacttatggtattgcagactgtttggtagttgaacaaggaccaaactatgctttggcaaaacgtattcaacaatggcgtgcgacacttgcccgtcatcaaggtcaacgtgtaagtattaatattgcaccatctaccacaactcattcggtcacaaagaatccgctccttaaagctgcttttaatggcgcagaactttttgatgtagaagcatttagtccagaaaccaccaatgccattatggcggcgctatggattcatgacttaagaaatgattcttctgtcgcaaaccctgaaaccgtactcgaccaccctctagagttgatgatggagggtgctaaccatggcggtttatggcgtgtggcttatttggcacgtacagctcttccttttgcagccatctatggctttgcagccgagaaacttccatttaggaaattttctaaaaaataa

SEQ ID NO: 42154 - DNA, 1335 bp, Acinetobacter baumannii
atgaaaacggttcaactcgaccaattaaaacaacaatttccactcattcaaacattacaagactatcaagaaacattttggtttaatcctcaccgttatcctttaaacgaagcactagcgaaagtgggtcttacagaacaggatgtaaaagaagcagaagcaaggctagcgcgtttcgcaccttatttggcaaaagtcttccctgaaactcaagcccagcatggaaaaattgaatcagcgctagtaaaaattgccgacatgcaacaagctctatcgctacaaaagcataagacacttatagggaaactttggctgaaaaaagatagtcatttacctatttcgggttcaatcaaggcacgtggcggtatttatgaagtattggcccatgctgaaaaattagccattgaggcagggcttctcaagctagaagatgattacagtaaattagaccaagactcatttcgaacatttttttccaaatatcaaattgcagtaggttctaccggtaaccttggtttatcaatcggtattatgagcgcgaagcttgggtttagagtgtcggtacacatgtctgccgatgcaaggcaatggaagaaagataagctacgttcacttggtgtaaatgtggtggaatatgccagtgattacggagttgctgtagaagaagggcgtaaggcagccgaacaggacccattttgtttttttattgatgatgagaattcgaccactttatttttaggttatgcagttgcaggtttgcgtttaaaacaacagtttgaacaaaagcaaattaaagtcgatgcagatcatcctttatttgtatatttgccatgcggagtagggggcggacctggtggggtgagctttgggttaaaactcgcttttggtgagcatgtacattgtatattcgcagaacctacccattctccgtgtatgttacttggcgtttatacaggcctgcatgatcagatttcagtaaatgacattggtttagataacatcactgcggcagatggattagctgttggccgtgcttctggttttgtcggacgtgctatgcagcagttaattgacggttattacaccattcatgatgaatgtttatatgaactcattgcgcttttaaatcaaactgagaatattcaagttgagccctcggcagcggcaggcatgatggggccatattatgtgcaaactactcctgattatttggccttgcatcaattgtcagctgaaaagttacaacatgcgacacatgtggtatgggcgacaggaggaggaatggttccacctgatgaaatgcagaagtatttaacgcatagccaaagcaattaa

SEQ ID NO: 42155 - DNA, 1632 bp, Acinetobacter baumannii
atgaattctaatctaccccctgtttcggattcaaaacttgcggcaaacctgcaagcaaaatcgacgaatgtacatgtcccgacacctaagttttttatgccggtgtttctgacgattattattgcaacacttatttatattgggtttcaggtcagtgctgatttagcacatgttccacctttaagcctttattcagttattcttttatctactgcactcttgattgcactaggctttgaatttgtaaacggtttccatgacactgctaatgcagttgcaacggttatttatacaaatgctttgcctgcaccggttgcagtcatgtgggcaggtttttgtaatttccttggggtaatggtcgcaagtggtgctgttgcgtatggcattattgcattgcttccagttgaacttattatgaacatgggcagtggtgctggctttgcaatggtttttgcattgttgatcgctgcaattctttggaatcttggtacttggttcttgggaattcctgcttctagctctcatacgttgattggttcaatcttaggtgtgggtattatgaatcatctgttgagtgcatcgactggcgtaacgaccagtggtgttgatatggatcaggtgattaaagtaggtaaggcattattattttctcctttaattggttttgcttttgcggcaattgtattcttgttggttaaaactattttcaaacgccaattagaattattccagccacctgaagggaataagccaccaccagcaatcattcgcgcaattcttatctttacctgtacaggtgtgagttttgcacatggttctaatgatggccaaaaaggtatgggtcttatcatgctgattttggttggtttggtgccattagcttattcattaaataaaaacctcgatacacagcaggttcaatcattccatcagctttcttctcaaactgcggttttgttaaaccaaaatcaaccagaattgactgacgaaaaagcgcgtgcggttttaactaaatacattcaaaccaagcaacaaacgcctgaagttgtgcctgcattggcaagcatgactgaccatttgggtgagcgtgtttctagctatagcaacttaaaagatattccagaagctgcaattagcgaaatccgtaatgacatgtatttgagcacaacgacgtttaagcgtttggataaggcagatgctttaccaaaaatggatgactcacagaaaaagcttgtgaaagattatcgtagtagcttggattcattcttacaatacattccaaactgggtgaaagtggcagtcgcattagcgcttggacttggtactatggttggctggaaacgtattgtggtaactgtcggtgagcgtattggtaagcatcacatgacttatggtcaagggatgtctgctgaacttgttgcaatgagtacaattgctgcagcagatggtttaggtatgccggtttcaacaacacacgttttaaacagtgctgttgcaggtactatggttgccaataaatcaggcctgaatttcaatactgtaaaaacaattctctctgcatgggtatttacccttcctgcaaccatctgtttgtctggtggtctatactggttgttcttacagtttgtataa

SEQ ID NO: 42156 - DNA, 3687 bp, Acinetobacter baumannii
atgtctacgcttgccaccctaaaagcgcttcttgctaaacgcattctgattattgatggtgcaatgggaaccatgatccagcgccataaattggaagaagctgactatcgtggtgagcgttttgctgattgggcacatgacttaaaaggtaacaatgaccttttggttctaacacagcctcaaatcattcaaggtattcatgaagcctacctcgatgctggtgcagacattattgaaaccaacagctttaacggcacacgtgtttcaatgtctgactatcacatggaagatcttgttccagagattaaccgtgaagcagcacgtttagccaaagcagcttgcgaaaagtattcaacgccagacaagcctcgttttgtggcaggtgtactggggccaacatctcgtacatgttcaatctctccagatgtgaataaccctgcttttcgtaacattagctttgatgaactaaaagaaaattatattgaagcgactcatgcactaattgaaggtggtgcagacattatcctgattgaaaccgtatttgatactttaaactgtaaagcagcgatttttgcagtcaaagaagtctttaaacaaattggtcgcgaattaccaattatgatttcagggaccattaccgatgcatcaggccgtactttaacaggtcagacagcggaagctttctggaactcggttcgtcatggcgatttgctttcaatcggttttaactgtgcccttggtgcagatgccatgcgccctcacgtaaaaactatttccgatgtcgcagatacctttgtttcagcgcacccaaatgcaggcttaccaaacgcatttggtgaatatgacgaaactccagagcaaactgcagctttcttaaaagagtttgctgaaagcggtttgattaacattactggtggttgctgtggtacgacaccagaccatattcgagctattgccaatgcggtaaaagacattgcgcctcgccaagtgcctgaaaccgtacctgcttgccgcttaagtggtttagaaccatttaatatttatgatgattcattgtttgtaaacgttggtgaacgtactaacgttaccggttctaaaaaattcttacgtctcattcgtgaagagaactttgcagaagctttagaagttgcacagcaacaagtcgaagctggcgcacagattattgacatcaacatggatgaagggatgctcgactcgcaaaatgcgatggtgcattttttaaaccttgtagcatccgaacctgacatttcacgtgtaccgatcatgattgactcatcgaaatgggaaatcattgaagccggcttaaaatgcgtacaaggtaaaccggttgttaactcaatttccttaaaagaaggttatgacgagttcgtcgaaaaagcccgcctctgccgtcaatatggtgctgcaattattgtgatggcctttgacgaagtaggtcaggccgacactgctgaacgtaaacgtgaaatctgtaagcgctcttacgacattttagtaaacgaagtaggcttccctgctgaagatattatttttgacccgaacgtgtttgcagttgcgactggtattgaagaacataacaactacgcagtcgattttattgaagcaacgggctggattaaacagaacttaccgcatgccatgatttctggtggtgtgtctaacgtttcgttctcattccgtggtaatgagccggttcgtgaagccattcactctgtgttcttgtaccatgccatcaaacaaggcatgaccatgggtattgtgaacgcaggtcaaatggctatttatgatgatattcctaccgagctaaaagaagcggttgaagatgtcattttaaatcagaaccaaggtgagtctggtcaggctgcaaccgagaaactacttgaagttgcagaaaaataccgtggacaaggtggtgcaacaaaagaagccgagaaccttgaatggcgtaatgagtcagttgaaaagcgtcttgaatatgccttggttaaaggtattacgacttatattgaccaagacaccgaagaagctcgcttaaaatcaaaacgtcctttagatgtaattgaagggccactgatggacggcatgaacgtcgtcggtgacttgttcggttcaggcaaaatgttcttgccacaagttgtaaaatctgcccgagtcatgaaacaagcagtggcatggctcaacccgtacatcgaagctgaaaagaccgaaggacagtctaaaggtaaagtcctaatggcaacggttaaaggtgatgtacacgatattggtaaaaatattgtaggcgtagtacttggctgtaatggctatgacattgttgaccttggcgtaatggtcccttgcgagaaaatcttgcaaactgcaattgatgaaaaatgtgacatcattgggttatctggtctgatcaccccatctttagatgaaatggtatttgttgctaaagaaatgcagcgtaaaggctttaacattcctttattgattggtggtgcaaccacttctaaagcccacacagcagtaaaaattgaccctcagtatcaaaacgatgcagtaatttacgttgccgatgcttcacgtgctgttggtgtagcgacaaccttgctttcgaaagaaatgcgtggtgcatttattgaagaacatcgtgctgaatatgccaaaattcgtgagcgtttagccaacaaacaaccaaaagcggctaaactgacttataaagagtcggttgaaaatggttttaaaattgatgaaagctatgtgccaccaaaaccaaatcttttaggaacacaagttttaaagaattatccgcttgctacactcgtggattattttgactggacgccattctttatttcttggagtttaactggcaaattcccgaaaattttagaagatgaagtggtcggcgaagcagcaactgacctttacaatcaagcacaagcaatgttgaaagatattatcgacaacaatcgttttgatgctcgtgctgtatttggtatgttccctgctcagcgtacagatgcagataccgtcagcgtatttgatgaagctggtcaaaatgttacccatacttttgagcacttacgtcagcaatctgacaaagtgacaggtaaaccaaacttatctttggcagattacattcgtgctgaccgcgagcagcaagactacttgggcggattcactgtatcgatttttggtgcagaagaactggcaaatgaatacaaagccaaaggtgatgactactctgcaattttagtgcagtcattagctgaccgttttgccgaagcttttgcagaacacttacatgaacgtattcgtaaagagttctggggctataaagctgacgaacagctcagcaatgaagaactgattaaagagaaatacgtcggtattcgtcctgcaccaggttaccctgcttgccctgagcactctgaaaaagcagtgttgtttgactggttaggttctaccgacaaaatcggcaccaaactcactgaacactttgcaatgatgccgccatcttcagtaagtggtttctattattctcatcctcagagtgaatactttaacgtgggtaaaatctctcaagaccaacttgaagattatgcaaaacgtaaaggttggacactggatgaagcgaagcgttggttagcgccgaatttagatgattcgattgcttaa

SEQ ID NO: 42157 - DNA, 1005 bp, Acinetobacter baumannii
atgagccagttagccaatccccctaagaaaaaactaaccacttcggcaatgattgcttctattgctgccgaaggccaaccgaccaaaccagctccatttggacatgcactgaatgccttggcaaaagagcgtgatgatattgtgggcttatcagcagatttatcaaaatatacagacctgcatatttttgctaaagaaaatccagacaagtttttccaaatgggcatggcagaacaacttttgatgagcgcagcagcaggatttgctcgtgaaggatttgttccttttgcaacaacttatgccgtgtttgcatcacgccgtgcctatgactttatttgtatggcgattgcagaagataaccttaatgtcaaaattgtggcggcactcccggggttaaccacgggctatggcccaagccatcaggcgactgacgatattgcaattttccgtgctatgccgaacttgatggttatcgatccatgtgatgccttggaaatcgaacaggcgattcctcagattgccgcgcataatggccccgtatatatgcgtttattgcgtggtcaggttccgttagtgctcgataaatataattaccaatttaaattgggtaaggcacaggtgattaaaccgggtaaagatgtactcattatttctactggtttattgaccatgcgtgcgcttgaggcagctgaagaacttgaaaaagagggccttgaggtttcagtgctgcatgtgcctaccattaagcctttagatgaacaaactattctggatgaagtcgcaaaaggtggccgacctgttttaactgccgaaaatcattcagtgattggtgggttaggcgaagcagtcggctcactacttttaagaaatagtcaacatcctcgttttgacatgattggtttgccagatgcatttttagatgcaggcgcattacccactttgcatgatcgatatggtatttcaactgaagcagttaaagagaagattaaatcacatttgaagtag

SEQ ID NO: 42158 - DNA, 846 bp, Acinetobacter baumannii
atgttaaatgttgataaagcaggccaaattgccgagttgcaacaacgtgcctaccacattcgccaacatgctttacgtatggggcaagtacaaggccaaggctatgttggacaagccttgggtgcagcagatctactggcagtatcttatttccatgccatgaaatatcaaccggaaaatccagagtgggaaggccgtgaccgtttttatctttctattggacactatgcaattgcactctatgcagccttaattgaagcaaaaactattccgcttgaagagcttgaaacctacggtgcagatgacagtcgtctaccgatgtcgggtatggcttcttatacaccgggtatggaaattacaggtggctcattgggtcatggtcttggaattgcagttggtgcatgtctagggctgaaacagaaaaaatcagatgcttttgtttataacttactttctgatggagagttaaatgaaggctcaacatgggaggcagtgatgtctgcttctcattggaaactagataacttgattgccattattgatgtgaataatcagcaggcagatgggcactccagcgaaattttagcatttgagccaattgttgatcgttggcagtcatttggttggtacacccagcgtgtagatggcaacaacatggaagctctgcttgaggcattcgatcaggcacgaaaccatgagggagcatgcccaagagtcattatttgtgacaccaaaatgggtaaaggcgtgtcgttcttggaaagccgcgaaaaaacacacttcattcgtgttgatgaacatgaatgggacgacgctttaaatattttgacccactacggacagtaa

SEQ ID NO: 42159 - DNA, 1329 bp, Acinetobacter baumannii
gtggccaaatgtaaagggattcgcatgatggatacagtattttcatctgaagtagatacaacgattcgtaaatcggcgtatcgaaaaattgcatttcggctcatgccatttttaatgctttgttatttttgtgcctatttagatcgggtaaatgtgggttttgccaagctccaaatgatgagcgatttacagtttagtgaagctgtatatgggctgggcgcagggattttctttattggttactttctctgtgaagtaccaagtaatattgtgcttcataaagtaggtgcacggcgttggattgcccgaatcatgattacatggggcattttgtcaggctgttttgcttttgttcaaactgaatggcaattttacaccttacgttttttacttggtgtcgctgaagctggactagctccgggtttgttgctctacctcacttactggttcccatcttaccgccgcgcacgcatgaccgtactgtggtttatcgcgattccaatttcgggaatgattggtggcccactttcaggcttaatcatggaccgaatgagcggcgtacatggctggtttggctggcagtggatgtttgtaattgaggccattcccacagtgcttgttggcttgcttgtacttgctgttttaaaagattcagttcaagaagccaactggctaacccaagacgaaaaaaacttggtgaagcaagagcttgctcaggataaccagcacaaagaaggccatgctagcgtcaaagagttcatcgcagataaacggttatggctactggcaggtatctacttttgtgtagtgatgggccaatacgcaattacattttggttgccaactctcattcgtaactcgggcattagtgataactggcatattggtttgctcacaagcctgccttatatgtgtgccattgtggtcatgattttggcggggcgtagcggcgaccatttccaagaacgccgctggcacttaattattccgatgtgtgcaggtgctatagcactcacatttgcgactttattcgcttcaaatctaacgctctctttaatttgcctttgcatcgcagcctcaggtgtgctgacagcatcctctttattctggatgttaccgaccaactttttgggtggtgtttccgctgcggcaggtattgcagccgtcaatagctttgccaaccttgccggattttgctcaccttatttaatcggttgggtcactactaacacgggttcaaatgcaatcggcatgttcttaatcacagcagtattaattttcggtgccagtctggttctgcgtgttccggcaaaactggtcaatcgttaa

SEQ ID NO: 42160 - DNA, 750 bp, Acinetobacter baumannii
atgttactacaaggaaaagtggcattaattacgggtgcagcatcagaacgtggaattgggcgagcaaccgcagaaatctttgcacaacaaggtgccaaagtcattattgttgatttagatcttgcccaaagccaaaacgctgcaaaggcgcttggcgaaggacatattggtcttgctgccaatgttgcaaatgaagagcaggtcaaagctgctgttgaacaagcgctacagcactacggaaagattgatattttaattaacaatgcgggcattactcagcctatcaaaacacttgatattcaacgcagtgattatgatcgtgttttagatgtcagcctacgcggaacgcttattatgtcgcaagcggttattccatctatgaaagcaaacggtggtggaagtattgtctgtctatcttcagtttcagcacaacgtggtggcggtatctttggcggaccgcattatagcgctgcaaaggcaggcgtgttaggtctggcaaaagcgatggctcgtgagtttggtggtgaccagattcgtgtaaattctcttactccaggtctaatccagactgatattactggcggtttaatgaatgatgaccgtcgtcacgacattctggctggtattccgctgggccgtttaggtaaagcacaagacgttgcaaatgcagcactatttttggcaagtgacctgtcagcttatttgactggtgtaacacttgatgtaaatggtggcatgcttattcattaa

SEQ ID NO: 42161 - DNA, 906 bp, Acinetobacter baumannii
atggatagtagtgaaaacaatttcaaccaaatgccctcaattaaaacattacaggcttttgaacaaaccgcccgtttcggcaatgttgctaaggcagcagagaatttaaatctcaccccttcggcagtgagccatcaaattgctaagcttgaagaaatgattgggcagagtttatttattcgtggtgcccgtggtgtgacacttactccttcaggtgaacgctattttcaagatgtcaccaccattttgcataatctgatgttagccacagaaaaagctgccgataaaagccctaaagacagtttatatattcattcatccccaagttttggtttactttggttactccctcgccttgaatcatttaaagaaaagttccccatgattcaggttaacctatcgtgttcgtatgaaaatttgcactttacccgcgataagatcgatattgatattcgtcatggtttacccaactggacaggggtagaaatcagaaccattcgtaatgaaaagcttgaagtgcttgcgtcccctaagatactggaacgtagtccggttcataaacctcaagatttattaaagaaagaactaattttatcgcgttcaactttagttacttggccccaatggtttgcccatcagggtttaagcattcctgagtttccctacactttgagttttgaccgctcttatatgtcacttgaggcggccacacacgggctaggttttgttttagaaagtaatttgcttacccaaaattacttagaatctggaaaattagttagagtttttgcagatgagctatcgattcctatctctgctcatcatttggtatatccacgaacccaccaatttattcctaaaattgagctatttttaaactggattcatgatgaattggcaggctga

SEQ ID NO: 42162 - DNA, 447 bp, Acinetobacter baumannii
atgaatcatcctaattcaattttaaaattttcacttggtctaaatagtctctggtttgatgtagacagtcaacatattcaccttgagcagggcctaggttttattaattcaaaaagtatcagcaagggtgtgattgatgagctggctatcgaaaagatgatctatttcattgaagaaatcatcgagtctcagccactcagaaatttaaatataggtggtgtagcggttacggctgataccgccatggcacaactcagtgagttattttttagtgctaaaaagcaaatcagccgtatcgagcttgagcatggatttaatgattttattgagcgtttgagctactacacaaatcaaatggctccaaatcagctttatgtttttacctactttgtatttgttcgagagatgatgcatcacttaagagttgaagaaattcaaatcatttaa

SEQ ID NO: 42163 - DNA, 1146 bp, Acinetobacter baumannii
atgaaaaaattagtaattttaggtgttacggtttatagctttgcacaactggcaaatgcagcaacgttaaatgtaaaaccatatggtacgactcaagacggccaaaaagttgatctatacaccatgagtaataacaatggagtctcggtatcttttattagttttggtggtgtaattacacaaatcttgactcccgatgcccaaggcaaacaaaataatatcgttttgggctttgatgacttaaaaggctatgaagtcactgataccaaggaaggtattcattttggcggattaattggtcgttatgcgaaccgaattggcaatgctaaatttagcttagatggaaaaacgtataacctcgaaaaaaataatggcccgaactcattacatagcggcaatcctggttttgataaacgtgtttggcaagttaagcccctcgtttctcaaggtgaaaccgttaaagcttctcttaagttaaccagtccaaatggtgatcaaggttttcccggaaagttagatgtggaagtaatctacagtctttcagatcaaaatgaatttaagattgaatataaagccaaaactgatcagcctacagtcgtcaacctcaccaaccacagttatttcaacttgtcaggagctggtaataatccttatggtgtgctggatcatgtggtacaactcaatgcagaccgtatattggtaaccgatcaaaactctttaccaacaggtgaaattgcttcagttgcaggtacaccttttgattttcgaacgcctaaagcaatcgtaaaagacatccgagcaaataatcagcaattggcctatggatatggctatgaccaaacttgggtaattaatcaaaagtctcaagggaaactcaatcttgcagctattgtggttgatccaaaatctaaacggaccatgcaagtcttaacgactgaaccaagcgtccaaatgtatacagccaatcatttattaggaaatatagttggcgcaaatggcgtactctaccgacaagcagacgcactagcattagaaacacagcattttccagacagcccgaatcaaccggctttcccgtctacacgtttaaacccaaatcaaacttataacagtattaccgtatttaagtttggtgttcaaaaatag

SEQ ID NO: 42164 - DNA, 1236 bp, Acinetobacter baumannii
gtgttcgctattaagcaattatcattaagtgtttttctcgtttctacattaactttagttgcatgtggtggtgggggtggagggagttctacggatagttcttctacatcttcaaaatcaaatcctaatgaaatcccgactttatcatctaatcctttgattaattacactacaacttttgagcaaaatctcactataattaatgaaaaaaataatggcatatcaacccagcttgttccaagtaatggatctagtaaaagtgtgattgaacctagttatagtgtaagcacttatggaaattcagggctttcattttattataaattagataaaaatcaatttgttagggttgagtatgataagctttctggtaaagtaataaatgcaagaattgatacagagaaatcttctttaacttgtaggaatgataaatggactcctgaaggttgtgaagggattagtatgatttatgatagtcgtactggtgattcaacactattatttaataataaaaaatttgaagattcatattatacggattcctcctcgaataataaaaaggtaacgtatttagttacattgaatggtacggtaaaagggagtattagtagcaaacccttagaatttacagattttgaaaagacccataatggtgaaattactgttaatggtaagaaaatggatattcttcgagcctatatgagggatactcagcttgttgttcaatttacgaatggtgagagcttatatttgcttacaggtaaatcatcagggctggttaacacttattatacaggagaagagattctctctagtgcggcggctatgggaacattaaaaaaactagataacgatcgagtaaatgtagaatttaataacgtttactttaattcaaaaactggatctaactctaaaatagcctcaggaaatattacattaatcaatagttatgccaaaattgatatctcaaatgtaggaaaaattgatacaaacgaagtttatgcttatgaactctctaataaagaaataacttactttattacatctactactgggcatggttatattactgttcaaggacaaaatcctgttaatattcagataaatggctattcttgtactttaggtgattgtaaaaatgtattgatctctaaagatggttcttatatccaactgaatggtacaaagctgggtgatgtgagtgtgaccggttcaattcgaacgaatattcattaa

SEQ ID NO: 42165 - DNA, 1221 bp, Acinetobacter baumannii
atgacgtcttcaatacaattgaaagatggtattgccaataccgttgcaaatgatcagtctcaaggaatgattattaaaattgtaggcgccgtggcggttgcgcatttactgaatgatttaattcaggcagtgctaccagctatctatccaatgctaaaagcaaacttttcgctgagttttgcggaggttggcctgatttcgtttgtatatcaaattacaggctcgctgctacagccttggattggactttataccgataaacatccaaaaccttatcttctcccactcggaatggtcgtcacattctgcggcattatcttgttggcattttcaccaagttttgctgtgttgttatgtgcatctgcactgattggggtagggtctgccacctttcatccagaagcttcgcgtgtggcgcgtatggcatcgggtgggcgcttcggtacagctcagtcgactttccaagtgggtggaaatacaggtactgccattggtccattattagcagcattattaattgttccatttgggcagcatgcagttgcgggcttggtgatatttgcacttttagcgatttgggttttatttggtgtaagccgctggacagtaaaccatgctaaaaatcaggtagctgcacgtgcaactcaagcacatactaaattgcatgggcgtaagctcattatcgccttgggcacaattagtgtgttgatgtttgccaaatttacctacattgccagcattagtaactattttactttttatttaattcaaaagttccatattagtattcaaacagctcaattacacttatttgcctttttggcagctgtggctgtaggtacatttgcgggtggcccaattggcgataagattggccgtaaagctgtgatctgggtttcatttgttggcatggcgccgtttgcattaatgatgccgtatgcaaacttgttttggacgacggttttctcaattattgcaggtttggtgttgtcatctgcttttgcagcgatggtggtttatgcacaagaagctgttccgggccgtgtaggcatgattgcaggtttaatgtttggccttatgtttggggtaagtggtattgccgcagcggggctagggcatttagcggatattaacggcattgaatgggtatttggtttatgttcattgttgccattacttggttttgcaacagcacttttaccaaacacaaaagtaaaatag

SEQ ID NO: 42166 - DNA, 789 bp, Acinetobacter baumannii
atgtccgattctcttattcagtccgatttgtctgaactagtaattggactctcttctgaacattcttaccgagaaatcacgcctacccacacgcatacacgtgctcagtttttatatgcgtccactggcaacattcaggtgtttacacctaatcatgtgtggattgtgccgcccatgtgtgcgttatggattccggcaaatgtagagcacagtgtgatttcactgagtcacgtgaagttaaatacggcgttggttgaagtaaatgcagccgcactcatgggacaacattgctttattattcgagtaagcaacctgttgcatgagcttttaatacgtttaaatgaaattgaacgagaggaaactccaaatacagcgacctctcaagagctttcccgttctttacaaattttgatttttgaagaaatccatcgggccaatttgttgcctattcagattccgtggccgaaagacaaacgattattaaaaatttgtcaagagttattacatacgcctgacagttcaaaagatttaacagattgggccgatgatattggtgcgagttctagaactttaatgcgcatgtttcaaaaagaaacggggctgtcttatcgggcatgggtacagcaaatgcatattgcacttgccttgagtaaaatcgcgaatggcgaatctattgcccaaatttcagagtcactggggtataccaaccccagcgcgttcagtgcaatgtttaagcgacatctaggaaaaacacctcaacaatttagaagtgccgcgatgtcgctataa

SEQ ID NO: 42167 - DNA, 1323 bp, Acinetobacter baumannii
atgaaaacccctctcccagattatttggcaaatgttatagaagcctgtgacatcgataacagcggtcatctcgccgattatattcctgagttggccaatgcaaacccaaatcgattagctctagcaatgtctacggtagatggtgaaatttattcggtcggcgatgatgatgttgaattcaccatacaatcgatttctaaaccttttgtgtatgcttacgttttacaacaacttggcattgatgcagttcttgcgaaagtaggggtagagccttcgggggaagccttcaatgaaatctccttgggtaaagatggtcgtccaaaaaacccgatgattaactctggcgcaattactgtacattccttgattcaggtcaagcatggtttacatagcgcagaaattctacgccgttttatgagcgagcttgctggtcgtgaattaagttttgatgagtctgtttatgattcggaagtcaaaaccgcttaccgtaatctttcgatcggttatatgttgcgaacggtggggattttagaaactgacccagtcgatattgtgaatggttacattcgtcaatgtgcgatcatggttacagttaaagacttggtacgtatgggcagtgtacttgccaacggcggcgtcgaccctaaaactggaaagcgtttgttaaaccgatctgtagttagacaagtactcagtgttatgatgagctgtggtatgtatgatgccgcgggtgactggctttcaactgtcggtattcctgctaaaagtggtgtagcaggcggtattttgggtgtgctgccggggcaggtcagtattgctgctttttcacctcgactagatgagcacggtcatagcgttcgaggaatcgatattttagagcgattatctcgtgacatgggattacatctcatggaaggtacgccttctgcacaaacgattgtacaaagtcattaccgtacaggaaaagatgcatcgttaagtgtgtatgtgcttcgaggggtattgaaatttaccgaagctgaaatgttgttgcgtattttacaagacgagacaactgaccaaagcacaatcgtgattgatttaacccagatttcacttatccacgatgtgggtaaacgtatgttcttagaaggtgtagatcgtctgattgatgatggccatactcttgttttagtcgatcctgaacagcgcctagatcatgcgagaaccgctaaagatcgagaacttcatgtttatcatgatttcgatgatttattagaaaagcatgagatccgctctaaaaaaaagacttatagcgacatcgcggcacttctaaattgttga

SEQ ID NO: 42168 - DNA, 483 bp, Acinetobacter baumannii
atgagtgtggttttacctgtcgcgaagcgtggtgaagatattttaaaactaattgcggctcctgtttcggcaaatgagttaaacagtaattggctttatcagcttgctgatgctatgcatgcaactatgcttgagcgcaatggagtggggattgctgcaccgcaagtttatatctctaaacgcattattattgtggcttctcgaccaaatccacgctatccggatgcgcctgaaatgaatgctgtggtcatggtaaatccagaaattttagaattttcgagtgaaacgtgtttgggcgaagaaggctgcttaagtgtaccggatgagcgtggacaagttgaacgtgcagaaatggttaaggtgaaatacttaacacttcagggtgaagcagttgaaacaatttttcacggttttcctgctcgtattgttcaacacgaggtcgatcatttaaatggaatcttgtttgtagaaagaataagctaa

SEQ ID NO: 42169 - DNA, 1299 bp, Acinetobacter baumannii
atggatcaggaattaactttgcaggacgcgaactatcttaataaagaagataaacgaactcttgccctttcttcattgggtggagctttagagttttacgattttgtgatttatgtgttttacgccaaaatcatttccgacctctttttcccaagcacgcttagtccgttttgggccatgctcaatacttacggcatttttgcagcaggttatttttttaggcccttaggcggggttgtcatggcccattttggtgatttggtggggcgtaaaaaactattttcgctttctattttgctgatggcgctgcctaccctgtttatcgggattttgcccacttttgaaaatatcggatatttggcaccgctacttttattactcatgcgtgtggtgcaaggtattgcaattgggggtgaaattccagccgcgtggacatttgtatctgaacacgtgcctgaaagaaaaatcggactagcaaatggtttattaactgccggactgtctttaggaattttactaggtgcactgatgtctttatggatttcacttaattttagtgaaggacaaatccatgactgggcatggcgtattcctttcattgtgggtggtatttttggactcgttgcactttatttacggacgtatttgaaagaaacccctgtgtttaaagccatgcaggcccgtaaagaaatttctaaagaaatgcctgtaaaacaagtcttaaaaacgcataaaacagccgttgcaattggcatgttatttacatggtttttaacgggatgtgtggtggtggtgattttagccatgccaaatttgttgattggttcatttggctttgagcgcgcacagacttttgaaatgcaaagtgcagccattgtcatgcaaatggtcggctgtattttagcaggctattttgctgaccgttttggctgtggtaaagtcatgatggtcggtgcgcttgctgtggcacttacagcggcagttttttataacagtttaggtcatgcggcacattcaactatttttggtttatatatgttgttaggtctatgctcaggtactgtcggcatggtgtcgagcagtatggttaaaatgttccccgcgcctgttcgcttctctggcatttcattttcttataatttgtcttatgcaattgttggtggtatgacactgcctttagtgcattggctcagccaatatagtgatattggtgcgatgtattatattttcgcgctaaccattttggcctttgtaactgcctttgtgttttggaataagtttgaaaaaaacaggtattaa

SEQ ID NO: 42170 - DNA, 1197 bp, Acinetobacter baumannii
atgaaaaagacttcattgatcatggcattcattgcaccgcttacgctgggggtaagcgtcaatgcatttgcaaaagactcattgcttgaatggaaaagtgatgatggcacggattcattaaagttaggtggggtggttcggttaaatcaacgttatgaagattgggaagggccaaaccgtggttttggtaagctacattttgatattttcagggtagatctcaaaggtaaatttgatgatgcctatatcaatgccagttatatggttcaagaccaacagaaaacgtccattgaaaaagcatatgtcggctataacttagatgccaataacagcattgaagcaggtttagtttataagccttttacgatttatccttatccgcaaaatggctggacctatcacatcccattctttttaggttatggcaacaatattgcgccggggattaactggaattatcacaacaaagattgggatgtaaaactcggttattacccgcaaatgttagagaccaacttgcgttattcccctgagagtgcaacttatgatgacttggcaggaaatgcatttccatctcaaaaagcttatcagaatgaaaaacgtcatcagtttaatacccgaattgttcgtaagttagaaactgatttcggtaagcaagagtttggtgtatcgggtgcaattgcccagcttcataatgatattaccgataaagatggcaaatattatgcagtcggtttacatactgaaaacaactacaaacgctttaatttacaaagttcggtcattcattatcaatacgatgctaaaaatccggatggtgtaaatagtgatatgactttgatgggggcgaatggtcttacacctgcttatttcattgcttcggaaggtaccattgccagtttaaatcttgcttatacgttgccggtgaccaatatgggcaagctaaaagccattaagttttataatgactatagttatcttgataaaaaacgtgatgattggtcagattcgcaaatgaacactacaggaatgatgtttattgcttcaccatttatggtttgggcagattatacgtggggtaaaaactccaacattattggtggctcgactaactcaacgggttatacctctgcaacttcaccaaatagtgataaatggctataccgtattaactttaatatcgggtttactttctaa

SEQ ID NO: 42171 - DNA, 1641 bp, Acinetobacter baumannii
atgactgaacgtgtaaatgtaggcgaagcaatcgcaagagttttagaagcgcaccaagttgatagtatttatggtgttatttccatccacaatttacctattgccgatgcggtagggcgccgtgaaaaaatgcgctttgttgcagcacgtggtgaagcgggtgcggttactatggcagatgcacactcacgctttaaaggcttaggtgtagcgttgaccagtacaggtgctggcgctggtaatgcagtaggttcactgattgaagcaatgaatgcgggtagtcctgtattgcatttaactggtcaagttgagcgtgaatatctcgaccgtgatgcaagcttcatccatgaaaccaaagaccaacttacattcttgcgcgcatcaagcaaagcagcgttccgtatcaccagtccagacaatgctgttggcgtgattcgtgaagctattcgtgttgcaaccacagttccaatgggacctgtcagtgttgaattacccattgatgtacaagcagcagagattgatttgccacttaatcttgggccagtgaaagcacttgagttgccacaggcagagcaagctgaaattgatcttcttgtcagtgaaatcaaaaaggcaaaacgtccgattttctggattggcggtggaactttaaatagcgttgcagaagttaaagcaattgcagatttaggcattccggttgtttcatcgactcatgctcgtggggtgttgccagatgatcatccacgtagtttaggtgctttccataactcggcaggtgttgagcaattattaaaagatgctgacttgatggtggtagtgggttctcgtttacgtagtaatgaaaccaaaacctattcggttgaatttcctgaaaacattattcaggtagatgcaaacccagtagctcagcaacgtaattacaaaatccgcaacttcatttgtggcgatgccaaagatgtcttaacacgtgtgttagaacagcttcaagaaacttcaaaaatcgatgccgattacgatgctgctgtagtggctgctaaacaggctgcaattgatgcactgcgtaaacaaatcgatcagtacgctttaatttgtgatcacttacgtgcagctttacctcaagacggtatttttgtacgtgacatcaccatgtcgggtagtacatggggcagtcgtttattcccggtacaagcaccaaaccaaaacatccactcgcttgcgggggcaattggtttaggtcttgcaacagcaatcggtgcttcgattgctaaccctgacaaaaaagtaattggtttagtcggtgatggcggcttaatgctcggtattggtgagattgcaactatggtgcaagaaaacaccaatatggtcttaatgattatgaatgacggtggttatggtgtaatgcgtggcattcaaaataactactttggtggtcgtcagtatttcaatgaattacatacacctgactataaactccttggtgaatcaatgggtgtgaaaagctggaaagtcggtagtgcagatgagtttaaaacggttattcaagaggctgttgcttttgaaggaccaactgtaatcgagctcgatatgaactcgattggaccattaaacttcgcgggtccaccgcaaaagaaactgtattaa

SEQ ID NO: 42172 - DNA, 1467 bp, Acinetobacter baumannii
atggcaaaggaaatttatattgcgggtgaatggcgattaggccgtggtgcagtcattcaaagcctgtttccggcagatcagtcggtaaacgctgagctttcaacagcaacgcttgaagatgtaaatgaggcaattgaaaaagcggatcaggcttggcgtcaaccgagctggagaaacagcttgccgcatgagcgcgcacgtattctctataaagttgcagacattattgaagcgcgtgtagatgaattagcgaaattacaaacccgcgataatggaaagcctttaaccgaaactcgtggtttagtgatgagcgcggcggcaactgcgcgttatgttgctgcggcttgtgaaacgctaaacgatgagctcactactcaacgtgctccagactttatgaccatgagtgtgcatgaacctgtaggtgttgtagcagctattaccccttggaactctccaattgcgagtgaggttcaaaagcttgctccagctttggcagcaggaaatgccgtggtgttaaaaccagcagaagcaacttcactgattgctttagagcttgccaaaatttttgaagaagcaggtttaccaaaaggcttactcagtgtgttagtggggcgtggttctatcattggtgacgctattgctcagcacccattggttcgtaaaatttcttttacaggtggcacaaccacggggcgtcatttggcacacattgccgctgacaaactcattaccacttcgcttgagttaggtggtaagtcaccaactatcgttttaccagatgcagatgtcgaactggctgctaaaggtgtggcttacggtatttttagctcggcaggccaagcgtgtatcgcaggttctcgcttgtttattcatagcagtctttacgatcagtttttaacgcgtttggttgaaattactaaaggcttacgtgtgggtcatccggaacaagctggtgtgcatttagggccactggtcaatgacaaacatttgcagtcagttgatcgctatgtgcaacttgccaaaagcgaaggtggtcaggttctgattggtggtgaagcgcttacgactggtgactatgccaaaggaagctattacttacctaccattatcacgggcttaaataacagtgctcaaacctgtcaggaagaaatttttggtcctgttttagtcgttatgaaatacgacaatgagcaagatttaattgcccaagccaatgacagttgttttggtcttgccgcaggtatttggactgaaagctatcgcaaagcttggcgcatcgcacgtgccttagaagtaggaacggtatggattaatacctacaaaaaattctcgattagtgcgccgtttggtggctttaaagacagtgggattgggcgcgaaaaaggccgtttgggcattttatcgtacatgcaacaaaagagtatttatatggggctgaatgaacagcctaacccttggtgcgattaa

SEQ ID NO: 42173 - DNA, 792 bp, Acinetobacter baumannii
atgaaaaagttgatgatgattggttttggcgcaatggcagcagaagtgtatgcccacttgccccaagatctgcaactcaagtggattgtagtgccatctcgcagtattgaaaaagtgcagtcacaagtctcttctgacattcaagtgatttcagatattgagcaatgtgatggtaccccagactatgtcattgaggtggcaggtcaagcagcagtaaaagagcatgctcaaaaagttttagcgaaaggctggaccattggtctgatttcggtgggtactttggctgatagtgaatttttggttcagcttaagcaaactgccgaaaaaaatgatgcccatctgcatttactggcaggggctattgcaggtattgacggtatttctgctgctaaagaaggtggcttgcaaaaggtcacttataaaggttgtaaaagtccaaaaagctggaagggcagttatgcagagcaattggtcgatttagaccatgtttcagaacctacggtcttttttactggaactgctcgtgaagctgctatgaaatttccggccaatgccaacgttgcagcaacgattgcacttgcagggcttggaatggatgaaaccatggttgagttaactgttgatccaactatcaacaagaacaaacacaccattgtggcggaaggtggctttggacaaatgaccattgaactggtgggtgtgccgctgccaagtaacccgaaaacatcaactttggctgcgcttagcgtgattcgtgcttgtcgcaacagtgtagaagcaatacagatttaa

SEQ ID NO: 42174 - DNA, 795 bp, Acinetobacter baumannii
atgagcttccaagttgaaggaaaagttgcagttgttaccggtggctcatctgggattgggctggctgctgttgaaatactggttgcagagggtgcaaaagttgcttggtgtggtcgcgatgaagaacgtttaaatgcttctaagcactatattttagaaaaatttccacatgccaatatttttaccaaagcatgtaatgttttgcaaaaagaagaagttcagcaatttgccaaagaggtcaaactcaatttgggcaatgtggacatgcttattaacaatgctggacaaggccgtgtttcaaattttgaaaatacgcaagatgaagattggatgaaagagattgagctgaaatatttcagtgttttacatccggtacgggcttttcttgacgacttaaaacagtcggcaaatgcctcaattaccaatgtgaactcgttactggcattgcaaccggaaccacacatgattgcgacttcatctgcacgcgctgcactgttgaatttaacccattcgttggcgcatgagtttactcaatatggcgttcgtgtgaactcgattttactcggaatggtcgaatctgcgcagtggaaacgccgttatgaaacccgttcagatttaaatctgtcatgggaagagtggacaggcaatattgcaaaaaatcgtggcattcctatgcagcgcttaggccgtccagaagagcctgcacgtgctttagttttcttggcatcaccattggcatcttacaccacaggttcggcaatagatgtctcaggtggttttaacaaacatttataa

SEQ ID NO: 42175 - DNA, 825 bp, Acinetobacter baumannii
atgatgacactcattgaaaagttagcagaatttccggtgaaaacggtcaatgttcaaggccagcaacaagcctatcgggaagctggtcagggcgaataccttgtgctgttgcatggcattagctccggttctgcttcatgggtaaaccaacttgaagtgctgtctcatcattttcatgtcattgcctgggacgcaccgggctatggcaaatcagatgaacttttaacggatcaaccgaatgcaactgactacgcaaagcgtttggcagggttgttcgatgctttaaaaattgaaaaagcaatagtggtgggacactcattaggtgccttacagggcagtgcatttgctgcactttaccccgagcgagtgaaacacttggtggtcgctaacttggcgcaaggctatcaacgccacgatgaacagacacaaattcaggtttttgaaaaaagaccaaaaatgttgaaagaactcggtgctaaaggaatggcccaaagccgtggacctcatttgatttataaacaagagccacaagccttagctttagtttcagaagtgatgcagcagttgaccttacaaggtttcacacatgcatcgtacttactggcatatgacgaaatacgtaattatttaaccgatttaaaagtcccatgcacagtgattgcagggcagcaagatcaaatcactcctgcgttaggtatacaagagcttgctcaggaattgcagttggaacagcgcttcgtcatagaagatgcaggacatttaagttatgtcgaccaaccgcaagcatttaaccaaattatgttgacgattcaggaacaatcgtaa

SEQ ID NO: 42176 - DNA, 522 bp, Acinetobacter baumannii
atgactacacaacaattcgaatcgtggaaacagccggaaggcgcttctttagaagattggttaaacacacgtattgctcgctttgagactcgtaaatatgactttgaggctttgaagttccaagccgattacgacccgaaatatcgtcgtgctcaaatgcgctatatgggtacgggtgcaactggtgttgcaaatgacagcaacactgtacctgcagagaactttacgttttcgactatggtgctaccaccacagtgtgaaggccctttgcatattcaccacgacgttgaagaagttttctttatgcttcgcggcgaaattgatttgtttatcgagcacaacggcgagaaattccagacccgcttaaaagagcgtgacctgatttcaattccaccggggatctaccgtggtttatttaacccaggtcaagaagatgccttgatgtgtgtgatgttgggaacaggtaaaccaaccattcctaactatccaccagagcatccattgtctcaaatcaaacgttaa

SEQ ID NO: 42177 - DNA, 1224 bp, Acinetobacter baumannii
atgagtaatgaagaaaaaagtggattaaagcattgggtacctgcttttgtccttatggtgtgtgtagtactggcatttttcgacaagatcagtattgcggttttattttcagacccacattttcaaagctcgatgggaattgctgaagataaagccaagctcggatggctcatgacaagttttttacttgcttatggtttttcatcagtcttcctaagctttttaggcgacatttttaacccaaagaaaatgctgttctggagtgtgacctcttggggcttactcatgctttgcatgggctttaccaccagctactcaggcatgttgattttacgggttctactcggtttggcagaaggtccgctatttgctttggcatacaccattgttaagcagacttatacagaccgtcagcaggcacgtgcctcaaccatgttcttactgggtacaccgattggtgcattccttgggttcccaattacggcagccgttctggcacaccacgattggcacaccactttttttgtgatggctgcgctcacactcattgcaattttaagcattgtttttggtctgcgtaacttacagctcaagaaaactgttgagcttgaaggtgaaagtaaacgtactaacttcaaaggccatatcgccaacaccaaagtacttgtgagcaatagcgcgttctggttggtgtgcttattcaatattgccttaatgacttatttgtggggcctaaacagttgggttccttcttatctcatgcaagacaaaggattcaacctcaaagagtttggggtgtattcaagctttccattcattgccatgttaattggcgaagtggttggtgcgtttttatctgacaaattaggccgacgcgcaattcaagtatttagcggtttattactcgcgggcatcttcatgtatgtgatggtcattatgactgagccattattgattattgctgccatgtctttaagtgctatggcgtggggctttggagtagctgcggtatttgctctgcttgcccgagtaaccacctcaaatgtaggtgcgacagcgggtggaatatttaacggtttaggcaattttgcaagtgcaattgcacctgtactgatcggttacatcgtgatgcaaacacatagttttaatttgggaattaccttcttggctgcagtcgctgtcattgggtcgttgttcttggttcctcttttaaaacgttattaa

SEQ ID NO: 42178 - DNA, 1212 bp, Acinetobacter baumannii
atggaaaagattgtaattgtaggggcggggcaggctgcaggttgggcagttagtaccttacgtcaaaatggatatgtgggtgaaattcatgtggtctcaaatgaagatcacgtgttttatgagcgtccgccactgtctaagcaagtactttcaaaagaagcaagttatgaaagtttgaatctgttctctccagaacaggttcaagagttcaacattcaatggcacaaaccggaaattgcaacaaaagtcgatcgcgagcaaaagcaggttcatttagaaagtggtcagattttgccgtatgacaaattgttgattgcaacaggaagccgcgcccgtgtacccgtcaatacatggcagttcattccaaatgttgtgactttgcgaaatgtacgtgactgtgaacgtctggctgaaattttaaagaatgcaaaaaatgtggctgtgattggcggtggctggattggtttggaaatcgctgcaactgcgcgtaagcaagggaaagatgttcatatttttgaatatggcgaccgcttatgtgcaagaagtgtgagtccggaagtttctgcatttttaaaaaatatgcatgaggctcaaggcacaaaaattcatttagacagcaagagccttcacttagtggaagcaccagatcaaaaagttgaagtggtgaaccatcctcaacatagtcagttgtttgactgtgttgtagtaggtgcaggcgctgagatcgcgaaagagttaggggtacacgctggtctcgatgtgaaagatggcattgtggtgaattgttttggacaaacctcagatcaagacatttatgccgcaggtgatgtcgcgattcatccgggtttgggctattgcattcagtcttgggcaaatgcacaaaatcaggcgattgcagctgcgaaatcaatgctcggaattgaaactgaatataccgatattccttggctttggtctgatcaatatcactttaatatccagattttaggaacatatcaacctgaaaaaaccaaagaagtggtgattcgccaaggtggtgaagatcaggtgagctatttatatctggaccatgaaaatcgcttgctgaatatgattgccattaatgactcgaagttaatcaaactggcaaagcgttggatgcaagccaacaccgttttagatccaaaattattagcagatgctgaatttaatgtcatgaagttaaaaccgtaa

SEQ ID NO: 42179 - DNA, 930 bp, Acinetobacter baumannii
atgattacagggatcgagattttaaagtttggagttgaagatagagccgcttcaaacaagtttttggcagattttggtttaagtcaaagtacttcggatattgaaggcactgatctttacgagactcaaaacggtagcaagatttatctatttaattgtgatgatgagcgtttgccgactgctattgaacaaggttcaactttacgtgaagtgacttggggtgttgaaagtgctcaagaccttgaagacttggcagctcgtttggccgatgtagacggttttaaacgtactgaaaatacagttcagtgtcttgacccaaatggcatgaccattcgttttgaacaaagttttgtaaaagaagtaccagaacttaaaacggaaggtattaaccaatacggcaacattcaacgtgtgaatgcagcaagtcctgtctatgaaaaaggtcaacctgttgcgattggacatgtggtgttcttcacaccggatttagcaactactgaaaacttctatattgaaaaagtaggctttcatttatctgatgcttacaaaaatcgcggtgcattcttacgttgccgcggtgaaggttatcaccacgatttattcttacttagcgttccaaataaacctgcgggtttaaatcacgttgcatttgttgttcgtgatattcatgaggtgattggaggcggtttacatatgaaccgttcagagtggtcaacctttattggaccgggacgtcatccaatttcttctgcttatttctggtacgtcaactcaccattgggtggtgcatttgaatattacaccaacgatgattatttgaccgaagaatggcagccacgtgtagaagaacatcgtctagagcttttcaccgagtgggcgattgaaggtggtcttgatgacaaaacccgccgtcaggtgaagcctgtgtaa

SEQ ID NO: 42180 - DNA, 765 bp, Acinetobacter baumannii
atggctaatgtagcgttgttgcaaggcaaaaaagttttagtgactggtgccgcacgtggtttaggtcgagatttcgctcaagccattgccgaggcaggtgctgaagttgtgatggcagatattttatctgacctcgtgcaacaagaagcacaagcgttacagcaacaaggactcaaggcccatgcagtcactgttgaccttgccaatgcagactctattgaaaatacggttgcaaaaagcgtggaagttttaaaaggactagatggccttgtgaattgtgcggcattagcaaccaatgtcggtggaaaaaatatgattgattacgatcctgaactttgggatcgggtcatgaatattaatgtgaaaggcacatggctcatcagtaaggcttgcgttcctcatttaaagcaatcggctgcaggcaagatcattaatgttgcttccgatacagcactttggggcgcaccgaacctgatggcttatgttgcaagtaaaggtgcaattgtagccatgacgcgttcaatggcaagagagttgggacagttcaatatctgtgtcaacaccttgtcaccgggccttactctggttgaagcaactgagtatgtgccacaggaacgtcacgatttatatgtcaacggaagagcgattcaacgtcagcaacttccacaagatttaaatggaacagcattgtatctactgtcggatttgtcctcttttgtgacaggtcaaaatattccggtcaatggcggttttgtctttaactaa

SEQ ID NO: 42181 - DNA, 1068 bp, Acinetobacter baumannii
atgaacgcaatcgtatcaacttcacaaagcgctgaagaatatttagaactgggtttacgtgaccaatggcatccggttttagcaagttgggaagtcgctgctaatccggttgggattacccgtttaggtgaaaacattgtggtttggcgtgatgccgaaggtcaggttcatgcgcttgaagatcgctgtccacaccgcggtgctcgtctttcactcggctggaacttgggtgatcgagttgcttgctggtatcacggtgttgaagttcgtgctgatggtgtggttgccgatgtgccagccgttcatgaatgtccaatgactggaaccaagtgtttaaaaagctatccggtcattgaacagcatggtgcaatcttcatctggtttggtatcgatgcaaatgaacaacccgcaccgcttgagttcccagaacaactggcaagcgaagagtggagttcattcctttgccaagcagactggaaagtaaaccatcaatatgccattgataacgtgatggacccaatgcacggtacatatttgcactgtacttcacactctatggcagaaggtgaacgtaccgcagagatgaaacaccgcacaactgaaaatggttttgtttttgaaaaagaaggccaaacaggtgtgaactttgactgggttgaatatggttcgactggggcaagttggttacgcctttcaattccttaccgtaaacagtttggtccgggtggtgaattctggattgtgggttacgcaacgccaattgatgccaataatacccgtgtatttttctggcgctgccgtaaggtgagtggttggcaacgtaatgtatggcgcttcttatatcgcaatcatttagaacaattgcattgggatgtattggaacaagaccgcattattttagaaaaccttgcgccaaatgcacgtgcacgagaattcttatatcaacacgatgtagggcttgcacgtttacgccgtttaatgaaaaaagaagctgagaagcaattaaagaaaattgctgcactaaatgcatcaaaccgtatcgagatgcaggaagaagctcatggctaa

SEQ ID NO: 42182 - DNA, 300 bp, Acinetobacter baumannii
atgaagacatttaatgaaaagttggcaagctggattcatgcaacgccggcaaccgaagcaggtatcaacaatattcaagttccaggtcaatctgaattgttggtttggcaaacacgttataaagaaccgactctctacgaacaagactttgtaaagaacttgattcaggcattttctgcgggcgcaacagaattagatgaggttgtttctgcacttaatcagcaaggtttccgctgtgaatctggtgatgaatggacttctgagagctttacagaagaaatgcaacgtttaggttattga

SEQ ID NO: 42183 - DNA, 306 bp, Acinetobacter baumannii
atgagttggatctcagtttgtcagcagggtgacgttagcgaagatgagccgaaagccgtcgaagttgaagggaaaaaaattggtgttttttttgtcgatgaaaattacttcgctatcgaaaatgtttgccctcatgcgtatgccttattaacggaaggatttatcgaagatcaaactgtggaatgtccattgcacgaagcaatttttgacattcagacaggtgagctaaaaagtggacccgggtgtagaaacctatgtacgtacccagttcgtgttgaaggacaggatattcaaattcaactctag

SEQ ID NO: 42184 - DNA, 813 bp, Acinetobacter baumannii
atgagcctagagattgaagaagattcgcaagaatcagaaacaacaaaaaatgatgatcggtatttagtaccagggcttgtgcgtggtttagccatcttgcaagcatttaatcaacaagcacaagaaatgacgattacagaaattgccgaaattttggaagtgaaccgttctagtgcatttcggcttatctatacacttgaagcttgcggttacttaagaaaggcttcacaaaaaacatatgcgcttgattcaaaagttatggagcttggttttaacagtttatcaaagctttcattacttgatttatcaacgcctttaatgaaagaactacgtgaccagaccaaacttgcagtacacctgactgttttagaaggtacacacattgtttttgtaaataacgttcaatcgatgggtacgtttaccagcaatattagtttaggtactcgctggcctgcccatgctacagttattggtcaaatgttattatcagatttaccagaggcagaagtacgacaacgctatcgcaattttaatgactgggatagttactcagaacttaccccaaccagtttaaaagcgttattgcaaaaattgaattatgtaaaaactcaaaagtcgatggtgagctggggacattacaaccatgacatggctgcttgtgctgctcctattttcaaacaatcaaatggaaaaatggtggctgtcctttcagtcagttgtccaattaccacctatgatgagaagacctttaaagaagatatcgctgctctagtcatcgcaacggcagataaaatttcaaaatttatctattaa

SEQ ID NO: 42185 - DNA, 300 bp, Acinetobacter baumannii
atgttgttgagtttagatgcttataaacaacaacagtttgatcaaattgctgcaaaaattatagctgagcctgcaaaatatatagattttaattcagtatcggatttttataacgctgcttggctcaaggactttccacaagggacccaagtctctgcgacaggtttagatgatggggctgaagagttttatgccgtagtacagtttaaacagcagtacttaaagtttgatattaaagaaaatcattcaacactgagttttcagaatatgaatggtgaaacttttaagtgtaatttttaa

SEQ ID NO: 42186 - DNA, 582 bp, Acinetobacter baumannii
atgtcacctctagaaattttcgcggtcttaattagcctcattggagttggattaacggtaatccgtaatatgtggtgctggctgtttaatttctttgcttttgtcctatatgcctatttgttttacgaatttaagctttatggcgaaacgattttgcaattcttttttatggtcgtaaatttttatggcttttactattggctcaaaggaaagcagcaagatcatgacattcgaatcgagcctattgcagttcaaacagctatcattcaaatgattattgccgcggtaggtggcttagtctttggtttggtgcttaaaaactttaccgatgcagcggtgccgatgctcgactcacagcttgcagcatttagtttgcttgcaacttactggaccagccgaaaacatattgcgacatggattctttgggtatttgtcgatattgtttatgtcggcatgtttatctataaagatctgtttttaacttcagccttatacgcagcctttgtattaatggcagcttatggttggtatcaatgggaaaaggttaaaagaaagcagaacttaggtgctgggcagctttaa

SEQ ID NO: 42187 - DNA, 789 bp, Acinetobacter baumannii
atgtcaaatcaagaaggaaaagtcagccgtgaaactcgcgggcatatttttttaattggcttagatcgggcagcaaaacgtaatgcctttgatagccacatgattaaagacttatcactagcgctcaccgaatatgaaaataatgacgccctgcgctgtgcgattgtttttgctcacggtgaccattttacagctggcttagatttggttgagttacaacccaagctcgttacaggtgtttttgactttagtgaaaacgaaattaacccttggggcactgtaggccgaaagcttagtaaaccgttgatagtagcagtacaaggttattgttataccgctggtatagaattatttctcaacgcagatattgtgattgcgagtgaaaatacccaatttgctcaaatggaagttcaacgtggcatcttaccttttggcggagcaactgcacgttttactcaagccgcgggttgggccaaagccatgcgctatttgctcactggtgactctttcgatgccaaagcagcttttgacatgaacctcattacagaaatatccccagaaggtacagagcttaaacgtgccatagaacttgctgaacatatcgcgcaagctgcaccacttgctgtaaaagcgaccctcgcctctgctcgtgaggcagtcaatgaaggttacgaagtggcttttaaccaactgcaaaagcatcttcaacctttactcacaacagaagatgttcaagaaggtgtttttgccatgctgcaaaaaagacctcctgtttttaaaggtaaataa

SEQ ID NO: 42188 - DNA, 420 bp, Acinetobacter baumannii
atgaagacaaattcgttgattattgatttacgccgtcaattgccatggcataaacgctatgcttctacaacaagcacagccatgatgtgggcggcttggttgttgttgtggcgtccattcgtgtttatctgggtattggcagagctgcaaaaaactcatttagtacatcgtttgttcagtgcattcggtgtaggtattgaacatggtattacagcgctgattgcttgtgcagtcgggttgctactctggagtcatgtattgcctgaacgccgtgtagaaggtagtgaacttaacatgaaacagacagatgactatgcgcgctattttgatttgcctgtgcaagaaattgagcagggccgtagccaaaaaattacggtcgttcaccataatgaatttggtaaaatcattagagttgaataa

SEQ ID NO: 42189 - DNA, 1260 bp, Acinetobacter baumannii
atgacaatctttgctgctatatggtcgcatgccttaaaattcgttttctattatccattattcatgtcgtatttatggatgattggcgcgatcattttctattggaaggaacgtaaagctccgccttatgatcagccagctccattagaaagctatcctaaagttgctgtgcttattccttgttttaatgaaggggataatgcagaggaaacgattactcatgctttaaaattggattatcctcattttgaagtcattgcgattaatgatggcagttcggataatacaggtgaagtgctggatcggttagctgaacaaaatgaaaaactccgtgttgttcatcttgcacaaaaccaaggtaaagccatggggttgcaagctggaagcttaatgaccgatgccgagtttttaattggtattgatggtgatgctttacttgacccgcatgcagcaaagtggatggttcgtcattttcttcaaaatccgactgttgcagccgtgacgggtaacccgcgtatccgtacccgttcaactttattaggtcgtattcaggttggtgagttttcttcgattgtcggcatgattaaacgtgctcagcgtacctttggccgtttatttaccgtatctggtgttattaccgcttttcgtaagagcgctgttcaccaagtggactattggtcacccaatatgttgactgaagacatcgatattacttggaaattgcaacgtgccggctgggacattcgttttgaaccgaatgccttggtgtggattttaatgcctgaaactttaaacggattgtggaaacaacgtttacgttgggcaatgggtggagcacaggtattaattaaaaatattgatgtgttcaccaaaccaaaattgaattttttatggcctttaatgtttgagctttgcttaactttagtctggtcatatttaatgctggcgatggctttgttgtggttggtacattttattttaccggtccctgcattagccgttgtgagctctccatttttaccgtatggtagcggtattttattgggggcaacctgtctcattcagtttgctttaagcaaatggatggatagtcgttatgaaccgcatctaggaaaaaactatttctggatgatctggtatccattggtcttttggctaatcaccatctcggcaactattgtggcatttccaaaagtcttacgacgtggagatgagaaacgtgcgcgttgggtgagcccggatcggggcattcgtggatga

SEQ ID NO: 42190 - DNA, 1995 bp, Acinetobacter baumannii
atgattacccgctttgcatctcctttgttgaacctcacgcttggcttggctctagcaggcttgtcaggtatggcattagctaaccctcctaaaatagatgcttcaacacttacggtcattgggtatcatgaaattaccgatactaaaaatgccttaattcctcaatatgcggtcaccactcaacaatttactgagcatgtcgattggttgcaaaaaaatggcttccattttattaccgtagaccagttaatccgtgctcatcagggcaaggcagcacttccaaccaagccagttttattaactgtagatgatggttatcagtctttctaccaaaatgcatatcctgttattaaggctaaaaaaatcccagtggtacttgcggtagtgggttcatggttagagccaaaagcagggcagaaagtcgatttttcgggtgaagaaattccacgtgataaaatcttaagctggggtgagctcaaagaaatgcaagatagcgggtttgttgaaattgcaagccatagctatcatttacaccgcggtattacaggcaacccgcaagggaactctgaaccggcggcaacgacacgtttttatgatgtaaaaactaaaacttatgaaaatgacagccaatatcaggctcgtatttataatgatttaaaaaagaataatcagctacttaaagagcatggtatacgttcaccacgtattatggtgtggccatatggtcgctataatatgcaaacggtccaaattgctaaaaagcttggtatgccaattaccatcacgcttgatgatggcgcagaccatgcgaaacaatctctacaaaatatgagccgtattttggtagagggcggaatgagtactaatgatttggctcaagagattaagaaccgtgaattaaacttaacggataacaaccgcccgcaaaaaatcatgcatattgatctcgactatatttatgatccggatccgcaacaacaagaacgaaatttgggtcacttgttagatcgaattaatgcgatgggtgtaaatacagtttatttgcaggcattttcagatccggatgcgaatggttctgccgatatggtatatttcccgaaccgtcatatcccaatgcgtgcggacttgtttaaccgtgtagcatggcaaattcaaacccgtacgcctgtaagccgtatttatgcttggatgcctttattggcctgggaattaccaaaaactgatcctgtatcaaaagatttagtcgtgacagagcaggcaaaagctggtgaacacttaaatatggggtatatccgtttaagtccgttctcacctcaggcacgccaaactattcgtgagatttatcaagatttggccaagtcagcatctttcaatggaattttattccatgacgatgtcacattatctgattatgaagatgcaagcccagatgcattaaaagcttatgcgaaacaaggcttatcaacaaatttagcaaaaatccgtgaaaacgatcaagatttgcaaaaatggactgcatataagacaaaatatctagatgattttgcaatgcaacttgttgaagacgtgcgacaatatgaaccgttcttgcttacagctcgtaacttatacgcgcaagttgccttaaaaccatatgcggaaaactggtattcacaatcgcttgaagagtcattaagacgttatgattttacggctattatggcaatgccttatatggagcaggtcgataacgccgatcaattttataaagacatgattgatcgcgtgaaaaaatatccaaatggcattaagaaaacagtttttgagctacaagcaacaaactggcgcaacaacgaaaaggtaccatcaactgaaatggcagcaacaattcactcactctatcagcaaggtgcaatgcacgttgcatactatccagatgacccaatcaaagatcatccggacgtgaacgtgatgcataaagcatttgctgaaaaatcatctcgtcttgtgccatag

SEQ ID NO: 42191 - DNA, 342 bp, Acinetobacter baumannii
atgatcactgaattagaaattatcgatttaaaagtaggcgaaggtaaagaagcggttaaaggtgccttaattacgactcactatacaggttggttagaagacggcactaaattcgactcttcccttgaccgcggaaattatttcgagtgtgtcattggtacaggccgtgtgattaaaggttgggaccaaggcattatgggaatgaaagttggcggaaaacgtaaacttatggttcctgctcatttggcttatggcgaacgcaaaatgggtaaaattattccggcaaactcaaatttgatttttgaaattgaattatttgatgtaaaaactcgcgatgattga

SEQ ID NO: 42192 - DNA, 531 bp, Acinetobacter baumannii
atggcgcttaaagcaacaatttataaagcagatctgaatattgccaatatggatgaccatatttatggcgattatcaactgacacttgccttacatccttctgaaactttagaacgattaatggttcgtgtcatggcttttgcacgtttcgcaagtgatagccttgagtttaccaaagacctttttgaaaccgatgagcctgcactttggcaaaaagacttaacaggacagttagaaacttggattgaagttggtttaccgtctgaagataaagtgaaaaaagccagtgcccgttgtaaaactgtggcaattgtcgcttatggttcacaagttgaagattggtggaagagaaacagtaaaattaaaacattgagtaatgttcaagtttggcagctagcacctgaaagtacagcagagttagagcagctttgtgagcgtaccatgcagcttcagttaaatgttatggacaatgaatggactttgttaagtgacaagggccaagcgaatgttgtgtggacccaattacagtaa

SEQ ID NO: 42193 - DNA, 1263 bp, Acinetobacter baumannii
atgtggcaaaaacttaaacgtagtttatttctacaagtcctctgcgctctcttcctcggtattgcagtaggtcttgcttttcatgatttctccctagctttaaaacctcttggtgatggttttatttctctcattaaaatgttgattgccccgattgtattctgtgtagtggtactgggaatctatggtgcaaacgatattaaaaaaatgggcaaagtcggtgcaaaaacgattctttattttgaagtggtcacgagtattgctttaattttgggaattattgttgcttatgtctttaaaccgggcgtcggtatgaatatcgatattactcatttagatgctaaagatttaagtacctataccgaacgtgctcatgacatgcatacaggttcggaatttctactcaatattattcccaaaaccttcactgccgcttttgctaacggcgatattttacaagttttactcatcgctattttatttggcatttccctactgttaattcctaaacatttagcagagttggtccgtcaagcgcttgaagctttttcggaagtcttctttaaaattatgggactcattattcgcttagcaccgattggtgtatttggttcagttgcttataccactgcaaaatttggattagattcactcctgcaactcggttatttagttttactcttttatgtgacttgcattttatttgttgtcattattttgggttcaattttaaaactcaccggactgaatatctttaaatttgtcggctattttaaagatgaactcgctattgttttagggaccgcctcttctgattctgttttaccccaaatcatgaaaaagcttaaaaacttgggaattaaagattcaacagtcggtctggttattcctaccggttattcttttaatttagatggcttttcaatttatttaacattaggcgtgatctttattgcacaggcctgcaatattaatctctccatgcatgacttactggctattttattggtttcgcttattacatcgaaaggcgcacacggcataccggggtcagccttagtgattcttgctgcaacactttccgtaattccaagtttacctgcaattggtttggtacttttactgtctgtagactggtttatcggaattatccgtgcctgcaccaacttaattggtaactgtgtagcgaccgtagtcattgcccattgggaaaaagacatcgatcatgcacaagcgaaacaagtacttaatataaaaaattaa

SEQ ID NO: 42194 - DNA, 999 bp, Acinetobacter baumannii
gtgaaactgattgcccaaaaaactgttcctacccatattatttcagggtttttaggggcagggaaaacgacattattgcaacatttattaagtcagaaaccgaaagatgaagtgtgggctgtcttaatgaatgaatttgggcaaatcggagtcgatcaacaactcctacctcaagatcaaggttatgcagtcaaagaactattgggcggctgtttatgttgtagtagccaacttcctatgcatattgctttggctcgcttgttaagtgaacaaaagccagaccgactctttattgaacctacagggcttggacatccttcgcaattatttgatcagttaacggaaccacattggcaaaacagcttagctatgcgtgcactagtgactgtggttgatggtagtcgtctgcatgacaccaattgggtcaagcaaaacctatatgaagaccaattaaaagctgcacagattgtggtggtctctcatgccgataccatgacttttgaagatgaacaggcacttgttgagcttaaagaagaataccaaccttatcagcaacaatggctaaagactgaacatggtcaacttgaactggcgcaaattgatgtgcctgcgcgtttaactgaacggtctatacaacctttacttaagctgcaaaagcaaatgaccgaagccgaagttgtaaaagaaattcaccaactgccttatcattatgttgagacggcgcagggttatatggtcgcgggttggaaatttcctaagcgttggaaatttgagttttatgctttgctcgatgtgttgtgtgcacaacaagactggctacgtattaagggaatttttaatacagatcaggggtggaagacctttaactttaatcctgagcagtttaactataagtctggtgaagagggcattgataaccgcattgaaatgattagccaacatgaacatgactggctggcatttgaaactgaactattagcttgcagaattgaacaatag

SEQ ID NO: 42195 - DNA, 201 bp, Acinetobacter baumannii
atgaaattagctaaaactttactcgctactacactagctttaactgctgcttcaactttcgctgcttctaagcacgaccaagcacataacactgctggtgaagaaaaagttgttgtttcaactcaagagcaagcaaacactgcaaatgctgcttctgacgctgtaggttctgcttctgaagctgctcctgcaactcgttaa

SEQ ID NO: 42196 - DNA, 516 bp, Acinetobacter baumannii
atgcctacattagatgaaatgacaaccgtaactgacgatcagtcagaattaaccatgtcagttttaatgacaccggacatggcaaatttttcaggtaatgttcatggtggaacaattctaaagttgctagaccaagtggcctatgcttgtgcaagtcgttattcaggcagctatgtcgtaacgttgtctgtagacaaagtaaattttaaagaaccaatttatgtgggtgaactcgttacatttttagcgagtgtgaaccatgtgggacgtacttcaatggaagtgggtatccgtgtggaagctcaaaatattcaaaagcgtaccgttcgtcataccaatagctgttatttcactatggttgcggttgatgagcatggtaaaccacgcgaagtgcctaaattaaatttagataccgagtggaaacgttgccgatttgaagcggctgaacatcgtaaggtgttgcgcctacaagagaatcataacccttcttgcagcatgtataagaaaacttcttaa

SEQ ID NO: 42197 - DNA, 615 bp, Acinetobacter baumannii
atggtttcaccatatctgcattcttttgctttatttttctctttgctcaatccttttttaatgagcatttatatgattggcctcatccgccattcagaaaccaaggtatttaacaaagccttaattcaggggagcttgattgcttatatcgtctttatgctgtttgcatggggcggtgaagcaatctttagtaaatacctgaatgtacgctttgaagctttccagatttttggtggtcttatctttttggtgattggttaccgctatgtgtttcagggggcagataccattggtgaaatgcgcggtgcaccagaacatttggctggcaccatcgctatgccttttatgattgggccgggtaccattagtgcagctgtggtgacaggtattgaaatgtcgattggtgctgcggcacttgtgatcgggtttaccatgtttttaacatgcagtattttgatcttgatgaaattttcacatgatcatttacgttacaaacatgcaaaatacatcgatcgctatttcgatattgtcgggcgtttatctgctttattaatcggtacgattgctgtcgatatgattattaatggtgttaccggactgatccataaagtatag

SEQ ID NO: 42198 - DNA, 2067 bp, Acinetobacter baumannii
atggcaacagataatccaagagcagttgatgatttaacattatctaaatctaaaaaagacccgcttaaccgtgtggttttttatatttcagctctaatcattttaatcttttctctcgttacttttttatttaacgatttcgcaaatcgaaccattaacaccgtccttgcgtgggtaacgtcaacctttggctggtactatttactggctgcaacgctgtatatggtgtttgtaattttcattgcctgttcacgctatggtgagattaaacttggccctaaacattcaaagcctgagtttagtttactgagttggtctgccatgctgttttcggcaggtattggtatcgatttaatgttcttctcggtggctgagccattatctcattatatgcagccgcctgttggcgtaggccagacctatgaagcggcacgccaaagtatggtgtggacgctgtttcactatggtttgaccggttggtgtatgtatgccttgattggtatggcacttggttatttcagttatcgctataacttgccgcttaccattcgttctgcactttacccaatttttggaaacagaattaatggggccatcggccatagtgtagatactgctgccgtcatcgggacaatttttggtattgcgaccacctgcgggattggcgtggtacagctgaactatggtttacatgttttattaggactgccagagaatatctggatgcagtttgcactcattgccattgcagtcggtattagtattatttctgtgacatctggggtgaataaaggccttcggattttgtctgaaatcaatatttatgtatcaattggtcttttactgtttattttgttcttgggcaataccgagtttttactcaatgcgctggtacaaaatattggtgattatttaactcgcttcccaaccttagccttacaaagttttgcttttgagcaacctaaagattggatgagcagttggaccttgttcttctgggcatggtggattgcttggtcgccatttgtaggtttgtttttggcccgtatttctcgaggccgtactattcgtgagtttgtgtgcgggactttaattattcctctgttatttaccttaacgtggttatccatttttggtaatagcgcattgcacagtgttatttttgaaggcaaccagactttagctgcaacggtattatctaatccggcacatggtttttatgacctgttagcgcagtacccgggttttacctttattgcttcagtcgcaacagtgacgggccttttattctatgtgacttctgccgattcgggggcattggttttaggtaacttcacgaccaagcttacccatattgataatgatgcgccgcgttggttaagcgtgttttgggcaattgccattgggctattaacgcttgctatgctgatgaccaacgggattaccgctttacagaacgcaaccatcattatgggactgccgtttagtttcgtgatgttccttgtcatggcggggctttataagtcgctcagacttgaagactacaggcatgccagtcgaagtatgaacgcggcacctgtggtgggtaacgtcgacattctcaattggaaacagcgtttgactcgggttatgcatcatccgggaacgactgaaaccagacgaatgctcgataccgtttgcaaacctgccgttcaagctgttgccgatgaactcattaagcaaggtatgaacgtagatgtgcagcaaacaccacttgaagatgaagaggcgctatatcatctcgatatcactattcatttggaagaagagcaaaacttcgtttatcagatttggcctgttcgttatagcgcacctaactttagtcagcgtgtaaaacgaggcaaacagttctattaccgtctcgaaacctatctttatgaaggttctcaagacaacgaccttgttggttacagtaaagaacaggttattaatgacattttagataaatatgaaagacatatgacgttcttacatattaatcgtattagccctgggaaccgtccattattcccagatccacaagcttaa

SEQ ID NO: 42199 - DNA, 1623 bp, Acinetobacter baumannii
atggtgttgaaaagtgatggatattcttcagaccatattcggttaaatcgtttcgtattttggagttcggcagtcagtatcggcatttttggcctattatttgtgctgtttccagaaaaaagtcagttttggctgacctatgtgcaagagcaggtaaaccactttttcgggtggtattacatgttggtgattgtgctgtgtttaggctttgtggcttggcttgccttctcaaaagtgggacagattcctttaggaaaagaccacgacaaacctgagtttggctatttggcttggacctcaatgctgttttcggcaggtattggtatcgcgctactttattatggtgttgctgaacctgttgaccattttctaagaccgccagaaggtgaggcaggtactattcaggccgcccgtaatgccatgacctatagctttttgcactggggtattcatggctgggtgctttatgccttgctgggtgtgacattaggttattttgcctttagacaagatttaccactcgcactacgctcggcactctatccaatttttggagagcgtgttcatggtctggtaggtgattttgtcgatggctttggtattttagcaaccgtaatttctttggtgaccaacttaggtattggtgctttggtattggtttcaggcatttgttatttaattcctgaaattcctgataactctgcaactttaattactgcagttttaatcatgatgtttgtggcgacagtcactacagtgatcgggattgaaaaaggcttggcatggttatcacggattaatttacgtttgctctatgctttacttttatttgtatttttaacaggaccgacgaaccatttgttaaatggtcttgtgcaaaatacgggcgattaccttaataattttatgggtaaaagttttgatatgtatttatacaatcaaaaagccagtggctggttgggttcatggactgtgttttattgggcatggtggattgcttgggcaccttttgtaggaatgtttattgcccgcatttccaaaggccgaactattcgagaagtggttttgggggtatgtctcattccattaggttttaccttggcttggatctcgatttttggaaatactgcaattcatttaattctcaatcaaaaacagaaagttttaggtgatatggttttaagtgaccctgcgttgtcattattcaaattactcgaatatctcccgtttaatccgtatattgccgggattgttgttgtaatttgtttcgttttatttttgacaccggttgggtctggtacactaatgatcgccaatttgtcctcgaaagggggcaccagtgatagtgattcaccgatctggttacgcatcttttggtctgtggtcattaccattgtaagtatcggcttattattagcaggtagttttaactccatgcaaagtgcagtggtgttatgtggtttaccattttctgtgattattttgctttatatgtttggtctagccaaagccttaaagcaagatgattttgacccgaatgttgcgaaaaagcagttagctatttcaaaagacatttctattccatcgaattgtgaccagagcaaagtgaccgaggttttataa

SEQ ID NO: 42200 - DNA, 624 bp, Acinetobacter baumannii
atgacaaaacgcagagtaaaaccagagcatgtgcgccgtgaagaaattatgaacgctgcactcgacgtaatttatgaagtggggttatccaataccaccattgcacaaattgcaaaaaaagccgagttgtcgaccggtattgtcagccattattttggcgacaaacaagggttaataaatacctgtatgcaagaaatgctcaatgttttgcgtcggaaaaccgaacagtacagagcagaagcagattcgcatccggaaagccagattaaggcaattattgactctaactttgacattagtcaggtaaatgaaaaagcaatgcgggtctggttagacttttggtctgcaagcatgcatgtaccggacctgagccgtttgcaaaagattaatgatcaacgcctgtattccaacttgaagttttattttctcaagttaatggatgaacaacaggccagtgttgccgcaagaggtctggcagcattgattgatggattatggctacgtggcagtttaagccgtcacaatgaatttgacagcgaactggcccgttccattgcttacgattatgtaaaaacgcaattgcaatttgcgaacaagcctttgcaggagagacaaaatgagtga

SEQ ID NO: 42201 - DNA, 1473 bp, Acinetobacter baumannii
atgagtgatgtacaagttcatcaattgtatatccatggacgctacgttgaagcaaccagtggtaaaacatttaatagtattaaccctgccaacggcgaaattatcgcgactcttcaacaggcatctgaacaagatattgaagctgctgtaaaaagtgcccaacaaggacaaaaaatctgggcagccatgaccgctatggagcgttcacgtattttacgccgtgctgtcgatattctccgtgaacgtaatgatgagcttgcccgtcttgaaacactcgacactggtaaagcctacagcgaaacatctaccgtcgatattgtgactggtgcagatgtactcgaatactacgcaggacttgcaacagctattcagggcgaacaagttccgcttcgcgaatcaagtttcttttatacacgccgtgaacctttaggcgtagttgcaggtattggtgcctggaactatccaatccaaatcgctttatggaaatctgcccctgcccttgctgctggcaatgccatgattttcaagccaagcgaaacaactccacttactgcattaaaacttgcagaaatctatacagaagctggtttaccagacggcgtatttaacgtggtacaaggtgctggtcgtgaaatcggtcaatggctcacagaacatcctgtgattgaaaaaatctcattcacgggtggcgtagagactggcaaaaaagtgatggcaagcgctgctggctctacactaaaagaagtgactatggagcttggtgggaagtcgccactcattatttgtgaagatgctgaccttaaccgtgccgcagacattgcagtcatggcgaacttctttagttcaggtcaggtatgtactaacggtacacgcgtatttgttccaaaatcacttttagttgactttgaaaaagccgttgtagagcgtgtaaaacgtattcgcattggcgacccaatggctgaagacacaaacttcggtccgctcactagcttccctcatatggaaaaagtgttgtctttcattgagtcaggcaaacaacaaggcgctaaagtattaatcggtggtggtcgtgcgaccgaaggcgaacttgccaaaggcgcttatgtactaccgactgtatttagcgactgcactgaccagatggcgattgttcaagaagaaatttttggacctgtcatgagcatcttaagctatgaaaccgaagaagaagtgattcaacgtgccaacgacacgacctttggtttagctgccggtgtggtcactcaagatattagccgcgctcatcgcattattcaccaaattgaagctggtatttgctggattaacacttggggtgaatcacctgccgaaatgccagtcggtggctacaagcaatctggtgtgggccgcgaaaatggcttaaccacgcttgggcactatacccgtatcaaatctattcaagttgaacttggcgattatcaaagcattttttaa

SEQ ID NO: 42202 - DNA, 1659 bp, Acinetobacter baumannii
atgaatattaaagaatatgattacattattattggcgcaggatctgccggaaatgtactcgctgcgcgtcttactgaagacaaagataccaccgttttattgctagaagcaggtggaccagattatcgcttggatttccgtacacaaatgccggcagctttggcctaccctcttcaaggtcgtcgctataactgggcttatttaactgacccagagccacacatgaacaaccgtcgtatggagtgtggtcgtggtaaaggcttaggtggctcatctttaattaatggtatgtgctatatccgtggtaacgcaatggatttagaacaatgggcaacccataaaggccttgaaaactggacttatgccgactgtttgccttactacaaaaaagccgagactcgtgacattggtggcaacgactatcatggtgatagcggccctgtatcagtggctacaccaaaaaatggcaacaacgtgctattccatgccatggttgaagcaggtgtacaggcaggttacccacgtactgacgacttaaatggataccaacaagaaggttttggtccaatggaccgtaccgttacgcctaaaggccgtcgttcaagtaccgcacgtggttatttggatatggcaaaaggtcgtccaaacctgactattttaactcatgcgacgaccaacaaaatcttgtttaatcaaaagcaagcaattggtgttgaatacattattggtgctgatcaaaacaacttgcaacgtgccttggttaaacgtgaagtattactgtgtgcaggcgcaattgcgtcaccgcaaattttacagcgctcaggcgtaggtcaaagtaccttcttaaaatcaatggacattgatgtggttcatgatttgccgggcgtgggtgaaaacttgcaagatcacttggaaatgtacttacagtataaatgtaagcaacccgtttctttataccctgctttaaaatggtataaccaacctgccattggtgccgaatggttattcaatggtacaggtattggtgcaagtaaccagtttgaagctggtggatttatccgtagttcggatgaatttaagtggccaaacattcaataccacttcttgccagtagctattaactacaacggtagtaatgcagtaaaagaacatggcttccaagcacacgtgggttcaatgcgttcgccttcacgcggtcgtatcaaacttaaatcgaaagacccgtttgcgcatccaagtatcttgtttaactacatgtcgactgaacaagactggcgtgagttccgtgatgcaatccgcatcacgcgtgaaatcatgcatcaacctgcgcttgacccatatcgtggtgatgaaattagcccgggcaaacatttgcagacagatgcagagcttgatgactttgttcgtaatcatgcagaaacagcttaccacccgtcttgtagctgtaagatgggcgaagacgaaatggctgttgtagatggtcaaggccgtgtacacggtatgaatggtttgcgtgtagttgatgcctcaattatgccgctgattattaccggtaacttaaatgcaaccaccattatgattgccgagaaaattgcagaccaaattcgtggacgcgaagcgttaccacgttcgactgcaccattctatgtagcatcataa

SEQ ID NO: 42203 - DNA, 1641 bp, Acinetobacter baumannii
atgaaaaagtttttgaaataccttctggtattaatcattcttattttaattgcgggtattgttttcttgtttagaccgattgcgtcaaaacaagtacaaactgcaaaagatgagccagttgttgatgctgttcttgttggcggcggtatcatgagtgccactctcggtacttatttcactgagcttgaaccgaattggcaaattcgtatgtttgagcgtcttgaccaagttgctcaagaaagttcaaacggctttaacaatgccggaacaggccactctggctttatggaaatgaactataccgaagagaaaaacggtaagatggaaattgccaaagctgaaaaagttgcttctcagttcgaagttgctaaacagttctggtcatatcaggtaaaacaaggcgttttagctgaaccaaaaacattcattaacccagttccacacattgctttcgtttggggcgataacgttaaattcttagaaaaacgttatgctgccatgattcaaagcccgcttttcaaaggcatgaaatttactgaagacccagctgtgattaaacaatggacgcctttagtcatgaccgatcgtgatccaactcaaaaagttgcagcgactcgtatggaagttggttctgacgtgaactatggttcaatcactaaacaattagtgaatcacttaaaccaaaaccctaacttcaaattacagacttcaactgaagtgactggcatcagccaaaatgatgacaaaacttggacggtgtctttcaaaaatttgaaaactggtaaaacagaccacgttaaaacgcgttttgtatttatcggtgcaggtggcgccgcggttaaattattgcaacttactggtttaccagaagcgaaacaatatgctggcttccctgtaggtggtgagttcttaattactgacaacccagcaattactgctcagcacacagcgaaagtatatggtcgtgcggaacttggtgcgcctccaatgtctgtaccacatattgatacacgttatatcgacggtaaaaaatatgtattgtttggaccatttgcaacgtattcaaacaagttcctaaaaaatggttctcaacttgacttacttgcttcaacaaataaaagcaatgttttaccaatgaccactgttggcttggagaaccttgatcttgttaaatacttggtgagccaagtgatgatgtcagatgaagaccgtctcaatgaacttcgtaaatactacccagatgcgaaagctgaagactggcgtttaagccaaggtggtcaacgtgttcagatcatcaaaaaagaaccgggtaaacctgcaacacttcaattcggtacagaaatctttgcgtctaaagatggtgctgtaactgcattgttaggtgcgtctccgggtgcttcgacttctccatacatcatgcttaacttgcttgaaaaagctttccctcagcaaactgaaggtaagtggaaccagaagcttcatgaaattgtggtttcttataaacaagacttaagcaaagaccctgtgttactcgacaaagttcgtcagtacacaagctctacacttggcttgaactatacatctccgttcaaagctgcaaacgatgaaactgctgctgcccctgttgcaaaagcaaactaa

SEQ ID NO: 42204 - DNA, 471 bp, Acinetobacter baumannii
atgacgcctttaaaatcatcacctcgcctcttgtcattttgttttaagctcgtacttgttttgctactggcttatcttttgttaagtgggttttatatgtggatgattggcggtacagccatttacgtcagctcagccgtgttatttgtcattactgcctattcttttaagctcggtaaatatcaaaaactgtgttctgttttaaatgtgctcatgagtgcactcgcgttatatttcagcacggctcatctatttttctcccctatccagttctttatatttttacctgcgctattttttgttgtgttggcttttactcaagtaagtaaagttcgtagtttatctaaagtactcatattaattagtttattgatttggtcaggcgtacattttacgcagcttgaacaactcaaagcgtattatcaaacacagcatactggtgaaagctggcagcaatacggcgcgctataa

SEQ ID NO: 42205 - DNA, 879 bp, Acinetobacter baumannii
atgaaaattttagatggcggtttaggccgtgaattggctcgccgtggcgctccgtttcgtcaaccagagtggtctgcgcttgcactcattgaagcacctgaaacagtaaaagaagtccacctcgactttatcaacgctggtgcagaagtcattacaaccaataactatgcggttgtgccatttcatattggtcaagaacgttttgaaactgatggcgtgcgtttaattaaagttgcgattgaacaagcaaaaaatgcagttaaagaaagcggcaaaaatgtcaaaatcgcaggctgcttaccgcctttatttggttcttaccgtgcagacttgttccaaccggaacaggctaaaaatcttgctgagccaatcattaatacattggcaccagaggtagatttctggctcgctgaaactcaatcatgcttaaaagaagttgaaacagttcatgcgttattgccacaagatggtaaagactattgggtgtcatttacgctgcaagatgagattaaacaagaacaagctttacttcgttctggcgaaaatatgcaacaagtagctgactttataaagcagtcaaatgccaaagcagtattgtttaactgctgccaacctgaagtgatcttgcaagcaattaatgaaattaaaggactcattccagagtctgtgcaaattggtgcttatgccaacgcattcccaccgcaagatgaaagcgctactgctaacgatggtctcgatgaaattcgtaaagacttagacgctccagcttatcttgcttttgccaaacaatggcagcaagcaggtgcaagtttagtgggcggttgctgtggtattggaccagaacacattgctgaactttctcaattttttaaagaataa

SEQ ID NO: 42206 - DNA, 1335 bp, Acinetobacter baumannii
atgtctgctgccaaaatcggattattgtctcttacagcgctggtctttagttctatggtggggtcaggcgtatttagcctcccccaaaatatggctcaagttgccaacggctctgcccttcttgttgcatggctcattactggggtcggcattattttcttggctctctcattgttgcatttaacccgtcaacgaccagatctagatggcggtatttataactatgcacgcgaaggctttggagacctgatcgggttttgctcggcgtggggttactggttgtgtactaccattggtattgtcggttatgtagtgattgccttttcaggcgtcggcatgtttaccgacagcaaagaccacgttatttttggtgaaggtaatacgctctactcactgattggatcaagcatttttgtatggctggtgcactggttagtaagccgaggtattaaggaagctgcaattgtgaatttactggcaaccattgccaaaattattccaatggtggtctttatcttctttacttttattgcctttaagtttgatttattcaaactcaacttaaatgacttctctttaaaagttcccctttggcagcaagtaaaagacctgatgctcattaccctttgggtatttaccggtattgaaggtgcagtggttttatcatcacgtgcaaaaaaccgtcatgacattggcaaagcgaccattttaggtgttttactggcattaagtttttacgtcatggtcacagtattagcttatggtgtggtgagccgtgaagcgcttgcaggcatgcacaacccatctatggcgaccattttgcagcaactcatcggtctaccgggtaccatcattattactatcggcttgattatttcagtttcatcgtcttatttaagctggacgttatttgccactgaaattccatatttagctgcaaaaaatggtgctttcccgaaactatttttaaagaataaccaaaataatgtgccgatttcatcactatggctaactactattgtggtgcaaggttctttgattgccgtgtatttttttaataaaaactacactcagcttttattgatttcatcggtaatgattttgctaccttattttctggtatcggctttttatcttaaagaatctattcgccacaaacgcacgccacatattgccattgcaagtgtcgcttcaatctatgcactttggttgctctatgcagcaggtttagacttacttctgttgtctggtgtgttgtatttggtgggcttggttattttttcaatcagctactttgagcataaaaaatcgctcaaacaaaaccagcttaattaa

SEQ ID NO: 42207 - DNA, 1914 bp, Acinetobacter baumannii
atgacaaagtctggccattatttagtgcttgcaataatgggactgctgagcggttgtcaggtcattcatttaaaagaaagtaacttaagcagtgctttaaaaagtaaaaatgaaagcattttgaccgacgatactttaagtcatcaaacccaaaacttgctgtatttggtcaaagaaagtgaaacgtcttgtctgcaaaacttcaatgtttgtttaaataaaattcagggattgtctgaaaatagcagccgagaagaacgttatgcggcgctgagtgaaatttatttggcaaaagctttagatgttgggcgtagtagccagtgcaatgccactcttaaaagtaacagttgtgttgagcaagagcttgcgttgtttgataaaagcttgcgctatagctatgtctatttgtttgattctgaagagtcaccttttgatcgggtatttgaccatcgccaaaatcaggtacgtatcttttataacgtcgctttgtcgaagctcatgaccacgtattttaattatttaaatacgcttcatttcccacctttactaaaagcagatgggcatgagtaccacgttaactttgatcatgctgtagatgtacagcatattgaagtcgatacctttcgctctagctataacatgaacttttcagggtttaataccgtcaaccgtaaggatggtttaggtgcggaatttattgtgggacgtaaggagcatgatgtaaatcatggcttcatcttagaccccgataatttttatgctcaccagagtaatcccaatattcatttaccacgcttctttccagtcacggctattgcttacccaaaacaaaaggccacagccgatcaggtcattgatggggcagagttagaaattgcgatgttcgatccctacaggcaagaccgtgtaaaagttgaaggtgtggattatccactcactgctaactattcggcgccttatgggctatggttatcgaaatataatttaggtgcagcaggctattggtctttaattaataaagaagccaatttgattatgccgcatttatatatgctggaaccctttaaccccaataagaaaattattgtgtttattcatggcttggcgagcagcccagaggcatgggtgagcctaaccaatgacattatgggtgatgccgaattaagacaaaactaccaagtttggcaggtattttattcaaccaatatgccaatttttgaaagtcgttttcagatttattctttgctgaatcaagcttttcaaaatgttgctaaagacagttatgccgcacatgatgccgtattggttggacatagtatgggcggagtgattagccgcttgctagtaagcgatgcagatgtttctgatttagccatgcaaaaaatgaatgaagcacagctaaagcgtttaaaagaaaatccggttattcgtgagcgttttcagttcaaagatttgccctattttaagcgggttgtttttgtttcggcgccgcatcatggtactgactatgctgaccgatggtttacccaaattgctcgccgtattattcgcttacctgccgacttttttattgcggtcgaaatgcgagatgagaaaaataccaaactcagaaaaggcttaattgaaaatggagcgagtaatttaagtcgctcttctaactttatgcagttgacccaagccattcaaccctcgtccaacgtggtctatcactcaattatgggcaacataaatggtacgacagataagtcaaaaatgagcgatgggattgtgccgtatcaaagttcacatttgggtggggagcagtcggagctgattattaaaggtgggcattcgattcaaactagccctgaggcaattttagaattacgccgtattttacgattgcatttaaagcagtcacagccttcaaaatag

SEQ ID NO: 42208 - DNA, 537 bp, Acinetobacter baumannii
gtgaagggtggtgccggtttatggattaaacttgcggctattccattgtttattgtgacggtggttattaccaaacttttaattgaccgtagtcagaccaaacacaaaacgctgtcttatttatttttatttgaagctatttttctctttgcttttatggctgctgggctttactttgagccatttaaaaatgccgattcgattacggttgcaatcactggcggcctcggtttaattgctttagcgattcgtaatacatcaagcaaaaccctcattaaaaatattagcccaagtaccatgatgacaggcaacactacccagcttgggattgatattgctaacttgcttaaaaataataatgctgccaatcgggcaagtttgcttaaaagtgccagtattgtaattggctttgttataggtgctttgatgggggcggtactctatgtctattttgacttttggagcgtagcgccgtttattttacccatcctttatttttcttatttggcttcacagcagaagtttaaacaagcttaa

SEQ ID NO: 42209 - DNA, 174 bp, Acinetobacter baumannii
atgccagagacttcaattcaacaagaaacacaaagtacatgggcaatatgccgagaacctgttttattgactatggtgggtggggcaattgataccattggctttatcgcgttatttggtttttttactgcgcatgtaacgggtaacttggtattggccgggctgcgttggtga

SEQ ID NO: 42210 - DNA, 276 bp, Acinetobacter baumannii
atgtctctttataatttttcagtttttttgggtggattattatttgtatccattgcctctgccggctataaaagtcatgcacaccgtgacttttactcaaaatgcgtagccgctggacatagtcgcgcgacctgtctgtgtatttatcaccgtttagagcgccaatattctccaaaactcatgcataagcttggaaagttaagtctacaaagccctgaagtgccacgtgattttgtaaaaaccatgcttcgaacgatgcaacagtgccagtcataa

SEQ ID NO: 42211 - DNA, 891 bp, Acinetobacter baumannii
atgaattatgaattatggaaaatatttttagacgcggtggaactcggtagcttaagcaaagtcgcgatgctgcataacaccaatcaaccgcaaatcagtcggcaaatgaatgagcttgaagcccaatgtggtggtcgtttgtttaaccgaactggacgtggtgtcgagctgaccgacttaggccagcatttacttcctaaaattcgttcatggctgaacgtgaccgatcaactcaataatgaaattttgcactcgaccgataccccgattggtacggttcgtattgccagtttgccgtctactgcacacccgttgttatcgactttgtataaagtgcttcaagagaaatatcccctaattaaactgtcggtgcgtgaggggcaaggggtacatttagaaaaatggctcgaagatggcagtgtcgatttagctattctttatcggtttaacccgacacctaaacaaggcgatatttaccttacccaagccgatacctatttggtcggctgcgaaggagatgcactcactcaggccagtgaagtcgactttaaagcaatcaatcagttaccgctggtcaccttttgcaggccaagtaactggcgcaattttttagaccacatggcttatgaaaatggggtagagctaaatattgtgtttgaagccgactcgattagtttgcaaacccatttggtttccgagtctcgcatgtataccatgctggggccgcaagcgttaaagaaggccagccaatacacctcaattcaagctgcaaaaattattaaccctgcgctcaagcgttatatttctttgtctatttctaaacatggctatttaacgcctgcgtgtaaggcagtgatggaagaaattaggaatttggccgatttgctttaa

SEQ ID NO: 42212 - DNA, 945 bp, Acinetobacter baumannii
atgagtttagatttacgtggattaaccccagcacctgtgactccttttacccgtgacggacaagtagaccatgatgcaattcaacgtttaggttcatggttaggcagtattgatggtgtgaaaggcttggttgttcttgggcatgcaggtgaaggaacattcttgtcgcaaaaagaacaaatgcaggtcatcgaaagctttgttaaatcggtagatgacaaaattccggttatcgcagggattacactcgaaggtacttcggttgcagcagaagaagcaaaacgtgcagtgagtgcgggtgcttcggcaggtttgatttacccttcacatggctggttgcgttttggctatcaaaaaggcgcaccacaagaccgctataaagcgatttatgaagaaagtggtttgccatctattttattccaatatccagatgcaacgaaggccacttacgacctagacaccctactcgatatttctgcacagccaggtgtatttgccatgaaaaatggtgtacgtaacatgcgtcgctgggatgtcgaaattccgattatccgccgtgaacgcccagacttacaggtattgacgtgccacgatgaatatttacttcacactatgtttgatgtagacggcgctttagttggctatggcaacattgcccctgaactgttaattgaaatgattaaagcaggtaaagccaaagattatgctaaagctcgtgctattcacgaccaattattaccagtaactcgcaatgtttatcaccgcggttcacacatggaaggtacggtcgcgcttaaacatgcactggttgctcgcggaattttggaccatgccactgtgcgttcacctctgcttccactggcagatggcgctgagcaagaaattcatgatgcgatgcgtcaagccggaattggcaaggtcgatttaacccaagccgttgcttaa

SEQ ID NO: 42213 - DNA, 1386 bp, Acinetobacter baumannii
atgacaaatctagcggatgtagaacaaattagtcatcatcaaaaaaatgcggaaattattgcaagactcgaacgactacccgtcaccggacgattgcaatttatgcgaattaccatcggtatcgcgaccttttttgacgcttatactgttcttgcgattgcctttgctttaccccaactcattaccgaatggcacctgacgcctgcctatgtcggtgcgatcattgccgcgggctatgttgggcaactggtcggtgcaatcttctttggttctcttgccgaaaaagtcggtcgtttaaaagtgctgtcttttaccattttactgtttgtggcaatggacatttcttgtctgtttgcgtggagcggaatgtcgctgttaattttccgtttcttacaaggtgttggaacaggtggtgaagtgcctgttgcgagtgcctatattaacgagtttattggtgcagaaaagcgcggtaagtttttcttgctctatgaagttttgttcccgctcggtcttatgtttgcaggcatggcagcatttttcctgatgccaatttacggttggaaagtcatgtttattgtgggcttaattccctctttactggtcattcctttacggtttttcttgcctgagtcaccacgttggcttgcttcaaaaggtcgttttaaagaagccgatcaagtcgtcaaaagctttgaagacggggcgattaaaagcggtaaaactttggctgaacctgtggttaaagaaattaacccgcaaggcatggcaaaaaccgactggcgcgagctgttccgtggcatttaccgtaaacgtacctttaccctgtggggcatgtggttttgcgtgtatatggtgaacaatgccatggtgacttggctgccatctctttacaaacaacactttggtctatctcttcaaaccagtctgggttatggctggattacgtcgggcgtgggtgtgattgcctctattatctgtgcgttaatgatcgataaagtcggccgccgtccttggtacagtgcagcgtttttcttggcaatcattccactcatgagcctctcagttttaggtgcaaaatcggccatgcaagttgtaattttcgcaacgattagctatgccattttgcaaactatttcattctctttatatctttacgctgccgaactttacccaactcgcctacgtgcgatgggcattggttttagtaccgcttggctccgtgccggttctgcaattgggcctgttatggtgggccttgtagttggtggctatggcattcaatatgtgtttagtgtgcttgcggttgtggcactcattggtggcctagtgactttcttgtttgccattgaaaccaaaggccaagtgctcgaaaaactctctccttaa

SEQ ID NO: 42214 - DNA, 1347 bp, Acinetobacter baumannii
atgaataaatatttgctatggggctgtattggtttaggcagcgtgagcaacgcatatgcagagcttcctcaagaatttggcaagctagaattaaaactcaacacccgttactggaacgatgaaggcactgcccaccccacgcttgccaacccttcgccttcgtcgagtgaatatgaacaaagtgccttaggccttgagttaaattatcagtcaccctacatatgggactggcttggggtagatggctcactctatgcagtcaccaagttatttgactctggcaagcctagcgctcagcttttagaggtcgaaaataacggcaagcttgatcaaaactttgcaactttagggcagctctacatcaaggcaaaactgggcgacaaaggcgaaattaaattaggccgtcagttgcacgattcactgttacttaaaagcaccaataaccgcgcagtgcccgacactttttcgggtgccagtggtcagtttcaattgaatgatcagctacagacctatatggcctactatgatcgctggaaaccgcgcagcatggactcttttgaaaaactggtgactgaaaatgacgagcgaattgattatgtcggtttgcttggtgccaagtatcaatacaaaaactggagcttgaatgccgaatatttaaatagcaaagattatttaaaaaagtacggggcgattgctcaatataaactgcccttgcatggccttgtgtggacatttaacacgggtgcgtttttctcgcgtgatgatggcaagctatttaaatgcggtgccgaaaccgagctggattgtgtcaaaggccaagacattaacaaccgtggcaatggctattttatagatgtaaatctagccaagaataatctcgaaggtggcattgcggtttcaaagtttgatggtttttggatagaagataactttgccgtgcactccgcccgcaactcggttttaacgcaagatcacggcaccaacccgtttccgacctctgcgaccattggccctgactttaccaataacgatgaaaccgccgttgcccttcgcttgaaatataactggaaagactacgtgaaaggtttaaaaaccgaagcgaagtatatttatggctttggtgctcaccaaagtaacattagcagtgatattgagggtaaagagcgttactttgactttacggtgagttatgccttgccgtgggtgaaaaatttagatgtgcgttattcatttttgcattatgagtcgaagtttgaaaatgcaaacctaggtgagaaaataaatggaatgtctcgtaaaggttgggaccagcaccgtgtatttattaattaccgttatacattttaa

SEQ ID NO: 42215 - DNA, 285 bp, Acinetobacter baumannii
atgaaattctataaaactattttagttttaggcctcgttgtcggcgattacagcgtttcgggttgtgacatacacactcagcaggagtttgaaaaaatttgcctgtcgggtgggcacactcaagccagttgcgactgtatttaccaacggctcgaacaagtgtattcacctcagctcatgcaacgcctagaacatgtcagtttgcaaagtcctgctctcccacaggactttgcccctactttttttagcgtgatgcggcggtgcgataaaaacgacatgggctaa

SEQ ID NO: 42216 - DNA, 729 bp, Acinetobacter baumannii
atggctaaagaaagatatttagagggtgatattaaatcattaatattcaaccacctgataaataataatttattaggcaaaaacgatacaatcattaatgaatttattattggaaattatactcgacgtgttgatttagctcttattaaatctcaaaaattacacgcatttgaaattaaaagtgaagcagataatcttagccgacttgaagggcagattattaagtatctagaatatttcgataaagttacggtagtagctgcctcaaagcatatttctaaaattttatcactagcgcctcctaatgttgctatttgggaaatccgtgataaaaaaatcatcattttgaggcgtggtaaagcgaagaatattacggataaattaagattcttagaatatcttagagtctcagaattattacaaattgcgcgtcaggaaaagttggttttccaaagtaacagaagaaaaactttagagaaaggtttaatctatttacctactcataaattacgagagtattccattaaatatcttaaaaaaagatatcaaccaactactgacttattttttcaagaaattaataaagctaactatgccagtttagaaaatttaagtcttttgagaataaatcgaaacaataaagttcctaataactcaacaaaaaatataaatgatctactaaacgtcttagaggaactagagcatgaaagagaactttctcttttataa

SEQ ID NO: 42217 - DNA, 1107 bp, Acinetobacter baumannii
atgttttttgatacatttaattatattcctatcttaggtttgaaacctgccgatatggctgccttagaagaattacctgaaaaagataaagatcttttattaccattattaccattaaaaaggtggaccacttctacctccttagataaagcatgtaatagaattgagaaagcatttggtataagaaaaatcttaattgatattgataaagattttctagtggagtgtagaagtaaggataccccaattgcgaaagaattttgtagtctaggtgactcaacaaatggatataaaaattggatcgatttatttaaaagaaaaactaactatttgccagttttacaattagaagatttagcagaattcacatctcaacttaatgggtttatagagttaaatttacctatcgctttaagaatagaaatgaagggtaaagataaagtagaaactgaaaattttaagtttattattagaaatattttacctttagctaataaaataaatagtctactgattattctagattataccgattatgatagaacagatttacttaattactctgagtcagcaagtctcataagagggttaaataaatattttccaaatgcgaaattttctatttctggtacatcttttccttattcctttgctggtagttataagggagaaatccctatatacgaaagattaatttataataaagttcaaaattatcttgaagatatgaagataatttattcagatcgtgctagtacacgcgcatatagtattgatggaggaggagggacacctttacctcggatagattatccattgaaaaatgattggcgttttgttcgcaaagaatttataactgatgatgagaacgaaaaagattatttatatcaagaagctgctattgaagtaatcaatagtgattactgggatgaaaatttacatttatggggtactcaaatgattgagagaacggccctgagagatccgtacggtattaattcccctcagaaagcaacttctgctcgtataaatattcatctttataaccaattacactatatggataatttgagtgatttagatacagatgaagactgggtggattaa

SEQ ID NO: 42218 - DNA, 501 bp, Acinetobacter baumannii
atgaatatttcgccagaatggactagaatcggtacacaaaaccaaaatattatacaaaagtatcaaaatgagctgccagtaaagttgggggctttagcttctgaattaggacttatcgttaaaaaagcaactctacctgccaatatttcaggagaaataaaagaagtaaatgggcaagttattatccgaattaatcgacatgatgcaaattcaagacaaaggtatacgcttgcacatgaaatagcacattttttacttcacaaacatttacttaaagatggaattgcagatgatgttttgtatagatcagctctttcaaatgagatagaagctgaggcgaatagattggctgcagatattgttatgcctttagctgcggtcagagacctatggaaaaaacataatccagatgctcctaataaagaaataacttatgaaagaatagccgatgagttgggagtttccgttattgcattaaagattagattagagaaaatataa

SEQ ID NO: 42219 - DNA, 603 bp, Acinetobacter baumannii
atgaaaagtaaaatttatcttgttttcattttatttttttcatctttaactaatagttatgctgatgaggcgaaacttgctttaagtaatatctcaggttctaatcaagcccttgctccatttgagaaaaataaattagaaaatttaaataaggaagaattattatcgattattctaaaacaagataagtctattgatgatataaataaaaagtatgaaagtttaaaattggaactagcctctcaaaaagaagctaatactaatcttgagtttcctgtttggataagcattgttttggggtgtgtagctatattagttactgttttaggagtgattgtagccattttaagtatatttggatatcaaaaaattaaagatagcgctaccaaaattgcagaagaaaaaactttggaaactgctactactgtggctaaagatgtagttaatgatcaattacaaggtattgcctcaacagaagtggctagattaattgcagaaggggagttgcgcgaagaattagagagagcagttgatatgattctgagaagaaatagagacactcagaatgcgacagggtttaataaatatccagaattagattag

SEQ ID NO: 42220 - DNA, 1986 bp, Acinetobacter baumannii
gtgaataaaagatattcatttttgttcagtagtttattagtagtcggtttattacaaggatgtggagatgactcctcgtcagatcagcccaaggatgattcaaatacaactccgcccaatttaattgtagataatgacccgaccagttgtagcaaactggcacaagacggttcaagtgtggtggttggttcaaaccaaaatggtgaccccgccgcgccagagggtgcatcgggttatagactcggtaacacggttaaatacgcagataaatatatggtggtggcaaacacgccacttgcggtaaaagcaggttgtgatgtgttaaaagcaggtggtagtgcagtcgatgcagccgtagcagtccaagctgtgcttggtttggtcgagccacagtcgagtaccatcgccggtagtggttttatgatgtattacgatgccaaaaccaagcaagtcactgcttatgatggccgtgaaaccgctccagcggcagccaacgaatattatttaattcgccaaaatatatatgacccaaattcacctccgcctgtaccaagtgcacgccgtagtggccgttcgattggtgtgccaggtgtgatgcgtttgcttgaacaagcacaaaaagagcatggcaagcttgaatggaaacagctttttggtgaagcgattggtttggctgataacggtttccgtataccgggacgtttggcagatgccattgcaagtaatgcaagcaatttagcactcgatgcagatgcaatgagaacctattttcattcggatggttcaccacgtaaagtaggtgaaattatgaccaatgaagcctatgccagaacacttgaagcactcgcttcaaagggagcaaatgcactgcacactgggccgattgcgcaagcgattataactgaagccggtcgaccagaaggagacgatccagcaaaaactcctattaccccaagtttgatgactttgcaggatttatcgaactatcaggtgaaaaaacgcgacccgatttgtacaacgtaccgtgaccgttactatgtatgtaccatgccacctccatcttcgggagggattgcggttgcgcaaacactgggtattttagaaaactttgatatgtcgctttatccacctaaaaaccctgaaaatgaaggtggtgtacctgatgtgatgggcgtgcatttagtgtctgaagcagaacgtttggcctacgctgaccgtgataagtatgtggcagacactgattttgtggagttaccagcacagggtattccaagctttattgataaaaattacctgaaacaacgtgcagcactgattaacccgaaccaaagtatgggcgtagcaccagccggtaattttaatacagcggcaggtgtggacaccactgttgaacatggcacgactcagttcacgattgtagatgcctatggcaatgtggtttcaatgacatcgactgttgaatcgagcatggggtcattccatatggtggatggtttcttgctgtcgaaccagttaactgactttagcgcgaatccttatgacagcactggggcgctggttgccaaccgtgtagaaggcggcaaacgtccacgtagtactatggcgccaaccttagtgtttaagggcaccacgccagatgaattttatatggcaacaggttcaccaggtggcggtaccatcattcaatatgtggttaaaactttggtgggtgcattggactggaacttaaatgcacagcaggccacttcgcttgttaactttggcgcaaccaatagcaaaaacaccaatattgatagctcgaatgtacagctttccttagttgacctaattgaaggcttaaaagcaaaagggcatggcatttctaacactgcgcaaaccagtggtatttcaacgattatgaaagtaaatataaataatcaaagtaaatacgcaggtggggtagacccacgccgtgaagggatcgtgttaggcaatggtgctttatag

SEQ ID NO: 42221 - DNA, 1524 bp, Acinetobacter baumannii
atgaaaacgcaaacaccttttgccgagttaagcggtggccgtttactactggcagcgtttgttattgccttgtcgaactttatggtcgtactcgatacgaccattgccaacgtctctgtaccgcatattaccggtaaccttgctgtttcaagcacacaaggcacatgggtcgttacttcatatgcagttgcagaagcgatttgtgtacctttaacgggttggctggcaggccgctttggtacggtgcgggtctttatctttggtttaattggctttacggtcttttctttcctatgcggtttggcaacatcgttagaaatgttggtatttttccgtattgggcagggtctttgtggtggtccacttatgccactcagccaaaccttgcttatgcgtattttccctcaagaaaagcatgcgcaggcaatgggcctatgggcaatgaccacagtcgtcgggccaattttaggaccaattttgggtggtctgattagtgataacctgtcttggcactggatcttctttattaacttaccggttggtattgtctgtgtattagcagcaatgcgcttgttaagagtagccgaaacagaaaccatttctttaagaatcgacactgttggtttaggtctgttaattctgtggattggtgcgctacagcttatgctcgacttggggcatgaacgcgactggtttaatagcaccagtattgtgattttagctttaactgccgccattggctttgtggtgttcctgatatgggagctgaccgacaaacaccccgtggtagatgtcaaagtctttaggcataggggctttgccatatcggtactggccttgtcgctcggctttggcgcattctttggcagtattgtactgattccgcagtggctgcaaatgaacctttcctataccgcgacgtgggccggatatttaactgcaacgatgggctttggtagtttgaccatgtcaccgattgtggcaaaactttcgaccaaacatgacccgcgtgcgctggcgagctttggtttaattttgctgggtattgtgaccttaatgcgggcattctggaccacagatgccgactttatggcactggcttggccgcaaatcctgcaaggttttgcagtaccgttcttctttattccactgtctaacattgcacttggttcggtgttgcagcaagaaattgcatctgctgcgggcctcatgaacttcttaagaaccatggcaggggcgattggcgcttcaattgcagtgaccgtgtgggacgaccacgccaaagttgcccgtagtgaaatggtgtcaaacctacataccactgaagtacaaaacacacttttgcaaaatggttttacggctgactcgacgcttggaattatttcaaaccttgtcgataaagaagccattaccatgtcggcaaaccatgtgtttttactgtttgcgatcgtgtttgtctttgcagggctggtgatttggctgtgtccaaaacccaaacaggttagcggtatgccttctcactaa

SEQ ID NO: 42222 - DNA, 1152 bp, Acinetobacter baumannii
atgactgatgcacaaagcaatgtacaagaaacagtgccaacaacatctgcctcggatgacaacatgcaaaacaagcgcaaaaaatttcttggtttctttgcgctgattttattgatcgccgctattttatatgcaatctgggcattatttttaaatcactcggtgagtacggataatgcttatgtcggtgcagaaaccgcgcaaattacctcaatggttagcggacaggtcgctcaggttttggtaaaagatactcaaacagtacaccgcggtgatgtgctggttcgtattgatgaccgtgatgccaaaatcgcgttggcacaagccgaggcagagcttgccaaagcaaaacgccaatataaacaaactgcggcaaacagtagttctttaaactctcaagtggtggttcgtgctgacgaaattaacagtgctaaagcacaagttgcccaagcacaggccgactatgacaaagcagctttagaactgaaccgccgtgcacagcttgctgcctctggcgctgtgtctaaagaagaacttaccaaagcacaaagtgcggttgaaactgctaaagcaggactagagcttgctaaagccggccttgcacaagcgacttctagtcgtaaggcagccgaaagcaccttagctgcaaacgaagcgttaattcagggtgtaagcgaaacctcgactccagatgtacaagtcgctcaagcgcatgtagaacaagctcagcttgacttggaacgtaccgtgattcgtgcaccagttgatggtgtaattacacgccgtaatattcaagttggacaacgcgttgcaccgggtacaagcatgatgatgattgtgccgctcaatgatttatatgtagatgctaacttcaaagaaagtcagttgaaaaaagtccgcccaggtcagccagtcacattaacatcagatttatatggtgatgatgttgaataccacggcaaagtggtgggcttctctggtggtacaggctctgcctttgccttaattccggctcaaaacgcaacaggtaactggattaaagtggttcaacgcttaccggttcgtattgcacttgacccgaaagaacttgctgaacacccattacgtgttggcttgtcgatggaagcaaaagtcgacttatctgcgaagtaa

SEQ ID NO: 42223 - DNA, 498 bp, Acinetobacter baumannii
atgagtgatgaaaagaaaaattggacggggaacatacaattaggcgccaaaaccgacctaaatgtggttctcaaccaattgtgtaaggcgtttaatagctgtccattttttaagcatagtggaatgattatgcgtgtggtagatgggcacattgaaggctatgttgaaatgcaacctaacctcattggcaatttggcttttcaggttttgcatggtggtgtggctgcaactttgctcgatagcattggtggaattgtggcaatggaacatctctatcgccgttcaactcccgaaaccctgcctgaaaccattaaacaggttacacgcttggcaactgtcgatatgcgtgtagattatttggcaccagggcgtggtaaatattttattgcacgtgccgaagtactacgtttaggacgcaagggctgtaccatgcgcatgaccatggtcaatgatgaagataagcagattgctgccggcattgcctcatatgcctattaa

SEQ ID NO: 42224 - DNA, 1098 bp, Acinetobacter baumannii
atggggctacaatacagcagtcggttgacagtaatggaatatccgccaacctatcctagtgtaataccgaacatcgagattgttatgacttatacgttcaatcgtcctgcatttccagctactcgcatgcgccgtatccgtaaaaatgaccagttgcgtgcgatggtcagtgaaacacagctcactaccaatcacttgatttatccagtatttgtattaccgggacaaaatcaaacccaagatattccaagtatgccaaacattcagcgtttgtcggcagatttattactgaaaaaagctgaaagacttctggaattaggtgtatccaaactggctcttttccctgtaacacctcaagaagataaaagccttaccgcagaagctgcatggcgtgaagatggtttagtacaaaccacatgtcgtctgcttaaaaaagaattaccagaaatggtgctaatcactgatggtgcactcgacccgtacacgactcatggtcaagacggcattattgatgaaactggctatgtgctcaatgacgagactgtagaatgcttgattaaacaagcattgagtcacgctgaagcaggtgccgaagtaattgcaccaagtgacatgatggatggccgtattggcgcaattcgtcaagctttagaagccaatggtcacatctataccaacatcatggcctactctgcgaaatatgcgtctagcttctatggtccgttccgtgatgctgttggctctgcatccaacctaaaaggtggtaataaatataactaccagatggactttgccaaccgtgccgaagcgttacatgaaatcgcgcttgatattcaagaaggcgctgacatggtgattgtaaaaccgggcatgccatatctggatgtggtacgtgaagtaaaagatacctttggtattccgacattcatttaccaagtgagtggcgaatacgcaatgttagctggcgcaattcaaaatggctggttatcagactcagtgattttagaatcgctcatgtgttgccgccgcgctggtgcagacggaatctggacttactttgcagaaaccgctgctgaaaaactcaaggaaatgaactaa

SEQ ID NO: 42225 - DNA, 1116 bp, Acinetobacter baumannii
atgcatattgcaatcattggcgcgggcataagtggactaatgtctgcgctggagttggttgaacaaggctgtaccatcagcatttttgatcaacaacaagcgggacaagcagcctcttgggctggtggaggtattctctctccgatgtacccgtggcgctatgtgcatgcagtgaaccaacttgcccaatttggcaaagcctcttatcaagcatggaaccaaaagctctaccctgttacagggattgattttgaaattcatgacacaggcatgctaatttttgatgaagaagattttgacatcgggctttcctacgccgagcagcatcaagagccgatgcagcgctgtgaatatttacaaagagatgccttagaacaagttaatccgcacatttccgaacaatttcaagaagcgatttatttccctgaactgtctaatattcgcaatccacgcgtattacagtccctaattagctatttaaagcaacatccaaatgttgagtttttcgaacacactcctgttaaaaaactgattcaacaaggcgatgtgatacaagcgctccaaaccgaagatggtcgcaaacatacagcagaccattttgtaataacctcgggcgcttggagccattactggaactcacaattacaactcgacattccagtcgaacctgtgcaaggtcagatgctgttatttaaaacccctgctcactggctaccgaccatgtgtatgaatcgagtcatgtacctgattccacgtatggacggtcatatcgtgtgcgggtctagtatggcacatcgtggttttgacacctctaccgatgaaactacacagcacaatattttagaagcatgtttagaaatggtgcctgaactggccgatttcccgattgtacatcgttgggcaggtctcagaccaagttcaccaaacggtgttccatacattggtaaaatgcctgaaatggataacctgtgggcaaactttggtcactttagaaatggtttgtgtatgggcgcaggttctgcacaattgcttcgtcagcttatgctaggtcaaccaacattagttgatgccaaagcatattcaccagagcgtttgcaaaataaaatcttagcctga

SEQ ID NO: 42226 - DNA, 906 bp, Acinetobacter baumannii
atgaataagaatgtgttaatcacaggtgccagtggctttattggaacgcatttaattaggttcctattacaaaaaaattataacgtgattgcagtgacacggcaggctggaagggaatctgaccatcctgccttgcagtgggtacaaaagttcgaagatatttcgactcgtcaaattgattatgtggtgaatttggccggtgcaaatattggtgagaaacgctggaccgagtcacgtaaaaaacacctcattgaaagccgtgtaaatacgacccaaaaactgtatgcatggctcaagcaatctcaaatttttcctgaagtgattgtctctggttctgcaattggttattacggtatagatgctcaagaaaagtggacagaggtgtgcactgaacaaagctcgccacagcccattttcatgtctcagctttgccaagagtgggaacgcgcagctttagcagatgctcagcaaaatactaaaattattcgtttaggggtagtgtttgggcagggtggtggcatcttgcctaaaatgttgcttcctattcgactcaatttagttggtcaaattggtcacggacgtcagcctgtagtatgggtacatattgaagacgtattaaacgcaattgagtttatattcaagcatcctcaatctgctcaaattcacaatgtcgtggcaccagaaaatgtgactcaaaaggtatttgttgaacaagctgccaaagttttgaataagaaaccaatgttgtcggcgcctagtacagtttttcgctgtttgttaggagagcagtcgcaattgatcttaaatgggcaatacgtcaaacccgaagccttacaagcagaaggatttgagtttgcttatcctcagttaaaaatagctttagagaatatactcgcctcaggctaa

SEQ ID NO: 42227 - DNA, 453 bp, Acinetobacter baumannii
atgaccaaattacgttcttactttctctggttttttgctttatgcatcgtacttactttaattgtcggtgtgattgcagcactattaccagcgagtgtaggcggtattttaacagccgttccatatttaggcgcaatgatttttgtcttatttagatttttaaagaaagaacgccgtgcaccgacagtaccagaaaaaaagaaatttactttaggttttacgctcatattttggggctataacttgtgtggtgttttatttggtctgtttttattttcaagaaaagaccctgagattttgcaaaactttatgctttacctcaaacagcctcagttcttaagcattatggtgattatgcttttaatgttagctattccgctttatttaattacctactggttttatggaaaacaggcacagcgtatggcaaacaaaatgtttaatgtgtcataa

SEQ ID NO: 42228 - DNA, 378 bp, Acinetobacter baumannii
atgaacaatattgcctattttgaaatccagtcttcaaaccctgcccgcgatgcgcagttttatcaagctgtgtttggttggcaatttaaactcgatgaaagcttacctattgaatattaccgcatagagacaccttcaattatgggtgggctattaaaacgccccgctcaaacacctccaatggaatatggcaccaatgcatttacctgttcggttcaggtggaaaacttcgatgaagtggctgcaaaaattttagcgcaaggtggcattgtggcaatggataaattcgctattccgggccgcgcttggcatggttactttgtcgatttagaccacaacgtttttggtatttttcaagtcgatgaaaatgcagcttaa

SEQ ID NO: 42229 - DNA, 492 bp, Acinetobacter baumannii
atgaactttgagaataaaatgactattcataaatacgaagtaaaaatacagtgggaaggcaatacgggtacaggcacttcatcttatcgttcatataaacgagactttagtattcagcattctcaaaagaccactattcaaggttcatcagaccctgcttatttaggcgatgtgaccagatggaacccagaagatttattggtcgcgtcagcttctgcttgtcataagctttggtatttacacctatgtgcagtcaatcatattcacgttgtgagttatgtcgatcatgcactgggatttatggaagatacagatccggtcaaacgtggtcattttacccaaattattttaaggcccgaggttgtgttggaaaaaggtgctgaccaagagcttgcagcaaaactgcatgaagaagcacatcacgaatgtatgattgccaattcggtaaattttccaattacatgtgaagccagctttagctttgctgaataa

SEQ ID NO: 42230 - DNA, 1269 bp, Acinetobacter baumannii
atgtctgtttctatgtccgtacattttctacatacttctgactggcatttggggcagtttttttataatcactcacgacactacgaacaccaacaatttttaagctggttgctcactcaaatccaagaaaaacaaccacatgccctgcttattgctggcgatatttttgatgtcattaacccgggttctcaagcacaaaaacaactctaccaatttttagcagatgcgcatcgtattgcaccgcacatgcaaacactcatgattgcgggtaaccatgactcaggctaccgtattgaacaggtcgaaccgcttttagaaaaatacaatgcaaaaactgtgggtgtggttcgctggaatgaagataaaaccctagatctcgatcgactgcttttacctatctataaccaaaatcaagatattgtggcgtggtgccttgccctgccttttttacgttcggccgaaattacgggctttaacgaacataccaccaatagcaaaaacgcgattgcctatttgcaccagcaactcattgccgaagccaaacgtcgtaagacaccagaccaagcgcttatcttgatgtcgcatgcgcatatgcaaggtggggaaacatccgactctgaacgccccattattattggtaatgaagaggcgctttcaacgacgttatttgaagatgcggtcgactatgtcgctttagggcacttacataaaccacaaaaagtaggtcagccgcacattcgttatagcggttcacccattccgctttcttttagcgaaattaactataagcaccaagtggttgaggtcaaaattgacccttctcaagacactgacagccgtttgcaatttgaagctgtcgaaattccgcgttgcatacaattgcaccgtattcgtggtgagctaaacgaggtactgcaacaactcaaagccttgccacacggtgtgattgaaaatattgaccaccgtgaatatgtcgatattgaatattatagtttaacgccaccacagccgaatttacgtcagcagtttgaagctgctctaccacctgaccgctatcgtctagtgcgtatttcacgtcaatacgtaaacaaagacgcgactaattcaaataccacccagcacattgctcttgaaccgccaacaccagaaaaactctttcaaaatatttgggaaaaacaaggttacagcgccgatgatgcggtcttaaaagattttctgagtctggtacaagaagcacaaaaacatcttgaaaatgatgcaagccattaa

SEQ ID NO: 42231 - DNA, 3597 bp, Acinetobacter baumannii
atgaaaattttatccattcgaataaaaaatctggcatcgcttgctgatgaacattttattgattttgaaagcgcacctctggcccatgcaggtcttattgcgattgtggggaaaactggcgcaggtaaatcgaccattttagatgccatgtgtctggccttatttaatcgggttcctcgccttaaagacagcgatggtaagttaaaagatgttgatggttccgagttactgaccaattcgcctttaactgtcttacgtcgtggtacaggccatggttttgctgagctttgctttattgcgcaagatcaaaagcgctatttggctcgttgggaaattaaacgtgcacgtgaaaacccaaatggtaaattacaaagtgtacagcgccacttaaaatgcttgaccgatggtgtagtacttgccgataaagccaaagcggttgatgaaaaagttaagcaaattacccagctttcttttgagcagtttactcgtgccgtattacttgcgcagtcagaagtcactgcatttttaaaagctcgagacagcgaacgtggtgaattacttgagtacctgaccaactccagcattttcgccaaaatcggtgaactggcttttcgtaaaacagccgatattgcaaagcagcgtaaacagctggaagagtttttaggccatattgaaattttgtctgatgaagagattgctgcatttaccgagcaataccagcaagccgaacaaaactatcaacagttagaacagcaaaaacatgtcttagacaaacagcaacaatggtttgagcgtaaagcaaaacttgagcaagaagttcaagcgaaacagcaacagtttcaaactcagcaaaatcatcatcaacaactggctagtgaacgtgagcaattaaaacgtcttgaagttttctctgaaatacgcccacaagtttttcagcaagctcaaaatttacaaacactgcaacaacttgagccgcaaattcagcaagctcaaaccaaatttaatgagttggtgcaaatttttgaaacgggacaaaaacaatatcaacttgcagaacaacaactcaaacaaactctcgattttgagcaacagcatcaacatgctttaaatcaagttcgacagtccattcaagaacgcgcttttattgccgatgaatataaaaagtgcaaagaaaaaagacaggtaattgagcaaaacctaagcccactacaacagcagcaaaacgctgtacaacagcaggttgcacagcttgagcaaaacaaaattcatttacaacagcagctgctccagactcagcaatatgctgtattagataagggtctttcagcgcatcttcatcaacttgggcaatttattcaaaattaccaagcaattgaagaacagctcggtaaccctacccttgctcaccaaaagctatcggaagctaaaagtgaactcgaacaactcacagcttcactaggcaccgttgaacagattgagttaaagcttgaacaacagcgtaaagacaaagaacaaaagcttgctcaagtcacgcagttagatctgattcaacagaaaataaaaatttatcatgagctatatgctgaacttcagcatttctctgaaaaatatactcaagcctccacgcaagaagagcaacttaaaaccgtttgccagttagctgaacaagactaccaaacagcaaaaaatgaacgtgaaaagttacagcacatcctgcaacagcaacgtttactacacaccgaaaatattgaacagttacgtgccaatcttaaagaaggtgaagcatgtttggtctgtggaagcatccatcacccctaccgtgttgacaatagtgcagtctctaaagcgttgttcgatttgcagcaacagcaagagcaacaagctattgcactcgagcaaactaagtttaatgcatggcaaacccagcaacatgcgcttacccagtgtcatgctgagcttgagcaagttcagaaatatctagctcaacttcaaacaaaacaatcaagcttgcagcaagagcttaagcaagcgtttaacctcaatcaattacacattgagcttaatcaagctcctgaacaaatcttacaaacacttaatgagctgagacaagcgacacaaactgccataagtttatttgattcagaaaatgcgcgtttaacccaagccattaaacaacacaatcagcttattcaaactattcagcgtaatgaaagtttgcttaatacagcacagcaatggcaacaacaagttcaacatattgtcgagtgtttatcggaaaccgaacagcacgcatggcagcaagcaagtagccaaacagctaagcagacttgggctattcttgatgcacgtgctaagcaacttgaacaacaagaacagctttcacagcgttttgaacaacagcagcaagaacttaaaatgctgactgctagccttgagcaaatgaccaagcaaattgatgagatcgatcaaaatctccaagagattacgcttaaaggtcaacaaaataatgaaaaagcggtatcgctcattcagcaaatgacgggccgttcggatattaagccgcatgaatggttaattgagcatgacgctaaacgtcagcaccaacaaacggcgtatcatgaggctaaacaacgtttcgaacaaaccagacaacactttgaacagcaaaaacaggcgctcgatcaacttaaacatcagtatcaacacacagaacaacatcaacagcagattgatgggcaaattcaaaactggttaaaagcccatactgattttcaggcatctgatcttacggcactcatacagattaattcagcacaagagcaagacattcgtaaccgtcttaatcatgccgagcgtttattaagtgaagcctcttctgcccttaaaaccatgcaagagcaattaagcgagcacttacaaactcagccagatattgaatacgaaaagctcgttaccctcattcaagacaatattgcaaagctcaaagcacagcttgaagtgcgtgacgggctaaagctgaagcttgaattacatcagcaaaaccttgccaaacagcaaaaatacgctgaacaaattcaaaacattcaacaagaagaacatcgctggagcaaaatttcaggcttgattggtgatgctaaaggtaaagagttccgtgactacgctcagcaatatcacctagatattttagttgaacatgccaaccaacaactggcgatgctttctcagcgttatacgctaaaacgtcttgatcaatcattaagtcttgccatcattgaccacgacatggatggagaaacccgctcagttgcctctttatctgggggtgagtcattcttaactgcccttgccttgtctttagcgattgccaatatggcatcgggttcaatgaaaattgaatcactgtttattgatgaaggctttggtactttagatgcctcatctttgcacatggtcatgaatgctctagaccaactgcaaaatcagggacgtcaggtcattctcatctcacacattcaagaaatgcatgaacgcattcctgtacaaattcaagtgaaaccacttggcgctggtgcaagtaccattgaaatagtgggttaa

SEQ ID NO: 42232 - DNA, 693 bp, Acinetobacter baumannii
atgaattacctgcaagatgcgcgacagcacgtattacagcaaatcagaacagcttgtgaacttgctcagcgtgcgcctgaaactgtgcaacttttagccgtatcaaaaactcatccgagtgaaagattgcgtgaaatgtatgcagcagggcaaagggcattcggcgaaaattatttgcaagaagctttagataaaattgatgctttacaggatttggatattgaatggcatttcattggtcatgttcagcggaataaaactaagcatttggccgagaagtttgattgggttcatggagtagatcgtttaattattgcagaacgcctatctaaccaatgtggtgatgaccaagctgcgcttaatatttgtttgcaagtcaatattgatgggcaagagagtaaggatggttgtgcaccggaagacgttgccgagttggttgctcaaatgagtcaactaccgaaaatcaagttacgtggtttaatggtgattccggctcctgacaatacagctgcttttgcagatgccaaaaaattatttgatgcggtaaaagtccaacatgctcatccagaagactgggatacattgagtatgggaatgtcgagtgatttagaagccgcaattgccgctggttcaactatggtacgtgtaggaacggcgttatttggtgctagagactattcgcaaaaaggctga

SEQ ID NO: 42233 - DNA, 1068 bp, Acinetobacter baumannii
atgacatattttgatttacttggggaaattatggatattacagagctactcgccttctctgtgaaaaatggcgcgtccgatttacatctctctgctggcatgccaccaatgattcgtgttgacggtgaagttcgtcgtattaacttaccagccttagaacataaagatgtccaccgtcttgtttacgacatcatgaatgataaacagcgccgtgactatgaagaaaaactcgaaactgacttttcttttgaagtacctaatgttgcgcgtttccgtgttaacgcatttaaccaaaaccgtggtgctggtgcagtatttcgtaccattccatctaaagtcctcaccatggaagatctaggtctaggacaaatctttaaagatatttgcgactatcctcgtggcattgtactggtgacaggaccaacaggttcgggtaaatcaactacgcttgcagcgatgctcgattatattaacgaaaaccgctatgaccatattttaacggtggaagacccaatcgaatttgtacaccagtctaagaaatgtctcattaaccagcgtgaagtgcatcgtgacacacacggctttaatgaagcacttcgctcagcactgcgtgaagacccagatattattttagtcggtgagatgcgtgaccttgaaactattcgcttggcattaaccgctgccgaaacaggtcacttggtgtttggtacactccacaccacgtcggcagcaaaaaccattgaccgtgtgattgacgtattccctgccgaagaaaaagacatggttcgtgccatgctgtcagaatctttacaagcggttatttcacaaaccctgcttaaaaagaatggtggtggccgtgtcgcagcccatgaaattatgattggtattccggctattcgtaatttaattcgtgaaaacaaagtcgcgcaaatgtactcagccattcaaactggtgccaatcatggcatgaccacactagaccaaagcttaaaaggcttagtcgctcgcggtgtgattagtccacaaaccgcacgtactgcggcaaaacagcctgaatcattcctataa

SEQ ID NO: 42234 - DNA, 1119 bp, Acinetobacter baumannii
atggattttaatgacctactcaacctgatggttgaaaagaaatcttccgatctctttattacagatggcgttgcgccctctatgaagattaacgggcaaattgttccaatttcaaaaaacagcctttctggggaagtaattggtcaactgttacattccattatgagtgaaaaacaacgcaaagaatttgcagacactcgtgaatgtaactttgccattatgaaccgtgaaaaaacggcgcgttttcgtgtcagtgcttttcagcagcgcgacatgccaggcatggtactacgtcgtattgaaaccaagattccttcaattgatgacttgcagttaccgcctgtacttaaagatttatcgatgaccaaacgtggcattattattttcgtaggtgcgacaggtacaggtaaatctacttcattggcttcaatgatcagccatcgtaaccataactctaagggccatatcattaccattgaagacccgattgagtttattcacgaacatgcaggttgcatcattactcagcgtgaagtcgggatcgataccgactcatttgaaattgccttgaaaaatacactacgacaagcgccggatgtgatcttaattggtgagatccgttctcgtgaagtcatggactacgcgattggctttgctgaaacaggccatcttgtattagctaccatgcacgccaacaacgccaaccaagcgctcgaccgtattattcacttttttgaaagtaatcgtcatagtcagctttacatggacttgtcacttaacttaaaggcaatgattgcgcagcagctcattccaacaccagatggtaattcacgccgtgcagcaattgagattttaattaactcaccattaatttcagactacatccgtaaaggtgaaattcatgaaattaaggatttgatgaaacgctcacgtgaacttggtatgcagacctttgaccaagctttatttgatttatataaagctggtcaaattacctacaaagatgcacttaaacatgctgactcaccgaacgatttacgtttaaccattaaacttgcagatgaaggtcctgatcaattatcagacggaaaacagcatttaacttttgaccgccagtaa

SEQ ID NO: 42235 - DNA, 438 bp, Acinetobacter baumannii
atgcctatttccaatcaagatttgcgcaaagctggacttaaagttacccttccacgaattaagattttggaattattagaaaattcaaaacaacatcatcttagcgccgaagatatttacaagactttgttagagcaaggggaagatgtcggacttgcgacagtttaccgtgtgttaacacaatttgaagctgcgggtattattcaacgtcatcattttgaaaataaccattctgttttcgaaatcatgcaagaagatcatcacgatcacttagtatgccaaaactgtaacaaagtcattgaatttactaatgatgttatcgagaaagaacagcattctgtagcagaacaacatgggtttaccttaacgggtcactcattaaatctctatggttactgtaatgaacctgaatgtcaggaagcattgcgcaagaaataa

SEQ ID NO: 42236 - DNA, 399 bp, Acinetobacter baumannii
atgcaaaaactcgtgctgacgttattcgtcacttcactcctagctggttgttcaatctttggtgtatataaggttgatattcctcaagggactccattgactaaagctcaagcctctcaagtacaggtcggcatgaatttccagcaagtgcgctttttgcttggtagcccaacagtgactgatcccctcaatccacaacgttgggactatatctacaactatatcccgggaacatatgctaaaaaagcgaaaatccccgcagcacatggtcagcatttaaaaatttactttgatggaactggaaccgtaactaaaattgaaggtttagagactattccagagtcgcaaccaggtttacctgcttccaaagaagcaattttaactgccccaccactataa

SEQ ID NO: 42237 - DNA, 324 bp, Acinetobacter baumannii
atggaacgtacacaacaagtttgggtcgcttttgcggtaccggaacaacagtttttaatttctgttccatttgaagagggaatgactgctgcacaggcagttcaagcaagtggtttatcaaatcaagttgatttgcctgaaccacttcagctcggcatttttggagtaaaagtagaaactgttgcggtattacacgcgggtgatcgagttgaggtttatcgaccattaacgattaatccaaaagatattcgccggaaacgtgctgcgaaaaaccctgtaggcagatacattaaaggcaatcgctttaagcaatcagctcaataa

SEQ ID NO: 42238 - DNA, 1068 bp, Acinetobacter baumannii
atgtcacgatggttatcgcctcttatggcgttttgcttatcttttgtcatcatggccactttggcaccaaccatgggaatccagattgatcgtcaaatcgatttctggttattgtggtttggcactatgttgttattggcattaccagtttgttatttggaaattgctttagcaaaacgatcaaaaacaaccgctttaaatgcattatcgagtttaactcgtgaagctgatagttcccctaaatggcgtgtggttggctggcttgctgttgtttttattcctttcttagcgggtaacgttctaagtactgcgagcaatatattagttgcacagtttgccccaagcatttccggtcaaattatttttgcaggccttgcagttgctgccttggtattatcttttattccacgccaaatactcattttattaatgaccttaggagtaatcgcttctattgtgttggcaaatacgatgggctcgactttacaaccttggcattggaccagtgttgagtttaaggagtggggtaatgcaactgtacttgcacttgtcgcgagcgggttaggtttagggctttactggcaaaatagtgtaggtgctgttcaggcgcaagaaggcgcaacgaaaactgttcttccaatttggttagctcagctcattgctgtggttgcttttggctttttctcgcttcaggctcaattacctgttttaacgtggatatttactggcgtaatgacatccgcgttatttgtgcagttggctagagaacaacttgctcagcgtcagcttatgcctgttttacaatgggtgattattgttgtagcaattgcagtttgggctgtgccggaagttcataatttattcacgctcattcttatgctgtggggcttacttatttgcttaatctatgcagtttttgcaggttggattatgaaaattagccacttacgtaaatcgatgaattttagcaatgagcttttttataacctatggcgtattgctgtacgtatcgtattgccgctttcaattattgtggcaatgattgctgtaattggacaaagtatctaa

SEQ ID NO: 42239 - DNA, 456 bp, Acinetobacter baumannii
atgaaaatgaaatgggcttcagaatataatactggtattgacgttattgatgagcagcataaacgaatactggattatattaatgagattgatgatgtaaaagatgatgaggatagacgtcgtattaaagatgttttagacaatattattgattatacgcaatcacattttacctttgaagaaagtttacaagaggaagcggattataaatatagagtgcctcataaacgtgtacatgacttgtttattaaaaaaatagagttatatcgtgaacgttttgaaatgggccatacgattgaagcagaattacaagagatcttggctaaatggttaattaaccatattcaacatgatgatgccgattatgtgggggcagtaaaagaaaatatgatggggattattagagaaaaagaaaagaagaaaggaaagaactggttcgcccgttttttctcataa

SEQ ID NO: 42240 - DNA, 219 bp, Acinetobacter baumannii
atgtcattgcaacgcggcatttatcagcattataaaggtaatctctatcaagttttttctgtagcaaaacacagtgaaactgaagaggaattggtcgtttatcaatgtttatatggtgattattcaacttgggttcgaccacttgatatgtttactgaaaccgtgcaaatgagtgatggtagcgtcgtaccgcgttttaaattaatacaaagtacttaa

SEQ ID NO: 42241 - DNA, 588 bp, Acinetobacter baumannii
atgccaaatactattttcttacaaagagttgctgatttatatgacacctttaaacagcatgactcacagcaatccgatcgtttacaacgatatcgtaatatagaagtagaatctgctcagctaatttcccagcttattcgtatgcagcaagccaagtctattttggaaattggcacttcaacaggctattcaactttgtggcttgccgaagctgcccaagcgactggtgggcaagtcattacagttgaaattgatgcaaagcgaagtgcagaggcaaaacgtcatgtagctgagttagagctcagtgaaattgttcaattttgggtaggagatgcagccgattacttaaaagcagctcaggaaaaatttgattttattttgttagatgctgaacgcgatgcatatgaaaattattggccagatttaaaacgcctaatgaagcctaaaggtggggttttagtcgttgataatgtgatatcccatgcggcagaagtaaatcgatttatagccttaattaaaaaagatccggattacatgagtagcattttgcctgtcggcgcaggtttgtgtttagtggtcacaaaatag

SEQ ID NO: 42242 - DNA, 216 bp, Acinetobacter baumannii
atggcgaatacagcggtcgtcacttcatggaaatacaatgcgacatcgcgtcatttaaaaatcttttatagcgatggctcaggagatctctatcatcctgttcctgagtttgtttatgacaacttattgcgttcaaccgataaagccgcttttgtacacaaatacttagaatttaatttgcactttacccgactctctttggtgattgcctcataa

SEQ ID NO: 42243 - DNA, 564 bp, Acinetobacter baumannii
atgagcttgattaatactgaagttaaacctttccaagcaactgcttaccacaacggccaattcatcgaagtgaacgaaactaaccttaaaggtaagtggtctgttgtattcttctatcctgctgacttcactttcgtatgtcctactgagcttgaagacttagctgataactacgctgaattccaaaaattaggcgtggaaatctacggtgtttctactgacactcacttcactcacaaagcttggcacgacacttcagacgcgatcaagaaaatccaatacccattaatcggcgatccaacttggactctttctaaaaactttgacgttttaatcgagtctgaaggtttagctgaccgtggtactttcgttatcgatccagaaggtaaaatccaaatcgttgaaatcaacgctggcggtatcggtcgtgacgcatctgaacttcttcgtaaagtaaaagctgctcaatacgtacactctcacccaggtgaagtttgcccagctaaatggaaagaaggcgaagcaactcttgctccatctatcgacctagttggtaaaatctaa

SEQ ID NO: 42244 - DNA, 3858 bp, Acinetobacter baumannii
gtgctgaatggtttaaatatagatcaatgggtgatggcgagagatcgttaccgtttaaatcgtttacgtaaagataaaaaagccaatactgcagagattgaaaaattatttgaacagtctaatgcaaaagttagacagcgttttgaacgcttaccaaaaatcaaattaaatcaggatcttcctgtaacccaatatgctgaccgtttaatagaagcgattcaaaagcatcaggtcattattgtggcaggtgaaacaggttcagggaaaactactcagctccctcaaattgcaatgttagcagggcgtggcttgactggtatgattggtcatacccagccacgtcgtttagctgcacgtagtgtgtcgcagcgtattgcagaagaagtcggcgaaaagctcggcgaatcgattggttttaaaatccgttttaatgaacaaggctcgcaagattcgattgtccggttaatgaccgacggtattttgcttgccgagttaggcaatgaccgcttcttgtctaaatatgacacgatcattattgatgaagcgcatgagcgctcactcaatatcgattttattatgggttatttaaagcagttactgccaaaacgcccagatttaaaagtcatcgtgacttcggcaactttagatgtaaatcgttttagtaactactttaataatgcaccaatttttgaagtagaagggcgtagttatccggttgaagtgcgttatcgcccaatttcagaaatgaatattggtggtagtgatgacgacgagttcgacgactttgaagaaaacctgccgcgtgcagtcgttcaagctgtagaagaatgctttgctgatgccgaggaaaaaggccatccagaacatgcagatattctgattttctcaagcacagagcaagaaattcgagaattgcaggaaaccttacaaaagtacgggccgagacataccgaaattttacctttgtatgcgcgtttagccgtttctgagcaacaaaagatttttagcccaagtggaaagggccgccgtattattattgcgacgaacgttgcagaaactgcactgactgttcctaatattcgctatgtgattgatagcggctttgcacgtatatctcgttataactaccgttcacgcgtgcaacgcttaccaattgaggcaatttcacaagctgcagcaaatcaacgtaaaggacgttgtggtcgtgttgctccaggtgtgtgtattcgtttatatagcgaagaagactttttaagtcgtcctgagtttaccgaacctgaaattaagcgaaccaacttagcatcggttattctgcaaatgcagagcttaggtttaggtgagctggaaaattttgatttcattgagccgccagatttccgtctagtcaatgatggtcgtaagctactcattgagttaggtgcgctgaacgagaagaaaaatgaactgaccaaagtcggccaaatgatggcacgtatgccgattgatccaagactcgcacgtatgattgtgggtggtgctcattttggtgtactcaaagaaattttggtggtggtcagtgcacttgcagttcaagacgcgcgtgaacgtccagcagataaacaaatgcaagctgatcaaaagcatgcactattcaaagaggcagattcagattttctgttttatttaaaactttgggatactttaaatcctaaaggtgaagcaggaatgtcggaaaataagcgtcgtcaatttgctaagcagcatttcttaagctggttacggttacgtgaatggaaacagacacaccagcagctggttgagctggccgaaggtttaaaacttagttttaatgaaaagcctgcaaattatgaaaacttgcaccgtgcgttgctaacaggtttattgtcttttattgccaataagactgatgaacgtaatacctttatggcagtacgtcagcaaaaggcaaaagtttttccagccagcacattgcacaaaaccaatactgcgtgggtgatggcttttgagatggtggaaacctctcaagtctatttacgtacattagcaaaaattgatcctgaatggattttgcttgctgcacgcgacttattgaaatatcactatttcgagcctcattggtctaaaaaagccggtattgtaaatgcttatgcacaaatttcattgtttggtttaattattgaaccgaagcgtttggttaattttgagaaagttgaccaacctgctgcacatgagattttcttacgtgatgcattaaccacaggaaatctggggacagttccaccatttttaaaacacaacttgcttaaacttgaagaagtagagcgagttgaagataaattacgtcgccgcgatttggtggtcgatgaagaaacaatttatcagttctatgcgtcgaaaattcctgaagaaattgcgagtcgtcgtagttttgaagactggcgtgcaactgtagaagcaaaaaatccacgttatttatatgtagaagatgatgcgctttggctcaatgaccgtccgaccacgcagcaattccctgatcatttacataatggtcagttacgtttggcaactacttatcgctttgacccaagtcatgatgaagatggcgcaacggtccaaattccggtacaggcattgcctcaggtagatgaaaatatttggtcgtgggggattccaggctggcgtttagatctcattgaagccttattgaaagccttaccaaaagataaacgtcgtaacctcgtaccgattccagatacggcgcgtaagctcatgcaaggtattgatgctgtacatttgcgacaacatatctttagctatctggcatttgctttacgtggtgagcagattacggaaaaagatttttcatttgaacgcatagatccgtatttggtgccttttattaaggtgattgatgaaaaaggtaaattgatcgccaaaggccgtgacttggctgagttgaaggctcgttgtcgcgtagaaacgcatcgtccggtgaaacagcaaaaaggtgaatttaaaactttccctgaaaactttacctttgaagcttcacagaaggtgacaggtgttgttgttaaacaatatcaagctttagtgccaactaaaaattttgccgaactcgaggcgaaagatgagtccggcgtggttatacaaacatttaacgatcaggcagaggcgattaaacaacatcgcgaaggtattattcgtctggtccatatgcaacttggtgatttggttcgtcagttgaaaaagcagatttcgaaacctcttgcgttggcttattcacctttaggcaataaagctaaacttgagcaaatgctggtatacgcgactttacaaatggcaattacgactttgccaatcaatgctggtgaatttaatcaattgcttgaacaagttaaaaaacaatttttgagctatgggcagcaagcacttgagcaattaagtgatatttatattcagtggcaacaaatccgtcgtcaacttttagtacttgatccggacgtatttggacgcagtatcgatgatattgaagatcagctagatttaatgtcactcggcaattttgtctattgccagccagttgatctttggcaggaatatccacgttatttaaaagcgctgctattgcgtttagatcgattgccaaataatctacagcgagatcatgctgctattgacgatgtcgatccatggatggacaaggtatttaagttcaaaaatgatccaagaatcaaagaattgtatttgatgctggaagaattacggatttctttattttctcagccgatgaaaaccaagatgcctatttcgccaactcgactacaaaagttatgggatcgtttgggaatcagttaa

SEQ ID NO: 42245 - DNA, 1107 bp, Acinetobacter baumannii
atgggcattcgtatcacaggtactgggctatttcacccaacagaaatcatttctaatgaagaactggccgacagtttaaatgcttatgtggaacaatataaccaagagaatgcagagaaaattgcagcaggcgagctagaagaattacgtggttcaagtgctgaatttattgaaaaagcttctggtattaagcgccgttacgtgattgaaaaatcgggtattcttgatccaacacgtttacgtccgcgtttgtctgaacgttcaaatgatgaactttcaattcaagcagagtggggcgttattgctgcaaaacaggcaatggaaaatgcaggtgtaactgctgaagatatcgatgttgtgattttggcgtgttcaaatatgcagcgtgcttatccggctgtggcaattgaaatccagtcggcacttggtattcaaggttatgcttacgacatgaacgtggcatgttcagctgctacttttggtttgaaacaagcggcagatgcaattcgttcaggtgctcgccgtgttttattagtgaatgttgagattacatctggtcacctagactaccgtaaccgtgattgtcacttcatttttggtgatgtggcgaccgcttctattattgaagaaaccactactaaaactggttttgaaattttagatattcatttatttactcaattttcaaataacattcgcaataactttggtttcttaaaccgtagcgaagatgcagtggttgacgacaagttattccgtcaagatggccgcaaagtatttaaagatgtttgtccgttggtggcaaaaatcattaatgcgcagttggaaaaaatgcagttaactgcaaacgatattaagcgtttctggctacaccaagccaatgccaacatgaatgaattaatcttgaaatatgtggctggtaaagatgcagatctaagccgtgcaccaattattctagatgagtttgccaatacctcttcagcaggtgtaattattgctttacaccgtacaggccacgaagtggatgatggcgaatatggcgtgatttcatcttttggcgctggctattcagtaggttcgattgttgtacaaaagcatgttgcttaa

SEQ ID NO: 42246 - DNA, 1263 bp, Acinetobacter baumannii
atggaattattacaccgttttaaaccatgtaatttagcaataactacattattcggtttattaactagctcaagtttatgggcagcagacaccactcaacaaagcgaagatgaatggaagttcacgctaaaaaatgcctatatcaatcgtgattttgataatgatgcactcaaagacacaggcagttggtctcaggcagcctcattattttataagtcgaaaatgtatgacactccgttaatcatagcagacaagccaattacgattggtgccgatgcttctgttcaatacgccgtgcgcttgagttcagacaaacatgtcgcagatacagttttgccttttaataaagaaacgcaatctcaaacatcagatttcttaaaatacggtgcaaccttaaaactgggctatgacaaaaccctgttgagtatcggtgaactctggctggatttacctgtaacggctgtcgatgctagccgacaattgcttgcttcttattggggaaccaaccttaaatcgcaactttcagatcagctttatgccgaaattggtcgggttgaaaaagtttcgccacgaaatgaagaggactttaaaaagttttcattcacggcaaatggaatgaccaaagaatccgatggcctgaactacattgacctacgttatcaatttacaccgtcactcaagggtgaatattactttggtaacttagaagacctctacaataaacactatgtagggcttgagcatacgtggaaacaacctaattttgccctcacctctaagtttaaatacttcaatgcaaaagatgatggcaatacttttgatattgatgcgcaaaacatcggggtgctagaaacacttaaagtaaaaaatcatacctttggtttggggtaccagcaaattattggtgagtcggcttatccattaccggatggttttttaccagaaacctatttcattaactggaatgctacaggtttctttaaagaagatgagaagtcttatcatgtgatgtatggctatgactttaaagattacgttccgggcttaaatgcaatggtgaaatatgtttacggtcatgactttaaagcagccaatggggagaaaaaccacgaaaccgagtcgaatgtgattttaaactatgcgtttcaacagcctttcttgaaaggctttgccctgcaatatattcgaattgattacaacgtaaaacatggcaatgactttggtgaagatcgcttgtttgtaaactacactaaaaagttttaa

SEQ ID NO: 42247 - DNA, 1359 bp, Acinetobacter baumannii
atggacacaagcaaggttaatattaatgagttaattgataaagcccgttttacatcttttcattggaaagttttaatctggtgcttacttattattatttttgatggatatgatttagttatttatggggttgctcttcctctgttaatgcagcaatggtcgttaactgcagttgaagcaggcctgctcgccagtgctgcactattcgggatgatgtttggtgccatgattttcggcacgctttcagacaaactgggacgcaaaaaaaccatcctgatttgtgtcaccttatttagcggatttacctttataggtgcctttgccaaaggaccaactgagtttgctattttgcgctttattgcaggtcttgggattggcggtgtcatgccaaacgttgtggcacttatgaccgaatacgcacccaaaaaaatccgcagtacattagttgcaattatgtttagtggctatgcaattggtggcatgacatctgctctactcggtgcatggctcgtaaaagatatgggctggcaaattatgtttttaattgcgggtattcccctgttgctgctcccgctcatttggaagtttttaccagagtctctcgcctttttagtgaaatctaaccatagcgaacaagcaaaaaatatagtgagtaaaattgcgcctcaaactcaagtcaatgccaatactcaactggtgttaaatgaaagtacaacaacagatgcacctgtccgtgcgcttttccaacaaggccgcaccttcagcacgtttatgttctggattgctttctttatgtgcttactcatggtgtatgccttaggaagctggttgcctaaactcatgctgcaagcgggctattcgttaggggcaagtatgttgttcctctttgcactcaatattggcggtatggtcggtgcaattggtggtggtgctttagcagacagattccatctaaaacctgtcattaccattatgtttattgtgggatcggcagctttaattctgcttggcattaatagtccacaatttattttatatagcctgattgcgattgccggcgctgccacaattggttcacaaatcttactctacactttcgttgcgcagttctatccgacggcacttcgttcaactggcatgggctgggcatcgggaattggccgtattggcgcgattatcggaccagttttaacaggtgctttgctttcatttgaacttcctcaccaaatgaatttcttagcgattgcaattccgggtgtggttgctgcacttgcaatatttatggtcaatctcaaagcctctgttgctgcacaaacgccatcaacttttaaccctcaaaacacgcttacccagcagtaa

SEQ ID NO: 42248 - DNA, 1194 bp, Acinetobacter baumannii
atggcaaccctgttcaagacattaaaaaatgactggtccatatcagcaacagttgcgggctttcttgcagttttaatttcttactcaggcccactgattatttttttccaagctgctcagcgtgctcatgtgtccacagatatgatggtgtcatggatttggggaatttcaatcggcgctgccatttcaggtatttatctttcgattaaatataaaactcctgtgattaccgcgtggtctgcaccgggtactgccctgttagttaccctatttccaaatgtctcattgaatgaagcagtagccgcctatattacttctgccattgttatattcttaattggcgttacaggttacttcgacaaattactgaaatggattccgcaagatgtcgctgcgggcatgatggcaggtcttctttttcagtttggtattagcctatttactgcatctgatagcatgcctttgattgtctttagtatgctcattgtctttttagttgccaaacgtttaatgcctcgctacaccatgatttgggtgttagctgccggagttttattaagcctcattttaggcaaaatgaatccggttgatgtgagttttaatttagcaatcccccagtggattagcccggaatggacttggaactcaacactgaatctcgctgttcctcttattttagtcagtctaaccggccaatttttaccgggtatggcgattatgaaactgagcggttatgacacgccagccaaacccattattacggctaccagtattgcctcgttagccgttgcctgtatcggtggtattaccattgtacttgcctcgattaccgcggctttatgtatgggtaaagatgcacatgaacttaaagaaaaacgatatattgcaggaatcgccaacggaattttttatattttaggaggcttatttgctggcagtattgtcatgctatttagcttacttcctaaagagttggtggcagcactggcaggtttagctttgcttggtgcaattgctaccaatatttctgttgccataaaaaatgatggtcaacgtgatgctgcacttattacctttttagctagcgcatcaggtatgcattttcttggattaagctcagtgttttggggtatttgtattggtgtaatcgcccatttcattcttaccccacgctcaactccagccacaaattaa

SEQ ID NO: 42249 - DNA, 786 bp, Acinetobacter baumannii
atgtcaaaccgtcaaagatttaccgataaagttgtgattgttacgggtagtggccaaggtattggccgcggcgtggcattgcaagttgcagctgaaggtggacaagtcgtcatggctgaccgctctgaatatgttgaagaggtactcacagaaattcagcgtacaggtggtgatgctgtcacggttaatgctgacctagaaacctatgcaggtgcacaagcggttgttacaaaagccatcgaacattatggtcgggtagatatcctgattaataacgtaggcggcgcgatctggatgaaaccttttgaagagttttccgaagaagagatcattaaggaagtgaatcgctcattgtttccaactttatggtgctgccgcgctgtgttgcctgccatgattaagcaacaagcgggcgttattgtaaatgtatcttccattgcaacccgtggtattaaccgtattccctactccgcatctaaaggtggggtaaatgccctaacagcgtctcttgcttttgaacatgctaaagacgggattcgagtcaatgctgttgcgactggtggaaccgaagcgccacctcgcaaagtaccacgcaatgccaacccgttaagtcaaaatgaaaaagactggatgcaacaagtagttgatcaaacaaaagatcgaacatttatgggccgttatggcacaattcaagaacaagtcaatgcaattttatttcttgcatcagacgaagcatcgtatatgacgggatcggtcattccggtcggaggtggagatcagggttaa

SEQ ID NO: 42250 - DNA, 1017 bp, Acinetobacter baumannii
atgtcaaaccacaatgttgcacttcaatttgaagatggtgttacacgttttattaacgtagctcaaggcgaaaccctatctgacgcagcctatcgccaaaaaattaatattcctttggattgccgtgatggtgcatgtggaacttgccgtgcattttgcgagtccggtagttatgacatgccagaagaaacctatattgaagatgcattaacccctgaagaagctgcgcaaggctatattcttgcttgccaatgtcggccaacttcagatgccgtatttcagattcaagcgtcttcagatgtttgcaaaacagaaattcatagcttccaaggtacattggcccgcgttgaaaacttatcagactcaaccatcacatttgatattcaacttgatgaaggacaaccggatattcatttccttgcaggtcagtatgtgaatgttgcaattccagaaactggcgaaacacgttcatattcatttagctcaaaaccgggcaaccgcttaacgggctttgtggtacgtaacgtaccgaatggcaaaatgagtgaattcttaagcaagaatgccaaaactggcgacaaaatgacttttaccggtccattcggtagcttctatttacgtaatgtagtgcgtccagtgcttatgctggcaggcggtactggtattgccccatttatgtcgatgttacaagtgcttgaagaaaaaggctccgaacaacctgttcgtttagtctttggtgtaaccaatgactttgatttagttgctctagaaaaactcaatgagttgcaggcgaaattcccatggtttgaataccgcactgtagttgcaagccctgagagtaaccatgaacgcaaaggctatgtaacgggtcatattgaaagtgaatggttaaacggtggcgacgtcgatgtttatctatgtggcccagtaccgatggtagaggctgtacgtggttggttagaaactgaaaatattaaaccagcaaacttcttgtttgaaaaattctctgcaaactaa

SEQ ID NO: 42251 - DNA, 501 bp, Acinetobacter baumannii
atgagtgctcaagacaaagcaactttagaaaatattgctcagtttctttatcgtgaagctcgctttttagatgatgaacaatgggatgactggcttgaatgctatgcgccagaagcttctttctggatgccagcttgggatgacgacgatagattaactgaagatccgcaatctgaaatttcacttatttattatccagaccgtcaaggtttagaagatcgagtgttccgtattaaaaccgaacgctcttctgcaaccatgccggacacacgcacaagccacaatattgccaacgttgaagttctcgatcgcgacggcgacaaagtcactgttcgctttaactggaataccttaagtttccgttataagacaaattacagctatttcggtatgtcacgttatgtgatcgatttttcaggtgatcaaccaaaaatcttgagcaagtatgtcgttttgaaaaatgactatatcaatcaagtcattgatatctaccacctttaa

SEQ ID NO: 42252 - DNA, 1383 bp, Acinetobacter baumannii
atgccacgtattcctgtaatcaataccagccatcttgaccgtattgatgaattacttgtagacaatatcgatacaggtgaatttaaacttcaccgctcagtttttactgatgatgccttatttgatctcgaaatgaaatacatcttcgaaggtaactgggtttacttggcacacgaaagccaaattccaaataataatgactactacacgacttatattggtcgtcagccgattatcattgcccgtaaccgtaacggtgaacttaatgccatgatcaatgcatgttcacaccgcggagcacaactttgccgttacaagcgtggtaacaaagcaacgtatacttgccctttccacggctggacttttaataactcaggtaaattgctcaaagtaaaagacccaactgacgcaggttactctgactgctttaaccaagacggttcacatgaccttaaaaaggtagctcgttttgagagctacaaaggcttcttatttggtagcttaaatcccgatgttccttcgcttgaagaatttttgggtgaaaccaccaaaatcatcgacatgattgttgaccagtctgaacatgggttggaagttttgcgtggttcatctacctatacctacgaaggcaactggaaactcactgctgaaaatggtgccgatggttatcacgtttctgctgttcactggaactatgcagcaacaactcaacaccgtaaagaaactcaagctgccgataacattcgtgccatgagtgcaggttcttggggtaaacaaggcggtggctcctatggctttgaaaatggccacatgttgctttggacacaatgggcaaatccagaagaccgtccaaacttcccgaaagcagatgaatacaccgaaaaatacggtgaagcaatgtcgaaatggatgatcgagcgctcacgtaacttgtgtctctatccaaacgtttatttgatggatcagttcggttcgcaaattcgtgtacttcgcccactttcagtcaatcgaaccgaagtcaccatttactgtatcgcgcctaaaggtgaagcacctgaagctcgcgcacgtcgtatccgtcaatatgaagatttctttaatgcatcaggtatggcaacgccagacgatttagaagagttccgtgcttgtcaggcaggttacgccggtattgcacttgaatggaatgacatgtgccgcggttcaaaacactggatttatggaccagatgatgcagcaaacgaaatcggtttaaaaccgatgttaagtggtatcaaaactgaagatgaaggactgtatctggcccagcatcaatattggttaaaaaccatgaaacacgcgattgcatcagagaaagaaattgctgatcagggagaaacagcatga

SEQ ID NO: 42253 - DNA, 960 bp, Acinetobacter baumannii
atggaactaagacatttacggtattttgtggctgttgtagaagaacagagcttcaccaaggcagccgaaaaactatttattgctcaaccgcctttgagtcggcaaatccaaaatttggaaagtgagcttggaattcaactctttgaacgaggaagccgtcctttacagaccacaccagcagggcatttcttttatcagcacgctgttaaacttttgtcgaatgctgaagaaataaaaagtatgaccaagcgtattggtctcatcgaaagaagcatgaccattggttttgtcgggtctttactttatgggttgctgcctcgaatcatttatttatttcgtcagcagcagcctcatctgaatattcagctcatggaattaagtacaaccgaacagttgcaggcattaaaagaaggccgtattgatgtcgggtttggacgtttaagaattagtgaccccgctgtgaggcgtattcttttacgtaaagagcgtttggtcgttgccgcgcgtaccagtcatccaattgcacagcgcacagaaggggtatatctggccgatttgattgatgaaaagatgtttatgtatcccacctcgccaaaaccgaacttctcaacccagcttttgaatatttttgccgaacatagtttggttcccaaaaatatgcatgagatacgggaaattcaattggctttgggcttagtcgcagcgggggaagggatctgcattattccagcaagtgccgataccattcgatttccacacttaaactatattccgattttagataacggcgcggtcagcccaatttttattactgcacgggcaatggacagaagtgaagacttacaatcattgttcgactgtatttatcaggtttatgatttagaagggataccttatcaacgaactgtttttacacttgatcagaacccgatagatgattcaaatggtatcgatttttaa

SEQ ID NO: 42254 - DNA, 195 bp, Acinetobacter baumannii
atgaaactacttattgaaaatatgacttgtggtggctgcgcacgtggtgtgactgcaacgattcaagatgtcgatccaaatgcaaaagtagatgtagacttagcgaccaaaatcgtgactgttgaaagcagtgaaagtgtcgataaaattaccgaagcacttgaagaagatggtttcccagcgaaagtgcaataa

SEQ ID NO: 42255 - DNA, 2472 bp, Acinetobacter baumannii
atggactcaaaaaccacaaaattgccagcatatagtgaaacactctcaattgagggcatgacttgtgcctcctgtgtaggacgtgtcgaaaaagcacttaagaaagttgaaaatgtagagattgccaatgttaatttggcaacagaaaaagccgttgtttattcaaatcaaccgattcagcgtgaagcactggttaaagcagttgaacgtgcgggttatgatgttccaaaagctgcgccagtggagttgtctattgagggtatgacctgtgcatcttgtgttgcacgtgtagaaaaagcctttaaaaaagtagagggcgttcaaaacgctacggtcaacctagcaacagagcaggcttgggtacaggcagataattcagttaatgttgaagacttaattcgtgctgttaaaaaagcaggttatgacgcgaaagcgtctgaaaaaaatcaagatgagcaactcgataaaaaagcttcagagttagatcagcttaaaaaagatctgatcatttcgattgtgttggccttacctgtgtttattttggaaatgggttcacatctcattccagcttttcacatgtgggtcatgcacaccattggtcaatacaatagctggcttttacagtttgttttgaccacattagtactcgtttttcctggtcgccgtttttaccaaaaagggattccagccttatggcgtttggcgccagatatgaactcgttggtcgctgttggaactttagctgcctacagtttctcagtcgtggcaacctttatgccgcaggttttaccacaaggcacggtcaatgtttactttgaagcggctgctgtaattgtcagtttaattttactcggacgttattttgaagcaaaagctaaagggcgtacttcacaagcgattaaacatttggtgggaatgcagcctaaaactgcccgcattcagcgtgatggacaaatagtggaagttgcagttgccgaagtggtcagtggaactattgtagaaatccgtccaggtgagcgtgtgccagtcgatggtgaggtggttgaagggcatagctatattgatgaatctatgattacgggtgagcctgttcctgttgaaaagagagaagggcaacaagtagttggaggtacggtcaatcagaacgggactctaaacattcgggcaaccgcagtgggtagctcatctgtactttcacaaattattcgcatggttgaacaagcccaaggttctaaacttccgattcaagggttggtcgataaagtcaccatgtggtttgtaccggctgtcatgctaattgctgcaattactttctttgtttggtttatttggggatcagagcctgcgctgacttttggattggtgaatgccgttgcggtactaattattgcttgtccttgtgcgatggggcttgcaacaccaacttctattatggtcggtactggacgtggtgctgagctaggtgtcttgttccgtaaaggtgaagctttgcagcttttacaagaagcgcaagtggttgccgttgataaaacaggaacgctcaccgaaggcaaaccgacactgacagactttaatgtgcaatctggctttgaacgtaaccaagtgctgactttagttgcctctgttgaagcgaaatctgaacacccaattgcccttgcgattgttcaagcagcagaaagcgaaggcctaaacttattaccagtaacagcatttaactcgattacaggatcaggtattgaggcggaagtttctggtcaaaaagtacaaattggcgcagaccgttatatgcaccaacttggtttagataccaactcattccaagcgattgctgctcaattaggtgaagaaggcaaaacaccactctatgttgccattgaccagcaacttgcagcaattattgccgtggcagacccaattaaagaaacaacctatgctgcgattgaagccttacataaattaggtctcaaagtggccatgattacaggagacaaccgtcatacggcgcaagcgattgccaaaaagctgaacattgatgaagttgtggcagaggttttacccgagggcaaagtggatacagtccgccaactgcaaaaacaatatggtcgcttagcttttgttggtgatggtattaacgacgcaccagccttggcacaagcggacgtgggcttagccattggtacaggaacagatgttgctattgaagctgccgatgtggtgctgatgtcaggtagtttaaaaggcgtaccgaacgcaattgcgctaagtaaagcaactatgcgaaacatacgccaaaacctgttctgggcatttgtatataacgttgcactgattccaattgcagcaggtgcgctatatccagcatttggtgtattactttcacctatgtttgcagcaggcgcgatggcactttcttcggtatttgttttaggcaatgcgttacgcttaaaacgctttcatgcgccagtagagtaa

SEQ ID NO: 42256 - DNA, 402 bp, Acinetobacter baumannii
atgaatatcggtcaggcatccaaacattcgggtatttcagcgaaaatgattcgctactatgaagaaatcggtttacttgaagcagctcaacgttctgcttcagggtatcgtatttattcagaaacagaccttaaaactttaaactttttaaaacatgctcgagagttaggtttttcatctgaacagatgaaagagcttatttcgctttggaaaaataccgatcggcatagtgcagaggtgaaagctttaaccgtaaaacacattgccgaattaaagcaaaaaattgctcatttacaggaaatggttaatattttgcaggcttcagctgatgattgctgtggtgaccaacaggcttcgtgtgcgattttagaccatattgaaaaaggtgtaggcgtaagttaa

SEQ ID NO: 42257 - DNA, 408 bp, Acinetobacter baumannii
atggcttatacagcttcttgtctttgtaatgggattcaacttcgtattaatgccgaattagaacccatcatggtttgtcactgtaagcaatgccaaaaagcacaaggggctgcttttgcggccatcactcaagtacaaaaaagcgatttagagattgtacagggggaaaatcttttgcaagcgtattttgcatcgcctaataaaaaaagagtgttctgtaaaatctgcggttcacctgtctggagtgaacgtttagataaacctgatgtggtgcgtttaagggtagggctcattaatgaagaaatatcgacgccagtcatctctcatgcttttgtcaattcacaagtgaagtggtatccaatttgtgatacggctcgccagtacccaaatggcgtcgaaaacccttga

SEQ ID NO: 42258 - DNA, 357 bp, Acinetobacter baumannii
atgaatagctcacaagaaccaaatcaatctctgtttaatcaagcatctacctctattcaagcctgcattgaatgtatgtttgcttgtaagcattgtgcctctgcatgcctacaagaagagcatgtgcatatgatgcgtgagtgcatcaaacactgcttaacctgtgtagaaacctgtcagttatgcacatctttagaactaagacattccgaacttgctgaacaagccatgcagttatgtgctaatgcatgtcaactatgtgcagctgagtgtagtaaacacgaacatgagcattgccaggtttgtgcaaaagcatgtttagcatgtgctcaagcttgtcaggcatatcgtgcttaa

SEQ ID NO: 42259 - DNA, 330 bp, Acinetobacter baumannii
atgatgaatgcttatgtacgccctcatcccgatggttttaaatcttatttaggaaaggatcagaaaaccggcctctatacagtacgggttggttggacagtatatgaaaccaatgccaatggttctgttttgtatattgttaaagaggaaagtaagattccactggatgtagaaaagtttaaaactgaccgacctaaaatctatgatgcgcttttaaatgaagtgcaatttcaacgcagaaaacaattggctattgatcttcaaaagtccaatattccctcttatgatcgtaaagcctacaaaaagcgccgcggctttacaggctcttaa

SEQ ID NO: 42260 - DNA, 594 bp, Acinetobacter baumannii
atggtgtcatttttatttattggacttgtagtcactattttgttgactccaggaccaacaaatacattattagcctcggctggcatacaagcaggggtaaagcattctcttaagttgattccggcagaggtcataggttacctgatcgcaattacctcatggggtgttttacttgaatcggtgtctcatttcattccatggcttccagccatattaaagctgatgagtgcgggctttatactctatcttgcttttaaactctggatgacatcgtctgaagatattaagttagaccgaccgcttattacaccaaaagctttatttcttgcgacacttttaaatccgaaagctttactttttgcttcagcgatttttccacatacagcgtgggaaattcctcatttatattttattcacattgttgtctttttatctttaattaccccaattgcttttttatggattatgtttggtacagtattaatctcaaataaagtcacttggttaaatcaacgtaacttacaacgtattgctgcatttattttaactttttttgccatgccaatcggctattcagcgattagctcattttag

SEQ ID NO: 42261 - DNA, 225 bp, Acinetobacter baumannii
atgaagagattaaaagttgttattaaagatcagtttgaccaagaaagtattgctttagcaaaggttagacctgcgaacgatcagaaattagagctgtataaaagtgtagagcatatcgaaattgatgacgatattattctaccgaatatggatttactctatgaaaacccaaaagatggaaaaatttataaattagttggcccgtttaatgaagatgaaatatag

SEQ ID NO: 42262 - DNA, 195 bp, Acinetobacter baumannii
atgaatgataaagaactgacttttaaagaaggtcatgacattttaaagcgaaatgccgaattacttgaatctcaggaaagcccagatattgataatttgatgaagattgttgaagaatccattggtgcttataaagcttgcaaagctcgcattgaagcagtccagcaagctttagatgaaacttttaaagaataa

SEQ ID NO: 42263 - DNA, 1263 bp, Acinetobacter baumannii
atgtctgatcctcagctctctcttagtgaatatctcggtacagtgcaagaagtcatacgcctgacttttgacgagcctgtatgggtgagagcggaaattcgtaatttaaatgttaaaggtggacattattatttagagcttgcagaaaaagatgctgacaccgacaaggtcattgcaagctgtaaagcaaccatctggaaattttcagccagtaaaattgttctaaagtttgaacgtgaaacaggtattgagttagctagtgatttaaacgttttaatcaaaattagagcgcgtttcgatccacaatatggattttcagtcaatattgaagaaatagactcaagttttacacttggagaaattgcaaaacgttatcaacaaattgttgaacgtttaactcaagaagggttaatacataagaataaacttctccctactccttttgatattcaaaatgtattagttattgctcctcaaaatgctgcgggtttaggtgactttaaaaaggatgcggatgctcttgagcgaaatggggtttgtcattttgtttatcaaagtgcgacctttcagggaaatacggctgccgtcagtcttatggagtcgttggcaacaggtttaaaacaatgggcaaataattttaactttccacccgacctgattgtaattattcgcgggggtggcgctgtaaatgacttagcttacttaaatgattatgagctcgccgccctcctctgtaaacgcagcgtgccgatttgggtcggtattggacatgaaaaagatcgtactatccttgacgagattgcacaccgttcgtttgacactccaagtaaagtgattgcgggtattcgcaaccatattgttgaacgtgtacaagaagctgtagacaacctgcaaacaatcaaactcttgtcacaacatcaaattacgacctaccaaagtaagagtgatcaatatctacaacatattaaatcctctgcccaagctcagcttaattcagctcaccagttccttgagcagataaaggaacgcattcaatttgtttcacagcaacaagttaaattttctttgtcgcaaactgaatcccttatgcgagaaattcttttgcagaacccgaaacagattcaagcaaaaggttatgcaattgtaagatcagaaggcaaagcaattcgttccattcaccaaatcacaaactctaccattactgttgatatgcaagatggagcaattaacgctaatattaccgaggtaattccaaatgaatga

SEQ ID NO: 42264 - DNA, 234 bp, Acinetobacter baumannii
atgattgtgaatatagtaaatgagtggcaaatcgccacagccgtaaatggcaatgaaattaatgtgaggattgttcctcacgtccgtaagcaaaactcgcttgatggttatcgttgggttgaggttggaaagaaaattcagcttcaaactggtgaagaaattgagttaaaccaagatggaaaaagcttctatgctgggtttaatcaactttatcgtttaaatacatattgttga

SEQ ID NO: 42265 - DNA, 672 bp, Acinetobacter baumannii
atggctcttaaagaccgtttaaaagattcaaggattaaagctaaaaaaacacaggcagaggttgctgaagcagtaaagatgtctcagcctgcttatcaagctttagaatcggggaagaatttaaaatctgcttttcttccactcattgcacagtttttaggtgtagatgcttattggcttactacaggaaactcagaagactcttttagagaaagtgatgtatttagtcctactgtcgtgaataacgatgcagcagaccaatatgtctggatcgaagtagttgaagcgagtttttcttgtggtacaggcgaatcaattgaatttcattttgatgcaattaacggaaaaattcctttccccgcttcattctttaaagaaaaacgtgttgctcaggaatgcatgcgtattatcaaagctaagggcgatagtatgaccgattacatcaaagatggtgatctggtcggtattgatatttctcaaacagaagtaattgatggtgaaatctatgccgtttattttgctggtgaaggcatgattaaacaaatttttaaagaggcagatggctctttaattttgcatagtttaaatgaaaaatttagagaccgacgtgtcactgaagagaacggtaaaaactttaaggtcatggggcgtcagttctggagagcaggctaa

SEQ ID NO: 42266 - DNA, 126 bp, Acinetobacter baumannii
atgttcgtcgataaagggtatcaagaacatgaagaatctaacaaagaatttaatgcgtcacaaaagtttccgatatacggcaacgtgttatctcaactttttggtcaaaaaagagaggttatctag

SEQ ID NO: 42267 - DNA, 390 bp, Acinetobacter baumannii
atggaaaattttttaacttcaaatgggctagctgccgcttttaacctttatggcaccgtcatgatggtggttttagcagtgagcttagttgttgcagtagttttaattatgcgctttccacgttcacctcaagaatgggtcgttggtttgatttgtacggttgtttcaagcttgactggtggctcattcattatcatgaaatggaatttacatgagtgggtgacagatatatggggaatgatcactttaggtggattcttctttatttgtggcttacctggttgggcaattgtgaggtggatatttaatttcattaataaacaagaaggaaaaaccattgttgaagtcatgcaagatctaaaaaaagcgaaagatgatatccaaagctaa

SEQ ID NO: 42268 - DNA, 618 bp, Acinetobacter baumannii
gtgagcggtcttttagtttttataaccattgcttttcttactttatcaagcccaggcccaggcgttttatttacagtaacaaattcaataaattatggtgtgaggacagctttatttggtattagtggtttaattattggtatgtttattatcgctgtgatttctgcaagcggtgtcggacttattattactagcaaccctactatcttcactgctttaaaatttattggggccttttacttaatgtacttaggttataaaaattttattaaaaaatccccgactcaagacttattagaaactgaacataatcaaaaaagtataaagaaatcaaagcttttctatcaagggttgtttgcctcactacttaatcccaaaacaattgtcttttttattgcccttttcccacagtttattgatattaaaaaagaaatattaaatcagtttttggttttatctttaacattctgcttgatcggatttttaattcatttagtttatgccaacttttcctcaatattcaaagagaagatgcttgccggaaataatttttctaagctcaataaagtcagtggttgtatattttttcttttagcagttttacttattactcaataa

SEQ ID NO: 42269 - DNA, 963 bp, Acinetobacter baumannii
atgaagaaatacacccaactttctcaagatgaaagatacgaaatttatgctactttgaaaagtaaaagttcaatcgctacccttgctcgggaattaggacgttcacgatcaaccatctaccgtgaattaaaaagaaatactgggcaacgtggatatagagctcaacaggcagctaaatttgcaagtcaaagacggtaccgtccttcatcatcaatgatagcatttgccttcgcttatattgattatttgattggtttggactggtcacccgaacaaatttcaggtgctttaacacaacgcggttggctggatgtaccttcacatgagtggatttaccagtacatttatcaagataaatcaaaaggcggtaaacttcatctacacttaaggcatcagaagaaatatcgaaaacgcggttacaaaaacacggatcgtagggggcaaatcattgataaaacaagtattcactgccgagaccaggtcattgatcaacgacaacgtttaggagatttcgaaggtgacacggtgattggtaaacatcataaaggtgctttattgacactcgttgatcgaaagagtctgtatgtacatattgttcatttagggccaacgagagcatcctctcaaacgattacttgtgcattagatcgtttacaaatgagccatgcttatagtgtgacatttgataatggcaaagaattttccgaacacaaaagaattactgatgctggcatagagacgtattttgctgatccttacaagtctattcagcgagctagaaatgaaaatacgaatggtttaatccgtcaatatctgccaaaatcatcatcgtttgatgacgtgtcaaacgaacaaatagagcagatagaatttgcactcaaccatcgtcctagaaaaacactaggttggtatacaccgagtgaagttatggctggtttttatactgttgcacttgccgcttga

SEQ ID NO: 42270 - DNA, 216 bp, Acinetobacter baumannii
atgtctaatactactggtacagtaaaatggtttaatgaaactaaaggtttcggttttattcaaactgatgaaggtaaagatgtttttgcacatttttctgagattcaaacacaaggctttaaagttcttttagaaggtcagcgtgttcagtttactgtaacacagggtaaaaaaggcccacaagcttcgaatatcacaattgtgacgaatgcttaa

SEQ ID NO: 42271 - DNA, 228 bp, Acinetobacter baumannii
atggatatttgtattggcggtattttaaacggtaaagtaagaaagaataatgaaaattatttctctataggaaatcctcattcagatgatgtaacggagtatcacaagcaatatttccatttggatggaaagcttttatcattttgggtgtgtaatgaaatcaattttcaagaagcctccagaatagctgaaagtttctttaaaaaagaacaaagttttattaagtaa

SEQ ID NO: 42272 - DNA, 816 bp, Acinetobacter baumannii
atgttgaatatagtacagcctaatatttgtttcattggtagcagtaatttgtctttagctttaattggaggtttagttttaaaaggctttcaaagagaaaaaattaatctaatagaggaagtcaaatttgagaatcaaatcattctaaagcaaaagcaacatgaggtgaaaaaggcagatatagttgttctattactagacccaaaagacttaaaggctatactggcgcccttaaaaaaatggttagctgataaaactattgtgtcgatgatggccggagttaatattcaacaattaatgagtattacgggttcaaaaaaaattatcagagtcatttctaatccccctgtattaacctatacaggtactcatgtgttaattggttcagactatttagagcctttagataaagaagtgatagaaacaatttactcagcaacagggcgaacctattgggcaaattcagaatctcaaagtgatgcgattattgctttatcgggttcaggaccagcttacttcttctatattctcgacagtatggtgaaaacaggtgtttctatggggctagataagcaatttgctttagatctaatacttcaagctgcatcaggcgctgtagaaatggttcgtaaaagtaatgttcaacctagcgagttatgtggcaaggtcaccttagcgaatggtattacagagtctgcattacgaatgtttgaattaggcaacctctctgatgatattcggctggctttaaaagcagcttaccatcgtagtaaagaaataagcttagaaattaatgcagaaattacgagacactag

SEQ ID NO: 42273 - DNA, 459 bp, Acinetobacter baumannii
atgccaaagtatttagctatagcggagaaagtatacaaggaaattaaaaaagataatttatttactgaagataccattcaaaatttaaattgtttaattagcttgattcgtaaagcaattaaaggtactgagttcaaacttaagtacaattttataaattttgaagaatgcttaaatcaatttaataaagaaaaatcagtgcatattgatttaagtcttatgcccaagtttaaaaatgaagatgaattcattttgtggcttgcaggctttattgagcgaatgacaattggagggaaagagaagcttcctccaatttcaaactatattccaaaaggctttaaaattgatcaaaccgaaattcctgtggcggctgaaccaagcaaagaagaaaatgctgagatgattattaactactttaaatctgaggatttcattaaaaataataaaatatcctcttaa

SEQ ID NO: 42274 - DNA, 345 bp, Acinetobacter baumannii
atgaatgagaatgctgaactcattaaatatttagatattgccgaaaatgtatacgaaaatatgtttgaaaagtaccagattacggataaccctgtaactaatctcaatagagtgatggcagaaattagaaaagaagccgaacaaaatgatttaaagttaaaatataccaaaattgattttgaagaatgtttgactaaacctctttctgaaagagagataaaggttgacttaagtctacttcctcgttttgagtatagagatgagtttattttgtggctcactaattttattagaaatattagtgtgcaaaaaaagtttgtaaaacaaaagtactattttaattag

SEQ ID NO: 42275 - DNA, 1107 bp, Acinetobacter baumannii
atgaagaatattactgaaaaatcactttttgatgtttttacccagcatcaagcttatctctaccgagcatcatcgcgatcggtaaatgaactttataagttttttaatagtgaaacgatggttatgcttgatcggttaagcaatttaatgaaagagctgaatgaaactgagaggtttgctcttgctggtggagagtatacaactcagcatctaaaaaacatccaacttgttatttcgaactggtttaattcaattagcacagttttaccggaaatttttactcattcggcaactgctttggctatatatgagtcaaactatatggccaaactatttggtaaggttattaaagatttagagggagagcagctttatcagtcaataaaacgagtgcctttggctggcggtgccttggttgatgaatccttagctcaaattagtgaaaatgcccttcaacgcattgaatatgctattcgggatggtatgaataccggaatgacgcctcagcaaatcatcaaacgtattactggtacaaaacgccttaagtacgaagatggattgctcaacagtaccaaaatcgatattgaaagaattattagaacgctacgtagccatatatcaaatcaggtctatttatataacttcaaaaattttaattttgaatatgtaaggttcgtgagtgttttagatggcaggacttctaaaatctgtgcagccgttgatggttctatttggaaactgaatgactcggcgaaaagagtgccacctttgcatccaaattgccgaagtattctggttcccgtaagtaaggatggaaggcttattgggaaccgatctttcgttatggatgaaagaaaagtacgagatattcctaaagatgagcggactcagttaatgggccaaatagatgcaaatatttccttcaaagagttttttaatctgaccgataattttttccaaaaagaatggttaggccctaaacgttataagttatataaagaagggcaatttgattttgataaattttttgacccaaaggggcggctctatactttggatgaattgagagaattagatgaacgaacttttaaaatacttgggttatag

SEQ ID NO: 42276 - DNA, 1215 bp, Acinetobacter baumannii
atgaaagcttctcttgtatcttcaacatcttcagtagataacaataaaacgcattcgaacctacctcgtagcgtagttttactatttgctatagcaagtggtgcaagcgtagcaaatgtctattatgcacagcctttgctcgacatcttggcgagtgactttaatgttagtcatgccgtcattggtggtgtggttacagccactcaaataggttgtgcacttgccctcgtgtttttagtgccgttgggtgatcttgtaaatcggcgtcggttaatgacactgcaactactggctttaatatctgcattgctaatggttgcctttgcccactctacaattgttcttttgacaggaatgcttgcggtaggtctactcggcacagccatgacacaggggcttattgcctatgctgcaagtgctgcggccccacatgagcaagggcatgtggttggtactgcacagagcggtgtgttcattgggttactacttgcccgtgtattttcaggaggaataaatgatatagcgtgttggcgcggcgtgtacttttgcgcagctatcattatgctcatgattgccttaccactttggaggcgactccctcatttaaatgttcagcctgttaccatgcgctacccgcaacttctatcttctatgttaaagctactgcgccaagaaaaagtcctacaagtacgcggtgtattagccttactcatgttcgcggcatttaatattctctggagcgcattggtactaccgttaagtgcaccaccctataacttttcgcatactgtaattgggtcttttggactgttcggtgtaatcggtgctctagccgccactcgtgctggccaatgggccgaccgcggatatgctcagcgcacaagcttggcagcactgttaatattgctgctcgcatggtggccgctttcactcatgacctactcactttgggcgctggtgattggcatagtattgctcgacttaggtggacaagccctgcatgtgaccaaccagagtatgatttttcgtactcgcctagaagcacatagtcgtcttgtgggtctatacatgctcttttatgcagtaggtagtggactgggtgcaatcagcacaacagcgacttatgcttatgcaggatggctcggcgtatgtagtctaggcgcatgtgtaagtttattggcgttattattttggtggagaacgatgaagctataa

SEQ ID NO: 42277 - DNA, 447 bp, Acinetobacter baumannii
atggctaactctacattgatgaaagaagaaccttgtcctgttgcacgctgtgtcaatctcataggagatcgctggtcactgcttattgtgcgtgatgcttttgatggaatgcgccgttttggagatttccagcggagcttaggcgttgcacgaaatattctttctgaccggctgaaaaagttggtggatgttggtgttcttgaaatgcaagatgcttcagatggtacggcttatcaggaatatgtgctaacccctaaaggggagagtttatttcctgtgattgttgctctacgtcaatggggagaacacaacttattcgaaagtggtgagcgccattctctgttaattgataaaaatacaggtcaacaaattccatttatggtgccagtcgcggcagatggaaaattgctaaaagcctctgatactcaagtgcaaaaggtgaaataa

SEQ ID NO: 42278 - DNA, 330 bp, Acinetobacter baumannii
atgagatttatattcctctttataagcgcaatttcaattcaatgttatgcagcatcggaagcgatggaactccattactgtgaaactgtgaaaaaagcagcgagtggcgtgatggatgctagacaacatgaagtgccagctaaagagttacatgacatcgccaatcatcttgaagagcaacaagccaaacaactttatcaagagcttatcaaatctgcatattcttcaaagctatttgaagaccctctcattaagtcaaaagctgtcgagaattttcaaaccacttggcatgaacaatgtttggcaaaagaattagctaaaaatatgtga

SEQ ID NO: 42279 - DNA, 147 bp, Acinetobacter baumannii
atggctagcttaggttggaagatagaactttatttcttacttacctcttcgctaacactggctaagcgcggtaaagaaggagagaaggtattagttcgggttcttaatatcatgcaaggccaacgttacatcgaaatttgtgagtga

SEQ ID NO: 42280 - DNA, 594 bp, Acinetobacter baumannii
atgaaagctattttaacgaagaaaattattagctgtatcgcaattagtggtgttttaagcttcagtgcatttgagattatggcagcgaatcaacaaactataaatgatgggaagaaccactctaaaatattaaatgaaaaccatgaaaatttgactgatagtcaaattttcaagatattaagtacagctaataatggtgaaattaagcaggcaaaaactgcattgccaaaactaaaaatggatgaagctaagaaatatgctgaaatgatgattaaagaacattcagccaatgaaaaaaatacacaagcgttggcaagtcggttacagttgatttcacaaaccagtaatcttagtaaatcattgcaaaatgatagtgataaaattgttagtaagcttaatcaaataacatctgatactgataaaaattatatgatgagtcaagttaaagttcaccgtaaagttttgacgataattgataagcagttaataccaaacacgaaaagttctgaattaaaaaatatgctcgtacaaacacgtgatgctgttgcgaaacacctaaaagcagctgaagatatatttaaaaatatgaaataa

SEQ ID NO: 42281 - DNA, 630 bp, Acinetobacter baumannii
atggtaaatacaaaacaatcaaattcagttggtaatcatacggctcaaaaggagccatcttctaatggtaatgtatcaaatagcaaaccattacaagacatttcatccacaattgataatgctcgtccagatttaaactctccaccgactaataacaatcatgtacccgatatgaatgaagggggagagaatttggttgctacaggtgcaggaaccttgggaggagcggcggtaggtgctgcatttggtgttgttggtggccctccaggtgctgttgttggggggattattggtggtgtggtaggggcaatagcaggtaatgatatagctcaaacaaataatcaaaaagatgatagtaatgactggcaagaagaagataattattggcgagaaaactataaaaaaatgccatattatactgaaaacaagaatctagaatatgatcgtgattatcgggcggcttatcgtttaggttatgaaaatcgtgtagataataatgcagaaattaatttttccgaggttgaatctaaattgaaaactaaatgggaacaaattaaaggcagttcacgcttacagtgggaggacgctaaatttgctgtagaagatggattgaaaaaaattcatccttaa

SEQ ID NO: 42282 - DNA, 1422 bp, Acinetobacter baumannii
atgcaaccgtttgttttatataactctgagcaacgaaaaaaagttgaatttgtacctcgcaaagaaggtcacatcgatatgtacgtctgcggtatgaccgtttacgactactgtcatatcggacatgctcgagttatggttgcatttgactacattatccgttttttgcgtagtcaaggctggaaagtccgctacattcgcaacattaccgatattgatgacaaaatcatcaaacgtgcgaatgagaatggtgaaacaatccaacagctcaccacgcgtttcatcgatgccatgaatgaagatgcagcgaacttaggctgtttagcaccagatgaagcacctaaagcgactgaatatattgaccagatgcaaaatatgattggcaatttggtaaataaaggcgctgcttaccctgcttcaaacggtgatgtttattttgaagtcaccaaatttgaaaaatatggtcgcctctctggccgtaagcttgaggatatgcaagctggcgcaagtgagcgtgttgatgtagaagttgaaaagaaacatccttttgactttgtgctttggaaacatgcaaaagaaaatgaaccatcttgggcgtccccttggggtaatggccgtccaggttggcacattgaatgttctgcaatgtcgacttgctgcctaggcaatcactttgacattcatggtggcggttcagatttaatgttcccgcaccatgaaaatgaaattgcgcaaagtgaagcttcgactggtgagcaatatgtaaactactggatgcatgttggctttattaacgttgatggtgaaaagatgtctaaatctttaggcaacttctttacgattcgtgacgtaatggagaaattccacccagaagtgatccgctactttattgtgtcttcacactatcgtagccctgtgaacttctctgatgtagcacttaaagaggcaaaaacttctttaactcgtttctatcattcatttaaagcttatcaacaagtgtacggtcaaacgacaactgaagcgcttgatcaaagctttattgaacgctttaacaatgcaatgtgtgacgatttcaatactgccgaagcaatggctgtattgtttgaactgaacaaagagttaaaccgtgctgtaaaagaagagcaagctgaccaagcgactgtgctttattcgacattacgtcacctcaccaacattttaggtttggtacaacacaatgtagacgatttcttaaaatcagatattggacaagatgcacttgctttgtctgatgctgaaattgaagatttcattcaacaacgtgttgatgcgaaaaaagcaaaagactttgctaaagcagatagcattcgtcagtctttacttgagcaaggcgtagttcttgaagacactcgccaaggtacagtttggcgtcgtgctgattaa

SEQ ID NO: 42283 - DNA, 978 bp, Acinetobacter baumannii
atgcctaatcctacagatttccaaagcagtgcattagcgacattgcgcattgagcaacaagccatagatgtattagcaacacaaattgatgaccgttttaatcgtgcttgtgaaatattattacaatgcaaaggtcgtgttgtgatcacaggtatgggtaaatctgggcatattggccgaaaaatggcagcgacatttgcttcgacaggcacgccgtctttctttatgcatcctggcgaagcagggcatggtgatttaggaatgctggttcgtggcgatgtacttattgcaatttccaactcgggaaaaagcgatgaaatcatgatgttaatgccactcattaagcatcttggtgtacctcttattacgattagtcgtgatgataaaggcccaatgccgcaaaatgcagatattgctttaactctgggtgagtctgacgaagcatgccctttaggtttagcacctacttcaagtacgacagcgactttggttttaggcgatgctttagcagttgctttacttgaagctcgtggttttactgctgatgactttgcacgttcgcatccggcgggtgcgttgggtaagcgtttactgttacatgtaaaacatttaatgcatacaggggacgagttaccaaaagtttcacctaatacaccaatgaatcaagtactttacgagatctcaaataagcgtttaggtttgacaacaattgttgatgaacaagaccatctacttggtatttttacagatggggatttacgtcgtctcatcgataaacagcaagggtttgatgtaaatttacctgtgtctgaagtgatgacaaagaaaccgtcaacgatctctcaagaagcacgagctgtagaagctttacaacaacttaaccagaaaaaaatcagtcagtttgtggtagtcgatgaccagaacaaagtgattggtgtaattagtatgcatgaccttattcaggcaggggtgaattaa

SEQ ID NO: 42284 - DNA, 540 bp, Acinetobacter baumannii
atggcatcgtatgcattgttagaacaagcacgtcatttgcaggcattggttctggatgttgatggtattttaagtgatggctttgtgacattaaccaacacgggcgatgaaattaaatcattcgatattcgtgatggtttgggtatgaaacttgcgcaacaagcaggtatgaaagtcatcattattactggacgaaaaagtaatatcgttgaaaaacgcatgtccgatttaggcgtcgatctggttttccaaggccgtgaagataaaggctcggcactacgtgaagcgtgtgcacagtttaatatcctgccttcagattgcttatacatgggtgatgattggccggatctttcagcatttgccattgccggaatgagtgttactgttccaaacggacatgaagaagtgcgccgtcgtgcggatttggtaacacaggcgatgggtggccgtggagctgtgcgtgaagtttgtgatatgttgctgatcgcaaaaggcatttaccaagaacttcttgaaaaatatcttgcagtaccgcattaa

SEQ ID NO: 42285 - DNA, 549 bp, Acinetobacter baumannii
atggataccagagttttatatattgttgctgtagtggttgctgctgtgagtggtggttactactactatagtggcaaggcaaaaaaactggacattggttcggcgaagaatatgacttattcggcgcagggcgtccatttgactcaaactgatgacaaaggcaatttgtatattcgtgctgaagttcgtcagcttgaacaggatatgcaacaaaaaacgtcaaagttggatcaactcaatgccactatgtataaattaggtaaagttgatgcaacattctttgctaaacaagcttatggatatgatgataatcaaaaggttgtgttatcgggtgatgtggtagccactaagctggcaccgcaaggaaccattgagtttcaaaccgatgaattaactggttatccaaaaactagagatattgaaactaatcatcaagtgacagttcagtctccacaaggcgagtttgtgagtaaaggactaaaagccaatttgaataatggtcagtacgaattttttaatattcgaggaaagtatgcaccaaagtcttaa

SEQ ID NO: 42286 - DNA, 549 bp, Acinetobacter baumannii
atgcaccaaagtcttaatttaaaacgttcttcagctttcctaaaacaagctgcggtaattacattcgttgctttatcatctgcttcgacttttgctttgccgtctgaccgtaatcaaaaaatttcgttagtggcagaccgagcaacttataatgaaaaaaccggtttgacgacttatacgggtaatgtcgtgattgagcagggcaccatgaagcttcaggctgactcaattgtggctacgctaaactctaaacgtgaaattcaaacgatcactgctaaaggtagaccgtctaagtttcagcaacaaataagtgctgataaaggtattgcacgcggtgaaggacaaacgattgtttataatgcagatacaggtattattaccttgtctggcggtgcatatttataccaagatggttcaagtattcgcggtaacaccctgaaatatagtatgaataagggtgatgttgaagctcaaggttcttcttcaaaccgtgtacaaatcattattccaccttcaagttcaaaaagtttcccaggagcgcgtgactaa

SEQ ID NO: 42287 - DNA, 747 bp, Acinetobacter baumannii
atgcagcaagctcttcaacaaccgcaaactttgtgtattaaacacttagcaaaaaactatagtaagcgttgggttgtcaaagacgtctcttttagtatgcaaagtggacagattgttggtttgcttggtcctaacggcgctggaaaaaccaccagtttctatatggtggttggactagtgcgcatggataaaggtgagattcatcttgatgacttggatatgtcagacctagcgatgcatgaacgtgcacgtaagggtattggttatttacctcaagaagcttctatctttagaaaattgacgattgctgaaaatattatgtcgatcttagagacgcgtaaagatttgaataaacagcaacgtcagcagcgccttactgagttattaaatgactttaaaattagtcatattaaagattcattgggaatgagtgtatctggtggtgaacgtcgtcgtgcagaaattgcacgtgctttggccgcagatccgaaatttatgcttctggatgagccgttcgctggtgttgacccaatttcagtaggcgatattaaagatattatccagaccttaaaggatcgcggtattggtgtcctcattaccgatcacaatgttcgtgaaactttagcaatttgtgaacgtgcttatattgtaagtgaaggctcggtaattgccgaaggcacaccacaagaaattttagacaatgaacaggtacgtaaagtctatttaggtgatgatttcacagtttaa

SEQ ID NO: 42288 - DNA, 1467 bp, Acinetobacter baumannii
atgcttttaagtacactacatgtacctgtcgtgatatacgctgctaagccaagtgagcaataccacaccctgaaagagaacttgtcacaactttttgtccctaaaagtagtgatgactttaaagttgccaaaatgcacaagcttagtaattttaagctagaccgttctattgtgcaggaatttcctactgttcaacttaatgataatcgagcttcatctttttctaacttgccatctagaacgatgacattgcaagatgcggtaaaaattgccattcagcgtagccccgatatttcacaatctattgcaactttagcaggtcaaaattcaggagttgacgttgctaaagccggttactatccccagctttcaggagggattacgactggtgatttaagcagtggagaacgaggtcggcagttattaactttaagtgctacccaaatgctttatgacttcggtaaagtcaaatcaggtgttgatgttgaagaagcgaaagttcaggttgaacaagccaatgttttggttagcgttgatactctagctttggatgttgcacagaccattgtgaatattcagcgttatctacagcttaataaaattgctgagcagcaaatcgccggtattcgacgtattcaggaaattgctaacctgcgtgcaaacgctggtgtcgcgagtcaagccgacccaattcaggcgcagtcatacttacaggcagcgcagtctgctttgattgctcagcaatcattattacgtcaataccaacagcatttaagaaccttattaggtgcagatgttagtcataccggatggattatttccgacgatctcgtgaagcaatccgatctttatggtgaacctgagtttaataccattccaaaaatgattgccgcgcaggcaggtgttgaggttgcaaaagctcaaaaacaacaaacccgtttaacccgatatccgaccttggctgtgaaaggttcggtaagtcaggcgattaatggtaaaaacccgaataacgacaaagatgacggtttatatagttcagtcatgcttgaagcaaccagtcagttttaccaaggtggtgctacagcttcacaagtaaaaatggcaagttatgccgaagaagctgcaaaagccaaagtgaattcggtatatatggatgttctggaccaaattagaacaagtcgcgaacagattgaaaataaacagcgtcaaatgcaggttttggcaagtcgccaagcaacaacggttcgtacacgtgaactctatcaagagcaatacaagctcggtacgcgttcattggtcgatttattaaatgctgaacaagctattcatagtgccaactcagaactcgaatcagcacgttatgacatttatagcagcattgttcagtacattgaagcaacaggacgttcccgccaagcctatggcttaaataatatttcaattcaggggttcgaagtacaaccatga

SEQ ID NO: 42289 - DNA, 2142 bp, Acinetobacter baumannii
atgatgacaaaaataaattaccagccttggctacaggcggtcttaactattgctaaacattatcgaatagagccttcagaagaaagaattcgcttacaacttgattggaaccaaaatcagaatttagataacgtcttgcagttaatgacacgtcaagtcggtctgaatcttcgtaaggcaccattttccttagacttactcaacccatggcgtttacctgtcatggtggagtttaatgatggtcaagtcggtgtaatcgataaggccgatacacaaggaaatgtgagtatccagttcagtggagatcagggcctttcgcaaagtttatctttagatgctttaaaaactacacttaaaaatgtctatatcttgcgtcctgaaacatctattccagatgcacgtattgacgaatatatcaaaccttatgaagccaactggttctggtcaatcgttttaagagactggaaacgctacgttgatattatgtttgcctcgctgattgccaatgtgttagcactggcaaccattattttctcgatgcaagtgtatgaccgcgtggttccatcccagtcaattccaactttatgggttttggcgggtggtgtactgattgccgctctttttgagtttaccttacgcgtttcacgagtatatttatccgatattattggtaaacgtgctgatttacgtgtgtcggatcgtgtatttggccatgccttaagaattaaaaataaagatcgctcgaaatctacaggtagttttatttcccagattcgtgaactcgagggcgttcgtgaactggtcacctcaactacaattagtgcgattgccgattttccgttctttttcctgttcttagtaatttttgccattattggtggaaaactgttctgggtaatgctacttgttgtgccgcttatgatcttgccgggtattttggtgcagaagaagctggctcaacttgcacaagagggtatgagagaatcttcaattcgtaacgcaattttggtagaggcggtgcaaggtattgaagacattaagctcttacgtgctgaatcacgtttccaaaaccaatggaaccatatgaatgaagtctcagccgacatcggtatgagacagcgtaaaattgtgggtaccttaatggcttggacccaaatggttcagggtttaacttatgccattgtggtgttagtgggctgttttgcggtaatggacggtgaaatgaccacaggtgcgttagtcgcatgttcaattttatcttcgcgtatgttagggccaattgcccagattacgggcgtattaggtcgtttacaacaggcaaaagttgctaagcaaagtttagatgagctcatgcagcgtccgattgatcaggccgaccgttcacatctggtacacaaagctgttttaaatggcgactatgaattaaaaaatatcttgttccaatatggggaagaagatccgagaccaagtcttgcgatccgccatttaaaaattcgtgccggagaaaaaattgcgattttgggtcgtaatggtgctggtaagtcaacattgcttcagcttttatctggcatgcaggttccaactcagggagctgtgcatttagatggactcgatctttctttaattgacccatcagatgtgcgccgagatatggggctactcaaccagaatgcacatttattctacggaacaatccgtgaaaacctgactttaggtgcaccgcttgcaacagatgaagatattcttcgtgcattggtggtaacaggtgctttgtcttttgttcaagagaaaaaagaaggcttggattacttggttttagaaggaggcgttggtttctctggtggtcaaaagcaagctttattgctggcgcgtttattgattcgtcaaccgaatattttattgcttgatgagccgacagcagccattgatgatgttgcagagaaacaattaattgatcatctcaaaggatggttagcacaccgaacgttggttgtggcgacccaccgccgagctgttcttgaactggtcgatcgaattattgttgtcaatgaaggcaaaatcgtgatggatggaccacgagatcaggtacttaatcaatctacagcccaacaaaaacaagtgagccaagggggcaattcatga

SEQ ID NO: 42290 - DNA, 1191 bp, Acinetobacter baumannii
atgagcgaacaacaacaagaacttacccgttcaatgaatgtatcttatagtgaaccaccattaccacgtgccagtttagtcatctggattgtgggcattggtttagtgattttctttatctgggcatggttttttaagcttgaagaagtttcgaccggtacaggtaaggttattccatcctctaaagaacaggtcatccagtctttagaaggtggtattttaactaagctaaatgtacaagaaggcgatattgtccaaaaagggcaaattcttgctcagcttgacccaacccgttttgcttcaaatgtgggtgagtcgagatctttattaattgcagctcaggccacagcagcacgtttacgtgcggaagtgaacggtacaccattggttttccctgaaatagttgcacaagatccgaagcttgttcatgaagagactgctttgtatgaatcacgcagagccgatcttgaacaaacgctttcaggattaagacaggctttacaactggttcagcaagaattggccatgacagagcctttggttgctaaaggtgcggctagtgaggttgaggttttacgcttacgccgtgaagcaaatgatttgcaaaacaagatgaacgatgcacgtaaccaatactacgttaaagcacgtgaagagttatctaaagcaaatactgacacgcaaactcaacaacaagtggtcatgggccgtaatgacagtttacagcgtgccgtatttaaagcccctgtgcgcggtgtggtaaaagaaatcacagtgacaacgcatggcggtgtgattccacaaaacggtaagttaatgaccatcgttccaattgatgaacagttattaattgaagcccgtattttgcctcgtgacattgcgttcattcgtcctggtcaagaagctttggttaagatcacggcctatgactactcaatttatggtggtttaaaaggtaaggttacggttatttctccagataccattcgcgatgaagtgaaacaggatcaattctattatcgtgtttatatccgaactgattccgataagctttacaataaagaaggtaaagcattcggtattacaccgggtatggtggcaactgtagatattcgtacgggtgagaagactgtactggattatttacttaaaccatttaataaagccaaagaagcattaagagaaagataa

SEQ ID NO: 42291 - DNA, 600 bp, Acinetobacter baumannii
atggcttttacaattgcatcacccgttacttttgaagaagaaattaaaaaaagtagatttcaggcgattgctgcgccagtagaaaatgaacagcaagtgaaagagtttttagaattaaataaagatatctcaaccacacatcaatgttgggcatggaaaattggtcataacgttcgctttaatgatgatggggaaccatctggtacagcgggacgtccaattctggcaactattgaaggaaatgacctgactaatattattgtcatggtgaaccgctggtatggcggtataaaactgggaactggtgggcttgttcgggcatatggtggttgtgccggacaatcgttattgttagctgaacgtattgaactgattgccaagaaaacgattcatttttcttgtcattttaatgagtgggccatttttcagtatgagctgacacagcagcaaattgaatatcaggaaagctacactgcaataggtgtcgatattgaagcgagactacaggttcaccaaattgaaccactcgctttaaaactacgagatgtgactcgtggtcgcgaagaattaaaagttgaggaggaattgactgatgactga

SEQ ID NO: 42292 - DNA, 612 bp, Acinetobacter baumannii
atgactgattctttactcaagtaccgcgagcaacataaacaccgtttaaattatatgccatggctatattggacattgaaacccaaacaccgtgtttgggcggaagaatggcaaaaagaatatcaggcttatttaatggatatggaaacggtcgagatcggggagaactgttttatttcaccgttagcccatatttttgccgagccgggacggaaaattaagattggtgataattgttttattgcggcagattgtagtttgcatggaccgcttgagattggtaatgaggttgcaattaaccaccactgtattttagatggtggtcgagcaggcataaaactacatgatcaagttcgtattgctgcttattgtcatctctatgcatttgatcatggcatgcaactcgaccgtccactttaccaacagcctgttcgctcacagggtatcgaaattgaaaaagatgtttggttaggtgcacatgtggggattaaagacgggattaaaattggaaaacatgctgtagttggcatgaatagtatggtgacaaaagatgtggagccgtaccatattgtgggaggaaacccagcaaaatttatccgtttaagagaataa

SEQ ID NO: 42293 - DNA, 843 bp, Acinetobacter baumannii
atgaaccgtgttattgcgtgtattgactcatcaccttgtattaatgctattgcagatgcagcggcttgggttgcgaaagcaactggacgagagcttgtattattacaaattctagattactacccggcaagttatcaccttggtgaaattagtggtgtaatcggctttgaaagcaatgcaatgttgcttaaagagttagctgaattagagcaaaaacaaagtgaactcgctttagattacagcaataatttactcagacatatctctgacttaattaaagaaaaacacggaattacttgctcaaaaattcaggaaaaaggggattttctagagcaaagttttaatctcttacacgaaaacgatatcgtgattttaggtcgcgtaggcgaaagagctgccgaaaaacataaaccgattggcagcaatgttgaaaactttatccgcggtgcaaattgtacggttttgaccattggtgaaaacttcaaagtaccgacacgttttattttcgcttatgaatactctccgacatgtcaaaagatgatgcgccgtattgcgcaaagtgacctattacggactttacagtgccatttagtttatgtcggtgaccatcctgaaatattgaatgaaccagagcattacttgaaacaagcggggctagatgtagtgaccgtttatagatacggcgatgtggcgcaaaatattctagagtaccaacaagaacacggcattcaaattattgtgctcggcgcatttagccatagcaaaatacatcagttcttcttgggaagtattgcaaccacgattttccgtaacgcgactgtaccattacttgtggctaaatga

SEQ ID NO: 42294 - DNA, 669 bp, Acinetobacter baumannii
atgcagcagatgtggacagacattgacgaatatatcgattcacatttaattcccgaagatcctcgactcgactttgcattaaaaaataccgacgaacacggcttttcaaatcatcttgcagttgctccaaatcaaggaatgttcttgcaaatgctcattcagatgaataaatgcaagcgtgttttagaaattgggacctttgctgcctacagtacaatctggttaggacgtgcactgcctgaagatggctatttgcttaccattgaaggtcgtgatactcatgcagaaatggctcaaaagaatatcgatcatgccaacctgcctgtaaaagttgagcttaaattaggccgtgctgccgatgtactttccgcaattgaccctcagtcgattgagccttttgattttatctttatcgatgccgataaacagggctatccggaatatttagaactcagtctcaaattttcaaaatctggcactattattgtgctagataatgtcattcgtgctggtgatattttgaatcctgaaaacaaaaaaccaagtattgaaggcattcgtgaaacctttaaagccctagaaaatcatccgcaaattttgtcttgcacagctttacaaacggttggctcaaaaggtcatgacggttttgcaattgcaattgtgaaataa

SEQ ID NO: 42295 - DNA, 702 bp, Acinetobacter baumannii
atgctgcccctatgcataatccctgcgattatggtgggttgcgccagctctcctcaacacacaacaacaggcaaaacctctccaagcggtaagcgcatctttattcctcaagagcgcgttattatcgaacgtccaattccacctaaagttgaacctgcttcctatcgcgcttggttaaatacaggcgatcattatgaacgtgtacgcgaatatgaaaaatttctggcgcgtcatgatgtggcaggtatcgtaccaagttttgaattattaagatccgctcgtgattggcagaagtgtggccgttcagaatatgcggtacctaaccgtgaactttggaataattctttatcgaccttacgtgtctttaaatatcttattgccgcaaaagttttaaccgactttgaggtaacttcggtttatcgagacttacctttaaatgaatgtgcaggcggcgcaagttcttctaagcatttatttaactctgccattgattttcgtattggaccagaagttccacagccccaagactatgcttttattgaaaatacgaagtttaaattgtgtcagttctgggctcagcacggccaaagtttaaatttaggtattggtttatatagttcaggacaaatccatattgatactcaaggctatcgtacttggggacctgacttaacccgcaatacgtcaatgtgtaatttctaa

SEQ ID NO: 42296 - DNA, 324 bp, Acinetobacter baumannii
atgacctttgttgtcactgaaaattgtattaaatgtaaataccaagattgcgtagaagtttgtcctgtagactgtttttacgaaggtccgaatttcctagtgattaatccggatgaatgtattgactgtgcattgtgtgaaccagaatgccctgcaaatgcaattttctctgaagatgagctaccagaaggtcaagaagtatttattgaattaaatgctgaactttctcaaaagtggcctaacattacccaaattggtgaacagcctgctgaccgcgaagaatggaacggcaaaccagataagttacagtatctagaaaaataa

SEQ ID NO: 42297 - DNA, 576 bp, Acinetobacter baumannii
gtgtataggcatgtttgctcttactttaaggagaataaaatttctattttcttaaggccactgcaatacacagagatcgatttaatttggcaacagattaatcgtcgtgaactgattacccaactctacttacaaaagcaagaacacttagaattaacagattgtttttatgatgttaaacattgggatgcttatcatttagaaaatgatccgcccaaattaaaagaactttatgaacaaggggctttatttatcggtgcttttgatgcgtctgaacagttggctggcattagtgtagtctcgaatcagactattactgattatcccgatgcaaaattactgcaatatttttacgtcgatgccgatcaacaaggtaaaggtattggtgcaaagctgatgcaagcggcaaaagaatcggccaagcaattggaagcccatcaactttatatttcagccactccaagtaagcgtacagtagatttctatataaagcatggcgcggtcgtattaaagcacccagatcgtcaattatgggaacttgaaccagaagacatccatttactttgtacactttaa

SEQ ID NO: 42298 - DNA, 2646 bp, Acinetobacter baumannii
atgaatagcgctgaaatcatggctgatctctccaaccacactccaatgatgcagcaatatctcaaagtcaaaaaagactatcaacatgcgttgctgttttatcgtatgggcgacttttatgaactgttctttgaagacgcgcatttagcagccaaacttttaggaattaccttaacccatcggggtaaagcaaatggcaacccgattccaatggcaggtgttccctaccattcagccgaaggttatttggcgcgtttagtaaaagccggccgaactgtagctatttgtgagcaagtcggcgaagttactggcaaaggcccggttgagcgcaaagttgttcgtattcttacaccgggtactttaactgacgacgcattacttacaagttatcagtcctctaaccttgttgcgctatgtatccatcaaaaccagatcggttttgctttactcgacttaagtgcgggtatttttaaagttcaacaacaagaatacaaaccggaacaacttccaattgaactggctcgcctcatgccaagtgaaattttgattgatgaagatctggttgacccgaatattatcgaacaaattaaaaagcatttagattgccctgtaaccaagcgcccaaatgtcgattttaatttaaacaatgcgcaaaaaaccttatgtgaccagttctctgtatcaacactctctggtttcggactagacccgttacctttggctaaagccgccgcggcagcacttattcactatgccaaagaaactcaaaaaacggctttacctcatatccgttcaattcttttagaacaaagtactgactttattgcgctcgacccaatcacgcgccgtaacttggaaattattgaacctttgtttgagcacggaacttctttatttcagcttgtgaacgattgccaaaccgcaatgggtggacgtttacttagccgaaccctcatgcagcctgtccgtgatacagcattacttgacgcacgtttagatgcgattgagcaattgattcaaggctaccatgaaagcccagttcgtatggtgcttaaagaaattggggatattgaacgtgttcttagtcgtgtggcgctgggtagtgcgcgaccacgtgatttagttcaacttcgtcatgcttgcgcgcaaattccatttttacgaaatgctttagcacctgttgtacaagcaaagaaatctaagttattaggacagctcgatcaggaattgggtgactttaaatcgcttcatcaacatttaatggctgcaattgttgaaaatccgcctgtattacttcgtgatggcaatgtaattgcagaaggctatgatgctgaacttgatgaattacgtcaaattcgtgatcatgcaggtcaattcctcattgatttagaaataaaagagcgtgaacgtactggtattagcaccttaaaaatcggttataaccgtgtgagtggttactacattgagctgactcgtgctcaagccgagcaagccccggccgactatatccgccgtcagacattaaagaataccgagcgctacattacgcctgaactaaaaagttttgaagataaagttttatcaagtgagtcgcgtgcattagctcgtgaaaaagcattatttgaagctttacttgaaaaccttcgtgaaaatattgctcacctacaaatgatgagctcagcaattgcgcaaattgatgtaattgcaaactttgctcatcaagcgcgtttaaacaactgggcacgtcctgaatttacaccagaaacaggtattaagattcaaggtggccgtcatcctgtagttgaagcgttaagtaaagcaccatttacaccaaatgatactttccttgatgtgcagcaccgtatggcaattattaccggtccaaacatgggcggtaagtctacctttatgcgccaaacagcattaattagtttgcttgcttactgcggtagttacgttccggcacgagctgccaaacttggcccaatcgaccgtatttttacccgtattggttcagccgatgacttatcgacaggcaaatcgacctttatggttgagatgactgaaacttcacaaatcttgcaccatgcgacgaatcaatcgcttgtgttaatggatgaagttggtcgcggaaccagtacctacgatggtctttctttagcgtgggcttgtgtggttgatttaaccaaacgcgttaaatgtctttgcttgttcgcgactcactattttgaattaacagagttgggtagcgaacctggtattgataactaccatgtcactgctcaagagttaaatggtaatctcattttattgcataaagtccaacaaggaccagcgagccaaagtcatggtttacaagttgcaaaattagccggtattccagctaacgtgattaaggaagctcagaagcgtttacgtattttagagaagcaacaacagcagcatttacaaactagtgttcaaagtgatttgtttgcaactttagattcagaagttaccccaagcactcaagttatagagaaagtgattgaagttgaagtctcttcacctgccctcgatttacttaagcaaatcgaagtagacaacctgactcctcgtcaggcacttgaacagctttatgagctaaaagcagcgcttaattcataa

SEQ ID NO: 42299 - DNA, 468 bp, Acinetobacter baumannii
atgtcagagatttctttagataattttgattatgcgatcttaagaatactgcaaaaagacaataaaacttcccatcgagaaatttctgaaaaaatcggtctatccgctgcatctgtacaaaggcgtataactcggatggaagaaaaggaaattattttaaaaaattgcgctatcttaaatcccctcaaatttggtgaaaaaattacttccattattgaggtccgccttagcgaagatcgttcagtagttatggacagagcgaagctatactttgcttctgttgaagaaattcaacagtgctacttcgtgaatggaggagtctcatttataattatcatgctgagcaataacttatctcattttgaaagtttagttagaaaacatttcgctgataatgaagacgtgaaaacttataggacactcattgttttagatcgtgtaaaagtaaactttgagttgaatatttaa

SEQ ID NO: 42300 - DNA, 861 bp, Acinetobacter baumannii
atgatgattgagacaaactccaagcaaggcatggcatttgcagccgcatttttatctttagtttctgtacagatcggcgcagcaatagcaaaagtcctttttccgattcttactgctgaaggagtcaccttagctcgacttgccttatcggcctgtttcttatggatagtctttaaaccatggcgacagtggaataaacagaccaattggaaaaatctaattatttatggatcaatcctcactttaatgaatactttggtttataaagcattttcttacatgtctgttgggattgcgatttccatcgaagtgttaggaccacttacggttgctattttaatgtctaaaaataaattagattatttttggggtggattatctattattggtttgcttcttctacctatgggcaatgccaataataactttagttttattggcatgacgtatgctttattagccgcagtgggttgggggctgtatgtgatttatggctcaaaagttgcacaaggtggtggtagctctgttgcgactggaatgtttatagcggctttatttgcaacacctttaggtgcatctcacattatccatatttttgatagttataagattctttttacatgtttacttatggcgatgctagcaagtgctattccatttatattagatatgattgccatgaaaaaactgcatcctcgagtttttgggattttactaagtgcgtcacccgcagtcagcgctttggctggatggctgattttagatgaacgattaaatagttttcaggttctagggataacaattattatggcatcgtgtgcaggttgctcttatttttcttataaacgcaataaggtataa

SEQ ID NO: 42301 - DNA, 1206 bp, Acinetobacter baumannii
atgtgggtgattgtttatatggatatctgtttcacactaatttccatatttagcttttttcttatttatataaaccgtatttcggcagggatacttttatcacaagcggttctactggtttttccagttgtcttttgcttatttttcgatgttgctacgcctgatcgccctcgagtggcccatttgtttttacctgccggagcgatactggggtatttgaattaccgtagagagccaagcttcttacaaattgttttaattttactttcgattggctgctttatattttttagtggaagctcttttactctcgatagtgccatacctttatcagaagatattcgtgatcatggtgggtggatagccacttgtgtcgctactcttatgatctgtatttcaatttataccatgcaactagagatacaaatagaaagcagtatggagcacaatctacgtttggcactcactaagcaacaatttgagcttttttatcagccccaagttaattcgtcagaaaaactgattggtgcggaagccttgttaagatggcatcatccggttttagggtatattccaacaaaagagtttattccggcagcagcaacttttgggttaatgccagagatcggagagtgggtactggcccaagcctgcaaagttttacaagactggagtaaaaaagaagagaccaaagatcttacgctttcaatcaatattagtgctgatcattttatgcaatctaactttgagcacacggtgattggtctggttcagcggtatgatattaatccatctcggctcatattagaaattactgaaaatattgctttaaataattgtgcgagcatgattgaaaaaatgcacttcttgtctaagcatggtattcagctttcacttgatgactttggtacagggtattcatcgttaagctatttacaaaaaatgccaattaaacaaattaaaattgatcgcagctttgtacaggcagctttagatgataaacgcagcaataaattagtgacgggtataattaaaattggcctagatttaaaccttcgcgtgttggtagaaggaatagaaacggctgaacagtttagtgcttttaaaagtaatggttgtaccgagtttcagggctatttatggggctgtccaatgtctttaaatgagtttatcaagcaattgcccatcaagatcgataaagaataa

SEQ ID NO: 42302 - DNA, 933 bp, Acinetobacter baumannii
atgacgaaacctgaagcgcagtatcaatcagggcaatttcaattttcctttctatcattaaaatattggggtatctggttcacagcttttattctaatgtttcttgcgtatttgccttgggcaatccagtggcgcttagcaaaactgttttcaaaaattgcttggacactattgggttctagaaggaaaacgactttaagaaatttaggtgcgtgttttccggaaaaaacatctgaacaaattgaagccaaggctaagtcggtttttaccgatacgatgattggtatatttgaagccttaaatgcttggtattgtcctgcatggtttaaaaaaagagttcatatagaaggcttggaacatctaaatgacaatcgggatcgcggtattctactgttaggcacgcatagcacattactcgatgccggaggtgctgcatgtacgctattttttgatatggatgtggtgtatagacctcaaaataatcctttcatggatttcctcattcatcgtagtcgcgctagggtttataaaaatcagattgcaaaagacaacatgcgtagcttaattgaaaaactcaaaaatggtcatgcaatctggtatagccctgatcaggactttggtttaaagcaaggtgtcatggcttcattctttggaatacaagcagccacagtcacggcacatcgaagactcatggatatttcaaacgctgttgcaataccattatatttttacagaagcggggatattcgagatcctcaatacaatgtactggtagaacctaaacttgaaaattttcctagcgaatgcgaagtgaatgatgctgaacgcgtcaataaaattattgaaaaccagattcggatcgccccaacacaatacatgtggtttcatagaaggtttaaaactcgtcctgctggtgaagcgaagttttactga

SEQ ID NO: 42303 - DNA, 690 bp, Acinetobacter baumannii
atggcctctaaaaactttctttctacgctgccacggaaaattaaagagaacaaagggagtatagctatatgttctattctttttattattcctttatttgtatttcctacttatcctaaaaacgaatggcagtacgaaatatatcaatacatcacacaaattatgcatgtgactattggtacgaaagggccattaccgttttttacgattctttacagcctttatataaccatagtcatgtttattgttggttgtgttatatgttatttttttattagaaaatatggaattaataaagcttatcaagaggaaatctataaattctttttcaaagccgaatttgaatcttcaaaaaaataccgttggttagaaaagcctctagttaaaaagactttagtctcaagtacctttgctgggtgttttgtcatgggaattattcactttattgaggatgatattactcagcaaagacctagacgtagaggtggacttatagcatttagttataattacagagtcggggtgatgttttgggaaatagtaacaactgtctttagtattttcccgattttttattttggcttgttattcttatatatcattaattatttttttcgcgggttaggtacaggtaaagtggttgttttagaaaaaacttcaaacccaaaattcagaacttctaaaaaataa

SEQ ID NO: 42304 - DNA, 642 bp, Acinetobacter baumannii
atgcctgtatttagcactcattttaagagtgacggcatttctatctctttacatacaacaagaatttataacggtaaaactatgccaaatttagaaacctcttctaaaaaattacatattattcgtaccgctattcgtttgtttaccacacatggattccatacaacaggcgtagacctgattgtcaaagaatcagaaataccgaaagccacgttgtataactactttcactcaaaagaacgacttattgaaatctgtatagctttccaaaaaagtctacttaaagaagaagtgcttgcgattatctattcaagccgttattgcacgccaaccgataagctcaaggaaatagtagttttacatgttaactctaacagtctgtatcacttgctacttaaagccttttttgaaattaaagtggcttaccagcaggcttaccgtatggcaattgagtatagaaaatggctgactcgtgaaattttggaactgatttttagcttagaaacacgtgccttaaaacccgatgctaatatggttttaaacttaatagatggcttgatgttcgggtttttgagtacaaagagtttggatgaaagggatgtggtggtggagtatttttttaagccaacttgtttgaggtaa

SEQ ID NO: 42305 - DNA, 1305 bp, Acinetobacter baumannii
atgaaagaaattgtattaagtgatttgatcaatcagcagaaagttggaccttatcaaaaatttattttggccacctgcttattactaatgattatggatgggtatgacattcagtccatggcttacgcagccccactgattatagaagaatggggtgttcaaaaatccatgttgggagttgtgtttagtgcaagcttgtttggtttgtttgttggatcatttttattaagtttactttctgatcgttttggtcgccgtccgatactactgatctcgacctttatattctccatattgatgctgttgacaccacatgtaggcaatattgagcaattgactgtaatccgctttgttacaggaatttttttaggcggtatcatgccaaatgtgatggcttatagctccgaaattgttccatatcaatctcgtatttttaccatgatggtcatttcttgtggctatacggtaggggcaatgttggggggcggaatatcagccttactagttccttggggaggatggcaggcgattttttattttggcggtattatccctttaattattttctttatcacattctttaaattaccagaatctttatattttttgagtgaaaatagcaaaaatagctccaaaattttgttttggttgaagaagttttatccagcattaacattcaattcagagataaaaatcatcaataataatgaggttcaggttaaaaagtcaccgcttgagttgtttaaaaatcagcgtgcgttttttacctattccatctggatcattagtattttaaatatgatcagtttatattttctggcaaattggctaccgactttggccaaagagtcagggctttcattaaatcaggcattgttgatcggctccactctacaattaggcggtacgattggtagtgtggtgatgggccttaaaattgataagacaggattttataaagtattaattcctgtttttctggttgcagtgattagtgttgctttaattggctattctgttagtcatatcgttttattgtttattatcatttttattgctggctttgccattgttggtgggcaacctgccattaatgctttgtcggccagttattacccagtttcacttcgtactacaggggtgggctggagtattggaattgctcgtttgggttctgtcattgggccgttatttggcggttatctctctcaatttctggtcattacccatttatttgtgattgctgccataccttcgctattcgtcattatcatgctgatgattcaggccaagtatcggtcataa

SEQ ID NO: 42306 - DNA, 438 bp, Acinetobacter baumannii
atgaaaaaatatttattcttacttttactgagtttttactcaattcattcatttgcttcggacaaactacatggcagtgtttggaaaactattgatgatgccaccaatcaaccgagagcgctggtaagatttagccaagacaaaaatggagttctatccgcaaatattgaaaaaatccttgttccaagcgaagccaataaatgtacgatgtgtgaagggacttataaaaataaatctttaattggtttaaccattgtcaaaaatttaaaaaacgtaggtcaaaataaatatgacaaaggatctattctcgatcctcagtcagacaagacttatcgctttagtgtaaccgtatcaccagatggggaaaaacttaccgctcgtggctacattggtatttctgcaattggccgagaccaaacatggtatcgagttaaataa

SEQ ID NO: 42307 - DNA, 1029 bp, Acinetobacter baumannii
atgctgttaaaagttggtgaattggctaagcaaacaggacttactgtccgtgctcttcatcactatgacgatatcggtttacttcagccttcggcccgttccgatgctggttatcgactatatacccctaaagacattactcgtttgcatcaaattcaagcattacgagggctgggtatgtcgctagctgaaatctatacggttcttgaagatcccaatctagcacttttaccgattattgatcggcagattcaagcaattgatcaaagactggcagagcagaagaaattgcgaaatcagctaggacaattgaaatctcagctcatcaatggtgaagaacttgatttggaggattggctaaatatgctggagcttatagcaatgtacgagaaatactttacgcaagaagaacttgaaaagcttacatttttacaatcaggtactaaaacccaccaagaatggcaagagttaactcaagctgtaaatacggtatttaatgctggagaatcatctagcagtgaaaccgctcaaaagctcgcccataagtggatgaaaacacttgagcaaaatacgcgcaccaatccagaatggcttgttaaattaaataacatcaattctgcagaacctgaatttcaggaaaaattaggggtactgccagaagttgttgactttttacttagggccttttcagagagtaagctgagtatttttgctcgttatttatctgataatgagtttgcttttttaaaggaaaattatggtcgcgagatgaaaaaatggcctcaactattagtcgatattgagaaattgattgacgctgaggttaaaccgaatagtgaaggagcaaagcgtttggcacagcaatggctctctatgctacaaggttatactggcgaaaatccaagtactcaagaaaagatccgtacagcaatgcaaaatgaaccaagccttgctgacggtacttggcttaaaccggttaccctacactttctagaaaaagcagtagcagcattcaagcatagtgcttag

SEQ ID NO: 42308 - DNA, 699 bp, Acinetobacter baumannii
atgacaaatacattttctgaccacaagcaagttgaagtggtatctacttttgctgaacttgtgaatacacattttcagggaaataagaatgctatttgttggtacagaaatttggtaggcgactttaaagaaattgtgaataaacttcagttaaaagaaaatattacagaagtttctgttgaagacttgttagccctacaactttcagaaaaaggtaatctagcaaggacaactattttagaagatatcgagctgttaagtgattttggcgcatcacctgtacttaatttgcttaaaaactatgaacgtgatgaagagctagatttcatttcaacagatgtatattcatttcatgttgatcgctcgcccattgaaaccgatacattcttatgtacctatcacggcgctgctagtgatattgtgccgaatgatcaggttgaacaaaaagttttaattcctgaaattagagaaaagctcaaagctttacatgacggcccagaagccgaatttgaaagctttttagcagagtatttttttgatttacattatcagcctaaacccgatgcacaacctataaatttaggtattggacatatttggcgcttagcagtagatcatccaactcaaaaggttttaccgtgtgtgcatcgggcaccagttgaaaatgacggtgaatatcggttgctattgatttgttag

SEQ ID NO: 42309 - DNA, 951 bp, Acinetobacter baumannii
atggaaggaattaaaacaatcggtgtggttggtgtcggtgtcattggtgcaagctggacagcattatttttatataaaggctttaaggtaaaggtatatgacccttatccaatagacgaagaattatttaaaaagagaatacaggcaaatcttagtgatttgctcgctttagatcagcaaacggattcaattcatcatttacaagatatttttctaaatttagagctttataacaacttaaaagatgcggtgattaatgtcgattttattcaagaaaatgcaccggaaaggttagatttaaagcaaaatttatatcaagaaatcacttcatattgccctgaaaaaacactaattgcttcaagttcttcaggtctaaaagtttctgactttcaaaaagatgcaactcatcccgagcgtatttttttaggtcatccatttaacccacctcatctgttacctttggttgaaattgtgggtggaaaattaacagatccgcaaattttaaagaaagcttccgagttttatcaaagtttgggtaagcatccgattgttttaaataaagaagttaaaggacatgtagcaaatcgtttacaagctgctttgtggcgagaggcattttcactggttaaagaaggggtgtgttcagcagaagatgttgatatcgcaatcaccagtgggcctgggctgagatgggctttatttggcccctatataaatatggaacttgccaatcagaaggggtttaaagaggcaattcaccatttaggaccacctatgaccgaatggtggaatgatatgcaaaattttcagcactctgaagaaactactgagttgctagaagaacaaactaaagagcttttaacacattataaagatatcgatttatctcaaaaaagggataaaggactagtcgatattttaaaattgagacaacaattagagttggattaa

SEQ ID NO: 42310 - DNA, 459 bp, Acinetobacter baumannii
atgccaaagtatttagccgtggctgaaaaggtttataagaatattaaaaaagacgacttattcaccaatgaccttacacaaaatctgaattgtttaatcagtcagatacgtaaggccattaaagggactgagtttaaacttaagttcaattatattgattttgacgagcagctcacgaagcctcttagtgaatgtaaagtcaaagttgatctaagtgtaatgccgaagtttgaaaacgaaggagagtatttgctctggttagcaagttttatcgagcgaattaccgatggtggaaaacctaaatttccaccaatttcacaattaattccgcacggatttaaaatttctaaagaatcatttcctgtgactgttgctcctcctaaagaagagcatgcagatatgattattaaatattttaaatcggaagattttatgaaaaccaataaaactccttcgtaa

SEQ ID NO: 42311 - DNA, 429 bp, Acinetobacter baumannii
atggaaatttcattaagattcgcgacccctgccgatctaaaagctataaacgaacgctatgccgaaattgattttgtaccatcacatgatgatgaacttattgtactagcttcaattagtgagaaaactgttgggcaaggtagagttgtaggtattgatgctaacagcggcgagcttggtggaatttatgtttttccgggcaatgaagggttaggaatcgcccgtaaggtagttgatttcttaattaaaaattcagatttttctatgctttactgtttaccctttgccgagttagagggcttttatggctctctgggttttgctgctgtgaaagacatagctcaagttccagaagctatactaaaaaaacatgagtggtgtaacagtaattacgacaaaccggttttacttttagaaagaagtaaataa

SEQ ID NO: 42312 - DNA, 678 bp, Acinetobacter baumannii
atgaaaaaagttctcttgtttgacctagatcaaactattcttaaccgaaatgaatcacttttaaaatttcttaactggcaagtaagctacttaaacttggtaccccatgagctaaaaaaatcttttattaaccgattcatagagctagacaataacggaagcgtttggaaagatattgtttacagtcaattaattaaagattttaatatcaaaaaatatgatacatctgaattgctgcaatcttacattaatgattttaataaattctctacagcatttgaaaatgctccaaaaactattcaaaatcttcatgctcaagggtacacattaggcttagtatccaatggaaaaacaccttttcaggagaaaaatttttatgctttagaattaacggactatttttcgattatcgtgatttctgaagctataggtttaagaaaaccagatcctgaaatctatttatacacttgcaatcaactagattgtaagccatcagattgtatttttattggagacaatcccaaagcagatatagaaggtgccaaaaaaattggtatgaaaacaatatattttcatccaactcttacccttcatccttctctttcagatgcaagtattcatcattacgatgaactcgaagaaacggttagaaggttaattaatccgcctcatttttaa

SEQ ID NO: 42313 - DNA, 1248 bp, Acinetobacter baumannii
atgaagaactttctcaccaagaaaatgtacgcaactagagctttattttttgctgtaggtgttatggctttgaatgtttcccctattgttatttctactactcatgcagcgacagaacaaaaaatggataatttatcgactaaactttcattaatttttgcagataaacccatagaagcttctttatttagccctcaatttttagaacaagttcccatcacacaaattcaaaaaatcgttgatgatttaaaagtctctttaggtgctcttaaaaatattaatgtttcaaatggctctgggactattgatttcgaaaagggagaattacccgtttcaattagcttaaatgagcaaggacaaattagtactctttggtttagtgcgcctcattttaagacaataagcctagacgaaatggttaaaggtctacatgaaaatgcgatcggtaaaacttctcttttagttattgtagataacaagcctgtggttgtagaaaatgataaaacccctatggctgtcggttcgacttttaaattactggttttaaaagcttatgaagatgcaataaaaaaaggcgaattaaaaagagaaactattgtttctttaaaagaaaagaatcgctcatttccaacaggagttttacaaaacttgcctgctaatacacctgtaaatctcgaacttcttgcgcagttaatgatacaaattagcgataatacagcaaccgatagcttgatagaggtattaaagaaacctcgtatagaagcgttgtcacctagaaattcccctctgctgacgacacgagagctatttcaactgattgacccaagtaatgaaaagttcagaaataagtttaaaacaggaacaaagtcaactcgtctagaagcactcgctgaactagacaaactgccgctaccaagtgtgagtagcattggaaaattggctacttggcaagatgctgaatggtatatgtcagccaatgagatttgtcctcttcttgaaagtgttcaagatgctcctgctctgaacagttctttaaatccactttttaaaaatttaaattggcaaaagattggtttcaaaggtggttctgaatatggcgtgattaacttttccgtgattggaaaaactcaaaaaggccataaagtgtgcgccgtatttaccgcaaatggaaatgagccacaacccgaatcaaaactagcaatattatttactggaatactacaagcagttgattctataaatcattaa

SEQ ID NO: 42314 - DNA, 318 bp, Acinetobacter baumannii
atgaataaaatgcatgtaactttggctgtagtggttggtttaattattggtggtgtagtcggtgcaataggttactctaaaacggccgcacgttatgatgcgatgaccaccgcatgtgtaatggtgaatcaggcagttgaacatgaaatcttgaagcctgaacaagtgaaagagttaggtgagctcacaggtcaaacccttaaaaaagattatgcttctgttgcatcaaaatttaagttttctgaaaagcaattaggtaatgcttctgaaggttcaaattgtagtcagtttattgttggtgtgaacgcaggacagtaa

SEQ ID NO: 42315 - DNA, 912 bp, Acinetobacter baumannii
gtgaatttaaagaatcttgaagcattttactgggtggtgactttaaatagcttcaataaggcagcaactaaattacaaaccacgcagcctgcggtatctcaaaaaatcacagctcttgaaaatgaattaggttttaaagttttagaccggagcttgcggcagtttaaactgacccataaaggcatgacattatttaagtatgctgaaaagtttatgcgtttagaaactgatttggttgcagagcttaccgaaaaccagcacctgaccggaaccatacgtttaggcgtttccgaaaccattgtgtatacatggctcgttgaatatatcgaaaaagttcaacaggaattcccaaaagtttcggttgaaatcgtggtagatctgacccctaacttgcaagaaggggtacgtacaggcgacttggacatggcctttttgcttgggccaactttggcttttgaatgtattgagcagtcgctttgtaactttgaactgagtttcttggcggcaccatcttttaaaggtggaattgggcaaatgtcttttaaagctttaatgtcgcataccattttaacctatcccaaaattacctatccctataaagaactaaaggcaaaaatgaaagaaaaggggattgatgaaccactttctattaccagttattctttagcgacgttattgcgtctagccgagcaaggtttgggtattgcggtcgtgccgaccttaacggcattaaaggaaattaccgacggacgattggaaatattaaatacgcccatccgtttaaaaacctttcatttcacgtctatttatattcatggtaatgacgttgctttgaaagaaaaattaactgaagtggcggttcaggtttcagaaagtgccatgaaaagactcaatgaacaaattaaaaaataa

SEQ ID NO: 42316 - DNA, 1233 bp, Acinetobacter baumannii
atgtctttactgaaatcttcttttttatcagatcgccaatgggccattgttgcctcaatttttatgatggcgacctctgcaatggggccaggatttttaacccaaactgctgtatttacagttaagttaggtgctgcatttggctttgcaattttaatttctattttgattgattatgtcgtccaacaaaatatctggcgagtggtgacacttacccagatgcgtgcatctgatattgccaataaagccttaccgggtagtggttatttactggcatttctggtgattttaggcgggtttttctttagtgtcggtaacattgcaggtgcggctttaggtttaaatgcactttttggcctagacacaaagtggggtggtattttaagtggcgccttagccattttgatttttgcttctaaaaaagcaacgcttgccatggataaaagcatgatcgtgttgggattgcttaaaatcctcctgattattattgtggccgtcattgtaatgcctcctgttgggcaagcagttcagcaaacctttgctccagatcagatcgactttgccattattaccaccattgttggcggtacagttggtggttatatctgttatgccggagcacaccgtttactcgataaaggtgctgttggacctgaaaatattaatgaagttgccaaagctgcgaccaagggcattgttgtagtcggcatcatgcgttatgtgttgttcttagcattcttaggtgtggtggtaagcggtgctcatattgatttagccagtcacgatgccaacccggcagcccaagcattccaatatgcggcaggcacatttggttttaaattatttggtttaattttctgggcagcaggtattagtagcacgatcggcgcagcatatacttcagtttcattctttactgcatttaaaaagaacttaacaccaaaacagaccaactatacgaccattacctttatcgcattagcgttattgctctatgtgttattgggtgcaactccggcaggcctactcattttcgtaggtggttttaacggattggtgttgccaattggccttacaatttttgtgtatgtcgcagcgtgccgtaaagatttaatgggtaattataactatccaaaatggttgcttattttaggtggattaacatgtctgttaacgtggtggatgggctatatgtcatttacgacagtatttaattatttgaccaagctttaa

SEQ ID NO: 42317 - DNA, 765 bp, Acinetobacter baumannii
atgtttgtagatttaaatagtgatttgggcgaaagctttgggtcatggaaaatgggtaatgatgaccagattttacctgtcgtgaccagtgcgaacattgcttgtggttttcatgctggtgatccgctcggcattttaaaaacggttcgtaaagcagttgagcttggcgtgaccattggtgctcatgtgtcttacccagaccttgttgggtttggccgtcgtaatatggatttgtcacgtgacgaactcattgccgatgtgctttaccaaatttctgcactcgatggtttagcgaaagtggcaggctcaaaagtgcagtacgttaaaccacacggcgcactctacaacaccattgcccatgaccaagctcaggcagcagccgtaattgatgcaattaaaatgtataaccctgaactggtgttagtggctttggcgggttcaaacttagtcgagcaagcacgagttgctggtttaaaagttgtgtccgaagcatttgcagaccgtgcttataacagcgatggttcattggtgtctcgccgtttagaaggtgcggttttacacgactcggcatttgttgcgagccgtgtggtgtctatgcttaaaaatggtggggtcgagtcaattgatggtgtatttaccccaattcaggctgacacgatttgcctacatggcgataccgacggtgcactagaaatgtcggctgccattaaagccgagcttgtaaaaaataatattgaaattcgcccatttgtaaataaagcataa

SEQ ID NO: 42318 - DNA, 807 bp, Acinetobacter baumannii
atgtataaggatattaaagtcgacccagctcagcttgaagcggcattagatgcacgtttaaaaatccgtgcaggtttcgataaaccaacagcaggcatggctgcgggtatgacgcaggtcaacatgatttcagtgccaagagattgggcatatgactttttactctatgcacaccgtaacccgcaaagctgcccggtgcttgatgtgctcgaagaaggcatctatgcaactaagcttgcagcagattcagacattcgaactgactttccacgttatcgcatttggaaagatggcgaaatggtcgatgaagtgactgatgcgagagaaatttataatgctcatcctgatttggtgacttttttaattggttgtagtttttcgtttgaaacagctttgcaagaagcgggtattgaagttcgccacattcatgacgataccaatgtgccgatgtatctaagcaatataaagtgcgaaccggcagggcgtatttcaggaaacatggtggtgtccatgcgaccaattccgtcgcatcaaattagtgaagcggtaaaaattacagcgcgtatgccaagtgtacatggggcacctgtacatattggtcatcctgaaagtttaggcattaaggatgtaaataagcctgactttggtgatgcttctcgtatagaagcgggtgaaattccagtattttgggcatgtggggtaacaccgcaagcagcagtcatgaactcgaaaattccttttgccattagtcatgcaccgggctacatgtttattaccgatattcctgaccgtgcttggataggctaa

SEQ ID NO: 42319 - DNA, 1584 bp, Acinetobacter baumannii
atgcgttttttatcggtaaacgccgattgttttctaattgagcttgcgagcctagaagaaacattggcgttgtacaataaattgcaaaatacgcaattgaatggaattaaagacttagtccccgctgcaaaaacaattttggttttttttaatgagatcgaaaccaattttaaaacgctagttgcttcaattcagagcctcaaaattgattctggatttgagcgtagcagccaagaagtgattgtgccgatttgctataacggcgaagaccttgcgcaagttgccgagttacaagggctgactgttgctgatatgattagaaaacatcaccaaagcgtgtggaatgtggcttttattgggtttgcgccgggctttgcgtatatgagcagtcccgataagccttttaccgatattccacgcttaacggtcccacgtaaaaaaataccgtcaggctctttggggttggctggaaaatactctggtatttacccaaaagacagtccgggtggttggcagctgattggtacaacaacagaaaaaatgtgggatttagagcgtaaaaatcctgcattgctgttaccgggcatgactgtacattttgaagatgtcacgcatcgtccaactacggtgactgtaccgcagcaaatcacacgtaaggctgagccgaaacaatcggtgccactatttaagattaccgcgccaagtttacaaatgcttattcaagacgaagggcgtttaaatcagaccaatattggtgttggtgtggcaggtgcaatggacttgtctgcaatgcatagtgctaaccgtattgtcgggaatccaaccgatacacccgttattgaagttttaaatggcggcctaaaagccaaaatgcagcatgctggcgttattgcggtggcaggtgccatttcaaacattcgtgtgaaatttgccgacggtcaaaccgcggactttgcaagctatcaaccgattgatttagatgaaggcgatgaatttcaaattcagccaccaaccgcaggcttaagaaactatctggcagttcgcggtggtatagacgttgaaccagtgctcaatagtgcttcgtttgatagcttagcagtgttagggccagagcctttaaagcttggagatagcatttaccaagggcaagtaaaggcagccaatattagcgtaaatgaagttggtaaaaccgatttgccacaagctggcgaagtcgttgagctagatattgtgatgggaccacgtaccgattggttcgaacaagacagtattgaactgctctgtcagcaagaatggctcgtgaccaatgaaagcaaccgtgtcgggctaagactttcaggtgcgcagcctctaactcgcaaaattacccatgaactggaaagtgaaggcacgtgtattggcgctttgcaaattccaccgagtgggcagccggttttgtttatgaatgatcatcctttaacgggcggatatccggtcattgcttcagttgctaaacaccattgggatttggtggcacagattccggcaggttgctgcatcaaatttaaaaaaattgccgaatttacagattttgagaatgaatga

SEQ ID NO: 42320 - DNA, 1722 bp, Acinetobacter baumannii
atgatgaatacagaaaaattattgattgctaaccgcggtgaaattgccgttcgtattattcatgcttgtcgtgacatgggaattgcatcggtcgcgttatatgcagatgacgatattgatagcatgcatgtcgaacttgcagatgaagcatggggcttggctggtgcgactgccagtgaaacctatttaaatattccagccattatcgaagttgcaaaaaaatcgaaagcaaccatggtccatccgggttatggctttttatctgaacgtgctgaatttgcccaagctgtgattgatgcaggtttaaaatgggtagggccatctccaagtgccattgaaaaactaggtgataaaatcgaagcacgtaaaattgcagcttcggttggtgcgcctttggttcagggtacgcaagacccactcaacaatgcagatgaagttttagagtttgccaaacaatatggtttaccaattgccattaaagccgcgtttggtggtggtgggcgtggcttaaaagtcgcgtggaaactcgaagaagtcaaagagctttatgagtcggcagtacgtgaagcaaaagcggcctttggccgtggtgaatgttttgtcgagcaatatcttgataaaccgcgccatgtagaagcgcaagtaatagccgaccaacatggcaatattgtggtactgggtacgcgtgattgctcgttgcaacgccgcaaccaaaagttagtcgaagaagcgcccgcgccatttattagcgatgagatttaccaacaaattttaagctcggcaaaaaatatttgtcaggctgcaaactatgtcggtgcgggaacagttgaatatttactgagtcatgatggcaagctttcattcttagaagtaaacacacgtttgcaagttgagcacccagtgaccgaagaaacttccaaagtcgatttggtggttgagcaaattcgcgtggcacaaggccatgagctttctattaaagaaacaccgaaagctcaaggtcatgccattgagtttcgcattaatgccgaagacccagcgcgtgggtttattccggcctttggtgtgttgagtttgtttgaagcgccgtttggtaacggtgtacgagtcgacacaggtgttcgcacgggttcattggtatctagccactttgactcactcatggcaaaactgattgtcactggcccaacccgcgaagttgcaattgcccgtgcgaaacgtgctttgaaacaattcaaaattgaaggcgtggcgtcggttttagacttccaccgtgcggtacttaatgaacctgactttacagatgaatttaatgtacatacacgctggatcgaaaatgactttaaacaagagttaaagccaaccaaacgtggcattccaaaccatcaacaaccaatgctgctcagctacattgaaattgatggcaaattacaccgtctaggtttacctgcgggcatgtttgcacaagggccagcaaccgccgttcaagcccaaacagccgagccagaagtcagtgtcgagcatttacttgccccaattaatggtgtgattagtgcttggaaagttgaaaatggtgagcaggtcaccgaggggcaagtggttgccattatggaagccatgaaaatggaagttcaggtactggcacaccgcagtggtgttattcagattggtgccgagaaaggcgcgacctgtcatgcagaaactgctattgcgagtattcactaa

SEQ ID NO: 42321 - DNA, 1221 bp, Acinetobacter baumannii
atgaaaattctaccttcatctgaatatgatcaaattctaaaatacagtgtctactggctcgtcatttcgattgtgattggagtcgttgcagggttggcatcgaccttaatttttgtggcttttgatatttcaaataaagtgagaagcctgcatcactggcttatttatttcttgccttttgtgggctttggtattggttatctcattaaaaaatatggttcgccgattgaacggggaactcatttactcatagatgagattcatcaacccaaatcgtttattccaaaacgaatgagtcctatcatttttatcacctcaattttaacgcagttgtttggtggttcggcagggcgtgaggcgccagcggttcagctttcgggtgccttaattgaccatttaagctatatattaaaaatctcggaagacaaccgaaaaatctgtttaatcgccagtattggagcaggttttgctggggtgtttggtctgcctttggcgggtgcaatttatggtttagaaattactgctttaggtaatttaagatactcagctatttttccatgttttgtgtcggcgctgattgcttcggccatacctgagctattcgaaattgtccatccacatgttttttatgtaattagcgagtttccagccattcattttggaacgctcatgagcctgattgcggcagggttgatctttggtttagttgcgcgtttctttattgcagctattcattttgcgagtgacgtcttttataaatacgttcggtatttgcctttaagaacgatggtcggcggtatagtcattatgctacttactttgttcactgcgcatcagcaatacaatggtttgggtacagataaaatcatttcatctttttatgtgccgattgagttctacgacttttttaacaagaccatttttaccgctatcactttaggttcaggctttaaaggtggtgaaattacgccgctgttttatgtgggtgcgacattaggtaatgctttaggggcggttttaaacctgcctatttcattgcttgctggcttaggtttggtaagtctgttttcaggcgcgagtaaggcaccgttaacatctattattttagctgttgagctatttggaatgaatgttgccacttatgcgattattacttgtttgttggcagcgctattttctgggaattgtgggttgtatcgccgtaaaaagttgatggattag

SEQ ID NO: 42322 - DNA, 1128 bp, Acinetobacter baumannii
ttgaatacatttattaattattatgagattttacatgtatctcaagatgctcctgttgaaattattagattggcctataaaggtttagcacaaaaatatcatcctgatcgttaccaagggaatgatgcaaatgaaaaaatgcaattaattaatgaagcacttgaagtgttaactaatgaaaataaacgtaaagattttgatttgaaattaaattcttttaatcaacaaaaacaaaaagagagagattttcaagaatatcaaaaaagaaagaagtatgaagattttcagcagcaagagaaaaatagtagaaaattttcaaaaaatgatgataaagatcagaaagaagccaaagattttaatatcaatattaatatcaatatttcaaaagggctttatatttttaagccatttttaagtctttacaatgtagtaaaaagaaatagcaaaaaaattattatatctttatccatcttaggcgtagcgataattttaattaatactattatatcaatatatgagaatacaagatactcagaaaatattgttactgaaggccctttaccagctgaacaagctgatgagacagtaaatactttatatgcctctacttctgaatctgtcagtacaccagaattagttaatactaccaatgaagagcctaaagtaattccatatcgaccagatctaatgaataaagctgtcctaagtgttattaatattcaagaagagagtggcatcataggtgtgatcaaagaaattcatgactgctacgtagataaaaaagaagagaggctttattgtctatttttagatttaactgctagaatgcttgatttaggtgcttctcagacaatgggtattattcgtgatgattacttaatggatgaacgagtattaactaggataaataataattactatataccaaatggtattgactctagtacagcaactgaacacgtgcaaagaatgaatattgaactagcagaaatatttaaagaaaaatatcaagaaaagataaaaaatatgcattcttctgataatcttaataaatctgttgaagaggagttatcagatataaataatgatgaagtgaaaacagatcaaccatctagtaatttaatctaa

SEQ ID NO: 42323 - DNA, 561 bp, Acinetobacter baumannii
atgccaaatttagaagcttcatttagagcactcagagtgcttcatacagcaaaagatttatttaaccaatatggatttcataaagtcggtattgaccgaattattgccgaatctaaggtgaccaaagccacgttttataaccattttcattcaaaagaaaggctcattgaaatgtgcttaacctttcaaaaagatgggttaaaagaagaggtattttctattattcattcttatcgtgaacttatggtgtttgataagctgagaaaaatattttatctccatgccaacctcgaagggctgtaccgtttaccttttaaagccatttttgaaattgaaaagttttatcccactgcctacaaagtggtggttgattatagaaactggttagtgacccaaatacatggcctacttttaaccgtcaaacccacagctttaatggaagatgctcacatgtttttgtttgtgattgatggggcaatggttcagcttttaagtaaagaggaaacagatgaacgagataaattattagattattttttaagaaagctgtctgagtgttaa

SEQ ID NO: 42324 - DNA, 432 bp, Acinetobacter baumannii
atgttaaaaactcaaaaaatcaacatcgtacaagaatttgatgcgcccgtagacaaggtctttgccgccttaagtgaacacgaaaatctaagtaaactttttgcccctgctaaagtcactcgcattagtaatggaaaggatgcacgtaatggggttggctctgcacgcaagatgtctattccgtttacaccttcatttgttgaaacaaatttagtctacaaagaaaatgaactgatcgagtacgcaattacaagcggcattagcccaattaaggcacaccgtggtgtgatgcaatttacagacttgggaaataaccgaactcgtttaaattacaccattagctttaaaggtcgcgttccttttattggcccaattattaaagcggctttacaaaatggcgtgagtcgtggccttaaaaagcttaagttttaa

SEQ ID NO: 42325 - DNA, 1164 bp, Acinetobacter baumannii
atgcgcgctcttacttaccacggtgcagaagatgttcgagtagaaacggttgcagacccaattattcaagatccagatgacattattttacgtgtgactgccacagcgatatgtggctccgacttacatttatatcgaggcaaaatcccaaagactgaacatggcgatatctttgggcatgagttcatgggcattgttgaagagatcggtccagccgtcaccgcagtcaaaaagggcgaccgtgtgattgtgccatttgtgattgcctgtggtgaatgtttcttttgccaacttgacttaaccgctgcatgtgagaccaccaatacagggcgcggcgcgattatcaataaaaagcagattccaccgggtgcagctttatttggctatagtcatctttacggcggtgtaccgggcgggcaagcagaatatgttcgcgtaccaaaagccaataaaggaccttttaaagtacccggctcactgtcagatgaaaaagtacttttcttgaccgatattttgcctacggcttggcaagccgtgaccaatgcccaagtgaaacgtggctcaaccgttgcaatttatggtgctggtccagtcgggctattaagtgctgcttgtgccaagatgcttggggctgaaaaaatatttatggtcgatcacaatgaatatcgattgaactatgcggcggcaacctatgacgctattccggttaattttgatgaagtcgatgcagccgaatttattattcaaaatacggacaattaccgtggggtcgacgcggtgattgatgcgattggttttgaggcaaagggcagtgttattgaaacagtcctgaccaatttaaaacttgaaggttcaagtggcgcagcgcttcgtcaatgtatagccgcggttcgccgtggtggtgtggtgagtgtaccgggcgtatatgcaggtccaattcatggtttcttatttggtgatgcttttgataaagggctaacttttaaaatgggacaaacccatgtgcatcaatatttaccgcaactattagaattgattgagcgtggcgaattaacacctgaaacaattattacccaccgaatgaaattagaagatgccgcagagggataccgcatttttaatgaaagagaagaggactgccgtaaggtgattctgcttccttaa

SEQ ID NO: 42326 - DNA, 741 bp, Acinetobacter baumannii
atgaacactgcaagttatcataacaatcaggcgatttggaccgaacttttacccggaggacatcactggtcgggtcgtattcaaaaaggaactattcttagatttacttcgcttggcgctcaggcaaatgtttctttgttttgtgtaaatgctgctgatgtgcttgaacgttttaacatgcccgacagtttaaaagggcaacacactgcctatttaaaagcttccaacgtattgtattcagaccttggccgtgtcatggcttccattgttcgtgatgatcatggttggaatgatgcactttgtggcccaagccgaccagaacaaattgaaaagcaattcggtactcgtacatttcaagatgcccgcaatgatatgtaccaaaacggcttagacagcttactcattgaaatgtgtaaatacggacttgccagccaagatctcagtgccaccgttaatctattttctaaagttgcaccagatgaaaacggtgctttgtcttatgccagttctgataacaccaatcaaagcattgaactgcgttttgaaatggactgcttagtatttttatctgctgcgccgcatggtttagacaccagcccaagctatcaacctgccgatattcaactcagtttatttaaagcccattctctaacagacagcgatatttgtcgtgatgcatgttcgcaaaatcagcgcgcgtttcaaaacacagcccgctactacgcacttagcaatatttaa

SEQ ID NO: 42327 - DNA, 654 bp, Acinetobacter baumannii
atgacagttttacaatcatttgaaaaagcagttttaaatgaagtttgtcctgctggcgaagcgtggatgtgcgaggttaaaaaaggccaatattttcgaattattgaccttgagggaaaccaagcagtcgatactttatttatgagtgcagaaaacccgactgagcgttatagcgcaatggataccttggctatcaaccaacaaatctatttagaaaagggcaccaaactctacagtaatttgggccgtccaatagccgttattcatgatgataactgcgggcgccatgacaccattggcggtgcttgttcttgtgaaagtaatacagttcgctatgcacatgaaacctacccaatgcatagttgccgtaacaactttatgtatgccttggcaaaacacccgattgcaaaaaagcatggcttaaatgtccgtcatattggcccaaacattaacttttttatgaatgtgcctgttacaccagacggtcagcttaaatttgatgatggaatttcagggccggggaaatatgtcgaagttcgggcagaaatggatttaattgttttaatttccaattgtccgcagctcaataacccatgtaatgcctataacccaaccaaaattcaactggttgtccgtgaagcggaaggggtgtaa

SEQ ID NO: 42328 - DNA, 3606 bp, Acinetobacter baumannii
atgtttaaaaaagttctgattgctaaccgcggtgcaattgcctgtcgcgtaattcgcacccttaaaaaactcgggatcgcttcggtggctgtttactccgaggccgaccgtgactcgttacacgtgactttggccgatgaagctttcttgattggtcctgcacctgcccatcaaagttatttaaatattgaaaaaatccttgaagtagcaaaacagtcgggagcagaagctattcaccccggttatggttttttgtctgaaaatgccgagttttgtgatttgtgcgaaagccaaggtattgcctttattgggccaacttcaagccaaatgctcgattttggtttaaaacatactgcacgtgaacttgctattaaaagcaatgtgcctctacttccgggtagctcattacttgctaatgaagccgaggctttgaccgaagctgctcgtattggctatccagtcatgctgaaaagtaccgcgggtggcggtggtattggtatgcgtctggtctggaatgaaactgaattaaaagatgcctaccaaaccgtatcttatttagcgcaggtcaattttaaagatgcaggtttgtatttagaaaaatttgtacaacatgcacgccatatcgaagtacaaatttttggtgatgggcaagggaaagttttggcattgggtgagcgtgattgctcggtgcaacgccgtaatcagaaagtcattgaagaaacacccgcaccacatttaaatgaacagcaacgtgactacttgcaaaaagttgcgattcaactcatgcagtcggtgaactaccgttcggcaggcacggttgagtttgtcatggacaccgaaacgcaagaattttatttcttagaggtcaacacgcgtttgcaagtcgagcacggcgtgaccgagcaagtgtttggtgtcgacttagttgaatggatggttactttggcaagcggtgactggtcagaacccacagaaaagttagagccaacaggacattccattcaggttcgtctttatgccgaagacccaattaaacagttccagccgagtgcaggcctactcacacatgttaaatttgacgcgcaagcacgagtcgaaacatgggttgaaacaggttcaacagtatcatctttttatgacccaatgattgctaaaatcattgtaactgctgcaacaagggaccaagccatacaggcaatgagtgctagtcttgccgacacgcaagtcgcagggattgaaaccaatctggaatatttgcagaatattattgcttgtgatgtgtttgctttaggtactcaaaccacccgatttttaaatacctttgaatggaaaactcaaaaaattgaggtgttgcaggctggcattcaaaccgccattcaggatgtaacaggtcgactaggttattgggatgttggggtgccgccatcaggtgccatcgatccactcagtttaactgtggcaaaccagcttctagccaatgagccaaatacggcagggcttgaatgtaccttgcaagggccaactttaaagtttcactgcgacagccaaattgtgattacgggcggtgatatgccttcaaaacttgatggcgaactggtgccgatgtggcaaaccatcaatgtaaaaaaaggccaagttttaaaatgtgggattatccgttcaggttgccgtagctatataggcgtgaaaggtggtttcgatgttcctgagtatttagggtcacaggcgactttcactttagggcagtttggtggacatgcaggccgtaatttattaattggcgatatgttgccaattactgaatattccgctcaatcgactacagctttagctcaagcgcaaattcctagctttacccaaaactgggaaattgccgtcatgtatgggccacatggcgcaccagattttttcactaaacaagatattgataccttctttgccaatgagttcgaaattcactataactcaagccgcacaggcattcgtttaattggcccaaaaccagagtgggcacgtgaagacggtggtgaggcaggcttacatccttccaatattcacgacaatgcttatgccattggcgcaattgattttacgggcgatatgccaattattttgggtccagatggtccgagcttaggtggctttgtttgccctgcggtagtcattcattccgaactttggaaaatcgggcagctaaaagcaggcgacaaggtcaaatttgtacccgtgagttatgcgcaagcaaaagcactcgatcaaaaatatcatcaaagtttaaccgcgactgatacaactcagatcgattttaacccagccattcaagcagaacccgatactttaaaagatgccattttagctactttagacggtgacgctggtttaccaagcgtgacctatcgaccagcaggaaatagctatttgttggtggaatatggcgagttagtacttgacctaaatttacgcttccgtattcatgcactcatgcaatgggtcaaagatcaaaacattcaaggtattatcgacttaacacctggcattcgttcactgcaaattcattttgattcaatccagctcgatcaacttgaacttttacagaaacttcaacaagcagaagccgaattacccgatattcaaaatatgcaggtgccttcacggactgtctatttgcctttggcttgggaagattcgcagactcaacttgcaactgagcgctacacacaaattgttcgaccagatgcaccgtggtgcccagataacgtcgagtttattcgccgtattaatggcttagcttcaaagcaagcagttaaagatgtggtttatagcgcaaactatttggtgatgggtttaggcgatgtgtatttaggtgcacccgttgcaacgccactcgatccacgccaacgtttagtcaccacaaaatataaccctgcgcgaacttggacacctgaaaatgcggtcggcattggcggggcgtatatgtgtgtgtacggtatggaagggccgggtggctaccagtttgttggtcgcacgacccaaatgtggagccgttaccgtaaaaatgccaacttcgaagaaggcaaaccgtggttactgcgcttttttgaccaagttaagttttatgaagtttctgagactgaacttctacaaatgcgtgaagactttaaggcgggccgactacaacttcgtattgaagatggtgtgcttaacttaaaagaatacaacgagtttttaaaaacacatcaagacagcattcaagcctttaaagacatgcaacaagctaactttgaggctgagcgccgccgttggcacgaagcgggcttacaagaatatatctctgaaagcctagatgctgttgatgaaggtgaaaccgtggtgatccctgaaggaggctgtgcagtcgaatcacacatgccgggttcaatctggaaaatcgaatgtgcatcaggagatattgttgaagaaggtgcaacccttgcagtaattgaagcaatgaaaattgaaattccgattattgcgccggaacgcatgaaagtagaaaccattaccattgaaaaagggcaaaccgtaaaaacaggacaagtgctatttactttggcaccagtcgcttaa

SEQ ID NO: 42329 - DNA, 537 bp, Acinetobacter baumannii
atggctttactgattttggctcatccctactacgctcaatcaattgcaaataaaacgattgtgaatgaactcataaaaacctatccggaccttgaagtgcgagatattttccagctttatccggactataaaattgacgtcagcgctgaacaagaagcgttgttacgccacgacacgattattctgcaatatccaatgttctggtttaatatgccggcaattttgaagttatggtttgatgaagtttttacttatcagtttgcttatggctctcagggcgacaaattaaaagataaaaaagtcattattagtatgacggtcgggcaaaaagaagcgaacatggtgaacgaccaagaaaacttaatcgatagctttttaaaatcagttcaacattcaattcaatatacgcaaatgcagttaagcggcacatttttgctttatgacgtatcgcctttatcgggtaacccagagtcgaaaattaaattagaagctgttgaacatggccataaagtattaaaacatttgaccgaagcataa

SEQ ID NO: 42330 - DNA, 354 bp, Acinetobacter baumannii
atggcaaatactgaaaataaatgtgaaatcaccatgaatggaaaaacgtatccatgtcatatcagtatggctatggatttagtcggtggaaaatggaaatgcgtgatcttgtattatctaaaagatgggccaaaacgttttaatgaaatcaatcaattaatgccaaccatcacagaaatgaccttaagcctgcaactcaagcaattagagcaaagtggcttaatctctcgaaccgtttatggtgaaaaagcaccgattaaggtggtttatgaaatgaccgaattaggtcaatcttttaagcctgttttagagtctttatcggtatgggcacatacgatgattaatccaaaatag

SEQ ID NO: 42331 - DNA, 2712 bp, Acinetobacter baumannii
atgcaaaatcaaaagtttaaagatttagttaaacaagaacttaaaaataaaactagatcaattaaagatctagcaaggtttgttcaacgtaataatggttatccgtcatatagtgtatttttaggggctggtgcatctgtaacatctggaataccaaccggaggaagtttagttaaacaatggcgcgaagaaatatataaagaagtatttgatagtaatattgaatctttaaaagataatgagttggaaataattaattatttatctaaaaatgaggggatttggtataatcctcaaaatgaatattcttctctatttgaaaggaaatttgatttaccatctcaaagaagaaggtttgtagaatcaatagtagataataaaaaaccatctataggatataattatctaatcaatcttgttaatgaaaaagcatttaatacaatttttacaactaattttgatgatttgttaaatgaagcattttatcacttttcggatgttaggccccatgtttgcgctcatgattcctcaataggtagtctttcagtcttatctgatagacctaaaattattaaattgcatggagattatttatttgatgatattaagaatactttaaaggaaaccgaaagtttagaaaataacacaagagaaaagtttattgaattctcaaaagattatggattaataattgttggttattctggccaagataggtccatcatggatgttttaaattatttagtacagcaagaagaatatcttaaaaatggagtatattggtgttttagagaagatgatgagatatcacatgaggttcgaaagatattatggaaagataaagtttattgtgtgaaaattgatggttttgatcaattatttgcagaattaaataatgaattaggcattaatctaaaacagttttctgaaaaaaattctttaaaaattgataagtgtattgagaattttattaaagatgattttaatttaagttctaatgattatattagaaaagatttacttaaattaaaagaaaaatctaataatcaagatatttctgaattaattgcaaagttaaatgaatctaatcaaaataataatttatcttcaatagaatttaaacaaatactagaaatacaaaatttgattctaaccggtagttttaataaaacagtagctaaaattgataagcttttgcaagatagcggatgtgatctatcaagtgaattaacaaagtttcaggaaaatttattttttatgaaaatagattgtcttgaaaaagaaaaaaagattgagcaggccaatgaagcaattaatagtttaatagcaagtgataaatttaatttaacttatcatcataaaaaaatattacttattaatgatagtaaaaaaaatatagaatacttattatctattcttgatttgtttccttatagtgcatcaattagaaatgatatttgtagaagttatctttcatactatttgaagaataaagttgaacctgatttaattaatgttgataagtgtttaaattatattgaagaaagtttgaatattgataatagtttggataaccttgcttatgaaataaaagtagaattgctttttattaaaaaagatttaatttcaaagaaaacttcaagtactcttaatcgtaataaaattattgatgaaactaatgatcaaataaaagaattaattgttaaggttttaactgtgagtcccaaacatcaaaatagcattgattgtttaattaattacttaataaagagtgattcctcagttgattttttaaaattttataatcaaatttttttaaatattgataaatctagtaagaaacaaaaaagatatattattaaaagttttgctatgttgtttaataaaagaaaaatgttagaacgttatcaaaaagatagtgatattaaaaaagaggccgtaaactttttctcgaaacctgagtttgatagcaatatattttatttgttatataaaactatgtttatgatttctttaaatgtaagggatatttcattttataatctaatcgaaaaatgtattaatcataaaaatgtttatgaaattgctttagagttagtttctcttctggaaagtttagatttaaaagatgaagtaagaagtttagatttgataatgaaaaaccatcaagataaattaacaccatatgaagctagtttattttcaaagaatgtttcacttttgctgtatggggcaaaatctgatgaatttatggattatttagaaaatacaagaaaactctgtccaagtttttcaagatatttaattaaatatacctatgatttacttttagcagagaaatttgatcaagttctagaatgtttgaaaaatagctctgagattattcaagatttggatgaggatgacagagctgtgctaaaaattaatgaagctactgcttacaaaaaaattaataatgggcaattatcaaatagtatttatgaagaattgaagaagatcgtttctaaatctctttcacaagaaattacgatatcttgtaaatcacttatggatgaccagcaaactttatcgaacatcaagacattaataaatattgatcaccacttttattattatttccaacaatggccagtaatatcagataacttaaagcagcaactacggaataattatgagaaacatatgattgtgacattagatagagctagttaa

SEQ ID NO: 42332 - DNA, 126 bp, Acinetobacter baumannii
atgaacgatgtaaaacctgtggttcaaccaaagcaaactttaaaagcctttttagtcgaattacttagcgtacgtgcaggcgtatatatcaaacaaaacaatcagctgcctaaaacaaaaggataa

SEQ ID NO: 42333 - DNA, 435 bp, Acinetobacter baumannii
gtggcaaaacaaaagcttgctcgaatcagtattaccgtacctgaatcgaccctcaacgcactcgatcaaaaaattgtcgagcagaactatgaaagtcgctcgcaagctattgtcgacatgattaataaacacttaattgcggagcaagcacaggccaatgaagtcatggtgggcacattgacgctgctttatgacgctagccaaatgaccttgcgcaaccaattggttgatttgcaacaacagtttttagcacaagtgattagttcacttcatattcagctcgaccaacaaaagatattgcaagtcatgttaatgcagggcgcgagttctgagcttagacaaattagccagcaatttattgtgctgaaaggggtaatcaaaggacatctagaactgatggatgccgtcatgccgcctatacagcaaaatgactaa

SEQ ID NO: 42334 - DNA, 1812 bp, Acinetobacter baumannii
gtgttgaaaaatttatggaccatccaagactggaaaacagcatatcaaaacggacaaatccatcttaaggatctgattggctatgtggcagaaattcaaaatgatgatcatgcatggattgaaattgcatcgaacgagcagatgcaggcacaaattgatattttaaaagaccagaatgttgctgacttacctctatatggtgtgccatttgcagttaaagacaatattgatgttgctggatttcacactactgctgcttgtaaagaggttcaatatttagcgaaccaagatgctgccgtagttgccaagctgaaaaaagcaggggcgattgtggtcggtaaaaccaaccttgatcagtttgcaacgggactggttggtgttcgttctccctatggtgcagtaaaaaatagttttaaccccgaatatatcagcggtggttcaagctctggttcttcggtagtggttgccaacggtattgtaccttttagtttggggacagacacggcggggtcagggcgtgtacctgcgggccataacaatattgtgggccttaaacctacaaagggctggttttctaccacaggtttaattcctgcatgtcggactattgatgtcatttctatttttgccttgcatgttgatgatgcttggacagttgccagtttaatgcagggctacgatgaaacagatgaatattcacgagtacatccagccaatgtaccgaatcagttttctaaacgaaaaatagctattccaactcagcttgagttttatggtgatcttgaatctgaaaaagcttttttagttgcaattgagcgcgtaaaaaaactgggctatgacgttgagagtattgatttcagcgcgtttaatgagcttgctgccgcactgtataacgatgcatgggtggcagaaagaacagtcgccgttgaacgcatgaccacacgtgaaaaggctcatccagtcattgctcaaattattgcgcaggcagataaattcaaggcaacagatgcacttcaagccgaatataaccgcgccgttctggctcgaaaaattaatttggctttacagccttttgatgcattaatggttccgacagcgccaaccatttataccattgccgaagttgaagccgatccgttgactaaaaatgcacacatgggggcctataccaactttgttaattttgctgatctttcggctttagctttacctaatgtactccgtgaagatggtctaccaagtggggtaaccttcattgcaccagcttggcacgatcaggcactcgctaattttgcgcagctttggcaaaccgaaacatcgctgagtttaggtaaatcaactcaacattatcaaaaaagtataaacatccagtcgaatcattcagtgcagcttgctgttgtgggagcacacttaacaggcatgccacttaattttcagctgactagccgcaatgcaactttgcttaagaaaacccagaccgcagagacttataaactctttgccttaaaaaataccacgccaccaaagccggggctgcaatgcgatgcagcaggtacttcaattgaagttgaagtatgggatgttccattagcaaattttggagccattgtggctgaagtacctgcacctcttggcattgggaacttgaaattaaaagatggaacatgggtcaaaggcttcatttgtgaagcgtatgccattcaagatgcaaccgatattagccattttggaggctggcgagcttacatacagtcactcaatcaaaccgctcaaagtgttgttagtaaaaatgttggggaagtttctatatga

SEQ ID NO: 42335 - DNA, 1023 bp, Acinetobacter baumannii
atgattaaaaaagcgtttttatccgtatctattttatcggcagttgtattgggtgggtgtgacaatacggctaaagtgcccgaggctaaacaagacgctcaggcatctacaaatacaaaaccaattaccattggctatagcgattggccgggctgggtggcttggcaagtggctattgaaaaaggctggttaaaagaagcagggctaaatgtagagtttaagtggtttgattattcggcttctctttcggccttttcggcaaatcagctcgatgctgtgttggttaccaatggcgataacttggtaactgcttctggcggtacgcaaggcatgatgatcatggcaacggattattctgcgggcaatgatgtcatcattgcaaaagagggtattaacaccattcaagacttaaaaggaaaatcaattggtgtcgaaaaaggcttggttgaccatcttttattggcaacagctttgtccgatcataacattaaagcgaatgaggtgaagctggtaaattcagcgacgaaccaattacctcaagtgtttaatagcccagatatttccgcgattgctgtttggcaacctgttgctggtcaggcattaaaagcagtggcaggctctaaaattatctatacctctaaagacaagccgggtttaatttacgacaccttaacagtcaacatgagtcatttaacagctcatcaagaggaatggaaaaaagttattcaggtgtgggacaaaacagttaaatatattaatgaccctgcaacccatgccgatgcggttaaaattatggcaaatcgttcaggggttgacccaaagcaatatgagttgatggttagcggtacgcatttattagatatcaatgccaataaaaaagtatttactaaatctcaaggctttgtctcgatttatggctctagctatcacgtcaataaatttaatgtcgaaaacggtatttataaaaccgaacaaaatgtagatgggctgatttatccaacactcatagaacaactcaaataa

SEQ ID NO: 42336 - DNA, 882 bp, Acinetobacter baumannii
atgaacgattcaacatttaacgcacatgaatactttcaaaaaatttatgaacgtcctgttattttggaagctaaacaactgagccaagtctttaagcatggtcacagcgaacgcactgttttaaataaactcgatttaaaaattcataaaagagaatttatttgtgtgattggcccttctggctgcggtaaatcgacgctaagccgtgttattgcaggtttagacccataccatagcggagaagttttagtagacggcgaatgcattacaggcccatgtcctgatcgcggcatggtgtttcagggctataccctttttccgtggaaaactgtaaaagaaaacgtaatgtttggtccgcaaatgcgcggcgccagtcaaatgacagccgaagctcaagcacgcgaatggatcaatattattggtttagaaaaatatgaaaatcagtatccacaccaactttctggtggcatgaaacagcgcgttgcgattgctagagctttagttaatcaacctaaaattttacttatggatgaaccttttggtgcgctcgacccacatactcgccaaaaaatgcaaaagcacttaatggatttatggcaaaacattgatatcaccattatttttgtgacccatgacatggatgaggctattttactggcagaccgaattgtggcacttaaagctaaccccggtgaaattaaggaaattattgaagttaatttacctcgcccacgctcactcgatttaatgagtacacctgagttcaaacaacttcgggcacgagttgattatctagttcacgctgaagaagatgagcttgaccctgcgttgcaagacttaccaaaaattccacgtatgactcaggtcagtacagaaaaataa

SEQ ID NO: 42337 - DNA, 945 bp, Acinetobacter baumannii
atgggttatgttgcaaaggaatttacgcaaaagaacaagctgattctcagtatttgttctttcgtgattccaatatgtctttggtgcgcaatcagttacttaccttttgtttggcatcctcaagtacaaatcacaagttcgggaagtgtttcttacttacaagtaggaagtcgcgttgataaaaatgtgttctatctcgaagcacaaaatgcagtcaatcgagattctgcaccaccacaaggtattttagtcaatccaatttatttacccgctccccatgaagtcgctaaggctttggtcaccgcatttaccacaccacctgaacaacctgattcgccatggtttcatcaaagtttatggcacagtattaaactggtattttcagctttttttatctcttccttaattgggattccactgggtattttgtgtggtttttctaagcggatatccctgttaatagaaccgtttgtcgaatttttccgttacttacccgctcccgcctttggtgcccttgcagtggcaattttagggattaatgacgcacctaaaattgccattattgtgattggtacgctctttcagcaaattctcattattgccaataccacccgaatggttgatcgaagcttaattgaagctggctatacgcttggcaccaataagctcaaaagtttatttcacgtggtgattcctgctgcgttacctgatatttaccgtgacttacgtgtgctattgggctgggcatggacctatttaattgtttcagagttgattggtacgacctcgggtattacatggtttatcacccaacaggcacgctatcaaaactttgacaatgtctatgcggccattttgattattggggtgattgggctggtctgtgattggttattaatgaagttaggtgagcgggtgttcacttggaaagtaggagcaaaataa

SEQ ID NO: 42338 - DNA, 285 bp, Acinetobacter baumannii
atgtctaaacaaatggatcaggtcattcaaagtgtcattgacttacatgttttgatcgaaaatgtttttacaggtcaaaatgcagaacaaagtctcacaccacttttaaacagttttgatcaaaattttaagatggttacggttcaaggtcagagtattggtttagccgaagttaaaaacttatttagtcaaaatattggaaaaaagccctctttaaaaatcactattcttaaaagcacagccttatacaaatttgaaaattactgttgggtgcaatatcagtaa

SEQ ID NO: 42339 - DNA, 315 bp, Acinetobacter baumannii
atgatgtcccataaaatatttcaaattttagatagtttaggattggtcgcacagaatcgcgttcttcatgtgcaattttccaacgcatcattaaacaatcaagtttttttacaacgtattgaaggcgaacatacgcttaatcagggcagcgttgctgagttattatgtctgtcgacaaacgcgcatattgcattaaaacagtttattggttgtcaggttgccgtcgatcaggtcaccgatacaggccagttttttagaacgacaggtattattaccgaagccagccaagggcaaagcgagggtagtcaaaaatga

SEQ ID NO: 42340 - DNA, 459 bp, Acinetobacter baumannii
atgattcaaaatgaaacgatcgaagtctcgccagttcaacaacaagactatactcaatggttagaatattgggttgcctatcaaaatttctatcaggtcaatttacccctccatatcacaaaaatgacttgggatcgttttttcgatgaaaaagaacctatttattgtgctgttgccaaaaataaagaacgtatcttaggttttgtcacttatatgtttcatcggtctacttgggcagaaaataactactgttatttagaagatctgtatgtatcacctgaagttcgtggacgacacattggtaaacaacttattgagtatgtacagaagcaagccaccgaacatagctgtgaacgtttatattggcatactcaagaaagcaatcaaacagcccaaaagctctatgattggattgcacaaaagcccggcgttattcaataccgtatgtctttgaactaa

SEQ ID NO: 42341 - DNA, 570 bp, Acinetobacter baumannii
atggagtcattaattgagtctaatataaacttttctatattcttttataatcctaatattcatccggtaaaagaatatctgattcgtaaagaagaaaatatccgctttgcagaaaaacataatatcctctttattgatgcagattatgacaccgataattggtttgcccgtgctaaaggtatggaaaatgaacctgaacgcggtatccgctgtaccatgtgttttgatatgcgcttcgagcgtaccgctttatatgcttatgaaaatgggtttagtctaatcagcagctctttagggatttcaagatggaaaaatatggcgcaaatcaatgactgcgggattcgcgctgcttcacactatcccgatattcagtactgggactacaactggcgaaaaaatggtggctctagccgcatgattgagattagtaaacgtgaagaattctaccagcaagaatattgtggctgtgtgtattccctacgtgatacgaatcgctggcgtatgagtaatggtcgagatcgcattaaaataggtgttaagttttatagtaatgcaatggaaaatgattaa

SEQ ID NO: 42342 - DNA, 1125 bp, Acinetobacter baumannii
atggtgctttggtattctggtggtagtacatgggggagtttcattggattccatcagggttaccatagtgaacaattaccaattggtgttagccgcttctggtctccgacttttatatggttttatatttggttcctagtttctacagcaatttttgcagggttttggagaattatttctaatcatccatggcaacgttggtcagtttggggctctgcttttattttatttaacatctggtttggcgtgcaagtcagtgttgccgttaatgcatggtatgcacctttttataatcttattcaagcaatgctagatcatggtggcggtgatattaataagctatatagcggaacagttacttttcttttaattgccatggttggcgtgactttagccgtgattaatgcattttttgctagccattatgtatttcgttggcgtacggctatgaatgaatattatacagagcattgggcgaaacttcgccatattgaaggtgcttcacagcgtgtgcaagaagataccatgcgttttgcatctgttttagaagatttaggcgtaaacttcataaaggcaattatggtattgattgcatttttacctattctatttgaactttctaagcaggttaaagtattacctattgtaggagaaatagatcattcattagtatgggcagcaattgtatgggctatttttggtacagttctactcatggtagttggtattaaattacccggtctacaatttaataaccagaaggtagaagctgcttatcgtaaagagttggtttatggcgaagactatgaagaacgggcacagccaaagacattaaaagaattattctcgaaagtcagatttaattattttcgattataccttcattattcttattttaatctggttagtatctggtatctacaattagatattttatatagcttggttgtcttatttccgtctattgcagcaggtaaaatgacattaggcttaattacgcaaattagtaatgtctttgataaggtccgtgaatcattccagtatttaattacttcatggaaaacaatcattgaactactttcaatttataaacgtttaagaacatttgaagatactttaaattaa

SEQ ID NO: 42343 - DNA, 1236 bp, Acinetobacter baumannii
atgattcagcaacaggtaaaaaatgagtttccaacattagaagatatacatgccgctgcagagcgtttagatggtttagttgttaaaacaccttttgttttttcagaaaccatttctaaaaccttaggggctgaaatgtggctgaaatttgagaatctacagtttacggcttcgtttaaagaaaggggcgcactaaataaacttttgagcttatctgaacaagaaaaacaacatggtgtaattgcagcttcagctggtaatcatgcgcaaggggtcgcttatcatgcacagcgcacaggagtcacggcaactattgttatgccaaaatcgacgcccaatgtgaaggtgcaacgagtacgtgaatacggtgcacgtgttattttgcatggccaagacttttcggaagctgctgctgaaatgcaccgtgtggcacaagaagaatctttaaccattattcatccatttgatgatgctgaaattattgcgggtcaaggaaccattgcgctcgaaatgctggaagctgttcctgatttagatatattggtcgtacctattggaggtggtggtctcatttctggtattgcgattgctgcaaaaacgataaatcctaaaatcaagattattggggttcagtcggttgtttatccaagtatggcgaaactgctttgtaactatcaactcgcggtttcaatgggttcaacggtagctgaaggtattgcggttaaaactccgggcgagctgacaacacaaattgctaagcattttgtagatgatattgtggtagtcactgaagatatgattgaggaagcgattgcgctattactcaacattgaaaaaacagtgtgtgaaggagctggcgcgactggaattgctgcaattatgtctcgtcccgatctatttttaggccataaagttggtgtggtgttatctggtggcaatattgatacacgcgtaatggtttcagtattacagcgtcacttaacgcgtactggccgtatggttcgtattcgcgttgaattaccagataatccgggtgccttggcgcgtctaacagcaattattgcggagcagggcggtaatatttacgaacttcgacatgaacgctttgccgcaacaagccgtgctaaagaaagtgcggtgagtgtcgatattgaactaaaaagcgctccagatctggaaccattaattaaggctatgcaacttgaaggctatattgttcgtaaagaagagatttaa

SEQ ID NO: 42344 - DNA, 936 bp, Acinetobacter baumannii
atggtgttggccgggtgccaaaccacctcacacttatctgccttaaaaccgcaaacggcagaggcatactcacgtttcgtcgatcagccttttgcacagcttaagaagcagcataagaaaccagtagtcgcattagtactaggtagtggtggtgcacgaggatatgcacatattggtgtgattgaagttttagaacagcatggtattcgtcctgatttcattgttggaaccagtgcaggaagtattgtcggagcaatttatgcgagtggaaaaacacccgatgaacttcgcaatactgcattgaaaatgaaagctgcagatgttcgtgatattagtattggtttaaaaggtttttttgatggcaaaaaagttgaagactatgtaaaccagcaagtaaataacttgccgctcgaaaaaatgaaaattccgatgtatgtagtggcaacagagctaaagcatggcaccaaaaccgtatttaattatggcaatacgggacaggccgtgagagcatcagcctcaataccaagcatgtttgtgccgactaaaattggtaaatctgaatatgtagatggcggtttagtcagtccggtacctgttgaagtagcccgtgatttaggagccgatgtcattattgctgtcgatattctggctcaacccatttatacggaaacctcaaatgtatggggactctttaaccagaatattaatattatgcaaggacgtttggctgccgaagaacttcaatatgcagatgtagtaattcaaccggatttaagagaaaaagcacatatttttgatgtaaaaggccgtgaagcaaccatgaaggcaggcatagatgcagcaaatgcaaaactgtctgatattcagtttgcgattgatgaaaaaatagctgaacagaatctatctactgacggtttaagtgcgcaaacacaataa

SEQ ID NO: 42345 - DNA, 1476 bp, Acinetobacter baumannii
atgaatgaacaactcaatgccacactgatgtcgtgggtacaattttttaatgaacctttatgggattttctggttattttcttgctggccgtcggtattttttatacggtcttaacaggagcagtgcaaattcgcatgttcttgcaaagtattcgtgttatgaaaagcagccgtacagaaggcgaagatgagcatggccttacacctttccaagcatttgtaacaggtcttgcgagccgtgttggggtgggtaacattgctggtgtggcaattgcgatcgcaattggtggcccaggcgccgtgttctggatgtgggtaaccgctgtacttggtatgagctctgcttttatcgaatctactcttgctcaactttttaaggtgagagacagtaatagcaagcaattccgcggtgggccagcctactatattactcaaggtttacgtagtaaaaattttggtgtgatcttcgcgttagcattgatctttacttatggttttgtatttaattcagttcaaatcaatgcaattgctaatgcatcttcacatgcttggggttgggataaagctaatcttattgcgcatttaggtggtgttgatttagaaatttcatgggttggtcttgctcttgttgtgatggttgcattagcaatatttggtggtattaaacgtatcgctaaattcgcagagatgtttgttcctttaaaagcaggtctttatctttctgtagcgttatatattgcattaagcaactatgcgattttgcctgatgttttaaaactgattgtgactgaagctttccactttaatgctgcggcaggtggtttcttcggtgctgccgtgtcaatggcaatgatgcaagggattaagcgtggtttgttctcaaacgaagcgggtatggggtctgcaccaaatgcggcggctgcgtctgatgtaaaacatcctgtaaaccaaggtttggtacaaatgcttggcgtattcgtagatacattcattgtatgtacaagtacagcaatcatcattttagtttctggcgtttaccaagacgctggcttcgtcggtgttgaattaacccaacgtgcactagagactcaagtggggcactggggagctgacttcttagctgttctattattcttgttctgttactcagctgtattaggtaactatgcttatgcagaaagtaacgtacagttcattaataacaacccgaaagtcatgttcatcttccgtatttttgtattggtgatggtgtatttcggtgcaattggtagtgtgccattagtatggtcaatggcagacttgtttatgggtattatggctaccattaacttggtcgcaattttactcttaaccccaatggctcgtactttgttgaaagattaccgagcgcaattgaagcaaggtattaaagaacctgtatttaaaattaataaatatccagagttgaagaaaaaagttgattcagatatttggtaa

SEQ ID NO: 42346 - DNA, 204 bp, Acinetobacter baumannii
atgagtttaccgctcatcaacaagcagttcatgaaacaaggattggcgattaccattgcaaccatgaaaatgaacgtaactcacgcaactactgagccacaagaaatacaacagcttggtacagatctcaatgcactcttctttaatgaaaaagaaaagggcacagatagtcgtgttatgacgatggcttgttacagtctttga

SEQ ID NO: 42347 - DNA, 705 bp, Acinetobacter baumannii
atgaatttggaacaagtccgccttgttgacgaagcaattacctctcgacattctgtccgtgcttttttaagcactccgattgagccagaagtcattaaagatatattaagagtcgcaagtcgagcaccttctggtaccaacactcaaccatggaaagtttatgtagtcacaggtcataaacgtgatgaaatggtagagcgtgtttgtgcagcacagattgaggtttccaaaaatcccgaacttgcagagcaatataaagaaacttttgcatattaccctgaaaaatgggtctctccttttattgaccgccgccgtgaaaatggttggggactctatggtttgttagatatcaaaaaaggtgaaaaagaaaaaatggctgctcagcagttacgtaacttcaaactgtttgatgctccagtcggaattttctttacagtcaataaagcaatgggaattggttccaaaatggatatcgctatgatgattcaaaatgtcatggtcgctgccaaggctcggggattagacacctgccctcaagcagcttggaaccattttcatcccctagtgttagatattttaggcgcagcagatgatgaagagttggtatgtgcaattgcactaggtcatgccgaccctgaacatattgtgaatacctttattacacctagagagcctgttgagaattttgcagtttttcttgattaa

SEQ ID NO: 42348 - DNA, 1215 bp, Acinetobacter baumannii
atgtctgaacaaacagcccagcgtcaatattctattggctggattatgttgctcgctttactcacggctttagggccactatccattgatatgtacttacctgcgttgcctcaaatggcccatgattttggggtgagtacgcaaatggtagcaaacacattgccagcttatttttttggtttagcaattggtcaactggtatatggacctttaagcgaccgtattggtcgaaaaaagcctctttattttgggcttgcgctttatgcagttgcaagcttgttctgcgtgctcgctacaaatgaatggagcctaattgctgcccgtattttacaagccttaggtggttgtgtgggggtggttatggctcgtgctgctatacgcgatagattagatgtgcaaggctcggcacaagctttttcaagcatgatgatcgtaatgggcttggcacctattttggcaccgatgattggggcctggatattaatctggtttccatggcaagcaatttttattgcgctttcaattgtaggggcaatctgttggctatgtgtacatttcttttttaaagaaactttggcaatggataagaggctcaagttgtctctatatcaagtggctaccttatatggtgctattttcaaagatgcaagcttccgtttacctatgtttgcaggatgtttaacaggtgcagcgttattctgttatatcagctcagctccagccgtttttatggatcaatatggcttaaatcagcaagagtttgcgtatgtattcgggctcaatgcttttggcattatgttaatgtcatctttaaataagcacctaaccacacgtgttgaaatcactaagcgcttaaaagcaggttcaatggtacaagtgacaggtgcaagcattgtgttgattgctggtttaatttctgcagcacctttatggctagtaatgttaggactgttcttagcaatttcaggaattggtttaactggaccaaatgctatggctctagccatgtcaaagcaaggtgctcgtgcaggaacagccagtgcaattatgggcagtatgcaatttgcttgcggtctattgggtggagtactgcttaacttccttatttggtctgcatcactcaatatgggagtgatgatggtgttatttacattaagtggttttattgttgttttaaaagcgattcgacaagcaaaaagccaatcactctcttga

SEQ ID NO: 42349 - DNA, 2079 bp, Acinetobacter baumannii
gtgccttattttctaggacatcaattagcaacaattcccctcactttaggtgtggtcgcagctggtttaagtgatattgatgatcgcttttcagtgcgaatcatgaatttgatttacacctatattggtttcttcattaccgcagcttccgtacaattacttttcccttatccaatgctttttgcgctagggctgattgcctcttgtattggctggattttactcgggtcattaggtcgccgttacgcaacaatttcttatggatgtctggttgtttcagtttataccatgttgggagttcatttatttgaccagtggtatattcagccagcgcttttggttgcaggagcagcatggtacggacttattgcaaccattagctttttattatttccggttcgccagctccaggataaacttgcggcctcttatgcttcattaggcgactttctatttgccaaatctaatttgtttgatgtcgatatgactcctgcgagttatcagcaaagcatgattgatctttcattagaaaatggcaaattaataacgatttttaatgatcttaaaaccgcccttttaacccgtttaaagggtgaccgtggacaaaaaggtactcgccgtagcctacattattactttgtcgcacaagacattcatgaacgtgcagactcggcccatatcgattatcaaaagttagctaaaattttccagcacagtgatattttatttagatttcagcgcattttggcaattcagggcaaagcttgccaagagctaaatgaatgtattttacagcgtaaaccctatatccataacaaacgctttaagcagagttttgagaacttacgcttgtctttagtaaagttaagagatgatcagcagtatgacttattgtgggtaaatgctctttttgccttataccgaaacttaaagtctattgactcacaattactcaacttagaaacggaacagcatattcagtctgacaaagtaaagcaggctgaaaaccaacttaaagatgatgatctaaaaggttggaatgatattgttgttcgaataaaacaaaatctaacacctgaatctgtactattccgtcatgccattcgtgtttcgattgttctttttattggatatgtatttattcaaatgactcatatcgaatatggctactggattatgttaactgctttatttgttagccaacctaactttaacgcaacaaaacgtcgcttacgtttacgtattgtgggtacactagtcggaattattgtcggccttagcatagtatttttagtaccttctgtggaagggcaattagtcatgctaattttgagtggcgtactatttttcgagttacgcagtaagcaatatgctcaagcaaccgcttttattaccattttggcattaattaactttaatctggacggttcggcagtcgctgcggctattcctaggtttgttgataccctaattggttgtgctttagcatggtttggtgtgacctttatttggcctgactggaaattccgtcgcctaccgcgcagtattcgacgctccttacaagcacaatgtaattatttagctgaagtggtaaaacaatatcacgaaggccataatcatgccctcaattaccgtattgtccgccgagcagcacataatactgatgcagaagtcgcttcgcttatttctactttagcaacagagccagacttcgaccctactcgtaagtccgatatatttgaatttttatgcctcaatcatacatttttaagttatatcgcagcacttggagcacatcgagaaaagattcaggatcaagcggttcttaacgtattagatcaagcattagatgatatacaaggtgctttgttaagagatgaaatgcctgatctgacggcacaaaatatgctacagacgatacgtcagcgcttaagtcaaaatgatgaagatgaccaaaaatcgctcattattttacagcaattatcgctgatgctcagtgtattaaatcgatttagtatgttaaaacaacggctaagtcatgatctggataatgatgctagcgaacttgcatcattataa

SEQ ID NO: 42350 - DNA, 576 bp, Acinetobacter baumannii
atgaccgcgaaaactttatatgcttatacgcttcagcctgtcccttacgaggtatcagaagctgagcaacgtaatgcacaacttcttatctggcgcagcaccaataaaatcagcacaaaaatctgggcgattatgggcgtaattttagcccttgcgattttaggtcttatctttatcaagaactattctacagtgatttgctgggttgccattgtctgtgtagtactttattaccttggccgtaaatatggtttggaatggtacgttaagcgtaagatgaatgagtttcctgtgcaggaaatcaagggtattcgcttaggcgtacaacctcacggtatcgtaatgcgccagcaaatgggcttacaagaaggcgttggaactatcggatggaaaaatatctatgaatggtacaacacccctgactttattttagttaactttaaagtaaaagatcctaaaggtcaggaacaacaaggtgcatatatattgcctaaacgtatggactctaaaaacttttctttcaatacaattcgtaagcatttgaaagaaagtgtaggcgaaccgaaaactttataa

SEQ ID NO: 42351 - DNA, 2547 bp, Acinetobacter baumannii
atgtttaaaaagtttttatttcaaattcattggtttctgggtattagtgctggcctcatcttatccattatgggtgttacaggcgcaatttattcttatgatcagcaaattttaaaatgggtaaatacagatagttatgttgtgcaagcacaaagctcacctaagcttacccctgctcagctttaccagcatttcacaacaatccagcctgaaattaaaattaatagcattacaattgccaaagatcctaccgcctcatccgtagtaaacattgaaaaagaaggcgaacgacgcggctacaatatgatggttaacccttatacagctcaggtattaccagaggtacaaggtcgtaagctacttttattaatacaacaaattcaccgaaacttaactgctggtgagttcggtaaacaaattaccggtgcttgtgccctaatgctcatatattttgttttgagcggattatatttacgctggccgaaaaagcactctgcacgtcaatggcttgctgtcaaacccaaacttaaaggtcgaaattttatttgggatttacacgctgttgtaggtacatgggttattgttttttatcttctttttgcatgtacaggtctatattggtcatatgactggtggcgtagtggtatgttcaaagtattaggtgtagaacaacctaaaatgcaaggccatggtggatctgggcgaaataaagatcaattgcctaaaattcaactagataatgctcaactgattacggcactcaaccaaacttggagtggttttaataatcagattggacgtgattattcgactttaacagttaacttacctaaaaaagatgatggaaaaattgaattaagttttgtagatgcaacgccacaacacgaacgtgcacgtaaccaagctgtctataactataaaactgccaatattgaaaaaatggagctttatgaagataaaaagcttaatcaaaaaattatgagcagtatgttacctgtgcaccgaggtagtttcttcggaccagtttatcaatttgtggcgatgcttgcttctttagctatgccattattctttattaccggatggatgctttatttaaaacgccgcaaacagaaaaaactaacacaagctgctcgccagtctttagctggtcactacatcgatcaaaatgctaagccttggttaatcacttatgccacccaaactggagttgcggaacaactcgcgtggagtacggcaacgagcttacaagaggcgcatcaaccagttcaggttaaatctgtacaacaactaaccgaagctgatttacagcaacatgaacaaatattatttgtgattagcacctatggtactggagaagcacctgacttagcttctaattttgctaaaaagttattaaaaactaatttaaaacttcaacatgtcaaatatgcagtattagctttaggttctaaggaatatccggatacttattgtagttttggccacacagtagatgaatggcttaaaaacaatggtgccaaagccctcttcgatattatagaagtagataatgcaaatccggcagatattcaaaactggaatcaggcacttgtaaaagcaactaaactagatttgcatgctgttaatatcgaaaaagtgtttgataattggacattacaacaacgtgatttactcaatccaaatagtctaggtcagcctgcctacaatattgaacttactgccaatcatgaagctatatggcaagctggagacattgctgaaatacaaccaggtaacagccctgaacgtattaataagtttttacagcatcatcacattctaaaaaatgcagtggtagactcgctacaggtttctattgaaaaggcactttggaataaagatttaactggtgaaattgaaccatttgccaatctggaccatttactagaacaactccctaccctaccaacgcgagaatattcaattgctagcatcccttctcagcaagtattacgtctagttgttcggcaacaacatgatgagtctgatgatttaggtttaggatcaggttggctaactcaacatacagaaattaatcaaagtgttgcactgcgtatccgtaccaatgagtcttttcatttaattgatgataatcgtccaattatttgtattggtaatggaacgggaatcgcgggtttaatgagcttacttcatacacgaactcgccataactatactgaaaattggttaattttcggtgaacgccaacgcgctcatgatttcttctatgcatcaaccattgaaacttggcaaacgatgggaatgttaaaacgacttgatcttgcattctcacgtgatcaagaacaacgtgtttatgttcaagatatcatccgacaaaatgcagcagagttagtcaactggattgaacgtggtgcagttctttatgtttgtggaagtattgaaggaatggctagcggagtagatcaagcacttattcatattttaggcgaagaacaagtcgatgagttaagacaacaaggccgttatcgccgtgatgtttattaa

SEQ ID NO: 42352 - DNA, 786 bp, Acinetobacter baumannii
atgcaagtcagtaagtggattcggattttcttagcagtcattggttcaattttatttttggacggcttatttctagcttttctaaataaaattcatgtaggcacacttgttcctttagttttaggagcattcttctgtctttatgcattattttattatcatttagaacggtttttcttctatcactatcggcttcatactctttggcgttttgggtggttgtgtttctggatttggttaattggcttaggctatttttttaattttattaaagaaaataaagacgcaagtcaaaatctccccgcagttaaagcaattattgttttaggaagtggtgtcgaaaatggacagccttcagctattcttgcaaagcgtcttgacacagcagcgccagttactctttcacaaccgcaagcaaaggttattttaacaggcggtttagacttttccgaaaaagaacctgaagcattagtcatgtcacgctacttggaacaacattttcatatagcaaaagatcgaatgatccttgaagacaaaagcacaagtacagaacttaatcttaaaaatagtaaacctttacttgaacaagctcatattagtgttaatcaacctattgcaattgttacaagtgacttccatacaccacgagctgctgctattgcaaagaaacaaggctatacacaggtttatatggtcgctgcagaaacacctttaattactcgctacaacgcttggctacgtgaatattttgcatacgctagtggctggcttctaaacgagtattaa

SEQ ID NO: 42353 - DNA, 504 bp, Acinetobacter baumannii
atgtcccaatttaaacttgaagatgcagatattcttatcgatttagcaaatcaaactttaagcttacctaaacataataagttttacgtggtctctactggcaaaaatggaattggggaacaagaaaatacgggtaaaaccccacgtggatggcatcgggttgctaagaaatttggtatgcaatctcccaaaaatgcagtttttattgcacggcagcccacaggtgaagtgtatagcagtgaattagccgcacaatttcctgagcgagattggatattgtcacgcattctttggttagatggtttagaagagggctttaacaaaggcgaaggccacgacacgatgcaacgttatatctatattcatggtacacctgataaagaaccgatgggggttccaatgtcacatgggtgtattcgaatgcgtaatgaagaaatcattgaattgtttgatttagtctctgaagatgcattagtttatttgtctgaacaatctttaacctaa

SEQ ID NO: 42354 - DNA, 369 bp, Acinetobacter baumannii
atgcgaacattgttttggcgaactctggtcgtgatttttatcacgcttggtattattggagcaattttaccaggcatgccgacaacagtgtttcttattctggctgcttgggcggcctcaaagggatggcctcagatggatgcgtggttgttaaaccaccccaagtatggaccaaccctgcgggactggcgagcaaatgggacagtaccgcgtaaggcaaagtggattgcaaccattatgatgaccgcaagtggtattctgatgctgtttacttcggcgccgttttgggtcaaggtctttaccgatactaccatgcttgttgttgcaatttggttatggctacgtcctgagccaaaattaaaagattga

SEQ ID NO: 42355 - DNA, 909 bp, Acinetobacter baumannii
atgaatattgcctcaattaaaacatcctattttgagccatggttacagttcagtcacccaatggtaagacaattggcctttacaattgccagcccgaacctacttagccaacttccctgcagccttactattcgacatagttttcaattacatacagataaaaattgggaacaacattttcaaaattacttaccccgcctaaagcagcttgatgaagcaccagaacccttacttcaatttatgtctcggcttaagagtacacgcttaggtttacgttttgaaaatttactttggttttggctacaagaagatcaatatcatccttatcagttattaggccatagtattcaaaaaattgatggagcaaaaactttaggtgaactcgattttttagttttaaatcaaaatactcaagaaattgaacattgggaagttgctctaaaatattacctaggtgaaggccaattaaatttagaacaatggattggtttaaatagacaagatactttaagtaaaaaactttaccactttactgacaaacaatttcaattttcagaagctttgggttttaaagttcaacaacgtttcgctgtcttaaaaggacaattttatcttcctctaaatttacctcaagaacagcttattcctgaatgggtaaatttaaaacgtcgcttaggtacttggggtacagaaatccctaaatctgacttttaccgcttagaaagacatgaatggctttgtcctcatcaaaaagcgagttcaaacactgcttattggtggactgatggtctatattgtcaaaatattaatgaaacccgattttatatgttcaggcaccctgctttactaagcttaaaaccttctctcatcaaaaataacggtgttttacaagagaccacgtccttatag

SEQ ID NO: 42356 - DNA, 141 bp, Acinetobacter baumannii
atgaaaaaagttttagtcgcatctgtaatggtggcatttgttttaacaggttgtaatacgttcaagggttttggtcaagatgtctctaaagctggtgatgctgtaactaacaccgcacaaaaaactgaaaataaaatgtaa

SEQ ID NO: 42357 - DNA, 1134 bp, Acinetobacter baumannii
atgaaccactcagacactctctcgcttagcttagaacttttacaacagccttctgttactcctattgatcatacttgccaaactattatggctgagcgcttagctaaggttggcttccatattgaacctatgcgctttggagatgtcgataatttatgggctcgacgtggaaccgaaggccctgtattttgttttgctggtcataccgacgtagtaccaacaggacgtttagacgcttggaattcagacccatttgcaccagaaattcgcgacggcaaattatatggtcgtggttcagcagatatgaaaactgcattagctgcaatggtagttgcatctgaacgttttgtagcaaaacacccaaaccataaaggttcaattgcttttttaattacttcagatgaagaaggtcctgctgttaacggtacagttaaagtcatcgaaacactggaaaagcgtaatgaaaaaattacttggtgtttggtcggtgaaccatcaagtactcataaattaggtgatattgttaagaatggccgtcgtggttctcttaatgctgtattgaaggttcaaggcaaacaaggtcatgtagcttacccacacttggcacgtaatccaattcatgaagcatcgccagcgttagctgagttgtgccaaacagtttgggacaatggcaatgagtatttccctgcaacttcattccagatttcaaatatccatgcaggtactggcgcaaccaatgtaatccctggtgctttagaagttacttttaatttccgttattcaaccgaggttacagcagaacagcttaaacaacgtgttcatgaaattttagacaagcatggcttgcaatatgaaattgtctggaatttgtctggcttaccattcttaactccagtaggtgaattagttaacgcagctcaaactgctattttaaatgtgactggtactgagactgagctttcaacaagtggtggtacatctgatgggcgcttcattgcgccaacaggtgcacaagttttagaactcggtgttctaaacgcaactatccatcaaattaatgaacatgttgatgtacatgatcttgatccattaactgatatttatgagcaaattttagagaacctacttgcttaa

SEQ ID NO: 42358 - DNA, 2025 bp, Acinetobacter baumannii
atgggctttaaacttaaaaagaaaagtggcaatcgcggtgctaccggaaaatcgagtgtcaattttattgcaaaaatccagtcgaaaattgagcagtttgccagtttatttggggaaagtgaaaagtccaggcctatcctttatgcagcgctgttatgtttaatatgtgcattaatttcattagcttatctattttataatgtacctcgtcataatcagttaattcgtagtcttggtgagttacgtctgttatctcaaaccatttctaaacaagcaactgaagcaacagagtcgggttctcaagaggcgatcacaaagctacagcaatctaaaaaagactttgatgagaacttacttgaaattgaaaatattcacggtaagtcgaccgatgaatatcaaaaagttgagaaaatatggggtgaggtttcaaaaaatattgatttgatttcatcacatcaacgagttcttaaccagttatatgataccaacatctcgattagtgaaacggttccagagattcaggcagaatataacttgatggtcgaccaaatggctcgccaaggtttgcctagtagtcaggtaattattgctaaaaaccaggtatttattgcagagcgtattttacgttcgattaactcggtgttaagtggtacggacggaaatgtatcaactagtgactttagtgtcgatattgagacttttggtacctatttaaatgctgaactgaatggtaatgccgagttaggtgttgatcgtattgctgatccggctttacgtgaatctttagaaagtattaagtctgaatatgacaaagtcttaaaatctgctgctgcaacggtattaaaaaatggtagccagattgtcaatgttcgtcaggcttcttctcagattttctctaaatcggatgtaatgttggaaagtctaggacatttatctgatgttgcaagaaagaactggctcaccttatttttaggtgctgttcttattctttcattaggcggactaattttctctgtattcaagttaattacactacgtagtgtgatggataagcaacgtgttgctcgattacaggaagaatatgaccgtaaccagaatgcgattttacgtttacttgatgaaattgccgatttggcggatggtgacttacgttcatatgcaactgtatctgaagactttacgggtgccattgccgactcgattaacttcgcaattgaccaacttcgagatttggtttcacgaattcatgaaacctctcaggaagttgcacgctacacacaagatacgcaaagtattactaaccagttagcagaggcatcagaacatcaggcgcaagaaattgcaggtgcttctactgccatgaatgaaatggcacagtcaattgaccaagtatctgccaacgcttctgaatctgcggaagtagcacagcgttcagtacaaattgcatcaaatggtgcacaagtggtaaatcgttcaattgaaggtatggatactattcgtgagcagattcaggaaacttctaaacgtattaagcgcttaggtgaatcttctcaagaaattggtaacatcgtatcgctcattaacgatattgcagaccaaacgaacatccttgcattaaatgcagcaattcaagcatctatggcaggtgaggctggtcgtggtttcgccgtggttgccgacgaagtacaacgtcttgctgagcgttcagcatctgcaaccaaacagatcgaaacactggttaaaacaattcagaccgataccaacgaagccgttatttcaatggaacaaacaacgacggaagttgtacgtggtgcaaatttggcaaaagatgcgggtattgcactggatgaaatccaaaaagtatcgggtgacttggcaaaattgattgcgagcatttccgacgcagcaaaacttcagtcagcatctgcgagtcacattgcaaccaccatgacggttgtacaagaaattacttcgcaaacaacaacggcaacgttgcacccgttaaaggatgttataaatatttag

SEQ ID NO: 42359 - DNA, 537 bp, Acinetobacter baumannii
atggcagcgaatggatttatcgagttacttcgtttgtctaaacggggtaataagaattacgcttcagttcaaaatgaagcacagcgatggtcaggaattgcttttgaaatgagagggcaatacttcgtcgcaccacttggggaagtgtcagaagttatctatccaccgaaatatacaccagttccaaatactcaaagttgggtcaagggattggcaaacattcgtggaagattactttcggtatctgatttggctcattttatttcagggcagcggagttcattttcgtctacccaaaaagtgctgtgtattagccatcatgaccagtatgtggggttggttgtggatcaggttttggggattcagcactttaataaaaaaagttttttttctcagagttcagacttagaggaaaacctaaaagaatattgccaagggtattttcaccaacacaatcaacattggcatgtctttttatttagtcggttattgcaaaacccacattacatgaacgcatcgacaaaatttataaactaa

SEQ ID NO: 42360 - DNA, 363 bp, Acinetobacter baumannii
atggcacgtattctcattgttgatgactcaccaacagaaacttttcgttttaaagaaatcctaactaagcatggctatgacgtacttgaagcatctaacggtgcagatggtgtgactttggcaaaagctgagcagcctgacttggtattaatggatgtggtcatgccaggtgtaaatggttttcaggcaacgcgccagattacccgtgatgaagacacgaagcatattccagtggtgattgtgagtactaaagatcaggcaactgaccgagtatggggtaaacgtcaaggcgcaatcgattacttaatcaagccaatcgaagaaaagcaattaattgatgtaattaaacaatttctaaattaa

SEQ ID NO: 42361 - DNA, 384 bp, Acinetobacter baumannii
atggaagatgcattccaaaatctgaaagtaatggttattgatgactcaaaaactattcgccgtaccgcagaaactctattgcaacgcgaaggttgcgaagtgattactgctgtcgatggatttgaagctttatctaaaattgctgaagcgaatccggatattgtttttgtagatatcatgatgcctcgtttagacggttatcaaacttgtgctttgattaagaactctcaaaattatcagaacattcccgttatcatgctctctagtaaagatggtttatttgatcaggcaaaagggcgtgtggtaggttcagatgaatacttgacgaaaccttttagcaaagatgaattgctaaatgcgattcgtaatcatgtaagttcataa

SEQ ID NO: 42362 - DNA, 639 bp, Acinetobacter baumannii
atgaataagcggatgaaatatgccttttataggaactgcttgtctgtatctataggaattgcctcttgcggagcactgtgtttctcttccccaacgttggctgcaaatgctgctcctaaagctgtctggtatcgttattatgatcagcatggtattgcgaatattagtacatccgtaacgccggctcatattcgctatggatatgaagcactcgaccagaatatgcaagtcattaaaagaaatcatccttataattctgaagctgatttaaatcagtcctcacagcgtgcattatcagctcgatatagagaagaagataacaaattaaaaagagcatatagcaatagtaaaactgcgacgattaaaagagaccaagcattattggcgattaaaaaacaaataaattatcagcaggaccaactgagccaattacaacaagacaaaattttatttaagcggcaagaaatggaatattttcgtaagggtgaacaagttcccaaaagacataaaaccttgattgaaaacaatcttatgaatattaataaggttaaacaaaaacttgaaatactttcgaaaacctataatcgcaccaataaagattatgaaaatattatcgaacgtttaaaaaagcttgaataa

SEQ ID NO: 42363 - DNA, 1119 bp, Acinetobacter baumannii
atgcgcacaacgcatcttaccccttctactttttttaaattaagcttgatcagtctgagtttaatcttagctgcatgtaaccagcaagaagtaccaaaaacaacagcatctgaacctaaaaaaattgaactcattcctcaagatttaattcctgtaaaagaaggctcactcgccgctcaaaccgcttttacaggaactattcgtgcagtacaacaaagttctattcaagcccaagttagtgcaacagcgactgccgttacagccaatgtaggtcaaaaggtacaaaaaggccaagttttagttagattaaataatcaagacaacgctgcacgcttagctcaggcacaggctaatcttgcttctgctcaggcacaagcagaacttgcacgtaatttgatgaatcgaaaacaaagattactaaatcaaggctttattgcccgtgtagagtttgaacaaagtcaggtggattataaaggtcaacttgaaagtgttagagctcaacaagccaatgtggatattgctaaaaaagctgatcgagacggtattattaccagccccatttcaggtgtgattacgaaacgacaagttgaaccgggacaaaccgtttcggttggacaaacattatttgaaatcgttaatccagatcaattagaaatacaagcgaaactacctattgagcaacaatctgccttaaaagtaggtagctctatccagtatcagattcagggtaactcgaaacaattacatgccatactgacccgtatttcacctgtagcagaccaagacagccgacaaattgaattctttgcgagccctaaagaagcgattgattcattaagtattggtgcgtttattaacggtattattttgcataatgatagcaatcagggacaaaccattcctttagatatcattcaaaatctgcaccatgatccttttgtatgggtaatacgcaatcaaacaattcagaaagtcaaaattcgagtggttgagcaacgatacaacgaaaatatcgctttagttcagggtttacaaagtacagatcaggtaagtcgtatccagtttgaagattctgatatcaataaaaaagtgacgcttacaaccgaaaaaaataaataa

SEQ ID NO: 42364 - DNA, 3099 bp, Acinetobacter baumannii
atgtggtttacccgaattagtgtgaagtaccccgtttttactatcatgatgatgctcagtctaatggtactcgggttagcatcttggaaacgtatgaccgttgaagagtttccaaatattgatttcccattcgtagtcgtcactacgcaatatgcgggtgcttcacctgaagccgttgaatcggatattaccaaaaaactcgaggatcaaatcaataccatttcgggtattaaacaaattacttcacgctcaagtgaagggctttcgatggtgattgcagagtttaatcttgatacgtcttcggcgattgcagcacaggatgttcgcgacaaaattgctccagttattgcccaatttcgcgatgaaattgatacaccgattgtacaacgctacgatccatcatctagcccaattatgtcagtcgtgtttgaatcgaacagcatgagcttggctcaattaagctcctatgtagacaaaaaaattgtacctcagcttaaaactgtttctggtgtgggtaatgtcaatttactaggtgatgctaaacgtcaaattcggattaaggttcatcctgaacaattacaaagctatggtattggtattgatcaggtcattaataccctaaaaaatgaaaatatagaagtacctgcaggaaccttacaacaaaagaattctgaactagttgttcagattcaatcaaaagtcatccatcctcttggatttggtgatttagttattgctaataaaaatggttcccctatttttctaaaacaagtagcaaccgttgaagatactcaagcagaactgcaatcaagtgctttttataatggaagaacagcggtttctgtcgatattttaaaaagttccgatgctaatgtaattcaggttgttgacaagacttatcagaccttagagaagctaaaagctcaaatgcctgcgggtttgaattataaagtcgtcgctgacagctctaaaggtattcgtgcttcaattaaagacgttgttcgcaccattattgaaggagcagtcttagcggttttaattgttttactctttttaggttctttccggtccactgtcattacaggtttaaccttaccgattaccctacttggcacattaacattcatctgggcgtttgggtttagcattaacatgatgacactgttggccctgtcactgagtattggtctattaattgatgatgcgattgtggttcgggaaaacattgtcagacatacagagctcggcaaagaccatgtcaccgcggctttagatggtactaaagaaattgggttagcagtacttgcaaccacactcaccattgtggcggtatttttaccagttgcctttatgggaggcttaattgggcgtttcttctatcaatttggggtaactgtaagtacggctgttcttatttccatgttcatcagctttacactcgacccaatgctttccgcacactggaaagatcctgtaaagaaaaaagaaagtcgactgcaacgtttctttaactatatttctaatctattagatggcctaacgcacatctatgaaaagcttttaaagcttgccttacgctttcgtttcatcacggtcattattgcaattgtttcattggttgtggcattaggcttatcaaaaatgatcggaaccgaatttgtacctacaccagataaaggtgaaattcgtattcagttcgaaacccctgttgattcttctttagaatatacccaagcaaaattacatcaagttgatcagattattaggcaattccctgatgtcgtttctacttatggagtggttaacagtgaagtcgactccggtaaaaaccatgcaggtttaggagtcaccctaaaaccaaaacaagaacgtagcgcagacctgacaacactcaacaatgagttccgtgatcgtttacaaagtgtagctggcatccgagtgacttcagtcgctgctgctcaagactcagtgtctggtggtcaaaagccaattatgatttctattaaaggatctgatctaaatgaactacaaaaaatctcggatcgtttcatggctgaaatggaaaaaattgatggtgtggtcgatttagaaagctctttaaaagaacctaaaccgactttaggtgtacatattaaccgtgtactggccagtgatttaggtttatctgtttctcaaattgcgaatgcgattcgaccactcattgcaggtgacaatgtcacaacatgggaagatcgtgacggcgaaacttatgatgtgaatatccgtttaaatgaaaataaacgtgtgcttccccaagatgtacagaacctatatctcaactcgaataaaaccaatgcaaatgggcaaaatattttagttccattaagcgccgtagccacaacccaagaaaaacttggagcttcgcaaattaaccgacgtgaccttgaacgtgaagttttaattgaagcaaacacttcaggacgtccaagtggggatatcggtcaagatatcgataaaatgcaaaaagcattcaaattgccagctggttatacctttgatactcaaggggcaaatgccgatatggctgaatctgcgggttatgcgttaacggcaattaccctttcgattgtatttatttatattgtgttgggttctcagtttaatagttttattcaccctgctgcgattatggcatctttaccattgtccctgattggtgtcttcctggccttattcttatttaggagtaccctaaatctattttcaattattggcattattatgctgatggggctggtaaccaaaaacgcgattttgcttatcgactttattaaaaaagcgatggaagatgggataagtcgttatgatgctattttacaagcaggcaaaacccgtttacgcccaatcttgatgacaacaagtgcgatggtaatgggtatggttccattagctctaggtctaggtgaaggtggtgaacaaagtgcaccaatggctcatgctgtaattggtggcgttattacctctaccttattaactcttgtggttgtccccgtcattttcacttatctggatgacttgaaaaactttatgctgcgtcaaacccgacgattcatgtcataa

SEQ ID NO: 42365 - DNA, 1716 bp, Acinetobacter baumannii
atgcgcgcaagccgctttttatttgcaacgttgagagaaaccccaaacgatgctgaagtgatttcacatcagctcatgttacgtgcggggatgattcgtaaattggcatctggtttatatacatggctgccgatgggaacacgtgtgcttaaaaaagttgatgccattgtccgtgaagaaatgaaccgttcaggtgctatggaagtgttcatgcccgtaactcaacccgcgagcttgtgggaagaatcaggtcgttatgaacaatatggtcctgaattattacgtttcaaagatcgtcacgacaatccgtttgtgcttggtcctacacatgaagaagtgattaccgatttagcacgtaatgagctaaaaagttataaacagcttcctgtaaatttctatcaaattcaaactaaattccgtgatgagatccgccctcgttttggtgtaatgcgttcacgcgagttcatcatgaaagatgcttattctttccatgcaactcaagaatcattacaagaaacttatgatgtgatgtatgacacctatagccgtattttcactcgtttaggtttagatttccgcccagtacaagcagatacaggttcaattggtggttcagcttcacatgaattccacgtattagctgcaagcggtgaagatgacattgcattttcaactgagtctgattatgcagcaaacgttgaaatggctgaagctgttttagtgggtgagcgtgcagcgcctacacaagaatttaaattggttgaaacaccaaatcaaaaaacaattgctgatgtttgccagttcttaaatgctgaccctaaacaatctgtaaaagcattattggttcaaggcgttgctgatgagaaaggcaatgtacctgtcgttgccctattcttacgtggtgaccacgaactaaatgaaattaaagccgagaagcatcctttagtggccgctcctctcgcgtttgccacagaagaacaacttcaagcatttggcttaactgctggcttcactggtccacaaggtttagttgaaaaaggcatcactgtaattgttgaccgtgctgcatctgttctttctgacttcgttgctggtgcaaatgaggcagacaaacatgctgtaggcgtaaactgggaacgtgatgcacagattactgaaattttcgatttacgtaatgtggttgaaggtgacccatctccagatggtaaaggtacactacaaattaaacgcggtattgaagtgggccatattttccaacttggtactaaatactctgaagctttaggatgtaaagttctcggtgaagatggtaaaccatttacagtaacaatgggctgttatggtattggtgtgacacgcgtagttgcagctgcaattgaacaaaactacgatgacaaaggaattatttggccacaagcgattgctccttttgaaatcgcaattgttccaatgaatgcacacaagtcaccacgtactcttgaagcagcagaagcgctttatgcagaacttcaagcccaaggctttgacgtattacttgatgaccgtaacgaacgtccgggtgttaaattctctgaccttgaattaatgggtattccacaccgtattgtgattggtgaaaaaggtcttgatgcaggcacttttgaatataaaggtcgccgtgatgctgaagcgagcaatttaactaaagaagaacttttagctaaattagcgcgttaa

SEQ ID NO: 42366 - DNA, 342 bp, Acinetobacter baumannii
atggcaggatggtacgaaattacacaagcgaatgatggacaatatcgctttgtacttaaggctggtaatggcgaaattattttaaatagtgagctatataaagcaaaagcatcagcagtcaatggtattgagtcagttcaaaaaaatagtagtgacgatgcgcgatatgatcgtttaactgcaaaaaatgggaaaccttacttcaatttaaaagctgcaaatcatcaaattattggttcgagccagttttatgccagtgaagcttcacgagataaaggcattgaatcggttaaaaacaatggatcttccacaaccattaaagacttaacagttcaggcgtaa

SEQ ID NO: 42367 - DNA, 345 bp, Acinetobacter baumannii
atgtctttgccaaactgtccaaaatgccaatcagaatatacatatcaagacggcgattttttaatttgtccagaatgctcacatgagtggaaagaaggggaagctttagtaactgaagagcaagaagtgattaaagacgctaatggaaacgttttggcggatggcgatagcgttactgtaattaaagatttaaaaattaaaggttcttcttcagttgttaaagtcggaacaaaagtaaaaagtattcgtttagttccagatgcaagtgatggtcacaatattgactgtaaaattgatggtattggtcagatgaagttaaaatctgaatttgtaaaaaaagcttaa

SEQ ID NO: 42368 - DNA, 357 bp, Acinetobacter baumannii
atggatatacaaattaaaagaatttatgacgatgtaagcggtgatgacggtaagcgaattttggttgatcgactatggagtcgagggattagcaaagaaaatgctcatttagatttatggttaaaagaaatagctccttcaaccgaacttcgtaagtggtttcatgcagagtccgcagaacactgggatgagtttaaacaacgttattttaaagaactagaaacaaaccccgcagttaaagagttattagaaatcgtttcatatcataaagtcacacttttatattcggctaaagatgtggaacataaccatgcgattattttaaaagaatacttattagaaaagagcaaaaattaa

SEQ ID NO: 42369 - DNA, 807 bp, Acinetobacter baumannii
atgaaatattatatttatccatgctcatctcaggaagatgccccttatttgattttgtcatctgggttaggtggtcatgctaatttttggaacccacagcttgaatcgttgagtacgcatttcaacgtcgtgacttatgaccacgaaggttgtcacctagacagtgctttattaccttcacattaccatatccgtgacatggcaaatcaagtactacatttattagaacatcttcaaattcatgagttccatatgattgggcatgctttgggtggcatcatcggaatggaacttgcaaagcaactacaatccagctcaattaccatgctcagtctgacactaattaatgcatgggatgagctagatgctcatacgcaaaaatgttttgatgcccgtatcgcattgttagcctctgcaggcgctgaagcctatgtacgtgcacaggcattatttttgtatcctccagcatggatttctcaaaatcatagccacattaaaagtactgaagatattcagctccaaggttttccgcccaagacaaatgtctttgcccgactcaaagcattaatgctttttcaattacaggcagagcacgtacaggcactacaagacactgcaattcatatcgttgccaatcaagatgattttttagttccagtacataaatcacaagatctttttacaaaactcggtcatggtcaactctgcattttaccctctggtgcccatgcttccacagtgaccgaatctcaacgactaaatcaaactttcattcaatttttccatagcattaaggcgttatcatga

SEQ ID NO: 42370 - DNA, 588 bp, Acinetobacter baumannii
atgaatgcaaaaacattaaatatgttagatcaactctttttagaagctagaacccacagcacgtggttagataaaaccgtcagccccgagcaaattcaacaaatttatgatctggtcaaaatggcaccaacttctgccaactgtagtcctgctcgttttgtatttttaacaacacttgaagctaaacaaaaactcaagccagcattgtcgtctggcaatgtagaaaagacgatgacagctcctgtcactgttttggttgcaaccgatgcaagattttatgacaaactaccagaactatttccgtatgctgatgcaaaatcatggtttacatcaagtgatgccgtagcacatgaaactgcctttcgtaatagttcattgcaagctgcatatttaattatggcatgccgtagtttaggtttagatacgggtccaatgtctggttttgatgcgaaacaagttgatgagctattttttgcagggacaaatcatcatattaatctcatcattaacatcggctatggcgaccctcagaaagtttatacccgccttccccgtttaaattttgaagaggcttgtcgggtggaatga

SEQ ID NO: 42371 - DNA, 1119 bp, Acinetobacter baumannii
atgaagatcggcattttttgtccaattggaaataatggctggctgctttcagaaaatgcaccgcaatataaacctacctttgaattaaacaaacaaattgtacagcgtgctgaacactacggttttgactttgccctttccatgattaagttacgtggttttggcggaaaaactgagttttgggactataaccttgaaacatttaccctcatggcaggtctcgccgctgtcaccagtaaaatccaaatttatgcaaccgctgcaacactagtcatgcctcctgcaattgtggcacgtatggcatcgaccatagattcgatttccaacggtcgctttgggctaaacgtcgtgaccggatggcaaatgcccgaatattcccaaatgggtatgtggcccggcgatgaatattttgctaaacgctatgattacttatctgaatatgtcgaagttttacgtgaactttgggcaactgggaagtcagacctaaaaggcgagttcttccagatgaatgattgtcaggtcaaaccacagcctcaagctgatatgaagattatctgtgcaggacagtctgatgctggtttagctttttccgcaaaatatgctgactacaactttgttttcggaaaaggtttaaacacaccgacagcctatgccgaaattaatgatcgcttaaaagctcaaaccgacaaaactggacgcaatgtacagacctatgtgttgtttatggtaattgctgccgaaacagatgaagctgcaatgcagaagtggcaacactataacgacggtgcagacatggaagctattcgttggctacaagaccaaggtgcaaaagataaagtgtctggcaccgacaccaatattcgccacatggcctctagcgtttctcccgtcaatatcaatatgggcaccattgttggctcttttaaaaatgtcgcaaaaatgctcgatcaaatttccgagattaaagggacagagggaattttgttgacctttgatgactttttacaaggcgtagaagattttggtcaacgcattcaaccgctcatgaaatgtcgtgaaagtgtcgttaccgaactgacagagcaagccgaactaactgttttggagaaaagtgcatga

SEQ ID NO: 42372 - DNA, 753 bp, Acinetobacter baumannii
atgaatgaaatgtctaatattgtatgtgcagaattcacggcacagattggtacaggcaaagtgttgaaagccgaacctgaacatattcaattagcagcagaacaaactgcgcttattgtcattgatatgcaaaatgcctacacctctttaggtgggtatttagatttagcaggttttgatgtctcaaagactaaacccgtagtcgaaaatattaaaaaggcaattgatgctgcacatattgcagggattcaggtcatctatttccaaaatggttgggataaaaactatgtcgaagctggtggtttaggctcaccaaattttcataaatccaatgccttaaaaaccatgcgtaaatgtcccgaattacaaggccaacttttatctaaaggcagttgggactttgctttaattgatgagttacaacctcttccacaagacatcattattgaaaagccacgttatagcggtttctttaacacagcgctcgacagcattttacgtgctcgtggcattcgtaatttggtctttgtaggcattgccaccaatgtatgtgtcgagtcgaccttacgtgatggtttctttttggaatatttcggtgttgcacttaaagatgcttgctatcaagccggacctcaagaggctcatgacgcagccctatataacattaaaactttttttggctgggtatctgacaccaatagttttattgaaacctttagttcggcatcaacattgctacagcaatctgcctaa

SEQ ID NO: 42373 - DNA, 384 bp, Acinetobacter baumannii
atgtctaaacaagttgttattcctgaaggaacatcggcaccacttgcaccctatgttcctgcaaccaaagcagacaatattgtgtatgtctcaggcacattggcttttgatgaaaataataatgtggtctgtattggtgatgctgccggacagactcgccatattttagaaacaatcaaaaaagtgattgaaactgcgggcggcaccatggatgacgtaacgttcaattccattttcattaaagattgggcggactataccgcagtgaatacggtatatgcagaatattttccgggtgaaaagcctgctcgtttttgtatccagtgcggcttggtgaaacccgatgccttaattgaaatagcatcgattgcccatgtgggataa

SEQ ID NO: 42374 - DNA, 561 bp, Acinetobacter baumannii
atgcaaaaaagagaagagaaacaggttttaactccatctgctattcggcaagctcaaacatgctcaacacacttagaagtagatcagcatacttttagacaaggcatggcaaatcttggagcagcagtgaatgtcatcacgacggatggacctgcgggacaggctggctttacagcctccgctgtatgtagcgtaaccgatacaccaccgacactattggtttgtctcaaccgctcagcatcagtttttaatacttttaaacaaaacaaggtgctttgtgtcaatactttagctgcccatcaaagtacgctatctacaatattcggcggaaaaacaccaatgccagaacgctttgcccatggggaatggagcaagctactcactggctctccgagtttgaatgaggccttggtgtcatttgattgtgaaattgtacaaagcatgagtatcggtagtcatgatgtgttgttttgtgcggtcaaagcaatgaaacaccaaagtggacttaatgcacttatgtacttcaaccgcagttattgcgaattacagacagcatgctaa

SEQ ID NO: 42375 - DNA, 1353 bp, Acinetobacter baumannii
atgcgaacaaaagaatcttggtttcctaaatttaagccgcacacaggtaatttagaaactcccgtacaaattgatgaatatcttccttctggtaaaagtattgttttggggttacaacatgcttttgcgatgttcggagcaactgttttagccccgttactcatgggctttgatccaaacctcaccatttttattactggtattggtaccatcttgttctttttaattacaggtgggcgtatgcccagctatctaggatcaagcttcgcctttattggtgcagtcgctgccgccacaggctatgcaggggttggatcaaatcccaatttagctgtggcgctgggcggtacaatcatttgcggtttgatttatgcatgcatcggtttaattgtcatgaaaactggaactgcatggattgaaaaactcatgccacccgtggtcactggtgcaattgtcatgattattggtttaaaccttgcacctgtaacaatcaaaagcgtttcgacaaatagctttgacacgtggatggcagtcattaccattttatgcattagtgccgttgctgtttttacaagaggtatgattcgccgccttctattactcattgggctcatcagtgcttattttatttattttctactcaccaatatcctagggttaggcaaacccatcgattttaatgcaatcagtcaagctgcatggtttggcctaccaacttttcactcacctgtttttaatgccaaagctattttattgattgcacctgttgcgcttattttagtcgctgaaaacttgggacattttaaagcggtttctgccatgacagagcgtaatttatcgccatatatggggcgtgctttttttgcagatggtatctgtacaagtttatcagcttctgttggtggtacagggatgacgacttatgctgaaaatattggagtaatggctgtaactaaagtctattcaacgactatttttgtggttgcgggactatttgcaattctactcggtctatctcctaaatttggagcaatcattagtaccatccctgccgctttattaggcggtgcatccattgttgtctttggtttaattactgtggctggagcaaaaatttggatcgataacaaagttgatttcacccaaaatagtactttaattattgcagcagtcagcctgattatgggtgctggtaatttaagtctacatattgggccatttgacctagggggtattggaactgcgacacttgcagcaattgtgcttaacctattactcaacagaacggaaaaatccgaaagtcaatctattgaaaaatcagtagaaccgcttaattctgtcccacatctctag

SEQ ID NO: 42376 - DNA, 873 bp, Acinetobacter baumannii
ttgattcaaattgtttcatttatcggtttaggtgcgatgggatggcacatggcttcccatttaacccaagtatgtagccaagtgtatgtttggaaccgtacttttgctaaagcaaagcaacatgaacaatcctttggtacgcaggctgtagacctgacacaagctctacaagcagatattatcttttcatgcctaccgactagccaagatgtagaaaatttaattgcggattctcaactaaaacaaggctgtatttgggtggattgcactagcggtgtaccagagactgcaagaaaactcagccaaaagctcaaattaaatggagttgattatttagatgcaccagtttcaggacaaacgattggagctgaacgaggaactctcacggtaatggtcggaggtgacgagtctgcttttaaaagagtaaaaccaatcattcaagcatttgctaatttagttgaatatgtcggcgaaagtggtgctgcctttgcagtaaaagccatcaataacacattaatggcaacacatctttgggcgttggcagagggattaagtatccttaaatctcaaggcgtaaatttacactccgcaataaactgtattaaccactctagtggcaaaagtaatgtttccgaacacatcatgatgcaacgtgttttaaaccgcaaatttgaaaaaacttttgcattagatttattacaaaaggatattggaattgcactaaatctcgttactcaaaataatttaaaacttccagcttttagtctgattcagcaacagtttaatcaggtttccaaaccctatgcacaacaagttgatttttcagccatagttaaactattggaacaacaaaaccaattagaattaagttaa

SEQ ID NO: 42377 - DNA, 450 bp, Acinetobacter baumannii
atgacaacaggtacagtaaaattacatcgagtgtttaaggcaccagctgaacgagtttatcgtgcttttcttgacccagatgctttagttaaatggatggcacctcacggttttaccgcgaaggttcatagttttgatgcaaaagtagggggcttatacaaaatgagctttaccaatttctcaaccgggtcaacgcattcatttgggggaacttatgttgaactcgttcccaatgaattaattcgttataacgaccaatttgacgacacaaatttacctggcacgatgcaggtcaccattacattaaaaacagtattggtaggcacagaaatacacattactcaagaaggaatacctgaagttattcctgtagaagcatgctatttaggctggcaagagtctttatctttattgaagttgttagtagaagccgacattccagatcaataa

SEQ ID NO: 42378 - DNA, 723 bp, Acinetobacter baumannii
atgagtctgctcgctttctcctcatatgcattaaacggtgtagatgcacaaaagtttttacaaggccaagtgactgtagatactgaacgtttagctgaaaatgaaacacgctatacagccatttgtgatcttaaaggccgcatccattttggcttatggctaaaaaagaataatgcagaaagttttgacattattgtcactcaagatcaagctgaagaattcgcgaagcacattaaaaaatatggtgctttttcaaaaatgaccttaagtgaacaaggtgctgtattcccaaaagttgtgaatggccatactgagttcagctctacagaaactgatatttccgaatggcaaaaacaagccatcatgacaggtcaagcatggattgctcaagcgactgaacatgagtttcagccacaagaattacgtttgcatcaacgcgaaggcgtcaattacgataaaggctgttacttaggtcaagaaattgtggcgcgcctttggtttaaagcaaaaccaaaacactggttgcatttagttcaaggtacaggtgatgcacctgctccagcaactcaactgcacaatgatgtagaagtggttaatagtacccaaactactgacggttatattgccttagttgttgcgaaacccgccgcccttcaagaattaggtcttcaagttttagatttaccagaagctttaagtggtgatgttgctagaccacaataa

SEQ ID NO: 42379 - DNA, 711 bp, Acinetobacter baumannii
atgaaaactaaacttgctacactcttgttgagtttggcttttttcggttctgctcatgctgatgttaaaacacttgaacaaaatctgaagacaaattatccagacctccctgtaaaaggtgtctatcagtcacctgtcgctggaatttatgaagtctatacaagtggccgtattgtttataccaatcaagatgcaaaatacttttttgtaggcaatttagttgatatcaaacaacaaaaaaatatgacagaagagcgaattgccgaattgggtaaaattgatgttaaaagtctcccattaaatcaggcaattaaatacgtcaaaggtaaaggagagcgtactctttatattttcagtgaccctgactgcccttactgtcagcgtctagaacaaaatatggttggggtggataacgtaacggtatatgtattcttatatccgctgaccagcttacatccaaatgctgaaaaggtttctaatcaaatctggtgctctaaaaacccttcagaagcttggacaaattatatgcttaaccgtaaattgccagcggctggcaaaagctgtacaagtccaattcagaaaaatattgctttaggccagaaattaaatatagatggcacaccaactctgttcttacaagatggtcaaagaatctctggcgtaccaagtgatgcaaaacagattgaagcattattacagtcagtaaaataa

SEQ ID NO: 42380 - DNA, 825 bp, Acinetobacter baumannii
atgaagaaattacttatcgccagtctaattgccatttcaagttcgtcaatctttgcagcagatactacgacatctgcagctaaaaacgatgtatttaaacaggctgagcagctatacgcagcaaaaaattatcctgctgcttttcaagaagtccaacgtcttgcacaaacaggaaatgctcaagccatctataacttaggctatatgacacaaatgggccaaggtactgccaaagataatgccaaagctctgaaatattatgaagatgcctcaaataaaggttatgctcaagcaagttacacgcttgcacaaatttatgagactggtgaattaggtgttgccaaagatagcaacaaattcagtcaatatattcaaaaagcagcagctcaaggttctgatgatgcaactgtcaaaatagcgactattttatttgcacagaaaaaacctcaatctcaccaaattgctttacaaaagctagcgcctttgattagaaaaggaaactaccctgctattcaggtcaaagcgctttatgatattagccaaggggttgaaaataaaaatcctttaatgaaacgccaaggcattgaagctttacaaacaattgcccaaaaggggtatgcgcctgcatctatggctttagcaaccatgatggcgaatggcaatatcattcctcagaacctgcctcaagcaaaacagatctttactgagcttgctaagcaaaatgttcctaatgctagagaatctttagcttcggtcgaaaaaattattgctgagaagaataaacaagctgccgccgctcctacgcagccagctcctaaaaaatag

SEQ ID NO: 42381 - DNA, 924 bp, Acinetobacter baumannii
gtggtttttcaggtaattttaccaattttgattttattattgatggggtactgtagtgtcctcattaaactggtaacacctgaacaaattaaggctctgagtgcatttgttattaaaatttctttacctgcttttttaatccaatctttagccaataaaaacttacaagatatttggcaccctgcttattttattgcttatggtggcggctctttaatcttgttttttggggcttttatcctttaccgcaagtattttaaaaatagcctgacacatagtgcggtcatatcgatgggcgcttctatgtcaaatacaggttttatgggtacagcgattctaaccatgctaatggggagtcatgctgcaatctatatatctttaaccttaattatcgaaaatttattaatagttgctttaatgcttattttggcagaagcgggtttgcaccaacagcaacggcttttgcctttactgaaaaaaacattcattaatttacttaaaaaccctgtaattattgcaattttagttgggatgagttgcattttgctagatattcatctgccttcaaaacttagacaagccttagaacttttaggaagaacagcttcgcctctagcattatttgctattggtggcagcttggttggtattggtattaccgccgtgaatttccaaagtatattgttggctggatttaatgtcatccttatgcctgttgtgatttttggactgttccttttactgccaaacgtgagccaagagatgttatatgctggcactttacttgctgcgctgccaatgccgatcgcttttggtatttttgggcaagcctacggtttaaatgaaagagcattaacccccttaatgattagtaccattattggctttatgggggtgagtgggcttattgctttgtggtggtaa

SEQ ID NO: 42382 - DNA, 1110 bp, Acinetobacter baumannii
atggcaaaattatttgaaacggttaatttcgattcactacaactggtcaatagaattgtaattgccccaatgtgccaatattcggcaacagatgaaggcgaaattacctattggcatgaacagcaatgggcaaattacgcgttgtctggagctgggctatgtattgtggaagctacagctgtacaggcggaaggtcgaattagttatgcagatcttggcctttggaatgatcagcaacgtgaccagatcaaaactttattgggaaaagttaaaacactttctcctatgccatttggaattcagttagctcatgctggacgtaaggcatctactgaaaagccttggttgggtaaaggccaaattgcaaaagatcagccacatggttggcaaacagttgctccaagtacaagtactttttcggttcatgatgcagcgccacatgctttaaccattgccgagattaaacaaattcaacaagactttgcagctgcggccaaacgtgcagttgaagcgggctttgagttaattgaggtacatgctgctcatggttacttgctacaccaattcttatcgccaattgcaaatcaacgtactgatgaatatggtggctctttagaaaaccgtatgcgtatgacgctagaggttcttcaggcaattaaacttgctgttcccgaaggttatccggtaggggtacgtttatctgcaacagattggatggatggcaatgagcagtgggatattgagtctacggttggtttatcaaaagccttagagcagttaggcgcggcctatattcatgtctctagtggcggtttacatgagcatcaaaatattactattggagcaggttaccaagttcctttcgcggaacaggttaaaaaacatgtagctattcctgtgattgctgtaggtcttattactgacccacaacaagctgaacaaattttagaaaaccagcaagctgatgccattggtcttgcgcgtgcaatgttatatgacccacgttggccatggcatgctgcagctacattgggggcaaaagtcaaaattgctcctcaatatttgcgttgccaaccacatggcttaaaacagctttttgattctttttag

SEQ ID NO: 42383 - DNA, 2130 bp, Acinetobacter baumannii
atgtccttattacgcttagaccgacttcattactgtattttgatgagtatgggctgtatttctagcccacttgtttgggccgaagacttaaattcagacgttgccaaattgccaactttacatgtggaagcgacacgtactgacaccggttatttacaaacaccagcttcggttttccgaatcgagacacctcaagtggacagttcttcacaagtaaatttaactgaagttgtgaagggcataccgagtttacagattcgtaaccgtgaaaattatgcgcaagatctacagctatctatgcgtggttttggtgcacgttctacgtttggtgtccgtggtattcgtctttatgtggatggtatccctgcaacaatgccagatgggcagggccaaacatctaatatcgacttaagcagtttagatcatgttgaagttctaacagggcctttttcttcactttatggaaattcatcaggcggtactattttaacttctactaaagaagggcaagggaaggactcaattgagctgagctattcgggtggtagccatgataaaagccgagcaggacttgtgctgcaaggtggagcaaagggtgcgaatgaaccaagctatattattagctcatcatactttgataccgacggttaccgcgaacatagcggtgcagaaaaagtactaaataatgcaaagctcagctggaatcttgatgatggtagtaaaatcaactgggtaaccaactatgtaaaaatccacgccgatgatccgcagggactaacgcatgatcagtggaatgcaaatccaaagcaacaagttccatttttaaagcaatttaatgttcgtaaagatattgaacaaacccaaacgggcgtgacatggtctaagccgattaatgacaaaaatgaactctatgccatggcatatttaggcaatcgtcaagtcacacaatatcaatctattcctaagtccacccaagatgcgagcataaaccatgccggtggagtcattgattttgaacgtaattattatggtgctgatttccgttggacgggtaaagagttgcttccaaataccacgctaagtgtcggtgttgcacttgatgcaatggatgaagatcgtaaaggttttgaaaactttaatttagtaaatggtcaaccttcttatggtgtcaaaggtaatttacgtcgtgatgaagacaatactttatggaatatcgatccatatttacaagcttcatggcagttcttacctacatggcgtttagacacgggtgttcgctatagcaatgtccactacaaatctgaagataactatttaagtaatggtgatgatagtggtaagacggattacgataaagttttaccgtcggtcgctttaagtttgcaaattttacctgaacttatggcctatgtaagttatgccaaaggttttgaaacaccaacttttactgaaatggcatatcgacctgatggtcaaagtggttttaattttgatttaacagcttcaacaagcgatacctatgaaacaggtttaaagtcacaaaaccaattaggtgattttactttggcggttttccagactaaaactaaagatgacattgtttcggccggtaactcaaatggccgatcaacgttccgtaatgcagataaaaccttacgtgaaggtgtagaatttgcatggaataaaaagttatggcgagacttaatagcgaccgcaagctactcgtatttagaggcaacctttgatgctgacattccagcgttaggaaatattgctcagatttcctcaggaaatgccataccgggtattgccaaaaaccaagcttatgcctctttggcatggcagccatcgcacggtctatatggtggtgtagatgtacagtatatggacaaagtatacgtgaatgataccaacagtgacgcagcaccgagctacagtgtaacctcagcaaatgttggttatgcatgggtaatgggcgattggaaagtcaatagctttgctcgtgtagataacctctttgataaaaaatatgtaggttcagtgattgtaaatgacggtaatagccgctatttcgaacctgctgatggacgtaactggagtgcaggtttacgtgtaattaaacaattctag

SEQ ID NO: 42384 - DNA, 567 bp, Acinetobacter baumannii
atgtcagatattttaccattaagctggtttcaacgagaaacttcggaagtagcatatgatttaatcggctgcgtattatgtaagcgacagcctgatggacaagttatccgctgtacaattagtgaaacagaagcttatttgggcgtccgcgataaagcctgccatagctacaatgacaaacgtaccgcacgaacagaggtgatgtatcgccatggtggtaccatttatgtctatttaatttatggcatgtatgaaatgctcaacattattactcaaacagaaggtgtacctgaaggagtgatgattcgatcagcatttttaaatagtgcttcaactaaaaaagaatataagcttttggctggacccggcaaactgacgcgttatttaggcattgatcggactttaaaaggccagactttgggtgaagaatctggactatggatcgaggcggccactatacagccagaagtggttttaacgccacgtattggaattgattatgccgaggaggcaaaagactggcctgaacggtattgctggaaagatcatccatcattaagtcgataa

SEQ ID NO: 42385 - DNA, 825 bp, Acinetobacter baumannii
atgcctgagttacccgaagtcgaaaccaccaaaaccagtttatttcccttattgaatcaaaaagttctaagtgttgaagtacgcaatcctagcttacgctggcctataccagataatgttcagaaacttgttgggcaacgtctcattgggttaaatcgacgttcaaaatatattttggcagagtttgaacaagatcaaatgctctggcatttaggaatgtcaggtagttttcgcctgtgtcaaccaaacgatgaattgagaaaacacgaccatctcattattcaatttgaagatcagcagttacgttaccatgacccacgtcgttttggctgtattctttggcttaatcctgaaactcaaggcaaactcatcgatactttagggccagagcctttaagtactgactttcatgcagaatatttagcttctaaactcaagaataaatctgtcggcataaaaattgcactcatggataatcatgtagtggttggtgttggcaatatctatgcaactgaaagcttgtttaatgttggcattcatccagcacagcccgctggtgatttaaccatgcaacagattgagaaactggttgttgagattaagcgaattttgaagtcagcaattgatttaggcggctcgactttacgagactacagcaatgccatgggtgaaaatggttattttcaacagactttactcgcttatggtcgtgccggagaaatgtgtgttaactgtgaaaccacattagaaaacttaaaactcggtcagcgtgccagcgtattttgcccacagtgccaaccgcttaaaaagctgagaaagccttaa

SEQ ID NO: 42386 - DNA, 291 bp, Acinetobacter baumannii
atgcaaacagcaattgtccgacatattttagtcaaagataaagacttagctgaacagctgaaaaagaagctacaaagtggtgctgactttgccaaacttgccaaacaatactccacctgtaattcggcaaaacgtggtggtgaacttggtgaagtcaaaaaagggcaattggtgcctgtcattgacaaagtagtttttacggctgctgaacgtgtattacaaggcccaatcaaaagccagtttggctatcacctcttagaagttaaattcagaatgactggcttacgttga

SEQ ID NO: 42387 - DNA, 354 bp, Acinetobacter baumannii
atgaatcagctttttgtatatggaactttatgccctaataaagcaaatgctcatattttagagcagattggtggtaactggacaaaagcgagtgtacgaggagtgattcatattttagattggggaccagacaaaggcttaaaagctttagagttagatcccgaagcagcttgggtagaaggttatttgtttagcacagaaaagttagcagaaaactggcaaatgttagatgattttgaaggctttcaataccaacgcgtgatagcagatataaaattagaatcgggtgagtatgttaaagcctggacatatcaaatcaatatgcaggctaaagcttctcacaattacaagtaa

SEQ ID NO: 42388 - DNA, 432 bp, Acinetobacter baumannii
atgagtattattcaagaatttaaagaatttgccattaaaggcaatatgatggatttagccattggtgtaattattggtggtgcttttggcaaaatcgtagactcgttagtaaaagatatcatcatgccgcttattactgtaattactggtggtggtgttgatttctcgcagaaatttatcgtgttaggtgcaaaccctaataacttacaatctctagatgccttacaaaaagcaggtatcaatgtattaacttatggtaacttcctgaccattttaattaacttcctgattttggcttgggttgtgttcttaatggtgaaattattaaacaaacttcgccgtgataagaatgagccagaagctccagctgcaactccagaagatatccaattattacgtgaaattcgtgatgagttgaaaaaacaagcttaa

SEQ ID NO: 42389 - DNA, 1836 bp, Acinetobacter baumannii
atgtcagatatcaaaaatctccgtaatatcgcaattattgcgcacgtcgaccacgggaaaaccacacttgtcgataaactacttcagcaatcaggtgctctcggtgaccgagcaggcgagattgagcgtgtcatggactcgaatgcgcttgaaagtgaacgtggtattaccatcttagcgaaaaacaccgctattacttggttagacaaacgtacagatacaacttaccgtatcaacatcgtggataccccgggacacgccgatttcggtggtgaagtagaacgtgtaatgtcgatggttgactgcgtactacttcttgttgactcacaagaaggcccaatgccacaaactcgctttgtgactcaaaaagcctttgcccgtggtttaaaaccaatcgtgattatcaacaaagttgacaagccaagtgcgcgtccagactgggtaatcgatcaagtatttgatttgttcgataaccttggcgcaactgatgagcaacttgatttcccaatcgtttatgcatcaggtttacgtggtgtagcgggtcctgctcctgaagagcttgcagaagacatgactccgttgttcgaaacgattgtagacatcgttgagccaccagctgttgatgttgatggtccattccaaatgcagatttcatcacttgactataacagcttcgtaggtgttatcggtgttggtcgtattcaacgtggttctgtaaaattaaatactcctgttactgtaattgacaaagaaggcaatacacgtaacggtcgtatcttaaaaatcatgggttaccatggtttagagcgtattgatgtggattctgcatctgcgggcgatatcgtatgtattactggtattgatgcacttaacatttctgacacgatttgtgatccgaaaaatgttgaagcattaccacctttatctgtagatgaacctacagtgtctatgactttccaagtaaacaactctccgtttgctggtaaagaaggtaaattcgtaacttcacgtaatatccgcgagcgtcttgaccgcgaattaattcacaacgtggctttacgtgttgaagatactgacagtccagaccgtttcaaagtatctggccgtggtgaacttcacctttcagttttaattgaaaacatgcgtcgtgaaggcttcgaattaggtgtatcacgtccgcaagtaatcattaaagaaattgatggtgaaaaacaagaaccttacgaaaacgtaacgtttgacgttgaagagcagcaccaaggcgctgtaatggaacaaatgggtcaccgtaaaggtgaaatgaccaatatggaagttgacggtaaaggccgtatccgtattgaagcaactgttccttcacgtggtttaattggtttccgttctgaattcttaaccatgacctctggtactggtattatgacttcaagcttctctcactatggtcctcttaaacaaggtactgttgcgaagcgtcaaaacggtgtgttgatttctatggttcaaggtacatgcttgggctatgcattattcagcttacaagaccgcggtcgtttattcgctaagccacagttagaagtttacgaaggtatgatcgtaggtattaactctcgttcagacgatatggttgtaaacccaactaaagcgaaacagttaactaacgttcgtgcgtctggtactgatgatgctttaactttaacacctgcaattgaatttacgcttgaacaagctcttgaatttattgaagatgatgagttagtagaagttactccaaaatcaattcgtatccgtaagcgttacttgactgaaaacgaacgtaaacgtaaccgtgataaataa

SEQ ID NO: 42390 - DNA, 1359 bp, Acinetobacter baumannii
atgtccaatcaaccatcacaagaccgtcttgacctcgtttatggactagatgaccgaccaaaacccttcgtggcttttttggcagcctttcaacatttgcttgcaattattgtcccgattgttactcccgggcttctaatttgcttagcattaggcgttccacgaaatgaaaccaatatgattttatcaatgtctttggtcatttcaggaatcgcgactttcttacaatgtaaaaaagttggtccgtttggtgcaggcttacttattgttcaaggtacaagttttaactttattggcccgattatcggtattggcagtgcaatggttgctgcaggtacaccagtcaatcaagttatggctgctatttttggtgttgtgattgcaggttcatttattgaaatgggcgtatcacaaattctcccatgggtaaaaaagctaattactccccttgtgacaggtattgtggtactcctgattggcctaacgctcattaaagaaggtttgattagtatgggcggtggttatcaagccatgcaggaccatacttttgccagtgctgataatcttataatgtcgtgtacggttcttgctattattattgtcctaaaccgtattcgtattgtctggattaaaagttcagctattttaattgctttagtgattggctacattcttgccggctttatgggatatctagacttctctggtctaaaagatgcacccgtgattcaaattccgacaccgatgcattttggcttaagcttctcatggggcttatttattccaatggcatttatttatttggttacgtctttagaagcaattggtgacgtaacggcaaccagtaaactatcaaaccaacctgtagatggtcctcagtggatgcaacgtattaagggtggtgtgttagtaaatggtgcaaattcactacttgctggcctattcaatactttcccaagctccgtgtttgcccaaaataatggtgttatccaattaactggcgtagcaagtcgttatgtaggaatctggattgctgctttactcattttattaggtctattccctgctgtagctggtgtaatacaagctgttccacaagccgtattaggtggagcagtcatggtaatgttcggcgccgttgctgcctcaggtattaatatactttcatcaattcatttagatcgccgtgcccttttaattattgcgatttcacttgcattaggtttgggtgttgctcaggtgccacaaattttggagcatctgccagaattatttaaaaatatttttagttccggcgtagcaacaggcggtattgcagcattaattttaaatgttgtactcccagaaacacataaataa

SEQ ID NO: 42391 - DNA, 1014 bp, Acinetobacter baumannii
atggaccctagaagtgaagtgatattaagacaacaagactatttaaaaggtagggtcttgttaattaatgcaccgaatgacgccctagtcagtcaattaccaactgagattgatgcatcagtctggacatggaattatgctgactatcagggttttgtaaatgcaggcgcaacagctcatttctcggttgagtttccatcacaagaatttgatcaggctataatttttgttccaaaatcaaaagagcttttaaactatatattgcatgtagtgatgagccatctgaaaattgaccaatcagtttttttagtaggtgaaaaaaaaggtggtgttgaaagagctgccaaacaactacaaaactttggcaaaatacttaaacttgatagtgcccgacattgtcagttatggcatttaaaaattgagaaaattgaaaagatcaaacctcttgaaagctggttaaaaacctataatgttcaagtaaatgagcaagaacttaccatttgtgccttacccggcgttttcagccaaactcatctagatgtcggaactgctgttttactcccttatctaaatcaggtgaaatcaggtagaattgccgacttcgggtgtggagctggaattatcagttgttatttggcaaaagcaaattcaagtaatattatccatgccctagatattgatgccttcgctttacagtcaacggaaatgacttttagtcgaaatggaataggttcagaccagttgagattgcagcctgttacaggaattgcagacgccccaacagaacttgatgccattgtcagtaatcctcccttccatcagggtattcataccaactatgatgcaagtgaaggactctgccagaacgctaaaaaacatttaaaggcatcaggtgagctatggattgtagcgaaccgttttttaaactatccgatcttaattgagaagcactttggtcagtgtgagattaaaactgatcttcaaggctttaaggtgttatatgcctgtgcataa

SEQ ID NO: 42392 - DNA, 1461 bp, Acinetobacter baumannii
atgagcgaaacacatgctcctgaaaaactccagcgtaagcttggggctcgtcatctgaatatgatcgccattggtggttccattggtacaggtcttttccttgcttctgggtcaaccattgcaaatgcaggtccaggtggggcgttactcgcctactccctcattggtattatgatttacttcttaatgaccagtttaggtgaacttgcgacacacacaccaacatccggtgctttctttacctatggaagtcgctatgtcgaagagggttttggtttcgctctaggctggaactactggtacaactgggcaattacggttgcgtttgaactcgttgccgtacagtttattatgaaattctggttcccagatgttcccggattctattggagcgccctctttctcgtcattatctttatgattaatgcgatgaccgtaaaaggatttggtgaaagtgaattctggttctccatggttaaagtaattgccattgttgcctttattattattggtatcgccatgattattaagattatgttgacaccaggagtagcaacttttggcaactggacttataaagaggcaccattcgtaggtggtttacaagccatgattggggtagccatgattgctgggttctcatttcagggaaccgagatggtaggtgttgcagcgggtgaatcaaaagatccgaagaagacgattccgcttgcaattaaacagattttctggcgaattttattattctatatcttgtgtattttcattatcggcacccttattgcctatgatgatccaaacttattacaagcagcagcaacagaaaatattgctctttctcctttcaccttactttatgaaaaagtaggttttgcttttgctgcaagcttaatgaatgcagttattttgactgctattttgtcggcaggtaactcgggcatgtactcttctacccgtatgttatttgatatggcgcaacaaggccgtgcaccaaaatggtttgcaaaactcgataatcgtggtgttccaatgaatgcgttatatgcaactacattcattgctgcattctgcttcttaacgacttttatcggagaaaagcaagtctttaactggctcctcaatatgtcaggaatgtgtggtttcattgtctggttaggtattgcaatttcgcattatcgtttccgtaaaggttatattgctcaaggttataaattagaagatcttgcataccgcgctaagtttttcccattcgcaccttggtttgcctttatcctctgttctgtcattattttaggacaaaactaccaagcggttttaggcggtaaaattgactggattggcttactttctacttatatcagcttgcctttattcttagtaatctggcttggatataaatggaaaaataaaactaaattaatcccttacgatcaaatggatgtaaaaccagagcaagattaa

SEQ ID NO: 42393 - DNA, 1206 bp, Acinetobacter baumannii
atgggcatacaaaagatattaaacgaagaggcacaatatggtgtccccgttaaaattttcactcaagacatagatagtgaaagtattgaacaactcaagaaaatggcacaactgcaatttatatattctcatattgctgttatgcctgatgtgcatgttggaaaaggtgcaactgtaggcagcgtcattcctactaaacatgccattattccagctgcagtgggagtagatattggctgcggaatgaatgctattcgtttgagcctgaaagcttcacaacttccagataacttaagccgcttgcgggacgccattgaacggaaagtaccggttggatttgctttgcacaaacaagtcaaagcgaaagcttctagcattattccacttgaaaaacgcttagaacctattattaaaaagcatccgggtcttgtccgaatgcttcgtcagtttgaggcaacatggcaaaaacagttgggcactttaggcggcggtaatcactttatagagttatgtattgatgaaaatcaagatatatgggtgatgctccattcgggcagccgaggtcttggtaacgtcataggtacttattttattgagttagccaagaaagaggcacaacatcgctttgggcacgtgcctgataaagatttaagttattttgctgaaggctcgcaaagctttaatgattatgtagaagcagtagagtgggctcaagaatatgcttttgaaaatcgtaaagaaatgatgcgattaatattagaagcaattcgccctcttctaccttcttttcaaatgacgaaagaagcaatcaattgtcaccataactatgtgagtcaagaaacacactttggtgaaaacctttttgttacaagaaaaggggcaattcgagcaggtttagatgagttaggaattattccaggttctatgggagcacgctcgtatattgttaaaggtaaagcaaaccctgaatctttttgttcctgttctcatggagctggccgcaaaatgagccgaagcaaagcaaaagttctttttaatcagcaggacttgattgaacaaacacaagggattgaatgccgtaaagacagtggtgtagtcgatgaaattccaagtgcctataaagatattgatgaggttatagccaatcaggcagatctcattgaagtcgttcatactcttaaacaagttttatgtattaaaggttaa

SEQ ID NO: 42394 - DNA, 159 bp, Acinetobacter baumannii
atgaaaattaaagaaatgccgaaaattaaggtccgtaatcaagtagctctatcccctctacttcacaaaggtggtatgcacgaaacagaaaaacctcgtgctcaacatcgtagaaatagacaagatactaaacagcaattgaagaaaggtgtttggtaa

SEQ ID NO: 42395 - DNA, 1071 bp, Acinetobacter baumannii
atgaaattgagtcgtattgcacttgctactatgcttgttgctgctccattagctgctgctaatgctggcgtaacagttactccattattgcttggttacactttccaagacagccaacacaacaatggcggtaaagatggtaacttaactaacggacctgagttacaagacgatttattcgttggtgcagctcttggtatcgagttaacaccatggttaggtttcgaagctgaatataaccaagttaaaggcgacgtagacggcgctgctgctggtgctgaatataaacaaaaacaaatcaacggtaacttctatgttacttctgatttaatcactaaaaactacgacagcaaaatcaagccatacgtattgttaggtgctggtcactacaagtatgactttgatggcgtaaaccgtggtacacgtggtaactcagaagaaggtactttaggtaatgcgggtgttggtgctttctggcgcttaaacgatgctttatctcttcgtactgaagctcgtgctacttataatgctgatgaagagttctggaactatacagctcttgctggcttaaacgtagttcttggtggtcacttgaagcctgctgctcctgtagtagaagttgctccagttgaaccaactccagttgctccacaaccacaagagttaactgaagaccttaacatggaacttcgtgtgttctttgatactaacaaatcaaacatcaaagaccaatacaagccagaaattgctaaagttgctgaaaaattatctgaataccctaacgctactgcacgtatcgaaggtcacacagataacactggtccacgtaagttgaacgaacgtttatctttagctcgtgctaactctgttaaatcagctcttgtaaacgaatacaacgttgatgcttctcgtttgtctactcaaggtttcgcttgggatcaaccgattgctgacaacaaaactaaagaaggtcgtgctatgaaccgtcgtgtattcgcgacaatcactggtagccgtactgtagtagttcaacctggtcaagaagcggcagctcctgcagcagctcaataa

SEQ ID NO: 42396 - DNA, 516 bp, Acinetobacter baumannii
atgtttaaatctcctggttttactatagttgagctcactataacactcgtaattcttgtgattatgtcagttatagccattcctttataccatcaatttatggcatctgtagaactaaaaaatacgccgcgtatactcacaattcatatacaaaaagccaaatatgacgcaattattaggcataagaatgttgttctttgtccaagctctgatcaattggtctgcaatacgaattgggataaccgcgtaatcagctttgtagataataaccgtaatctacagcatgatttaaatgaagaattattgacctctatagatcttaaccatcactacggttctatgaaattacaacgttttggaaaaaaacaaaatagtattatttttcaaggtagttctggactacccatcgagtcgaatggcagttttatctattgttcttatgaccagcttaaaaactttaaattaattcttagcaaaatgggccatgtgcgcttagaagagcttaaaaattgttag

SEQ ID NO: 42397 - DNA, 1176 bp, Acinetobacter baumannii
atgactgacatcgtaattgttaatggtgctcgtactgctatgggtggttttcaaggatcactatcaggactaactgctcctgaattaggagcggtaacaattaaagaagcaatcgcacgagcaggtttacagcctacagatgtcgaagaagtcattatgggttgcgtattaccagcggggttaaagcaaggtcctgctcgtcaagccatgcgtaaagcaggtttacctgattcaacaggagctgtgacaattaataagctttgtggttcaggcatgaaggcggtaatgcaagcggctgatatgattaaagcaggaagtgctgaaattgtagttgccggtggtatggagtcgatgaccaatgcgccttatgtcttacccaaagcacgtgcgggataccgtatgggccacggtgaaattaaagaccatatgttctttgatggcttagaagatgctgaaactggacgtttaatgggttcatttgctcaagatatggcaaatacacgtggttatactcgtgagcaaatggatgactttgcaattcgctctttaaaacgtgctcaaactgcgattactgaaggctatttcaaagatgaaattgtacctgttactgtttctacccgtaaaggtgatgtcattgtcgatcaggatgaacaacccttaaatgccaagattgataaaatcccatcccttaaaccagcttttgcaaaagacggtacaattactgctgcaaacgcgagttcaatttctgatggtgcttctgcactagttttaacatcgagtgaagttgcagcacagcgcggcttacagccacttgcaaaaatcatagccactgcgtcaaattctcaacatccttcagaatttacaattgctcctgttggcgctattgaaaaagtacttaaaaaagcaggttggaatgctcaggacgttgacctttgggaaattaatgaagcatttgcgatggttacaatgtgcccaattgatgatttcaaacttgatccagaaaaagtcaatattcatggtggggcatgtgcacttggtcaccctgtaggatcgacaggttctcgtattattcttacgcttattcatgcgcttaaacgtactggtggtaaaaagggtgtcgctgctctttgcatcggcggtggtgaagcaacagctgttgccatcgaaattctttaa

SEQ ID NO: 42398 - DNA, 444 bp, Acinetobacter baumannii
atgcaactcaatcactatctcaattttcaaggccaggcagagcaagcttttaatttttataaatcagtattcggcggtgaatttgccatgctgagccgctatagcgatatgccgcctaatgacggtgtgacattatccgaagctcaaaaaaatttagtgctccatgtttccctgccgattaacgaatacactgtactcatggcatcagatgtcattgatcaattctgtacaccaaatagtgtatttactcagggtaataatcattacattgcaattaaccttgaaaaagatgagcaagaaaaggcaaagcaactttttgatgccttatctgtaaatggcaaaattgaaatgccactagaaaaaacgttctggggcgctttatacggtgcttttactgatcaatttggtgtcaaatggatgattaactgccagttagatacttaa

SEQ ID NO: 42399 - DNA, 354 bp, Acinetobacter baumannii
atgttcgctttaatttcaaaaataaatcctggtgcttggtggttaatattcgctattgtgacggatgtactttcaaccttttattcggctaaaggcaatggattagttaataaaactgctcaggggattgctctagttttgtatattatctcttttgcatgtgctgctattgctttgaaatatatgcaagctggaattttatatgtgttgtggtctggggtgggggtattggcgaccgcttttctcgcaaagatttttcttgggcagaacattgatgtcgcaggatggattgggattggttttattacagtcggcttaatgattattgcgcaatactctaatatcgatgtttaa

SEQ ID NO: 42400 - DNA, 486 bp, Acinetobacter baumannii
atgcttaatacagctctacctgtgctttataaagatggcacgattgcagataatacttatcaaatcattgctgaagatggtgtgattcctcaaggtgacgttgttttaacaacagcacagctcgatcaactggctaacattcaaggtaaaaaagctttgtatgtgactgtgaacgattcaccagaagatcatacattcccacttagtgaacttgatgcaatttttatcgagttcgcaggtttcggagatgggcgaggttattcattcgctgcattattacgtcgccaaggtttccaaggtgaactacgtgcaacaggtgatgtatttaaggatgtcttaaattatttaaaacgttcaggttttgatagttttgtcatcaaagaaggtaaagatgtgcaagaagctgctgctggtttgcaagactttacccatccttatcaagcctcaacagctgtgccaaaagcaagttatcaaactggtgcttaa

SEQ ID NO: 42401 - DNA, 1644 bp, Acinetobacter baumannii
atgtatttatataccgatttcgatcagcagctgattaatcaacgagttgctcagttccgcgatcagacagagcgctatttagcgggcaaactttctgaagatgaataccgcccattacgtttgcaaaatggtttatatgtgcaacgttatgcaccaatgctacgtattgctgtgccgtatggcttaatgaactcaaaacaattacgtaaaattgctgaagtatcaactcaatatgaccgtggctatgcacacgtatctacgcgtcaaaatattcagctaaactggcctgctcttgaagatgtgccagaaattttagctgaactcgcaactgtacaaatgcatgccattcaaaccagtggtaactgtattcgtaacacgactactgaccagtatgcaggtgtagttgctggtgaaattgctgatccacgcccaacatgtgaattgattcgtcagtggagtacattccacccggaatttgcattcttaccacgtaaatttaaaattgccgtttctgcacttgaagaaaaagaccgtgcagcaacagcattccacgatattggtgtgtatatcgtgcgtaatgaagcaggcgagatgggctacaaaatcatggtgggtggtggtttaggccgtactccgattattggtagtgtcattcgtgagtttttaccacgtgaagatttaattgcttatttagaagcagttttacgtgtttataacttacatggccgtcgtgataacaagtataaggcgcgtatcaaaatcttggttaaagcattaacgcctgaagtatttgcacagaaagttgaagctgaatttgaacacacacgtgaaacattaaaaattcagccagaaatcttgaaaaaattagatgaagagttcacgccgtttgattatcaagatttagaagatgaagactttacagctttatttgctgagcatccaaaattcaaacaatggttcaatatcaatacgcatgcacataaagtaaaaggctatcgtattgttacgatttctttaaaacgtgcaggtatcgcaccgggcgatatgaccactgaagaaatgaacttcattgcagatctcgctgataaatatacgtttggtgaacttcgtacgactcacgaacaaaacattgctttagcagatgtacctcaaaaagatttgttcgatgtatggcaagcgcttgaacaacacaacatggctcgtgcgcatatcggctttattaccgatattattagctgcccgggtggtgatttctgttcacttgcaaatgcgaaatcaattcctattgctgaagcgattacacgccgttttgaagatttagataaagtttatgatcttggtcatttagacttaaatatttctggctgtatgaatgcttgtggccaccaccacgtgggtaacatcggtattttaggtgtagataaaaaaggcgctgagttctatcaaattacattaggtggtaattcagaccatgatgcttcaattggtgatatcttaggaccatcatttgcagcagaagccgtacctgacgtcattgaagaagtattaaatacgtatcttgatttacgtactgaaggtgagcgtttcgttgatacatatcgccgtgtaggaattcaaccatttaaggagcgtgcatatgcttaa

SEQ ID NO: 42402 - DNA, 2406 bp, Acinetobacter baumannii
atgaatcaaccttcttcaagatcaggtttaacgacttttaccgtaattattattgggttattggcgttattcctgctaattggaggtatttggctcgctacactaggcggttcaatttactatattgtagctggagtcttacttctcattgttgcatggcaactctacaagcgcgcttctgctgctttgtgggtttatgccgcattaatgctaggtactattatctggagtgtctgggaagttggaacagacttttgggcgcttgcaccacgtttagatattttaggtattcttggtttatggttattggttccggctgtaactcgtggaatcaacaaccttggatcaagtaaagttgccttatcttcaactttagcaattgcaatcgtgttgatggtttattctatcttcaatgatccgcaagaaattaatggtgaaatcaagacacctcaaccagaaactgctcaagccgttccaggcgtcgcagagagcgactggcctgcttatggtcgtactcaagctggtgaacgttattctccattgaaacagattaatgaccagaacgtaaaagatctgaaagttgcctggacattccgtactggtgatttcaaaacagataatgactctggcgaaacaaccaatcaggttacaccaattaaaattggtaataacatgtttatctgtacggctcaccagcaattaattgcgattgacccagctacaggtaaagaaaaatggcgttttgatccgaagcttaaaacggataaatcgttccagcatttaacttgtcgtggtgtaatgtattacgatgcaaacaacacaactgaatttgcgacaagcttacaaactaaaaagtcgacttcaactcaatgtccacgtaaagtctttgttccagtcaatgatggacgtttagttgctgtaaatgctgacacaggtaaagcatgtactgactttggtcaaaatggtgaagtgaatttacaagaattcatgccatatgcttatccaggtggttataacccaacatctccaggtgttgttactggttcaacagtggttattgccggttcggttaccgacaactattcaaataaagagccatcaggtgttatccgtggatatgacgtaaacactggtaagcttctttgggtatttgatactggtgcagcagatccaaatgcaatgccaggtgaaggtacaacctttgttcataactcaccaaatgcttgggcacctttagcatacgatgccaaacttgatatcgtttatgttccaacaggtgtaggtactccagatatctggggtggtgaccgtaccgagttgaaagaacgttatgcgaactctatgttagcgattaacgcttcaacaggtaaattgatttggaacttccagacaacccatcacgatttatgggatatggacgtaccttcacaaccatctttggtagatattaaagacaaatctggtaaaactgttccagcaatttatgtcttgaccaaaacaggtaatgcctttgttcttgatcgtcgtaatggtcagccaattgttcctgtaactgagaaaccagttccacaaacagttaaacgcggaccacagactaaaggcgagcattattcaaaaactcagccattctctgatttgaacttggcaccacaagataaattgactgataaagatatgtggggtgccactatgcttgatcagcttatgtgtcgtgtgtctttcaaacgcctcaattacgatggtatttatacgccaccatctgaaaacggtactttagttttccctggtaacttaggtgtgtttgaatggggcggtatgtcagttaaccctgaccgtcaagttgctgtaatgaacccgattggtctgccattcgtgagtcgtttaattcctgctgatccaaaccgtgcgcaaactgcaaaaggtgcgggaactgagcagggtgtacagccaatgtatggcgtaccttatggtgttgaaatcagcgcattcttatctccacttggtttaccttgtaaacaacctgcttggggatatgttgctggcgtagatttgaaaactcatgaagtcgtttggaaaaaacgtattggtacaattcgtgacagtttaccgaacttgttccagttaccagctgtaaaaattggtgttcctggtttaggtggttctatttctaccgcaggtaatgtcatgtttgttggtgcaactcaagataactacatccgtgcgtttaacgtaacgaatggtgagaaactttgggaagcgcgtttaccagcaggtggacaagcaacaccaatgacttatgaaattaatggtaaacaatatgttgtaattatggccggtggtcatggttcatttggtacaaaaatgggcgactatttagtggcttatgcattaccagataacaaataa

SEQ ID NO: 42403 - DNA, 1254 bp, Acinetobacter baumannii
atgaaaacgcataaatctttgatggtttcctgtttatccgttttatcaattactctttttgttcagcatgcacaagctgctgctgcatttgacccaaatggttcttggatgttgggtgattggaacgggcaacgtacagcgttgcaagcacaaggttatgatttttcttttggatataccggtgaatatgccggtattttagattccaaacaaacatctacacacggtagtgcttatacagggcaacttgctttaggttctcatttggacctaggtaaaattttagggtggcaagatacagaagctcaaatcacattaacttatcgtgatgggcaatcgctttctgaacattctccagcattggctgggcaccaaagttctgttcaagaagtgtggggccgtgaacaaacttggcgtttaacagatttatggatcaagaaaaaattccttgatcagaagttagatgttaaagtgggccgttttggtgagggtgaagactttaatagttttgactgtgatttccagaacttggcactttgtggttcacaagtgggtaactgggtaggcgatcagtggtataactggccagttagccaatgggcaatgcgtgtcaaatataacttgcaacctgatttatatacacaagtgggtgtatatgaatataaccctgaaaacttggaacgtggcaaaggcttcaacctaagtacagatggttctcacggtgcaattattccagcagaagtagtttggtcacctaaactaggtgtgcaaagcatgcctggtgaataccgtttaggttattactatagtactgccgatgccaaagaaattgcagattcaactaaaacatctcataagcaaggtgtttgggtaactgcaaaacagaaattattccagccagctgatcaaactgaccgtggtttaacagggtttgtgaacctgactttccacgactcagataccaacaaagttgataacatgcaaaatataggcttagtctataaaggtttgctgaatcaacgtcctcaagatgagttggcacttggtgttgctcgtatccatatcaatgatgattggagcgatgttcaagccaaagaatacgacaccgaatataataccgagctttactatggtattcatgccactaactggctaactattcgtccaaatgtgcaatatgttcgtcatgttggtgcattaaaaaatggtgataacacttgggtaggcggtattaagttctcaactgcattctaa

SEQ ID NO: 42404 - DNA, 1119 bp, Acinetobacter baumannii
atgacgactgcattaaatggacttaaagttctcgatttctcgacgctcttacctggacctttcggcacaatgtatttagccgatatgggggcagaagtcatccatattgaatctccatcacgtccagacctcattcggattatgccgccctatgcaaatgggcaggcgactgcacatagttatctaaatcgaaataagcagtcgattgttctcgacttaaaagatgctgcaagtattgatctgattaaagccaagatttctgagtttgatgttgtgattgagcagtttcggccagatgtcatgcgccgtttagggctggactatgccacccttgcagaaattaacccgcgtttaatttattgttcaattacaggttatggccaaactggaagttataaagatcgggctgggcacgacattaattatttagccttagctggtattgctgggtatagcggccgacaagatagcggcccaccaccgcttggtattcaggttgccgatattgctggtggttcattacatgcagtcattgcgatcttggctgctgtagttgaacgcagccgtagcggtataggtcaatatattgatatttccatgacggactgtgttgcaagtctaaatagtatggcagcttcagccacgcttgccgcacaagttgaacaggctcccgagcaggggatgctcaatggggggattttctatgactattatatgacgcaagatggccgttatctttctatcggtagccttgaaccacaatttatggcaggtttgtctgcagcactagatttacctgtgttattacaaaaaggtgcatcattagatgtgcaagatcgacaggaagttaagcaagccattcaagaaaaaattaaagccaaaacatttaaagaatggcatgaaatttttgcaaatcttgatgtttgtgtagaacccgtattgagtttaagtgaggctttaaattcaccgttagcacaacaacgtggatggattgtgaatgttcctttgcaaaataatacgccagatacagaaccacaaattgcatgcccaattaagttttcacgttcgcaaatgagatattcctttgtaggtcaaaaacttggcgaagggcagtggtga

SEQ ID NO: 42405 - DNA, 1011 bp, Acinetobacter baumannii
atgagtcgcgatacgattagcatccacttcgtgaatgcggctttgacaggcgtaaagcgccttggcatggatgtcgagacgttactttcacatgtgggtatcgaagcggaactattacgtcaacctaaagctcgaatctcaccagaacaatatacccgttttataaaaatgttatggatggtcacacaagacgaacacgtcggtttcgatgtacaaccgcgtcgtttgggcacttttgccattatgtgtcagttgattattcatgcaaaaaccttgggccaagcccttgaactttcatctcaattttacaaattatttggtgatgaatggtcagtaacgatggagcgtgacaaacacgaagcacgtttagtacctctcattccaaaaacattagatccggatcatttcattactgaaagtatgctcatgatctggcatggattggcatcatggctgattgaacgtcgcttaccattagaacgtgttcattttagctatccacgtcctgcacatgcagatgaatatgacgctttattctttgcgccggttatgcaatttgacgcaccgcgtaccgaaataacctttgcggctgattatcttgatttgccaattcgccaagatgaaaaaacattagaagaattcttaaaagcagcccctgctcagcttttagtaaaattcaaaaataccaattcattgacttcacgtattcgtgaagtactcaaaagccaaattggtgaagaaatgccaacgctcaatgacgttgcatcaatgttgtatttatctccgcaaactttacgccgccgcctagctgccgaaggtaaaagctatcagggcgtgaaagacgctttacgccgagatgctgcgattcatttattactcaatcctgagttaacacttgaagatgttgctcagcaagttggttttagtgaaaccagtacattccaccgtgcatttaaaaagtggactggtgttactcccggtctatatcgccagctccatggttaccattaa

SEQ ID NO: 42406 - DNA, 1206 bp, Acinetobacter baumannii
atgagcgaggcttatattattgacgccattcgcacaccacgcggaaaaggaaaaaaagacggctctctttacgaagtaaaaccaatcacattactcaccactctattaaacgaattacagcaacgccatcaactcgatacatctaaagtagatgatattgttctgggctgcgtgacaccaattggtgatcagggcggtgatattgccaaaacagcagcgattgcagcgggctggaatgatgatgttgcaggtgtgcaaattaaccgcttttgtgcttcaggtttagaagcggtcaacatggcagccatgaaagttcgttctggttgggaagatttagtggttgctggtggcgttgaatcaatgtcacgtatcccaatgggttctgatggcggaccgtgggccttagatccggaaaccaaccttaaatcatcttttgttccacaaggtgtcggcgctgacctcattgcaaccttagatggctatagccgagaagatgttgataattttgccgtaaagtcacaacaaaaagcagcggcagctcaagcaaatggttatttcgatcaatcagttgtgccagtcaaagatcacgcaggtgttgtgattttagaaaaagatgaatttattaaaggcaataccacacttgaagggttagcaaagctcaacccaagttttgaaatgatggggcaaatgggctttgatgctgttgccctgcaaaaatatccagaagcacaaaaagtaaatcatgttcatcatgctggtaactcatcaggtattgtcgatggagcagctcttgttttactggcttcagaaaaagcagtgaaagaacaaaacttaaaaccacgcgctaaagttttggcgactgcattagtcggtactgatccaaccattatgctgactggccctgcccctgccgcacgcaaggctttggaaaaagctggtttaacaattgatgatattgacctatttgaagtcaatgaagcatttgcagctgtcgtgatgcgttttattaatgaacttaatgtacctgctgaaaaagtcaacgtaaatggcggtgcgattgctttaggccatcccttaggagcaaccggtgccatgattttgggtacattacttgatgagcttgaacgtcaaaataaaaaacgcggtttagcaacgctctgtgtcggcggtggtatgggtattgccaccattattgaacgtgtataa

SEQ ID NO: 42407 - DNA, 2136 bp, Acinetobacter baumannii
atgagtgcaattcaatacgaaaaaaatgccgacaatattgtcatcttgacacttgattcaactggtcagtctgcaaataccatgaatgcagaatttcgtgactcacttgatgaggtcacccagaaacttaaagcagaaacagaactttcaggtgttatttttcgctcagcaaaaaaaactttctttgctggtggtgacttagatgaactgattcaagttcaacctgagcatgcaactgactttttcaatatggttgagaagttaaaaagtcatctaagaacgattgaaacactaggagttccagttgttgcagcattgaatggtacggcactgggcggaggatgggaaatcgcattaagttgccatcaccgtattgcaatcaatgatccaaaaagcaaatttggcctaccagaagttaccttaggtttactaccgggcggcggtggtattgtacgtatggtccgtctgcttggtcttcaaaatgcgttcccatttttaatggaaggcaaacagttcggcgtcgataaagcaaaatctttaggcttaattcatgacacagttgaaaatgaacaagaacttttagataaagcgattgcttggatcaaagccaatccaaaatctcaacagccttttgatgtgaagggttataaaattccgggtggcgatccaaaaactccggcagttgcacaagttcttgccattgcaccagccatgttaaaagataaaactaaaggctgctatcctgctcctgaagcgattatggctgccgcagttgaaggtgctcaagttgatgtcgataccgccttgcgcatcgagtctcgctactttactcaactagcaacaggccaaatttctaaaaatatgattggcactttctggcacggcctaaatgcaattaagtcgggtgctagccgtcctgccgatattgcaaaatggcaagccactaaagtgggtgtgttgggtgcgggcatgatgggtgccggtattgcctacgccactgcaattaaaggcattcctgttatccttaaagatgtatctgttgaaaatgctgaaaaaggcaaagcttattctcagaaattgctagataaacgtgtttcacaaggccgcatgacggcagaaaaacgtgatcagattttatcgctcattacggctacagcttctgctgaagacttacaaggttgtgacctgattattgaagccgtatttgaaaaccaagagctcaaagcgaaagtcactcaagaagctgaacaatacttagcgcctaatggtgtaatggcatcaaatacatcaactctaccaattacaggtttagcgcaagcaagcaagaatgataaagcatttattggcctgcatttctttagccctgtcgacaaaatgcagttggttgagattattaaaggtaaaaacacctccgcagagacacttgccaaagcctatgactttgtacagcaaattggaaaaacgccaattgttgtcaatgacagccgtggcttctttaccagtcgtgtgtttggtacttttattcaagaaggtatgcgcttacttgcagaaggcgtccatccagcgcgtattgaaatggcagcactgaaagctggcatgccggtaggaccacttgcgattcaagatgaagtgtctttaactttaaccgagcatgttgcaagtgaaacgcgtaaggcactacaagctgaaggcaaagagttaccgaaaacaccggtagatgaagtgattcataccatgattcatgaattaaaccgtaaaggtaaagctgctggcgcaggtttttatgattatcctgaaaatggtaaaaagcacctatgggaaggcttaaaccgttggcaaaaagatcatgatatctccgagcaagatatgattgaccgtattttgtttgtacaagccttagataccctacgttgttacgaagaaggggtattagagtcagtgattgatgccaatgtcggttctatttttggaattggttatgccccgtggacgggaggagcgattcaattcttaaatcaatatggtattgataaagcaaaaaaacgtgccgaagagttggctgccaaatatggtgagcgcttcacgcccccaacattgctaaaaactaaagccgagcagaagcaaaatattcaataa

SEQ ID NO: 42408 - DNA, 255 bp, Acinetobacter baumannii
atgtccgataaaaattcttccgaatcagcaattttaggctggaaatttgttctaatcgtcggtgttttaagtgcgatcttccttggctttttctatttagcaatgagtaatgagcctgactatatgccaggagcacagcgcaaagctcaacagcatgaaatgcagcaaaaagctgagaaatcaatagatcagcaaactcagcatgacaatatgcctgaaatggacatgcaagaacatcagcattcacatcagtaa

SEQ ID NO: 42409 - DNA, 861 bp, Acinetobacter baumannii
atgacagatttttctcgcaatgcactggttgtagaaggtggaggcatgcgtggtgcctttaccagtggtgtacttgatgcttttctacaacaacggttcaacccttttgatttatatgtaggcgtatcttctggttcgaccaatgtagctaactacctgacaggccaacagggtcgcaccttaaccttctatattgatcattcactacgtcctgaatttatcgattacaaacgcttctttaaaggtggtgatttactcgatttaaaatggatgtgggaaattggcgagcaagaacatcctctcgatcaacagagcctttttgccaaaaatccagatttttatatggtattgacgcatgctaaaactggtcatgctgagtatcttcgtgctggtaaagataatttgctaaatgcactgcgtgcttctagctcaattccggttttaactcgtcatcccgtcgatattatgggtgaaccctactttgatggcggcgttgcagatgctctacccgttcgctgggcggctcagcaaagtggtgtcaaaaagctattagttttacgtactcgtccgaagaactattttaaagccagtagccgaggcgaccaattccttgcgaaatatgcttttaaacaccattatggttttgcaaatagtttgcgtaaccgctgtgcccgttataatgcttcagttgaatttgttcgtagcagtaacccagaacagcaaattttagaggtatgtccaccgcctcttaaaaatatggcagggcgtttaacgacaaatccgaaaaagcttcgttacagttatgaagttggtttggaaacaggcttacaagccatcgaaaactggaatgcgatgaagtag

SEQ ID NO: 42410 - DNA, 420 bp, Acinetobacter baumannii
atgtataaagttatagcgggtagttggacgcagtttgaggaagatgcaaaatacatccgtgaacaagtctttattcaagagcaaggcattgcacccgaagatgaatgggatgattttgacagcaccgctatgcactttatggtgtatgacaaagagcagcctatcgctacagcacgtttgttgccacagcatagcgtagggcgtgttgctgttttaatgctttatcgaaagcagggtataggtaaaattctaatgcagcatattattgaatatgcgcgccaacataaattgccttatttaaagctttccgcgcaaacctatgtgacggctttttacgaagctttaggtttcaaagtgcagggtgaagtgtaccaagactgtggtattccacatattgatatgactttagcgttaagttga

SEQ ID NO: 42411 - DNA, 1239 bp, Acinetobacter baumannii
atgagtcaccattttttaggtatatcagtgtcggttttctcctttgagcaagaacagcaattctttcatgaaatcaaacaaatgcttgatcagcagacttttgagcgtttgattttgagccaatataaaggagagttgacacagctggaaaaaattactttccgtgttgtggagctacatggaaaaaaacaactttccgcgctatatcattatagcacccaagatgtgactaaaaattattcattcgaagatggcttagaacagattgcagcactgattacgcaatgcaaacaagcgaatttattttcaacgcatcaagaaatccagcttaaaaaaaataagaaaaaagccatgcttaatatgggtaaaaagcaaagcatgactaccgctccaactgtacaagcgcatgatcgtgagaaacagcgttatgtacagcagagtagtgcatttttaaaagagctgggtattactgatgagaaagctcaaatcattccaagcatggctcgtaaatggaagcagattaataaatttatcgaaatttttgagagcgcatatgagcagattgatgctgagcaaaaagagttaaatattgtcgattttggttcaggaaaaggttatttaacttttgctttgtatgattatttacaagaacaacaaaagattccgctcattacgggtgtagagctgcgccgtaacttagtggagttttgccagaacgttgcagaaaaagtacattttaatcatttagacttttttgaaggtgacgttcgtagttatcagccggaaaagctggacgttatgattgctttacatgcatgtgatattgcgactgactttgctatccatacgggaattcgcttaaatgcttcgatgattatgtgtgcgccgtgctgtcacaaagagttgcgtccacaactacgtagccctgaagttttacaacccatgctacagtttggtattcatgcgggacaacaagccgagatgttgaccgataccttacgtgcgttacttttaaaagcatatggttatgaaactaaagtttttgagtttgtatcgcttgaacacaccagcaaaaataaaatgattttggcgactaaacgcaaaaacgtgacacaacctgatgccaagattatggctcaaattcaagcattgagagaaatgtatggaattaaaaaacagactttggaattgttattacaagaccagttgccgatcgaaaatattggctgcaaatgctag

SEQ ID NO: 42412 - DNA, 630 bp, Acinetobacter baumannii
gtgttagaaacctacgacccaaaagaagaactttttaatgcctacagccatggcgctggtgtggttatggcagtaattgcctctgtctttttaattataaaaggatcttatctttccactgcccagtggataggtttatgggtatatgcttttagcttaattctcgtgtttactagctcgactctctatcattttgcacaaacacaaaatttacgttactggtataaaaaactcgatcacacggctatttattatttaattgctggaacatataccccgttcttaagcattgctatacctacacaaaaagctcatattttacttattgcgctctggagcattgctgcaattggtacacttttcaagttagtttttattcaccgttttcagaaaatttcgctacttgcttatgttcttatgggttggcttgccgtttttgtaatggatgatatgcgaacctatttaagcaaagatactttgatgttattgattactggaggtttagcttacaccgttggagcattgttttacgcgttaaaaaaggtaagatatacccatgcgatatggcatatttttgtgcttttaggtgcaggtgcacactttcttgctatctattggtacgttgtttag

SEQ ID NO: 42413 - DNA, 1311 bp, Acinetobacter baumannii
atggagtcaacctctgcgactgctgctcctgtagtagccaccaattcgaaaacacgggttttgtttgcaagtttagtcggtacaaccattgagttcttcgacttttatatctatgcaactgctgccgttatcatttttccacacctatttttccctgccagtagtggtagtgccgcagtcttacaatcacttgcaacttttgcaatcgcctttattgcccgtcctatcggtgcagcactatttgggcatttaggagatcgtataggtcgtaaagcaacattggtggcagcattgctcactatgggtatctcaaccgtatgtattggcttattaccaacctatgctcagattggaattgtcgcgcctttattgctcgccttatgtcgtttaggacaaggcttaggcttaggtggtgaatggagtggtgctgttttacttgctacagaaaatgcgcctgaaggcaaacgtgcatggtatggcatgttccctcaacttggcgcacctatcggttttattttagcaactggttcttttttacttctaagtgctgctattcctgagcaagcattcatgcaatggggctggcgtattccttttattgcaagtgctgtcttggttattgttggcttatacattcgtttaaaacttcatgagacccctgctttccagaaggttttagataagcaaaaagaagttaatattccatttaaagaagtggtgacaaaacacacgggcaaacttattctcggtacaattgcagcaatctgtaccttcgttgtgttttatttaactacagtattcgcacttaactggggaacaactaaactaggctatgcgcgtggtgaattcttagaacttcaactatttgcaaccctttgctttgcagcatttatccctctttctgccatttttgcagaaaaatttggccgtaaagctacttctattggtgtatgtattgctgctgcaattttcggactgtttttctctagtatgttagagtctggaaacacactcattgtgtttttgttcttgtgtactggcttatcaattatgggcttgacctatggtccaattggtactgtcctttcagaaattttcccaacctcagtacgttatacgggttcagctttaacgtttaacttggctggtatttttggtgcttcttttgcaccgcttattgcaactaaacttgctgaaacatatggtttatatgcagttggttattatcttacagcagcatcacttttatcattaatcgcgtttttattaatacgcgaaacaaaaaatgtagatgtaaataatcagatttaa

SEQ ID NO: 42414 - DNA, 444 bp, Acinetobacter baumannii
atgaaaaaagtattacaacctttatttttaactgttcttgctgtgccaagttttgttttcgcagcagaaacagcttcagcccctcaaaccacaacggttgataaagtacttgcggcaaaaggcccaacttcggctcaggctgtagtgaaacaagaaaatacgacggtgattagccctcgtacaggtattcgttacacattgggtaatacgggtaatcgcccaatcattttacaaactgctgcgatcgctccagcaaactctgcaaatattaaccgtattgttgcaagtaacccagctctatctccaaagagccaagaaaaagcaaaagttgcattaattggtgaagctgctgttgctggtgcggcagcagttgcagcgaataatgtaactgccccagctgtaccaaacagtgttacacctgcaaatcctgcatcattgaactaa

SEQ ID NO: 42415 - DNA, 2724 bp, Acinetobacter baumannii
atgttggcaagtctgatcggaggtatcttcggtacaaaaaatgagcgtgaactcaaacgcatgcgcaaaattgttgagcaaatcaatgcgctcgagccgacgatatcagctttaagcgatgcagacttatctgcaaaaactccagaattcaaacaacgttataacaatggcgaaagtttagataagttactccctgaggcgtttgcagtttgtcgtgaggcagcaaaacgtgtaatgggcatgcgccactacgatgtccagttaattggtggtattaccttacatgaaggcaaaattgccgaaatgcgtaccggtgaaggtaaaacccttatgggtactttagcgtgttacttaaatgcattaagtggtgaaggcgttcatgtcattactgtaaacgattatttggcacaacgtgatgctgagttaaaccgccctttatttgaatttttaggtctaagcattggtacaatttattcaatgcaagaaccagcagaaaaagcagctgcttatctagctgatattacctatggtaccaataacgaatttggttttgactacttgcgtgacaacatggtgttttctttagcagaaaagaaacaacgtggtttgcactatgccattatcgatgaagtcgactcaatcttgattgatgaggcgcgtacgccattaattatttctggtcaaagtgaagattcttcacacctctatactgccatcaatactattccaccaaaattacgcccgcaaaaagaagaaaaagttgccgatggcggacatttctggattgatgaaaagcagcgttcagttgaaatgactgaaattggttatgaaactgtagaacaagaacttattcaaatgggtttgttagcggaaggcgaaagcttatattcagctacaaatctaaacctcgttcaccatgtttctgcggctattcgtgcgcacttcctattccaacgcgacgttcactatattattcatgacggtgaagtcgttattgttgatgagcatactggccgtaccatgccgggccgtcgttggtcagaaggcttacaccaagcagttgaagcgaaagaaggtttggctattcaacctgaaaaccagactttagcaacaactactttccagaactatttccgtctttataaaaagctttcaggtatgacaggtactgccgatactgaagctgcggaaatgaaagaaatttatggcctggacgttgttattattccgacacaccgacctatgattcgtaatgaccagaacgatttaatctatttaaaccgtaatggtaaatataacgcgattattcaagaaattatgaatattcgtcagcagggtgttgcaccgattcttattggtacggcaacgattgaagccagtgaaattctatcgtctaaattgaagcaagctggtattcatcatgaagttttgaacgcaaaacaacatgagcgtgaagcagacattattgctcaggcaggtagcccgaatgcagtaacaatcgcaacaaacatggccggtcgtggtacagatattatccttgggggtaactggaaagcgaaacttgccaaacttgaaaatcctacccctgaagatgaagcgcgtctaaaagcgcaatgggaacaggaccatgaagatgtattgcaagcaggtggcttgcacattattggttctgaacgccatgaatcacgccgtattgacaaccagttacgtggtcgtgcgggccgtcagggtgaccctggtgtttctcgtttctatttatctcttgaagatgacctcatgcgtattttcgcaggcgaccgtgttgttgccatgatgcgtgcaatgggacttaaagaagatgaagcgattgaacacaagatggtaagccgttctatcgaaaatgcacagcgtaaagttgaagcacgtaactttgatattcgtaaaaacttacttaaatatgatgatgtgaataatgaacaacgtaagatcatttattcacaacgcgacgaaatcttagctgaaaatactttacaagaatacgttgaagaaatgcatcgtgaagtaatgcaggcgatgattgctaactttattccaccagagtcaatccatgaccaatgggatgtggaaggcttagaaaatgctttacgtattgatttaggtattgagctaccagttcaagaatggttagaacaagatcgacgtcttgatgaagaaggcttggttgaacgcatcagtgatgaagtaattgcgcgttatcgtcagcgccgtgcacaaatgggtgatgaatcggcagcaatgcttgagcgtcatttcgttttaaattctcttgatcgccattggaaagatcatttggctgcaatggattatttacgtcaaggtatccacttacgtggctatgcgcaaaaaaatcctgagcaggaatataagaaagaagcatttaacttgttcgtgaacatgctgggtgtaattaaaactgatgttgtaactgatctgtctcgcgtacatatcccaacaccagaagagcttgcagaaatggaagctcaacagcagcaacaagcagaagcaatgaagctttcttttgaacatgatgatgtggatggattaacaggtgaagtgaccgcttctcaagaagcacttaatgagtcggctactgaacaacaaacgttccctgtacctgaaagtcgtaatgctccatgtccatgtggttctggtttgaaatataaacagtgtcacggcaaaatttaa

SEQ ID NO: 42416 - DNA, 642 bp, Acinetobacter baumannii
atgacattacgattaggcgacacagcccctgattttcaacaagaatcaagcgaaggcactattaatttttatgattttctaggtgatagttggggcattttattttcacacccggccgactatacgccagtatgtacaactgaattgggttatacagcaaaactaaaagatgaatttgaaaaacgtaatgttaaagcaattgctttatctgtagatgatgttgagtcccacaaaggctggattaatgacattaatgaaactcaaaatactacagtcaattttccaattattgctgacaaagaccgcaaagtatctgagctatacggttttattcatccgaatgccagtgaaacccttactgtccgttctttagtgattattgacccaaataaaaaagttcgtttaatcatcacctaccctgcttcgactggtcgtaattttaatgaagtcttacgtgttgttgactcattacaattaaccgataagcataaagtggctacaccagcaaactggcaacaaggtgaagatgtggtcattgtcccttctttaaaagatgaagaggaaattaaacaacgcttccctaaaggttatactgcggtgaaaccttatttacgcctcacaccacagcctgagcaagattaa

SEQ ID NO: 42417 - DNA, 903 bp, Acinetobacter baumannii
atggctttttttacattaattgaatacacatggtttttactgttgagatcagttataacttcccaagagtttgtgcaaaaaacaaaaatcatgatccataaaattcatcatttaaaatgcggcagtatgtgccctgtatgtgcacctttatttgggcagagaggctggaaagctgaaattgtttgtcattgtcttttggtagaaactgatcgaggccttgtactgattgataccggatttggcctacaagattatctacacatgcaacagcgccttggctctttagtcaaacggttggggaaaattgaaccgaatcttgagttcagtgctatccaacaaattcaaaaactgggtttccatcctaaagatgtacagcacatttttgtgactcacctcgactttgaccatgcaggcggaatttcagactttccccacgccactgtccatgtgctagccactgaatacaatgctgcacaactgcctaattttaaaggcaagcttcgttatagaactaatcaatataaacaacatcggtactggaactttgttgagtatcaacaaggtgaaaaatggtttaaccttgaaaaagtaaaaggtttccccctatttcaagatgaaattttaatggtgccattattgggccattctgctggacattgtggtattgcgataaaacaacaaaatcaatggttattattttgtggagatgcttactactcacacctagagctaaatccagcaaataaattaagatctcttacccttctagaaaagacatttgcagaagacaatgaaaagcgtcttattaacctaaaaaaattacagcatctggctcaacatgagcaaacgattgagatcatttgtgcacatgacccccatgagcttcggcggtaccaaacatga

SEQ ID NO: 42418 - DNA, 579 bp, Acinetobacter baumannii
atgaaaaaattttcgctcattgcatttgcggtctgtttaagccttcaagggtgtatgcaacacgaaagtattgcccatgagcacagacctcacgattggggaaccttagtttctcaaactcataatttttatcaaattagcaatgatgttttccggagtgaacagcccgatgtagcaatgattcccgaattaaaacaccatcaaattgggactattattaacttaagagccaaagcatcagatgatttagtctttaaaaatgaagactttaatcttgttcatattccgattaatacatgggcaattgatcgacaagatttattagaagttatgcagcaaatccaacttgccaagcaaaataatcaacgtgttttactacattgctatcatggttcagaccgtacaggggccagcgtcgccatgtatcgaattatttttgaaaactgggcaattgatgatgcagtgaaagaaatgaaacaagggggttatggttatcatattatttggaagaatattgaccgtttatttagccctgaaaatgtaaaatggattcaacagcaactgtcgaatccatcttaa

SEQ ID NO: 42419 - DNA, 1071 bp, Acinetobacter baumannii
atgtcaatgaataacaaacaacgctggatgggtggcgttgttttattaggtggtggtgttttattggcagcattacttctaaaaggaaatgaagaaataaaacaggtagatgttcaaccccaaacttcaacatcaccgaaattacaagctaaaccaaagcaatcagcacaagaagggcagatggtacagctacagccacttgcagttgatgttgaaacagaaaaacgtcttcttgaagaacagcgccgttctcgtgaaaaagctgtagcagaacaagaggctcgtgctgccgaattcttggcaatgcaacaacaggcagaagaggatgcggctcgtaaagctgctgctgaatatgccgcgattaatgctcgccgagctgctgcacaagaaagttccgataatattcctcctgaagtcgcgggtagtgagaataaggcaaaagggcagcaaactgatacaaaaaagtcagtagatccggctaaagcggatgcagataaaaaagctgctgaagcgaaacgcttagctgaggcggataagaaagcggctgaggcaaaacgtcaggcagaagcagacaagaaagcagcagaggctaaacgtcaagcagaagcagataagaaagcagctgaagcgaaacgtcaggcagaagcggataagaaagcagcagaggtgaagcgccaagcagaagcggacaaaaaggctgcagaagcgaaacgtcaagcagaagcagacaagaaagcagctgaagcgaaacgtaaggcagaggccgagaaaaaagctgaagcagagaaagcacgtgagttgcttgaaaatggtgataaaaaatggatggtacaagttgcattggctgctaaccaagcaaatgcagatgctgtagtctctaaattacgtgcaaaaggctataaggttacgacgagcccaaccagtaaaggtatccgtattatggttggtcctgcaaaagatagagatacggcagatactacacgtaagaaaattacttctgacgccagtttaaatatgaagtcagcttgggtgattgactgggtgcctttagatcagcgtaagtcagattaa

SEQ ID NO: 42420 - DNA, 1287 bp, Acinetobacter baumannii
ttgaaacaacaagctccactttcaacagactctttagatacatggctcaattattggagccatgttcacgttacagggatcgatcttggtctggaacgtgttattcccgtagcagaaaaattaggcgtgactaaacccaacgccaaagtttttaccgttgctggaacaaacgggaaaggttcaaccacaacaacgcttgcgtctatattaaaagcacaagggtacaaagttgggttgtatcaatcaccgcatatctatcgttttaacgagcgagtcaaattaggtggagttgaagttgatgaccaaagcctgattgatgcttttgtacaagttgatcaggctcgtcgcgaatgtgatttaagcctatctttttttgaagcaaccactttggctgcttttgttatttttaaacagcaacaatgcgatgtatgggttcttgaagttggtttaggtgggcgtcttgatgttgtcaacgtcattgaccctgatgtcgccgtgattactaatattggcctcgaccatacagattggttaggtgataccatcgaaaaaattgcttttgaaaaagcaggtattatccgacctcatattcctgtcatttttgcaggtgagcaatctttgcctcaagcgattcaagataaggcaaatagctcacaagccacgctatacgcgattaatagagattatttttataaactcgccgatgatggaaaacattggtattttgcaagtgaaggaaccactttaaggttgccgcttggtacacttgcaatcgagaatattgcaggagcagttgctgccgtattaaatagcggacttgaaatctcgcaattagcgctagaggagggcattacaaatgcccgcttggctggacgcttcgaagtgcgcgaagttaatggaaaaaccattatttttgatgccggacacaatcctcatggtgttgaatttttgttaaagcaattgcgaaatttcttagaatacaataaacagtacacagaagttgtcgcagtattttcaatgctggcagataaagatataaaatcagtagtcaatttgttgaaacctactgttttacattggaaaattgctgagttgaatgtgccgcgtgctgcaccgattcagcaattgaatgacgccctgcaaggccagacaatacaacaatttggcaatatcaaagaggcttttaaatcagcgcttgagcaaacaaataacaatcagctgattttagcctgtggttcgtttcatactttagaagcgatttgggagtatttggaagaatgtcaatga

SEQ ID NO: 42421 - DNA, 897 bp, Acinetobacter baumannii
atgaatcaagaagtgaaatcagggaaagttcttagcccttcgacgccatggacacagcgtccagttccaggtattgaagttgcagatgagcaacagactctcaaagcaacatttactgagccaactattgagtgccctgaatgtcatgctttagtgacacgtacagcaatatcttttaatgcgtatgtatgtccacagtgtgacgaacacttacgaatgaaagctcgcgatcgcttaaactggttcttcgacaatgttgtggctgaattaggtcaagagtttagcgcgaaagacccattaaagtttgttgatagcaaaccgtatccagaccgtatgcgtgaagcgcaaactaaaactggtgaaacggaagctttaatcgccatgcaaggtaacttaaatggcgtagatatgattgcatgtgcttttgagtttgactttatgggcggctcaatgggtactgtagtaggtgaccgttttgttaaggcagctgaacttgcaattgaaaaacgtcagccattaatctgctttgcagcttctggtggtgcacgtatgcaagaaggtatgttgtcacttatgcaaatggcacgtacttctgctgcaattcaaaaattaaaagatgcaggcttaccttatatcgtggtgttaacacatccggtatatggcggtgtaacagcttctttagcaatgttgggtgatatccatattgcagaacctaaagcaatgattggctttgccggtaagcgtgtgattgaacaaactgtgcgtgaaacactagaagagccgttccagcgtgcagaatatctgcttgatcatggtgtggtcgatcagattgttcatcgtcatgctttacgtgatactgtatctcgtcttgtatcaaaattgatgaacttaccttga

SEQ ID NO: 42422 - DNA, 804 bp, Acinetobacter baumannii
atgtcacgtcttgccacccgttttgaaaagctgcagtcccaacaacgtaaagcgcttgtatcttatgtcatggcgggtgatccacagccacaagtaacggtgccgttacttcataaaatggttgcggcaggagtagacgtcattgagcttggtttaccattttcagacccgatggctgatggtccggtaattgcacttgctgctgaacgcgcacttgcggctgggacgaacaccttagatgcgctgaacatggtaaaagagtttcgtgagcaggatcaggaaacacctgtagttttaatgggttatcttaatcctgttgaagtgattggttacgagaagtttgtttcttatgcgaaacaatgtggtgtagatggcttattacttgtggacttaccaccggaagagtcaaaagaatttggtgcaatcttgaaacaacatgatatgaaccagattttcttacttgcaccaacttcaactgatcaacgtattcaacacgtagcgaatcaggcaagcgggtttatctactatgtttcactcaaaggtgtaacaggtgcagcgactttggatacttctgaagcggctgcacgtattgaaaaaatcaaaggtatgactaacgttccagttggcgttggtttcggaattagtgatgctgcttcagcgaaagcgatgggtagtgttgcagatgccgtgattgtaggtagtgctttcgttaaatcttttgcaacgttggcagctgatgaagctgttgaacagacggtgaataaagtcaaggagcttcgagcagcgctcgatgagttagtatga

SEQ ID NO: 42423 - DNA, 933 bp, Acinetobacter baumannii
atgaataagcctgcctctaaaatctaccgtacaaccaattggtcatcctataaccgagccttaattaaccgaggtaatatttccatttggcttgatccaaagactcagtggtatgcacaatcacaaggcaagcaaggtcgaaatcaaacctactccgatacagcgattcaatgctgcttaatgatcaaattactattccgactctctttacgtatggtcacaggttttgttcaaagtctgattaaactctctggattagattggacagctccggattattccaccctttgtcgtagacaaaagcatattgatattgcgattagctatcaaaaaagtagtgatggactgcatctactcgtagactctactggtttgaagtttcttggtgaaggtgaatggaaacgcaagaaacatggggctgaatatcgtcgccaatggcgtaagcttcacattgctatagatgctaaaaccctgcaaatacgtgcagtacaactcaccacaaataatgtcagtgattctcaagtactcgaagatttacttgctcaaattcccttggatgaaccaattgattctgtttatacagatggtgcttatgacacaaagcactgccgacaagtcattttagatcgagatgcacatgcgatcattccacctagaaagaatgcaaagccttggaaggatcagcaagcgaggtctatagagcggaacgaattattaaagacagtcaaacggctaggcagatcgctttggaaaaagtggtctggttatcaccgtcgaagtttggttgaaaccaagatgcattgcatcaaattattaggcgataaattaacagcgcggagttttccaagtcaggtgaatgagatccatgcacgcatggcagtcttgaataaattcacagaattaggtcgccctcatacccaagttgtctcttaa

SEQ ID NO: 42424 - DNA, 552 bp, Acinetobacter baumannii
gtgcaacaaagccgctttgaactaacaaaacgttcaccacaatataatattgccatgaccgctgccgctgaacatttaacagcgttaatggcagaaaccttttatagccataaaaaaactttagaaaacgctcatccttatgttcgagcactgtttgcttggcatgccattgaagaaatggagcaccgcgatgttgcctttgatgtcatgaaacaggtgggagaagttccagagtcaacacgtcgctttgtgcttgttttaacaaccgtactcatgttcggttttacgctttaccgtaccaatatcatgttgaaatgtgatggcttcagtccaagagaaagacttttgatgaaccttaaaggtttaccttggttctttggcaaaaatggcacattaacagctatgaaaaaacaatatatggattggtttaaaaaagattttcatccaagccagcatcctgttattcgtcagtatcctgtttggattgaaacactcgaaaagacaaatgaccctattgcagcgggtgaagcattttggcaagcaggtttataa

SEQ ID NO: 42425 - DNA, 996 bp, Acinetobacter baumannii
atggatttaattcaagaaaatggacagcctcgttatgggcgttttgaatctgtaccgtccaccattcatgtccaacgttatatttataaaactccttatggcaaagtcctaaaaggctggcgcaaacaattaaaatataagaaatttaaattttgtggcattcaacataaacattatagtattggtctggcaattgcagatattggctgggtcggacacggttttttctatatctatgaccatgaaacagggcaagtcattgagtggaatgctattcagccgttaggtcacaagacgtatcttgatgaacagcctttgtttaatcaaagttatttttctaaatcgccttatcagtttgatattcagcatgccaatggtgtgcgatacattcgggtaactaaatatggggaaatttgtctgagcgcccgtattttctgcgccggaacagatattttaagcttgtgtacaccaacaggtatcaatggttggacctatacccaaaagcagaccactttggctgtagagggaatgttcattaataagcaaaatcaagttgtacaatttgatgaaaagacatttgcttcacttgatgatacttgcggatttttacgtcctgaaacagcttggttctggctctcatgtaacttctgggatgaacaggggcgtcgtattgggttaaatctggcctctggtgttaatgaaagctttggtaatgaaaactgcctatggattaacggagttttatttccgctcacagacgttttatttgaaaaagtaaatgatgaactttggcaaattagttctctagatcaaaaacttaatctacaagtgcatattgggtggtgccgatatgaaaatataaacttaagaatgattggcagtcagttcaatcaatggcaagctaaaattagcggcacgattgagcatgagacaaccgatataatcaattgcaaagaacaatacggtttactagaacaacattatgcaaaatggtaa

SEQ ID NO: 42426 - DNA, 513 bp, Acinetobacter baumannii
atgccaagcttgtttatggtgatgttgggcgggcgtcatgcacgtgctaatacagaagttcatgatgtggtcatggctgtaggagatactttggaagaagtttatcctcaacttaaacaagcttggtttggtgaggcccaaggattacatattgatgcttgggctaagctctcaggagttagttctcaaggacagaactatcaaattcattttacagatgctgctccacaaccagatgatttaaagttatatttaattaatctaggtggatataatgcacgtgaattcggtgaacttcatcgttatgagtttgtggtggcatctaatgcggtagttgccaaacaattaggtaaacaatttatagatcggcagtggcaaaaagcacatacagaccgggtcattgatattgatgactgtttagcgatagattgcgtggcaggccgttatattcatttaataaaaggcgattttgctgcaacaatttgggaaaatacatatttgactgttggatag

SEQ ID NO: 42427 - DNA, 1230 bp, Acinetobacter baumannii
gtggatcagcaaaataatgtgattgactatacccaattcccagatgcaaatgggcatttcggtatccatggcggacgttttgtgtcagaaactttaatggcggcattagaagatttggaaaatctctattcccgcatgaaaaatgatgaacagtttttggcagaattcgaccgtgacctcgcctactatgtaggtcgtcctagtccactttattatgctgagcgatggtcaaaagagttaggtggtgcgcaaatttaccttaaacgtgaagacttgaaccatacaggctcacacaaggtaaacaacacgattggtcaggcgttattggcaaagctttctggtaaaaaacgtattattgccgaaactggtgcaggccagcatggtgtagcaacagcaactattgcagcacgtttaggtcttgaatgtgttgtttatatgggtgctgaagacgttaagcgtcaagcgatgaacgtttaccgtatgcgtttgttgggtgcaacagttgtgcctgtgcaaagtggctctaaaacattaaaagatgccatgaacgaagcgatgcgtgactgggtaaccaacgttgatacaacatattatgtgattggtacagttgcaggtccgcatccttatcctcaacttgttcgtgacttccagtcaattattggtcgtgaagcgcgtaaacagattttggagcaagcgggtcgcttaccagatgcattagttgcttgtgttggtggtggttcaaatgcaatgggcctgttctatccattcctaaacgatgccaatgtaaaaatgtatggtgttgaagccgctggttttggtattgaaactggtaaacactctgcgccgttaaatgcgggtcatgtgggtgtattacatggtaaccgtacttatttaatgagtgatgaacagggccagattattgagacacacagtatctcggcgggccttgattatccgggtgttggtcctgaacatagcttcttgaaagatatgaagcgtgtagagtacgttccaattaacgatacagaagctctacaaggtttccgcgacttaaccaaaatcgaagggattattcctgcgcttgaaagctcgcacgcgatggcctatgtgtctaagcttgcaccgacgatgtctaaagatcagattattattgcgactgtttcaggtcgtggtgataaagatttaatgacagttgcacgcattgatggcgtagaaatggtcgagatgtaa

SEQ ID NO: 42428 - DNA, 660 bp, Acinetobacter baumannii
atgagccaatcaaaccaaaaacgtacacgagcaaaaatctgtggaattactcgcaagcaagatgttcaggcagtagttgcagcgggagcagatgcgataggctttgttttttttccgccgagtccaagaaatgtaacagttgaacaggcagaagaattagcaaaactcgttccgccttatgtacaaatggtgggtttgtttgtaaacgcgagtgttactgaaattcaggatgtacttgattgtgttcccctagatgtattacaactacatggcgatgaaactccagaacaatgtcaggaaatagcgcgtcattgtaaacgtcgctggtataaagcgattcaggttaaacctgatctggatgtagttgctgaaattcaaaaatatcaggcagctggtgccagtgctgtattgctcgatgcgtggcatcctgagcttaaagggggcacaggacatcagtttgactggtctaaattcccgaaacttgatattccattaatcttggcaggtggtttaacccctgacaatgtcattgacgctattcatactaccggtgcttttgcagtagatgtgagcggaggcgtagagtccgcaaaaggtataaaagaccaacaactcattgaacgatttatgcaaggagtccaacgtggatcagcaaaataa

SEQ ID NO: 42429 - DNA, 1839 bp, Acinetobacter baumannii
atgtctaagtcttttcaacctactcgtctggtaggggctatcgctattgcgatggggtgttcacctgttatttttgctgaagatgcaacagatgcaactcagcttgacccaattgttatcactgcttcaaaaagtgctgaaaaagcaagtgaagttccagcgcgtatttcagtgattgatgacaaaacaatagaacagaatccattactaaatgtttcagatattatccaacgcgatccttctgtttacataaaacaaagtggtggtctaggtcagatttctgaaatttcacttcgtggtactaaatcagttcatacattagtgcttaaagatggtgctcgtttaaatagtcaaaatgagcttggccccttatatccggcatttttagatacaacagatgttcaacaaattgaaattctaaaaggccctgcatcagttcaatatggcagtgatgcgattggtggtgtcatccaattaatttctaaaaaaccagagaaaacaggtgctgatttaacgggtatttatggtgaaaataatacctataaggctattgttaatgccaatttcgtgactgaccaaggattctatgcacaagtaggcgggcaacgcttagaaagtgatggaacacgtatttttgaaagccagccaaaaaatgaaaaagccggttatgatcaaaaaggctatcacgctaaaataggcttcttccaagaaaacttaatagatgcttctgcttcaattagtgaaaataaaggcacgaatgtttttagtaatgactacataaccaatacagcacaacgtcaatttgaaaatcgagttattaacactaaagttgcttataatattttgcctgatctcatcattaatgcacactatgcaaatgttcaggataaacaaaatgttcctgcttatggctcatattacaatactgaaaataatgagagtgatttaaacctgaagtggaagttcactccaaaccaaaatattttagttggtgctacctataacgatgcgaattataaaagtaataccattcttaactcagataaaagtgtaaatagcacagggtattatttacagcatcaactcaaaaatgatctttttgacacccaagtcggtgttcgtttagaagacaaccaacgctttggtactcatactgttggacaaggtgctatacgctatcatttcttacctaatgctagtatatatgcaaatatcggcagtgctttcagagctccgaccttaaatgaactatattctcaatggggaggcaatgaaaatttagcaccagaaaaaagtacttcttatgaaatgggtatgaactacgatcttacatcaaatgtgagtactaatttttctgtttatcatacaaaaattaaagatcttatcgcctacaatgctggtgctaatacaaatatagctaaagcaaactttacaggtggtgaagctggaataaagtggcgtcaagatgatctattcttgtccactgaatatgcttacgtaaaaacagaaaatgaaaaagataatacagaaattgcctaccgtcctcgccagactctcactataagcacaggtttagaaaatgcagtatatggaattagtgcttcattaattgctagagcgaaatcttatgcagattcagccaattctatgcgagtaccaggttacgcaactgtagacttaaatgcttactggaatattattcctaacgtgaaagtatttacaaatattcaaaacttaggtgatgttcaatatcgtgaagtattaaatacatatccttcaaatgactggtatgtaaatggaggccgccaagcttctgttggggtaactttccgctattaa

SEQ ID NO: 42430 - DNA, 579 bp, Acinetobacter baumannii
atgggacaccgtttaagcaaaatctatacacgcacaggcgattcaggtaccacaggtttaggcgatggctctcgtgttgctaaagatgatctaagaattgcggcactgggtgatgtcgatgaactaaacgccattattggtgtgctccgtgcacaaattacagctagccaaatggctaataaagctgattgggacaaaagcttaagtctgattcaacattggctttttgacttaggcggcgaagtttgtattccaaattacaatttgcttcagcccgtttgtattgaatttcttgaaaaagaaattgaccgtatgaatgaagatttaccgatgcttaaagagtttatcctaccgtctggttctttatcttgtagttatgcccatcaagcccgtgccgtttgtcgtcgtgcagagcgatcgctcatgtcagtacaaactcgcgatcaaaatattcaagccactgcccttcaacttttaaatcgtctatctgactggttatttgtcgcatcgcgtgctttacagcgtgctgaaggtggacaagaagtcctttggcaaaaaaatattaatgagatgatttaa

SEQ ID NO: 42431 - DNA, 714 bp, Acinetobacter baumannii
atgcgcattattggtcatcgtggtgcacgccgagaagctcctgaaaatacattaggtggttttcagcacattaaaaatttaggtattcgtggtgtcgaatttgatattcgtcagctgcaagatcaagagttggtcgttattcatgatgataattttttgcgcacggcaggtgtcgaccagattgtagagcactcaacattggctcaagcattatcatttgatcatcgtcaaaattggcctaactggccaacctctgaaccaacccctactcttacaggcgttttaaatttacttgataactttgatcatattgaagttgaagttaaagctgtaagagatatggcattagcagaaaagttagttcaaaagcttgagactgagttacaaggtttcaagaaagtcgtgaccatcacaagttttgatcttcaaattctaaccgctttacgtgatatcaactctcaatttaaacgcggattgttagttgaacttccggttggagcaacggcgattgaacttgctcatcaatatgggtgctgtcatattggctggcatgatcaacttgcaacagatgaaatgattcaattgtctcatcaagctggtttgaacattagtgtctggacagtgaacgatgtagaaagagcaaagagactacgggatttagatattcagggcttaattacagatattccaaccacaatgcttgaaactctttaa

SEQ ID NO: 42432 - DNA, 531 bp, Acinetobacter baumannii
atgaaaatacagcgattgagaaaaaagaatagcattgatattgcaaggaaattgccattgaaatgtcttttcatcgcaatcagccttgtattggcagcatgtcaaagcacgccgcaaccaaataatcacaaaggccaagtaaaaccaacacatcgtgtacaaacgccagttgtgaaaaagaaagtgagtccagatggtgttcaagatatagattggcaaattacccagataaatggtcataaggcaaaattctttaaccagtggccgactctttcattgaactctacagtcaaaacagtaactggtcatacaggatgtaatcgtgtttttgggcgatacacttttgatttcagccaaaagaaacttgatatggaagttaacgcaggtcattcgagttgtgatggtgcgttggctcaagaagcagaattggtcgattctttacaacgtattaaacgcttccagttagtaggtaataccttatatctacttgatcaaagcggtcagcgtttgattcaggccgagaaaaaataa

SEQ ID NO: 42433 - DNA, 1173 bp, Acinetobacter baumannii
atgacttccgccccactcaaggccccaattaactggaccgctagcattaccttaattggtttaccaattcttgctgcaatcataatcccgatttatgcgtattattatgattttagtgtaagcgcatgggtaagcttattttttcttttagctttaagtagcatggggattactgctggttaccatcgtctttgggcacaccgtgcttatgaagcgtcgttaccacttaaaattcttttaatgattggcggcacatttgctgtacaaaacagtattctgttttgggcatctggtcaccgtacccatcaccgtcatgtcgacgatgtagatgaagatccatattcaattgaacgtggcttttggtatgcccatatgggttggatgatccgcgatcattctccatctgaaccagattttaaaaatgcaccagacttactcaatgacaaactggtgatgttccaacataaatactacgccttgatggtcgtagcggttcacgttggtattttaggtttggttggctgggcaactggcgatttatggggtgttgtacttcttggtggtctattacgtttaatcattagccatcaagttacattcttcatcaactcactttgccacatgttcggtaaacgcccttataccgatgaaaactcagcacgtgataacttctggttagcgattgcaacttggggtgagggttaccacaactatcaccatattttccagtacgactatcgtaatggtgtgaaatggtggcaatatgatccaacaaaatggctcatttggacatgctctaagattggtttagcaaagaacctacgtcgtattccaagctttaatattaaaaaagcagaattggcaatgaagtttaaatatgctgaacaagacttggctatttatggtcatgatgtaaatgccgacattagtcaaatgaagcaacgtattgctcaagagtatgaagcatttacgcatactttaaatgactgggcgaaactcaaagaacaagagttacaagcaaagaaagcagcaatggctgaaaagattcacaaaatggatcataagttaaaagttgatttccaattgcttgaacatcgtttgagtcatcaccgtgagtgtttagaaactttaatgcgtaacattaaaaagaacacaaacgtcgtaccagactaa

SEQ ID NO: 42434 - DNA, 1443 bp, Acinetobacter baumannii
atgcaatttaatccgctttattcatcgctcaatcctaagctttttcatatccagcaaccttctccgcttcgtggtgcaaaggctggacactttaatttagctttagccgaagagttacaatggacagatgaagaaaaacaggcttgggttgaaatttgcagtggtcagcgtaccttctcggaattcccgcctttggctatggtgtatgcaggccatcagtttgggcaatgggccggtcaactaggcgacggacgtggcttactcattgcgcagattcttaataaaaaaggccaaaccatagatttacatttaaaaggtgcaggtcctacaccctattcgcgcatgggagatgggcgagcagttttacgctctgttattcgtgaatatttagcaggacatgctttaaatgctttaggggtggcttctagtcacgcagtaggttttacaagctccactcaaggtgtacagcgtgaaaagctagaacctggcgcaatgttacttagaacatctgaatgtcatatccgtttaggccattttgaatggatcaatcaatatgcacctgagctattggccgagttcactcaaaaatgtattgaatggcactatccagaatgccaacaagaagagcaacctattttagcttttgctaaagctgtgattagaaatacagccattatgatcgccaaatggcagttggtcggttttgctcatggtgtgatgaataccgataacttaaatattacgggttctacacttgattttggtccatacggttttatggaacgtttccgaccaaattggattaacaaccattccgattaccaagggcgttacacctatcaaaaccagccgagtattgcgcactggaacttatggacttggttaaataatcttattccacttgccgaacctgagcataaagagcagttcaaagaagcgttggccgcttgtttagaagaatttgagccgacttttattgagcattacaccactgggttgtgtcaaaaaatgggacttcctcattttcataaagacagtactgaatgcggcttaagctttttgcgtattctgcaagcggagcagctcgattacacccaaagcttcattcgccttcaaaataaagaatacaaagccttacgtgatgactgccttgatattcgacaatttgatgcattccttacgcagtatcaaaacatccgtgaatatcaagatattgatgagcttgatgcaaacatgcagcaggtaaatccaatttatatcttacgtaaccatatggcacagcgagctattgaagcagcggagcgagatgattttagtgaggttgaccgcttatttaagctactcaaccatccctatacaaagcaatcagatttggaaaaaccggaagatttaggtccgttaccaagcgatgtacctgatgtcgcggtgagctgttcttcttaa

SEQ ID NO: 42435 - DNA, 687 bp, Acinetobacter baumannii
atgaaacatattatgttggttgaggatgaagtcgagttagcgcatctggtgcgtgattatcttgaggctgctggattcgaagtaagcatgtttcatgatggtcaggatgcttacacgagctttcaacaacgtaaacctaatttaatgattctggacttaatggttccaagaatggatggtttaacgatttgccgtaaggtacgtgaacagtcagatttaccgattattatggtgacggcacgtactgaagaaattgatcgtgtcttgggcctaaacatgggggcagatgattatgtgtgcaaaccttttagtccaaaagaactggttgctcgtgtgcaggccgttttacgtcgtttagaacgtaaggctgagccagagcaaaatgattctttccgtattgataaagcacagcaaagaatttggtatcaacaaaaatctttaagtttaacgccaacagaatttcgcctacttgagttatttttagaacatgtggggcaagtttattcacgtgcacaattattagatcatattaatccggacagctttgatgttgccgaccgagttattgatagccatattaaaaacttgcgtcgaaaaatcacggaagtggccgaaactggtaaccgtcatgagtggattcaagctgtttatggagtaggttatcgcttcgaatatccagaagaataa

SEQ ID NO: 42436 - DNA, 1557 bp, Acinetobacter baumannii
atgcaaaagaactttgccaaatatgtagccgatgttgaaatgcaaaagctagatcggcttattactaatctgggaaatgtatataccgtttatcatgattgggggaatgcgattcaggcgcaaatcttacaaattgaaggaacggcagcaccagatgattatgaccgtctttcccagtggtggttacggcgccaatatgatattgccattcagcagcattctttcgatgaacacactctcattaatatttctccagatgcgggaacggtaaataaaaactctatttttagtgatgaagaactacgtacacttgagcaaaacttaccttcggaatatcaaccatttgaaggtttaagattcccgctaagtgcaaaccagtttcgtccaagcgatgataaaaacaaatcaaaaaaaggaagcctcaaagacattgagacgcaaaatggtaagaagcgttttattgctttaccagaccggctgggcttaagttctcgtttatctttatatgatgccaaacaccagttcgtagtgggtgaaccgccgtcttcggatcagatgtcttatcgcccgattatggtcaatagtcaggtcgtaggttatttaggtctaaaaccagttttagataaagaagatgcattaagtattaatttcttcagtaatcaaaagcgctatttacttttaatttatgccttaacattactgtcgagtttagttgcagcacttttaatggcaacttattttaaaaagccaattcagcgtctattaaatgcaacaaatgagttaacaaaaggtaattatcaacaccaagttgtgattaaacgaaatgatgagttaggtgatttatctactcaattaaatcatttagctgaaattttacatcagcatgaagaatcacgacgtcaatgggttgcagatacctctcatgaattgaaaactccattggctgttttgcaagcgcagattgaagcgatgcaagacggtatccgaaaggcaacacctgaacatcttgatgccatgatgcgacaagtttcgagtttaaagaaattgacacaagatttggcagacttggctcaggctgatgctcaacaacttaaatgttatttgagttcggttaatccttgggaagttatactgcaagaagtcgaaaatttcagacctaaactcgaacaagcagggttagaaattgaggtggaaggtgaaggtgcttctttattgttagaccgcgatcgatttaaacaaattattgttaacttgatcggtaatagtattcgctataccgaaacaggtggaaagattcatattcatacaagtcaaacgcctcaggagtggactttatatgttgatgacagtccatttggtttaagtgatgagcaattatcacgtttaggtgaacgtttttatcgtgtcgatgattcgcgtacgcgtagtacaggtggaacaggactaggcttagctttatcttgtaaaattgcgcaggcgcttggtggtacactcagttttgaacactcaccattaggtggtttacgttgtgtactgacctttaaaaagcagagttaa

SEQ ID NO: 42437 - DNA, 2721 bp, Acinetobacter baumannii
atgccttctaaaattaagtttaaacagtcaactctttctcactctatgcatttaatcttaaaaatgcagagtatacctaaacttatttgtagcagcttattattaagtttatgtgttactccttgttatgctcaaagttcggctgagaccgttacaccagaagcaaaccagacggtaacagattcattggtacaacaaactaatacaaataacccaagtgatgttccaattaccgatgtcgctactcttgtaactcaagtacagcaacaacaagatagcttggctatattgcaacaacaagaacaatttccgaatcagattgaagaatttaagccaattacgcttgataatcttgaagacttaccggttatgcctgttgatcagaatatggcaaatgaaatttatcgggtagcagaagaggcaaaaaacgaggctcaaaacttccagaatggtacgcaaaaacaaccagaaatggtggtgaatgacgcatcacaagcagaattacatgaaattaatcaggcccctgtaaatattgaccagctcatgcatgagattcaatctgatagtaagattgtggttgaagccaatgaaacaggaaaaactttacctgagcttactgctgccgttgaagagccacccgaagaaaaaggtttctttagacgtatattcaataaaatccgtccacctcgggtaattccaatggagcagataccccgtattactgctgaggttacgggtgcgccagatgatttagctaaaaatatcaaaggtaaattatctacatttacccaagaatcatttgaagattttaatgcagcgctaccgcaacttaggagcttaagtaatcaggctgctcaagctgtaggctattacaatgctgagtttcgttttgaaaagttaagtgccagtcgcgtacgcgttaatgtaacgccaaatgaaccagtacggattaatgaacaaaacattgaatttactggtgctggtgcaaaacagccacaatttcaggtcattcgtttagttcctgaccaagatgtaggtgatatttttaatcatggcctttacgaaaccacaaaaagccgaattgtcgatgctgcatcggataatggttattttgatgcgtattggcgtttacatgacgtaaaagtgagccaacctgaaaataaagcggatattaacctcaagtatgagacgggggagcgttataagcttggtaaggttgagtttcgcatgagcgatccatcaaaaccattacctttaaatatgaatattcttgaaagcatggcaccatggaaagagggtgatgactatgctttttggcgtgtaaatgttttagcaaataacctgactaactcacgttattttaactataccttggtcgattcaattaaacccgacccaattgaaaaaccacttgagttaccacccgatttacaagcgttggtcgatcagcagaatgttgatattgacgaatcgaagctgcttcctttagagcaacaacaacttgccaaagcacgccagttggcgtcctcaagtaaagaagtgacacaaaatgtggtagatgaaaaacaatttgccggaactgaaagtgtacaagccgcacccgcatctttaaaagctgcaactgtacagcatgaagaacaagagtctgaacaagaccgtttacaggctcaagctcgggaagaaaaacgtataccagtgattgtgacgttaaatgccgataaactaaatagtctggaaacaggtattggttacggtaccgacactggcgcccgtttacgtagtcaatatagacgttcgattgtaaataaatacggtcattcatttgatgcaaacttggagctttcccaaattcgtcaatctatagatgggcgctatagtattccttataaacatccgttaaatgattactttaatattgtgggtggttacgagcgtgagacgagggatgatattggtccggatgtaagcttacttacagaatcggcagttttagggggtgagcgagttattaaaaaaccactcggaaactggcaacatactattggggtacgttatcgtctcgaccgcctaactcaaaaggggaatgtggatatctctgagctaccagatgcatttaaaactgctgcatcagagcaagaagcattattatttagttatgagacctctaaaacttcaagtaatacacgcttaaacccgaccaaagcttttaaacaaacttataaattagaattaggtagtgaaagtttactttcagatgccaatatggcgattgcaactgcgggttggagatttatttattctttaggtgaaaatgatgaccatcagtttgttgggcggtccgattttagttatatttttaccgatgagtttgataaagttccatacaatttaagattctttactggtggtgaccagacaattcgtggttttgattataaaagtctttcaccagaagataatggatataagattggtggacaggctctagcagtaggctctttagaatataactatcaattcaaagagggttggcgagcagctgttttttctgattttggtaatgcttacgataagagttttagtaatccgacggcctatagtgtgggtgttggtattcgttggaagtccccaattggaccaattcgtttagacgtggcttctggtatttctgatgataaccatccgattcgtttgcatttctttattggtccacaactttaa

SEQ ID NO: 42438 - DNA, 1323 bp, Acinetobacter baumannii
atgatgaaacaagatgaatcccttatgacatcacgtcggtttgtaccgatgttttttacccagttttttggcgcattaaatgacaatgtttataagcaagctttattgttagtcattacttatggttggattcagcaacaatctgcaccagtaagcacactcaataatttagcagcattgttgtttattttgccatatttctttttttcagcaactgccggacaaattgctgataagtatgaacgttcacaacttgttcgtggcataaaaattttagaaatcattattatgctcatcggttctgccggttttttattggggcatttatggttgcttcttttagccctatttttgatgggcacacattcaactttctttggtcctattaaatatgccattttgccagaaatcttaaaaccacatgaactcatgtctggcaatgccctgtttcagtctggtacatccatggctatcttattcggaatgatcttgggtggtgccgtaattgcgtcatcagatggaaacttattgtggattagtattactgtagtagcgattgcttgcataggttatttattcagccgtttcatcttgccacaaaaagttgccgcacctgatttagatattgactggaactttattcgtacaagctttcaaactatcaaatatgccaaaagcttaccgttagtgtttacaattttgttaggtaactcatggtactggttttatggagcgacttatttaacccaaattccgcagttgactcagcaaaaccttcatgcatcggaaaatgtggttagcctattacttactttcttttcagtcggtattggtgtgggttctcttctttgccgcaaaattggtggttcagaaattaatattaaaatggtgccaatcggtgcagttggccttactgtttttgcgctctaccttgcagccagtctggcttttgtacctgaaagaactggagcattactgacattaaaagatgtttttacccaaggctgggtttactaccatgtcatgattgctgtgactttattgggtattagtggcggtttttatattgttcctctatatgccatgatgcaggcttactcaccacgctcacatcgtgcccgagtggttgcagcaaataacatcttaaatgccgtttttatggtttcttctgcaattttctcaatcttaatcttaagtgttttaaaaattgatattaaaatactatttattattacagctgtacttagtgcaatctttagtatatggcttcttgcccgactaaaaccaatgcttgccacagcacatctttctttggaggactaa

SEQ ID NO: 42439 - DNA, 636 bp, Acinetobacter baumannii
atgcgccactatactggaattgatcaacttattaactcttttgatcaagcattacgtagtcttgttccgggtgccacagcagcacagcgccaaaatccagctgaaacagtagaagcaaaacttggtgtagaagatgctcgccatgttgcaggtttaatgcgtgttaaccatagtggtgaagtgtgtgctcaagcactttatcatgggcaagcattgacagcgaaattgccaaatgtacgccgcgaaatgcaacaggcagcgattgaagaacaagaccatttagcttggtgtgaagaccgtttaaaagagctaaatagtcatacaagcttattgaacccgatttggtatggcctttcatatggtatgggtgctctagccggtattgcaggtgataaatatagcttaggttttgttgctgaaactgaacgtcaagttagtctacatttgcaagatcacttaaaccagttaccagctcaagatgaacgctcgcgcaaaattctagagcaaatgaatgaagatgaattgcatcaccgtcatactgcacttgaagcaggcggcgttgaattaccatatgcagtaaaaatcacgatgactgctatttcaaagttaatgacaaaaacgagttattatctttaa

SEQ ID NO: 42440 - DNA, 549 bp, Acinetobacter baumannii
atgaaaaatatcggtttagccattttagcaatcagcctttcaggttgtgctgcaatgagcgtagaagaatgtaagactgcaaattggtcattagtgggtgagaaagatggttcgaaaggttcttcgccacgtttagatcaatattacaaagcatgtggaaaagccaatattgttccagatcaaaagtcatatgaacgtgggtataaagaaggcctaggttattattgccagccagcaaatattttttataacgctttagagggtaacggcaatattaatgtatgcccagttgagcagcgtaatcgtttaagaccttattatcgagctgcctcagattactacaatgcaaaagctgaatacgatcgttatgacgaaaagtttaagcaatattctgacagtgcttataacgaaaaattaaagccagaagagcgcgaacgctatcgtaaacttttaagagaattacaaattgatcgtgaccgtattaacagaaactattggaactcaattcgagatatcgaacgttttaaatatgatcatggattaaaataa

SEQ ID NO: 42441 - DNA, 1425 bp, Acinetobacter baumannii
atgagtacgcttatttacccaagtttaaacttaaaagattctcactttaaggcatttaaaatatcagatgattttattccacaaacgcaaattcatacgttcaactcagatctttttttaaaagaagttgaagaatatttaagtttatatccacacactcagcacattgatatttgtctacatgacttaaacgggcatattcgtggcaaacgtattgacgttaaaagtctcaaaaatctatcgaatggatgttattttcctctttctgtttatgccatgagccttgatgggaaagtgattgaagaaacaggtctgggaaaatatattggtgaaccagatagactttgcctgcccattttaggcagcttgcaacccagtgccttatccccagaattaaatgctcagctttacctatccatgcaagaagaagatggttcagactgtcgctatgaaccacgcaatatattaaaaaaattattaaatcagttaaatgctaataattatttccctgtcatggctgccgagctagagttttaccttttctcacctcagcatcagtctgaaacctgcatagaaaaccaatgtttcgatatagatgcaccgaataactatcagcaagtcctagatgaagttgagaaagcagccctacttcaatctattgaaattaccgctattgttgcggaatcatcccctggacaatacgaattaaatcttcaacacagccatgatattttaaagctctgcgatcaaattaatgctttaaaaagaattgtaaaacaagtcgcaagaaagcatgacttaaccgcttgtttcatggcgaaaccgaacttggcaaaggctggtagtggcatgcattttcatatgagcatgctgaatcagtaccatgaaaatatatttagctcaaaagtacaaaaagatgagctttcagccaaattattgagcgcgattagtggcctaattgagttaatgcctgcatctatggcgattttagcgcctaatattaattcttatagacgttttaaaattgggcatcatgtgccattagaagccaattgggataccaataatcgtaatgtcgcaatccgaattccatgctcagacgtacaaaatcaacgcttagaatatcgtgttgctggagcggactgtaatccctatctagttacagcgactattttagcgggcgcgtcttatggcttatctcataagttaccactgccaaaacctgcacatcttttaaaatttccagacgagcacattttattagccaacaatcagccggaagccttaaaaatatttaaaggaagtcttattttaaaagggtatttaggggcagactttgtcgaacattggtacacagttaaacaggctgaatatcaaagtatttacagccaaatgactgaagcagaacaacattgggatatatag

SEQ ID NO: 42442 - DNA, 717 bp, Acinetobacter baumannii
atgataagttcagaaacatcacctgtagaaacacgtattgtgattattgatgatgagcctcaaatccgtaaatttttagacattgctttaagaactcaaaaatacaaaaccacgctctgtgaaacgggttacaaaggcctagaggcattagcaacccaaggggctgatttggtgattctagacttaggcttacccgatttagatgggaaagaagtccttcaagaattacgtagctggtcgaatgttcccgttattgtgttatctgtacgcgctgatgaatacgaaaaagttgctttgctagatgctggtgcaaatgactacatgaccaagccttttagtgtgcaagagcttttggcgcgcattcgtgtcatcttaagaaatcaaccaatccagcaagaagcacatatttatgacgatggttatcttaaagtcgatgtcacgcaacgtttagtttggatcgagcaacagccaattactttaactcgaaaagagtttcaacttttggccctattaatgcgctatcaagggcaacttttaacacagccacagcttttaaaagaactatggggtccaacccatcaggaagatacgcactatttacgtattttagtgggcaagttacgcagtaaactgggggataacgcgattcagccacgctatattgctactgaacctggtgtaggattacgttttttagctaagcagaaaaatcactaa

SEQ ID NO: 42443 - DNA, 2655 bp, Acinetobacter baumannii
gtgcaaagcaatcgcgaaaatcaggctgaagccttattaaatcatgtcaacagatatcaagccggtcgactaacagtctttctcggtgcggcacctggtgtcggaaaaacctatgccatgcttgcccgcgctaaagagttatatcaacagggcacagatgttgttgttggtattgttgaaacccatggaagaatagaaactctaaaaattttggaagggttgcctcaaattgctagaaaggaaatgcaatatcaggggcacactttagaagaaatggacttggatgctattttacttaggcatccgcaaatcgttttggttgatgaattggctcatcgtaacgtcccaaatagtcgtcatgaacgacggtggcaagatgttaatgagttgctagatgcaggtattgatgtatttactaccattaatattcaacatttagaaagcctgaatgatgtggtgtaccagattacgggcattcgagtaaatgaaacggtaccagatcgggtatttgaccgtattcgagacattcgtttaattgatttacccgtcagtgagctcattgaaaggctccaccaaggaaaagtctatgtgccagagcaagcaaatctggcattacaaggcttttttagcatttcaaatttaacggcattacgtgaactggcaatgcaatgcgttgctgaacatgtcgattcagatttaaaagagagctatgcctcaaagggattgaaatctatatcattgcaaaatgaattgatgattgcgatcgatgggcaaggctcttctgaatatttagtacgggcaggctgccgtttagcagaacgtaatggtgctacatggactgtagtgaatgttgctaaaagtttagactttgggcagagttcagtgagttcttataaaaaagaatacatcgagattgaccgtgcgtttgagttggctcggcaactcggtggccgaacagaggttttatatgggccgcgagttgcgtcagtgttaatggatgccgccgttgatcgaggtatttccaatctggtgattggtaaaagtatttcaccgtggtggttaaagttatttaagaaaaatttagctcagcaattattaaatcaagaaaactcgattgctttaaccattttgcacccagaacagggtactaaaaagattaatcagctcaaaaagccttcatttttatcattaaaagaaagtgtttttgttttagctgtgacgtgcggtagcatttttatagctcacttcgccgaagttctatttggtattgaagacttctctgtcatttttattatttctgttttaattgttgcaactaaaacccgaatgttagctgccgtagtggcagccttaatatgtttcttggcctataattttttctttattgccccgcgttatacctttcagatttcagcacaccaaggggtagtcaccgttgttgctttttttgcagcagctttaattgctgggcgtttggcctctcagttacgccagcaagttttatctttaaaagctgccaatgcctacactacggtaatgcaagacttggcacgtaagctttctagtgcagtgaatcttgaagaagtcatgcaaacaggacgtatgactttagaaacacaacttcaaactaaagtgtggatttctattcgagataaaataatttcatctgatattgagctaaacgataaagaaaaagtagccgcagaatggtgtttgaaacatcagcagccatgcgggcgctttaccgatacgctgagtcaatcaaactggtggtttttacctcttttagagcagaaaaatagcctaggtatagtgggaatttactttaaggatgaagtggtttccttaaattttgagcaaaaaaaattgactgaaagtgtaattgagtacattgcacaggcagcacttcgaacccaattggtaaatgagcttgaacaagcaaaagtcaccagtgaaacagagcgcttacgttctgctttattatcttcggtatcgcatgatttacgctcgccactcgcttctattattggggcagcagacacacttgccaattttaaagctgaaatgacagaacaagaccaacaagatctgcttgaaacaattcatttagaaggtgagcgcttagaccgttatattcaaaacttgcttgatatgacccgtttgggacacgaaggtctaactttaaaaagggactggattggggtggatgaattaattggttcggcaacccgccgtttaaagcgttataaaccagatacgcaagtggtcgttcagttacctgagcaaccgattagtttgtatgtccacccagcactggtagagcaagctatttttaatgttttagaaaatgcggcaaacttttcacctccagatgaatctgtcatgattcgtgctcaacttttgtcagaagatgaagtaaaaatagaaattgaagataaaggtgtaggcatccctgaagacgaaagacatcgcattttcgatatgttttatactatggagcgtggagaccgtggaaaattcggtacaggtttagggctaacaattgtaaaagcgattattggtgctcatatgggtacaatagaagcattttcagggcgccaaaataaaggtactttaattcaaatcaaattaccccttcgtccagtaaaagaataa

SEQ ID NO: 42444 - DNA, 606 bp, Acinetobacter baumannii
atgaaaacttatgcacaaaattcagaagcaaatttgggtcagaccttaagagcatctttcggacttctaatttttacccttgtcggttgtggtgctatttatagtgcgatcgctacaggcgtgggacaggttttatttaacaatcaagcgaatggtagtttgattgaaatagaccataaagttctagggtcaaaattagtcgctcagccatttattggagaggcttattttcatccacgtccttcagcggttgcttatgacccgatggccatgggcgccacaaacttagcccttaccaatccagagcttcaaaaacaaattgatgcacagattcttgaagtgaaaaaacaagaccatacgggcagtacagctattccaagtgatttggtgactaaatcaggtagtggtatcgatccgcatattagccctgaatctgctcagttacaggttgccagagtggctcaagcgcgtcatttagaccctaaagttgtagaagagttattacaaaagcatattgaaccagttcagtttggtgtactagggcaagctcgtgttaatgtattagagctaaatatcgctttagatcaattacaatctatacattaa

SEQ ID NO: 42445 - DNA, 2034 bp, Acinetobacter baumannii
atgaatacacaaactcatgtaaatagccataaacaaaccatggcagtgccaaattttgaagtttggaaaaatgcatttgtgaaactgctaccacagcatgcaattaaaaaccctgtgatggcaattgtatggcttggaacagtggttacaggcattagtacaatcttaggttacaccacgctgatatttggtttagtggttacagcaattctgtttattaccattttatttgctaactatgccgaggctgttgcagaggctagaggccgtgggcaagcatcttcactacgtgcagcgagagaaaatttaatggctcgaagacttaactctttgacagaccgtcaagcgactcaagttgcagcgaccgaacttcatttaaatgattttattgaagtacatgcaggtgagcttgttccagccgacggtgagattgtagaaggctttgcgaccattaatgaatcggctgttacaggtgagtcagcacctgtgctacgtgaagctggaacagaccgttcaggtgttattggcggaaccaaagtacttacagatcgtattgttgtgcaagtgactgctgaatctggtcaaagtttcttagaccgtatgattgctttggtcgaaggttcaaatcggcaaaaaacaccgaatgagattgcacttggcttcttattaatagtgatgacaatcacgtttttaattgtcgtgattagtttgccatttattgctgattatctacatattgaacttgatccagtcgtgctcgtggcgttattggtctgcttaattccaacaacgattggtggtttgttacctgcgattgggattgcgggcatgaaccgtgcactcaaagccaatgttttggcgaaatcaggtaaagcagtagaagtcgcgggtgacattgatgtgcttttactcgataaaacaggaaccattacttatggtgatcgtcaagcgacctctttttatcctttaacttcggtaaccgagtcagagttgagagctgctgcttggataagttcacttgccgacccaacaccagaagggaaatcaattgttaagttagcaaaagagcaaggtctaaaacagcaagaacctgagcaagccgaatttatctcttttagtgcttcgactcgaatttctggcgtgaatttaccgaatggtgaccaaattcgtaaaggtgcattagatgcaattttgaaatttgtagatgaggattattctcaagatttagaattaaaatcgcgtgttgaacaagttgccaaaaaaggagcaacacctttagtcgtcgctaatcaacatcatgtgttgggtgtgattgaactctcagatgtgattaaacacggtattaaagaacgttttgctcgtttaagagaaatgggcatcaaaaccgttatggttacaggtgataacccattaactgctgctgcgattgctgctgaagctggtgtagatgactatattgccgaagcaaaaccagaagacaaattggcttgtattcgcaccgaacaacaacaaggtcgtttagttgcgatggtcggtgacggaaccaatgacgcgccggcattagcacaagcagatattggtttagccatgaattcgggcacacaagctgcaaaagaagctggcaatatggttgatttagactcagatccaaccaaactacttgctgtggttgagattgggaaacagcagctgattacccgtggcgctttaacaacattttcgttggcaaacgacgtctctaaatactttgccatcttgcctgcattgttcgctgctgcgattccacaaatgcaagtattgaatgtaatgcacttggcaagtccaaacagcgcgattttatctgcattaatttttaacgcgattattatcccgctattaattccaatcgcactccgaggcgtgaaatttaaaccttcaatggcaactcagttattacgtcgaaatatgttgatttatggtgtgggcggtgtggttctgccattccttgccattaaagcaattgatgtagtgattgttcaattatttggtttgtaa

SEQ ID NO: 42446 - DNA, 1710 bp, Acinetobacter baumannii
atgttagaacttatacttgttttatttattgctatttttctagcatggtgcctcagtaaatatctatccaaagtgatggcaaatcagccgatgtggggtgatggattatttcgctggattgaaaatcctatataccgcttattaggtgtatctccacaacaacaaatgaattggaaacaatattctctagcatttgttgtgagctgtatttttcttgcagtggctattcttactatttttatgacgcaagcatggctaccattaaaccctaaccatgcaccaaatatgagttgggatttagcattacacacggttatttcatttttaaccaacaccaaccaacagcattattctgggcaagctcaattatcttatttgtctcaaatgacaggtgttgtgggtttgcaagtcattactccaatgatggggctggctttggtggttgcgaccttaagagctttcttttatcagcgcccaagccatattgcggccgatattgccgagcagccagatcaaattttaattggtaactattgggcagatgtaattcgtcctacagttcgctttttgcttccactctgttttgtctggtcattattgcttaacagccaaggcgtgccatcaactttccagagtgggccagaagtacagcttattgataaagccaatagcgttgaaactcaaaaaattcctttaggaccagtagcgccaatggtggcgattaagcaattaggtagtaacggtggtggttggtacggtccaaatagttctgtgcctttagaaaatccaacaccattttctaatttactagaaatgattgcgatcttacttattccaatcacagtcatttttatggtcgggcattttactcagcgtaaaaaatttgcctactttgtgtttggtagcatgcttttcatgtcgattatttcaggtgcagcggctgtctggtctgagagtatgtcatcgacagcatctcaatttgctgtaatggaaggtaaagaacaacgatttggaccagcagcatcagcagtttgggcagcgcttactacacaggtgaataacggttcggtcaatatgatgcatgattcttctgcgccgcttactgggctggttgaactcattaacatgctgattaatgccatttggggtggtgtgggctgtggcctgcaacagtttatgatttatctgttactcgcagtatttattgcaggtttaatgacaggtcgtactcctgaattgtttggacgcaagattgaagcagcagagatcaagttacttgcgattattatcttgattcaacctttagtcattcttgcgtttactgcattaagcctcagcattccaagcatatctggaattagtaatccaggaccacacggtattagccaagtgttctatgaatatgtttctgcctttgctaataacggttcaggttttgaaggtcttggagacaacactgtatggtggaatgtcacttgtagtatcgctctactgttaggacgtttccctacattaattttgccattaatgattgccacacgtttagcagcaaaaagaaaagcacccgaaacatcaggtagtcttcaggttgaaacaccaacctttgccttaacgctgattacgatagttgtgttgcttaccttattacaatttatgccagttcttgtccttgggcctattgccgatcaacttttgttggttaaaggctaa

SEQ ID NO: 42447 - DNA, 135 bp, Acinetobacter baumannii
atgcttataaattctcaaatgcgcatcttgcatcagtctggcattgtcttatgcggacttaaaacaaatgatatttctccatctctccttatttccagtttggcaaatcaagccaaggggtatagaggagaatag

SEQ ID NO: 42448 - DNA, 453 bp, Acinetobacter baumannii
ttgaacgcaccagaaacaatttttgcgctcgccctagcgagtaatttagacgcagatcagcactttacttttgcttatacgcaattggcaacattggggaaagtgcagttttcatctgtttatcaaattccatgccgagatggtattggagatgattactggaattcggcatgtctattaaaaagcaccttatcatctgaacaaattgaatcttttttaaagaaacttgagtcagattcggggcgtgttcgaccatcacatcatatttctttagatgtagatttgattgcatggggagctgatctggaccatatgcaatttaattctaaaaagctacctttggcactcgatgtaaaaattcctttatatgaactttggcattgtgagaccttaaaggctgatagcacactttatccagtcgttaattttaaagttgaatgcctttcaaactag

SEQ ID NO: 42449 - DNA, 381 bp, Acinetobacter baumannii
atggatgccattattattgaaggcttgaaggttgagacagtgattggctgtttcaactgggaaagacaaatcattcaacctttaatgttggatttaaccatccataatgatttgagccgcgcagcagagtctgacaagcttgaggacactctcaactatgcgcagatttgtgagttatcggctcaaaccattcaacaagccaaacctgaattaatcgagcatgcagcacatctggttttacaatgtttgtttgaaacctttccatcaattgaaaaaattaccataaccatccgtaagccagccatcattgcagaagcaaatgctgtaggaattcgtcttgaacgcaccagaaacaatttttgcgctcgccctagcgagtaa

SEQ ID NO: 42450 - DNA, 1299 bp, Acinetobacter baumannii
atgaaaaaaaatattttatttgatggattgcgctcagttgcgcgcatcggtgaaaccgcagtagttgcggctaaagccggtattaagtatgcaactgataagccaagtaatgccaaactcatgcgtgagacttttgagtcgcttggttcaacatatattaagcttggtcagtttatcgcgagtaccccatcgctattcccacgtgagtatgtagaagaattccaaggctgtttagaccagaccccaactttaccttttagctatattcaaggcgtacttgcctctgaatttgaaggacgagatttaagccagatttttagctatatcgatgaaaagcctttagcttctgcatcaattgctcaggttcatgcagctaaactgactacaggtgaagatgtcgttattaaagtacaaaaaccgggcgttgaaaccattttgtacactgacctaaatgtggtgcattgggctgctaaattacttgaacgtgcggtacctaaaattaaatttgccgctctttctgaaattgttgatgaaattaaaacccgtatggtgcgtgaagtcgatttcattgaagaagcacaaaatttagatgactttgtggaatatttaaatatttcccaaaatcaagctgctactgcacctaaagtttatcatcagttttctacgcgccgtgttttgacaatgcagcgtttatatggggtacctttgacagactttagcgtggttaaacaatatgctaaagatccatcgcaagtactgattactgccatgaacacatggtttggtagcttaatgttatgtaagagcttccatgcggacttacatgctggaaatctaatgctgcttgaagatggccgtgttggttttattgatttcggtattgtcgggcagttaaagccggaagtttggacagcatgcattgcatttatggatgctttacaaaaaactgattatcaggcaatggctgaaaacatgctcaaaatgggtatgacccataataaaattgacgttcaggttttagcacaagatctagagcgtttatttaatggtgtgttaatggctgatccacagcagattttggcttctaatccagccgatttaaatgacatcatgatggatatggtagctgttggtgagcgtcatggtattaaattccctcgagattttgccttattatttaagcaaatgctttatttcgatcgttttatgcgcgtactcgcaccttatactgatatttatgcagaccaacgtttgaaaatggttcaaaatatggaacctgcttcgttgttaaagcactaa

SEQ ID NO: 42451 - DNA, 777 bp, Acinetobacter baumannii
gtgaccgagcttcaagatatcgattttgtagagttaagtgatgaagaaatgcatctctatagccgtcagattttacttgatggatgggatattgaagctcaggaaaaacttaaactcgccaatgtattaattgtcggtgctggcggaataggttgtagtagcgcggaactacttgcacgagcaggagttgggaaaattaccctcattgatgcagataccattgagataagtaatttacaacgtcaaatcgcatttggtcatgaagatattggacgttataaagctgaagttttagctaaacggttacagaaaattaacccttatatctgtgttgaatactttaacgaacgtttagacgaacataacattgataaactagttgaacatcaagacgtcgttttagatggctgtgataactttacaacgcgttatttagtgaatgcagcttgtaaaaagcatcaggtcgcattaattagcgcttctgcaattggttttcaggcgcaaatgtttatggttgaaggtgattcagcttgttatgaatgtttgttcccaaaagaacaacatgccaatgaagggctgcgatgtgcggaatctggtgtgcttgcgactacacctgtaatgattgcgtcattacaagcacatcacactttattgtatttaggactaaacagaacgccgctaaaacaaaaactgttactttgggatgggttaaatatgacgcaacgtattgttagttttgataaagacataaattgtccactttgtcaggcaagctaa

SEQ ID NO: 42452 - DNA, 579 bp, Acinetobacter baumannii
atgtcccaatcatatattgcaccagtagagttagaaaaagcttatcgtttgttaaatcatggtccaactgtactagtctctgctcagcatggtgatgaccgtaacgtgatggctgccgcatgggcatgtgccttagagtttaagcctgctaaagtgactgtcgttttagataaaagtactaaaacccgacagctggttgagcaaagtggttatttcacactacaagttccttgctatgcacagctcaatatgaccaagcaacttggtaccattagcaaattagatgacccacaaaaacttgaacactgcggggttgagctgttttatcaaaaagatctgaccagtccgcttgtatcaggttgtatcgcatggctggtatgtaaacttatttctgaaccacataatcagtcagctcatgacctatttattggttctgttgtaggtgcatgggcagatagtcgcgtttttagagatgggcactggcattttcaagatgcaccaaaagaacttcgtagcctgcactatattgctggtggaacattttatttaattggtgaggaagtgaaagccgatctttaa

SEQ ID NO: 42453 - DNA, 1644 bp, Acinetobacter baumannii
atgaaaactttggcagaagcttatcagcaatttgatcttacaaggctcatcgaagagcaacttgttgggcatccccaagcaataaatgcttatgttgagtgctgtgagcgttatgtaggaaaaaataaaacagcgcttatctgggaaggaaaaaacgggcaggcagagcactatacgttcgaacaacttgctgaactttctggaaaacttgctaacttctttaaagcacaaggaattcaagctggagattgtattgcaggacttctaccaagaacgcctgagttattaattacaattttggcagcatggcgtataggcgctatttatcagcctttatttactgcctttgaagcaaaatcgattgatcaccgaattacgactgctcaaactaaattgattgtgaccaatgatgaacagcgccctaaactgaataccttgaatgttccggttattgtaactgttcatcaaacaggtcttttatctgagcatgactttgatttttggcaatctttacaacgatattctgagcaatgtgagccagtaaatcgtagctttgatgatgactttttaatgatgtttacctcaggcacaactggacttgcgaagtctgtacctgttccactaaaagcaattttggcatttaaaggttatatgactcatgctgtcgatttgcgtgaagaggatatgttctggaatctggcagatccgggctgggcgtatggattgtattatggcattaccgggcctttaagcttggggcatagcattattatggatgagcgttcatttaatgtagatcaggcaatagaattaattaaaaaatataaagtaagtaatttaacaggatcgcctacagcatttcgcatgttctttggttttaaggaaaaatttgacccttcaattaaacaacatttacgcgtagtgagcagtgcaggtgagccattaactcctgaggttgtgaactggtttaagcaggatttagaggtcaatatttttgatcaatatggccaaactgagctagggatggtgattgcaaatcatcatgctcttgagcatccattaaaagtaggttcagctggttttgcaatacctggacatcgttttgcggtgttagaccaaaattatcaagaattgccaacaggtggtgttggtattttggcaatggactcggagcaatctccattgatgtggtttaaaggttatggtggcaataatcgcaaagcctttgttggtaagtattatttaacaggtgacacggtcactttaaatgaacatgggggcattgattttgtgggtcgtgctgacgatgtcattacaacttcgggttatcgagttggaccatttgatgttgaaagtactttattagagtgtgaggcggtattagagtcagcagtaattggtaagccagatccggaacgaaccgaaatagtcaaagcttttgtggtacttaagcctgcttatcaagcgtgtgaaacattaaaagataagttacagcaatatgttcgtaaccgtttatctcgtcatgcttatccaaaagaaattgagtttgtggacagtctaccgaaaaccacgagcggaaaaattcaaagaggactgttgaagcagcaagaaattgcaaaaatgcagcaagcctacgcaagctaa

SEQ ID NO: 42454 - DNA, 1137 bp, Acinetobacter baumannii
atgattctaaatgctgaacaaagtatggttcaggagatgatgcgtaattatgcgcaaaatcagttaaaaccaactgctgcacatcgcgataagacccatgaatttccggctcaggaattaaaagacttaggcgccctaggcgctatggggatgactgtgcccgatgaatggggcggtgccggaatggattatgtatctttggtactcgcaattgaggaaattgccgcaggcgatggtgctatttcgacaatcgtaagcgtacaaaactctttgatttgcggtattacactggcatacggttcagagcagcaaaaacaaacctatttgccaaaattcgcctctggtgaatggctaggatgcttttgtttaactgagccacatgtcggttccgatgcgagcgcgattttatgtaaagccgagcgagatggtgaccattggattctcaatggcgtaaagcaatttattaccagtggtaaaaatgctcaagtggctttggtatttgcggttacagataaacaggctggcaaaaaagggatttcgtgttttcttgtacccacgaatacacaaggctacttggtgactcgtattgaagacaaaatgggtcaacatgcttcggacaccgcaaccattacgttagaggactgccgaattcctttagaaaatttggtagggcaagagggtgagggttataaaattgcgttatctaatttagcggctggacgtattggtattgctgctcagtctgttggtatggcaagagctgcttttgatgctgctgtccaatacgcaaatgaacgtaaggccttcggtgtagagctggttcagcatcaggcggttggttttcgcttagctgatatggcaactcagattgaagcggcacatcagctagttttgcatgctgcaactttaaaagatgcgggactaccttgtttaaaagaggcctcaatggcgaaactctttgcatcaactatggctgagcgagtatgttcggatgcaatccagattcatggcggttatggatacgtcagtgatttccctgttgagagaatttatcgggatgttcgtgtaagccagatttatgaaggtgcttctgatattcagcgtttggtgattgctcgtgaagtggctcaagtttag

SEQ ID NO: 42455 - DNA, 771 bp, Acinetobacter baumannii
atgaaaattcaaggaaaacattttgtgattacaggtggtggctctggtttaggggctgcaactgctgagtatttggtaaagcagggtgcctcagtcacattagtagacatgaatgtagaagcaggtgagcagcaggcgaaacagttaggaccaaaagctgactttgtaaaacttgatgtaaccgatgaagcagctgctgagcagttctttaaagatgtgttggttaaacatggtcatttgcatggtctggttaattgtgccggtattggcccttctgcaaaagtagttggccgtgagggcgttcatgacttggggttatttgcaaagactttaaatattaatgtcacaggtacatttaacatgttgcgttttgcagcagatgcaatgagcaaaaacacggttgaagaaggtgaagaggaccgtggcatcattgtgaacactgcttctgttgcagcatttgacggtcaaattggacaggcagcttattctgcatcaaaaggcgctattgtggcgatgactttgccgatcgctcgtgagctagcgcgacatgccattcgtattatgaccattgcaccgggaattatggaaactccaatgcttaagggtatgccacaaaatgtacaagatgctttggggcaaatggtgccgtacccatctcgtttaggaaaaccagaagagtttgctcgtttggttgcccatattgctgaaaactcttacttaaatggtgaagtcatccgtctagatggtgcaattcgcatggcagcaaaataa

SEQ ID NO: 42456 - DNA, 1029 bp, Acinetobacter baumannii
atggttgtccaatcttctttaagtaaaggaacaatttctattgcactggtacatgaagcattaagtgcggcttatgccaaagggctcaatactcaaattattttgaataaagctggcattcctgctgaattacttatgacacctaaagcgcgtgttccggtagcaacgtatgcacaattatggatagaacttgccaatgccatggatgatgaattttttggtatggatagccaccctatgcgtcgtggtagctataaattacttacaaaacttgtcagtacggctgaaactttagaaaaagcactctacgatattttgaagttttttaattttgtgcttgacgatatacgaggagaactcattcgagaacaagaaaaagcttatttggtgattcatgatcaaaaacaacccaaacgtatgtttacctacgcaacctttttaatgttggtacatgggcttatgtgttggttagtcgatcaaagaattggcttaaaccgtattgctgtacgttgtccaaaaccgaacgatattcaagattatttggtacgcttttgtgaagatatagaatttaatgccaagacaaatcagattgaatttgatgcacactatttagatataaaaattaaaaaagataaaaaagcgctttatgattttttagagcaaactccacaaaatcttttagttcgctttaaaaatgaaaatgcattgagtgttgttattcggcgtcatttattaaaacttcacccagccgaatggcctgaactcaaagatgtcgcacagcagcttaatatttcagaagctaccgttcaacgccgactcaaacatgaaggagtgagttatcaacaaattaaaaatgaaattcgttgtgatattgcgattgaacgcttaagcaaaagtaatgattcaatacaagacattagtgaagacttaaatttccatgatccaagtgcttttcaccgtgcttttaaaaaatggacgggtgttagccccggcgcttatcgggaagcaacccttaactctacagcttaa

SEQ ID NO: 42457 - DNA, 822 bp, Acinetobacter baumannii
atgaatattgctcaagcgcttgcaattcgtggtgagcctgacagttatgaacgacaggaaaatgcttggctgcttgagcattttctaaaaatcaattctctcgaattaaagttcagacttgagcaagagttaacagcccaacaagagcaagactacttggctggtcttgagcgtatccaaaatggtgaacctttagcttacgtgacaggttcacaaccattttggacgctcgatttaaaagtaacgtcagatactttagtgccacgaccagatactgaagttttgatcgaaactgttttaaatctaaatttgccaaagaatgcaaatatcgtggatttgggaacgggtacaggtgcaattgcgcttgcattggcaagtgaacgtccaaactggttcgtcacagcaactgatatttacgcacctactttagacgttgcaaaagaaaatgcacaaacacatagcttgcatcatgtgaaatttgcttgtggcgcttggtttgaagcactagaaccccaacaatttgatttaattgtttctaatccgccttacattgaccctgaagatgaacacatgcaagctttggcaacagagccgcgccgtgcattggttgcagaccatcatgggttagccgatattgaaattattattgcccaaggcaaaaactggttaaaaccacaaggctggattgcactggaacatggttacgatcaggggcaagctgttcgaggcattttcgcagagcatggttttagtgagataaaaactattcaagattatggtcaaaatgatcgagtcactttggcatcattattaataaaataa

SEQ ID NO: 42458 - DNA, 1089 bp, Acinetobacter baumannii
atgaaagcgtcactccgtttacgtcttgatcaactctgtgatcgtcatgaagaacttactgcattgcttgcagatgcagaagtgatttccgataacaaacgtttccgtaaactgtctcgtgaacatagtgatttaactgaaattaccgaagtttggggcaaataccgtcaagcagaagaagatattgaaactgctgaaatgatgaagtcggaccctgactttaaagatatggcagaagaagaaattcaagcaaataaagcattgcttgaagaattagaaagccagcttaatattttgatgattccaaaagatccaaatgactctaatgctgcatatttagaaattcgtgccgggacgggcggtgatgaagctgcaattttctcaggcgatttattccgtatgtatagcaaatatgccgaatcgcaaggttggcgtattgaagtcctttctgaaaatgaaggcgagcatggtggttttaaagaagtcatttgccgtgtagatggtgatggtgtgtatggccgcttaaagtttgaaagtggcgcgcatcgtgtacaacgtgttccagcaactgaatcacaaggtcgtgtgcatacgtcagcatgtacagtagcaatcttgcctgaaattgacgttgatactaacgttgaaattaatccggcagatttgcgtattgatacttaccgtgcgtcaggtgcgggtggtcagcacattaacaaaaccgattcggcagtgcgtattactcacataccaacaggtacagtggttgagtgtcaagaagaacgttcacagcataaaaataaagctaaggcaatggcattgctagtatcacgtttagaaaatgcaaaacgtgcagcagccgatgcagcaacttctgaaatgcgccgtgatttggtcggttctggtgaccgctctgaacgtatccgtacttataactacccgcaaggacgtatgacggatcaccgtattaacctaactttatataagttagatgccattatggaaggtgatctaacggaattgctcgatagtttacatcgtgaatatcaggcagatcagcttgcgatgcttgcacaggaaaatggcggctaa

SEQ ID NO: 42459 - DNA, 840 bp, Acinetobacter baumannii
atgaagaagttaaatcaaataatgtttgcaatgattgcagcttcggcagcattaagtgcaaatgccgctcatgtattggttgtattgtctgatgaaggacagttacagctaaagaataagcaggtttttaaaacgggcttttatcttaatgagttgatgcaacctacaaaaatgcttttagatgcagggcataccgtaacgtttgccactccaaaggggaaagctccaacgttagatgagtcatcaaataatgcaatgtattttaatcaagatgaaaaagcattaaagcagtatgctggtttattacatgatctaaagttaacttctgctcaagattctcctgttgtaagtctggcgcgtattgagcaaattggtatagatcaatttgatgctatttatattccgggcggacatgcgcctatgcaagacctattaaaagataaacaacttggaaaagtacttacagctttccataaagctggaaaacctacagctttggtttgtcatgggcctatagctttgatgtcagctttacctcatgctgcggaagccgttaagcaacttgaacaaggtaaaaaagttaaaactggagaatggatttataaaaattatcggatgacagtaattagcaatcaagaagaagagcaagcgaagggcttattaaaaggcggtgagatgaagttctatccacaaactgcattagagtcacttggagcaaaatatcaaagcaatacgaaagcttggtcgccaaatgtagtggtggatcgtgaacttattactggacaaaatccagcttcggctgttcttgtcggtaaatctttattagaaaaattaaaataa

SEQ ID NO: 42460 - DNA, 903 bp, Acinetobacter baumannii
atgtctcgccaatttgaccatcttgccgatgttgaagtctttttaattgtggctgaaaagctttctattagtgcagctgcaattgatttatctacaacgccttcagtcattagtagaacaattacaagactcgagaaaaaattaggtatacagttttttagaagaactactcgccatttaagtctgaccgaagcaggccagctttactatgaaaaaatgcaacatgcttttcaattaattgaccatgctgaacgcgtagttcaaggtgaacaactacaaatttctggaaaaattaaattaagtgtacctacgacttatgggcactatcgtctgcctcccttattagaaaaatttcttttgaaatatccggacattcaaattgaaattagtatttctaatcgaaacgttgacttaattgctgagggttttgatttagccatccgtcaaggacaacttcctaacagcacccttattgctagacctttagagcaagctcctttaaaacttgttgcctcacctgcttatttgaaacgcatgggtattccaaaaaatttggaagaattaaaacatcatcaatgtattgcctttgaattgcccagtagcggcaaaataaccccatggtttttaaaaaatgataatgaggaaattcaatggataccaacaaatcgaattttagtaaaagaagatattgtgggtgtggtaactcttgctgaaagcgggctaggtatatgtcaaagttacgactttattgttaatgaaaaaattcaacaaggaaaactacaacctatacttactacatatgcaggtcatacacgtcctttttctttgttatatgcgcagcataaacacatgtcctctgctacccgagctttaattgatttcttatgttcaaatgatgactag

SEQ ID NO: 42461 - DNA, 423 bp, Acinetobacter baumannii
atgaaattaaatgctttattatgtagtgctgttttagctacttctatggtaactgtagcacatgctgacaacacaactcatgtagcagcagcttctgctttaggtagtatcgctggtactgcaattggtaaaagcatgggtggtacatctggcgcaacaattggtgctgctttaggtggtgctggtggtgcagcagttgcaagtgaccgtcgtcaccgtacagaatctgcaattggcggtggtttaggtggcggtgcaggttatactgttggtaaaagcatgggtggtacgaacggtggttacatcggtgctgctttaggtgcagcaggtggttctgctttaggtaataaaatttctaaagaccgtgatgcagaccattcttctaagtattggaagaaaaaacaccgtcatcatcgtcactaa

SEQ ID NO: 42462 - DNA, 504 bp, Acinetobacter baumannii
atgaaaatgaatgtttggttagcaagtgcattaatcgcaacaacatctatggtaacagttgctcatgcagataatggtacccgtgtagcagcaacttctgctctaggtagtgtagtaggaacagcaatcggtaaaagtatcggtggtacatcaggtgcaacaattggtgcagctttaggcggtgctggtggtgcagcagcagcaagtgaccgtcgtaaccgtacagaagcggctattggtggtgctttaggcggtggcgcaggttacaccgttggtaaaaacatgggcggtacaaatggcggatatatcggtgcagcagttggtgccgctggtggttctgctctaggtcgtaaagttgcccaagatcgtaactatgatgaccgttatgaccgtcgatatgatcgtgatgaccgtagatattatgatggtgatcgccgttattacagaggtggtaactaccgccatgacaacggtttacaccgtggttggtacaaacatcgttaa

SEQ ID NO: 42463 - DNA, 1005 bp, Acinetobacter baumannii
atgcgatcacttcaagatactaaattttcaattttggagcttgcccctatacgtgatgataaaactattgagttttcattacgtcatgcactagagcttgcccaacatgcagaaaagttaggttatgaccgtttttggcttgcagaacatcataatatggatggaattgcgagttcggcaacagctgttttacttggttttatcgcggctcatacccagcgcattcgcttaggttcaggcgggatcatgctgccaaaccatgctcccttagtggttgcagaacaattcggtacattagctactttatatccagaccgtattgagttaggtttaggtcgcgctccaggtacagatcaagtcactatgcgtgccttacgccgtggacatcaggaaacagaagatcagttcccgagagatgttgtagaaatcttgcaatatttcaaagcacctcaagtgggccaaaagattattgcgacacctggacaaaatactcatgtacctgtctggttgttaggttcaagcttatttagtgctcagttggctgcaaaacttggcttaccctactcatttgcatcacattttgcaccacgtatgcttggtcaagccattgaactttatcgtgagaatttcgaaccttctgaatatctagataaaccttacgtttcaatgggtgttccagttgtcgttgctaatacagatgaagaagcacagttcttggcaacaagtgcttatcaacgtgtattaggattaattcgtggggaaagcctcaaacttaagccaccagttacatctatgcagggattatggaacacggcagaacaactttctgttgaaaacttctatacgatggcgcaaatcggttcagttgaaacagtacgttcgggtctgcaaaaacttctggacacttatgaagtcgatgagtttatttttacttgtgatgtatacgacacagttaaacgcttagatagtttcactcaattaatgcaagtaaaatcaggtaattaa

SEQ ID NO: 42464 - DNA, 564 bp, Acinetobacter baumannii
atgagtattgatcttaaaaataatgtcgctaaatcagctatttttcaaaatacggttgaggattttgaagcctttactggtaaaattctgccatcaaataaacttaaagaatttgatttttctcatttaaatgtagccattattggaacggatcaggagaccgtaacgcatttagaaaaaatctgccaacaggcaaaatttgtaacggtatttcaaattacgcctcactttattttacctcacagtcaaatcggtatacatcgattaattactcatccacttattgccaagaaccggaggttatttaacaatcgtgttaaaagcatcttagctttacgttttcttgaaacccaagtaaatgaaacatggcttaaacgacttttgacgcccaataccgcacgggccaataaaacattttttaaatcggatagctactatacggcactgcaaagaccaaattgcaaactacaaacttggccgattgtaaaagttaccgatacagccatttatagtatggatggcactcaacgacccgttgatatcattatcagaactactccttaa

SEQ ID NO: 42465 - DNA, 465 bp, Acinetobacter baumannii
atgaaaaatgatgcaaatatcgacgtagaagttttagatatacctgaatatattgatcagcctgaatatgtgaaaaataaaactgcaaactatacgttacaaacaataggttggttttgtttaatgtggctgctttttccactcgtttcattatttttatggatttttgaagggcatctcatctatgactatgtgtgggtagatcatgtttcagaagtgaaaactttattgcatttacttctgttaataggtctaagcgcgctcattttaattttatgggcaagttataactggcttagatttcatggggatgatcgccgcagcaaagctccgaatagctctgttgagttgctggcctcacaatttatggtcagtaccgaatcattatcagaattacaaaagtctcagcgcatcatcttacattatgatgagcaggggtatttaactcgatatgatttgaaatga

SEQ ID NO: 42466 - DNA, 804 bp, Acinetobacter baumannii
atgcagccttttttaaattttccaagaattggtgctgtaaccggtaatcctagaattttaaatcgctcaagtattttaggtaaattacaagttggcgagttctcttcaattattggcttgattaagcgcgcacaaagaacatatggccgtatttttacagtatcaggtgtaattgtagcatttagaaagaccgctttggttcgcgtgggcttttggtctgatgacaaaattacggaagatattgatatctcttggaagctccaaatggaccattgggacattcaatatattcctcaagcactttgttatatctatatgccggaaacctttaaaggcctttggaaacagcgtttacgctgggcacaaggtggggtagaggtattattagaatatattcctaaaatgttcaaactccgcttgcgccgtatgtggccggtaatgctcgaagctttagtcagcattatttggtcatatgtgatgattatgatttttattctattttttgtgggattgtttgtggatttaccgcaacaatttcaaattaattcactcatgccgcagtggtatggcgtgatattaggtggaacatgtcttgttcaatttctagtaagtttatggatagatcatcgttatgatcgtggtcggctttttagaaattatttttgggtaatttggtatccattatttttctggttactgacgttatttaccagtgttgttgcagtacccaaaactatatttaacaccaaaaaacgtgctcgttgggtaagccctgatcgaggcttccgtggagatcactcatga

SEQ ID NO: 42467 - DNA, 417 bp, Acinetobacter baumannii
atgaaagtattactcgatattttatttgcttttgcctttttatacccgttgttgatggcttggacatggatggtaggaggtctctggtttttctttaaaagggaatatcatgagcagcaactgcctgagccatcaagtgaagggtgcagtattattattccttgctttaatgaagaagctcaggtccgacaaacgattcgttatgccttacagacaaaatatccgaattttgaagtcattgctgtaaatgacggaagtagtgacagcactgcagaaattcttgatgaactggcagctcaagatgcccgattaagagttgtgcacctggcagaaaaccaaggtaaggccgtagctttaagatcgggagtgttagtaagtaaatacgaatatctagtttgtattgacggagatgtttaa

SEQ ID NO: 42468 - DNA, 1830 bp, Acinetobacter baumannii
atgaataatttattgtcgaaaatgttgggctgtgccttggtctcaacattgttgcctctgcaatttgcatatgcccagatagaaaaagatttaccaaaaaatcatacggtttctttaacctttcatgatgtcagggatgatgtcttaaaagaaggggatcgggatatttatgcaatccaaacgaaaaatttagcacagttctttgactggttaagtcaatctgactggaaaccaattcgcttaaaagatattgaagaagcacgtaaacaaggtaaggaattacctcataattctattttgttaactttcgatgatggcgctttaagtagttatagccgtgtatttccattacttaagcaatatcagattccggcagtatttgcacttccgaccagctggctaaatgggaatacacaagctggctatgaagcgtatgggcaaggaaatctagtcaattggaagcaagtgcgagaaatgcaagcttcgggcttagccgagttcgcaagtcatagtgatgatttgcatcatggagtattggctaatcctcaagggaatgaacagcctgctgcgacttcttacgcgtatttaaaatcccaaaagcgttatgaaacggatgtggaatatcaacaacgtattttgcaggacttaaaaaaatcatacgccgttttaaagaaagaagtgggtgttgaacctaaagcaattatttggccttatggtgctgtgaatgagcaattagaaaaattgtctcaagaagctggctttattttttctttcagtttagggcgcgatggaatgaatagagtgagtgactcgacttttaaacgtagtttggtcactaataatcctacagctgagcaattaacagagggtatgatcaatattctcaactttgaagaattagatttatttaagcaacctcgccactttgtgagtatggacttaaaacaattaactgcttcaactaatactcagtcagatgagaaactagggttattgttatccaagctttatagcttaaaaaataacacattgatattgaaacctttagatgatcaagatggcgatgggcagtatgacattgcttatttcccaacaactcaactaagcgttcagcaagatattttgaaccgaactttatggcaggcacaaactcgtgccggacagtcggttattttagagttgcctgtatatcctcaaaaaaataaaccgtttttggtggcagatttagcgaaggatatcgcacgtttcaatagtaatttaagtggtattcaacttaatgctggaaccactttaaattgtgctatgcaaagcacaacaataaaagaaaatgcctgtgctaaccaattaaaacagcttacatatgtgagccagcttactcaaaaggctgtgaagccttatttaaacatgagtaatcaggctcagtttagtttattgcttacacctgattttgaacatatcgaaaatttaccaacgcttttaaaaacgctgttatcccaacatgatttagtaaatcttaagttcaatatagtgggtaagcaaaaacagtttaatcacgtattagcaattttaaatacgcttgattcgaaatataaacagcgcattatgctgactttatcattacccgaaaatagtcagcaaaatgcctggcaagaagtgaaacaaggtcttttcaatattcagcgcataggtattcagaaatttggggttgatggctataccaatgaaaactcaaaaaatgttcatgaatatttatataacccgattagcttgaattcgagttcggtcatgtatcagccctttgcaggtctcgcgactgaggggaaaaagtaa

SEQ ID NO: 42469 - DNA, 552 bp, Acinetobacter baumannii
ttgcaatataacagtcaggctgacattcctctacaagcccttgatgcaggggaagatggtcaatcttaccgagctgctgtcacatggcaaaaagatgaatctcgccagattggcgcgagttacggtttaactgatattagtgatggtaacaaacaacaagaattttcaacattttggcgtgaaaggctattcgacgcacctcatcatattacttatggcactgttcgaggtttctacgatactaacagccaagatcaaacagcttattttagtccaagttcacattacagcgctgagttgaacttaagtcatgattgggtgacttggcgtgaatatgagcgttcatttaagcagcattttgaagcgggtgtaggcctttataaacaggccgattactctgctaaacctacttactctttgcaatatcaacatcaatggcagctatcccggacatggcagctcaattatggaattggttggcaataccatccttacgatggacatgatgaacaacatacctacggtatttttggatttgaagggcgtttttaa

SEQ ID NO: 42470 - DNA, 432 bp, Acinetobacter baumannii
atgcaaaatgctcaagctttaggtgatattccgacatggcgaaaaacgactcaaaacttagtgcaatattaccctgatgatagtggggtcattaaaagtcgaaaagaattagaagatcgtaatagagccactatttcacactcaaccacttgggggcaaagtaaggccgacggtcgcgatactgtaagtgggcagaatggtttaaaagaccgtgaaatggaaacgcgtcttaatagtccctggattaatgataattatcgtttattcgcttggcatcaagatcgttatggtgagtaccgttttggcgatgtgcatgaccagcgttatggggtcggagcagaatggcaggcgaaccgtaaggcgttgtcggcaattgtgtcgcaaagtacggatggtggacaagcaggagtccgtcttgattggtcccaatga

SEQ ID NO: 42471 - DNA, 1290 bp, Acinetobacter baumannii
atgctaaagaaatgtgttttttcattggtctatctcttgccaattcatttatacgctgctcaggttgatgtattgcgtgagcaagctattcaaaattatagagcaggacaaactcaacaagctgtatctcaactagatcaattgctaaataaatacccgcatgatcaaaagctgcttgctgattatctgtttattatgtcaagtgaaaaaagggatcttacgaatttttcacggtttttggtaaatattaattatgtagactttccagaatatgcaaagttacctttaattcaaaatttccgtgattttaagcattttaaaactgcaattgactggtcaaataagttcaatattcaaaagtcagttgatgggcgtattttattatcggttttgtatgctgaagctcaagatgtggcgaatgctaaagatcagttgtcgaagatcgatattaaaggtttaactgctgatcagttggtacgggttgcatatgcttatcgtttaataaatttaccagtagatgctttagctacagttgagcatgcttatcaacaacaaccaaaatccttatccgttttacaagaatatgtttacgatctaattgctattggctcatataaaaaggcgcagcaattactgcaagcgagcgaaaaaactgaacaaacagtgcaaatgttaaagactttacaagttagtgagttttctcaacatatcaacaatgcaattgctcgatataaatatttaaatcgcgaaggtctatccgatgccgaaagctttgctgaattagataaagtgctgaagcaaggacaaaaaatgcatcagcaaatgaatccttccgatcctaattacttacggttttattacgattatttatatggattagattttagagggcgttcaaaagcggttatagagagtttcacccagttgaatattccactcgaaaaattaccggcatatgtacgtcatgcaattgcggatagttatttggcggagcaaaaaccgaaacaggccgagtttgcttataaaacgcttttaaccgaaaagaattatccggatatgaccgtttatacgggactgtattattcttatattgaacaagaaaaatataaggaagctgaacaacttctcgctgaggttgatcggcttattccaacttataaatatagtcaggctaagggggtagataaaatcagtcatcctgatcgtgatgattatattgctttacaaggaatgcatttagcctacgctaatcatctggatcaagctgaaaagcattttcaaaaaaagtag

SEQ ID NO: 42472 - DNA, 837 bp, Acinetobacter baumannii
atgtcagaaagtaaacaatttaagcggagtgttttttttatttctgatggaactgcgattactgccgagacccttggacattcgttattagctcaatttcctaacgtagattttgatattcacatcatgccttacatcaccactgaagaggccgcaatggcagtggtggtcgagattaacaagtgtcagaccagagatggttgcctgccattagtatttgatactttggtcgatccgcatgtgcgagaaattattaatacggctaaagcggttaatctggatgtgtttgaagggttaattagtaagctggaacaggagcttggaaccccgcctacaactttagtcggacagactcatgccgtgaccgattcggagtattacaaggcccggattgatgctgttcattttgcgcttgataatgatgatggagcacgtacccgccattatgacaaagccgatttaattttaattggcgtgtctcgttccggtaaaacaccgacttctatttatctatctttgcaatttggtatccgtgttgctaactatcctttaaccgaagaagatttagacgataatcgtttaccggcagttttaagagagcaccgcagtaaattatttggtttgatgattgatgccgagcgcttggttgccattcgaagtgaacgtaaagcgaatagccgatatgcaagttttagccagtgtcagatggagttgcgggctattgaaggtatttatatttctgagggaattaaatacttaaatgttaccgaaatgtcgattgaagaaatttctactcgtattttacaaatgacaggtttaaaacgtcgtattggttaa

SEQ ID NO: 42473 - DNA, 2379 bp, Acinetobacter baumannii
ttggaagcgcgcgtaatcggtctagaaaaattagggaaacacgatgtcgaactcgtaggtgggaaaaactcatctttgggtgaaatgatcagccatttatcaaatgctggtgtatcggtacctggtggttttgcaacaactgctgatgcctatcgtgagttcttagaccaaagcggtcttaacgctcgaattcaagcagaacttgcagagcttaacgttgacgatgtaaatgccttagcagaaactggcgctaaaattcgtcaatggattgtagagactccacttacacctggcttagaacaagaaattcgtgaagcatttgctgcactttcaaatggtaacccagatattgctgttgctgttcgttcgtctgctactgcagaagacttaccggatgcatcgttcgccggtcagcaagaaactttcttgaatattcgcggtattgataacgtattaattgctgtaaaagaagtatttgcatcattatttaatgaccgtgctattgcatatcgcgttcaccaaggttttgaacacagtctagttgcgctttctgctggtgttcaacgtatggttcgctctgaaactggcgctgcaggcgtaatgtttacccttgatactgagtctggcttccgtgatgttgtatttattactgcatcttacggtttaggtgaaatggttgtacaaggtgccgttaacccggatgaattctatctttctaaaccattattaaatgcaggtaaacacgcggtattacgccgtaaccttggttctaagcaccagaaaatgatttatggtgaagaaggttcagcgggtaaatctgttgtagttgtagacgttgaaaaacaagaacgtcaacaattcgcgttaaatgatcacgagttacaagagttagcgaaacaagcgcttattatcgaaaagcactatggcgctccaatggatatcgagtgggcaaaagatggtgatgatggtcaaatctatattgttcaagctcgtcctgaaactgtaaagagccgtcaaaatgtcggcaccatggaacgctacctactcaagcaaaaaggtactgtactttgtgaaggccgttcaatcggtcaacgtattggttctggtaaagtccgtattgttaactcaattaaagaaatggacaaagtacaagacggtgacgtacttgtatcagacatgactgacccagattgggaaccagtaatgaaacgtgctgctgccatcattactaaccgtggtggccgtacttgtcacgctgcaattattgcccgtgaacttggcgtaccagcaatcgtaggttgtggtaacgcaactgaagtattgactgatggtcaagaagttactgtttcttgtgctgaaggcgacactggtttcatctacgaaggcgcgttagattttgaagttcaacgtaactctatcgaatctatgcctaaactttcattcaaaatcatgatgaacgtaggtaaccctgaccgtgcctttgactttgctcaaattccaaacgaaggtattggacttgctcgtctagagttcattattaaccgtatgatcggtgttcaccctaaagctcttctgaacattgaaagcttgcctcgcgaaactcgtgctgcggtaatgacccgtacagctggttatgcatcacctgtagaattctatgttgaaaaactagttgaaggtattgctacacttgcagcagcatttgctgataaaccagttattgttcgtatgtctgactttaagtcaaatgaatatgcgaatcttattggcggtaagttatacgagccagaagaagaaaacccaatgcttggcttccgtggcgcaagccgttatgtttcggacaatttccgtgactgtttcgaacttgaatgccgcgcacttaaaaaagttcgtgatgaaatgggtttaactaacatccaaatcatgatcccattcgtacgtacagtgtctgaagcgaaacgcgttattgagttattagctcaaaatggcttgaagcgtggtgagaatggcttaaaagtcatcatgatgtgtgaattaccaactaatgcattgttagctgaacaattccttgaacacttcgatggcttctctatcggttctaacgacttaactcagttaacacttggtcttgaccgtgactctggtattgtttctcacttgttcgatgagcgtgatgctgctgtaaaagctctcctttcaatggcaattcatgcttgtcgtaaagcgggtaaatatgtcggtatctgtggtcaaggaccatcagaccaccctgaccttgcaaaatggttaatggagcaaggcattgaatcagtatctcttaaccctgactcggttttagacacatggttcttccttgctgaagaaaaaatcaagcaaatctaa

SEQ ID NO: 42474 - DNA, 756 bp, Acinetobacter baumannii
atgcaaatttacttggcacgtaataatcaacaagctgggccttataccttagaacaactaaatcaaatgttggcaagtcaacaagttttgcttactgatttagcttggcatgaaggcatgacagaatggaaagctttaggagaattaacccaaggtaaacttgtatatcaacctactggttattctgctttttcagcaaatacaaatacgccttataatgagaccattcagcacattcgtgtagaaactaaaacacacgagcttgcttcaatttcgtctcgtgctcttgcaaaaattattgacttattactttggctacctattgcagctattccgtcttttttctttaatgaagctcaatataaacaactttttgagttacaaaaacagatgcaatctgcagaagttgcatcaactaaagcagctgaacttcaacagcagctttttacccttattcctatagaagcttggcatacaatgctactttatgtcgtcataatgctcgctattcaagcatttttattgactaagtttgggcaaagtattggtaaaaaaattgtcggaattagaattgtcgatgccgaaaccaatggtaaagttaatttaacgcgtatcttccttctaagaagtgtcgttttcattatattaaacttactatttatgcctattagtacaattattgactatgcttttgcattaggacaaaagcgacaagctctacatgacaaaattgcaagaacaaaagtgatcaaatga

SEQ ID NO: 42475 - DNA, 1053 bp, Acinetobacter baumannii
atgagacaaacgattttagctgtattgtctttatcaacgcttgccgcacttttgactgggtgtggtggtgatatggtacttctaaactctaaaggtccagttggtcaaggtcaaagtgaccttatgatgactgcgatctatttaatgttacttgtggtgattccttcaatcatcatggcattatggtttggttggaaatatcgtgcgtcaaataaagatgcagactataaacctacatgggcacactcaactgcaattgaagttgtagtatggggtattcctgtcattattattggtattttagcttggttaacttggtggggttcccacaagtatgacccataccgtcctttagaatcagataaagcacctttaactattcaggttattgctgaacagttcaagtggatttttatttatcctgaacaaaacattgcgactgttaacgaagtacgtttcccagagaaaactccgttaagtttcaaaatcacttctaacttcacgatgaactcattcttcattccacagttaggcggtcagatttatgcaatggcaggtatgcaaactcaccttcatttgttagcaaatgaaactggtgtatatcgtggtttctcttctaactactcaggctatggtttctctcaaatgcgtttcaaagcgcatagcgttacagagcaacaattcaacgaatgggtagcggctgttaaagcaggtaatggtacaaccattaacccagaagcagttcaaaaaactacgcttgaccaagctgaattgacaaccttacgtgatggcgatcgttctaagcaccaaatcgagcatttagtaaatcgtgctaaagctgctggtgatcaagaagcgcttgctaaagcagaagcgatgaaaccgttcccgactaagccacaccctgtgacttattactcttcagttgaaccaaaattgtttgaaacaattatcaaccactatatgagtaactatcatggtgctgaccactctgctgcacatacagcagcagaaactcatgttgcagctgaacacgctgctcaaggggaataa

SEQ ID NO: 42476 - DNA, 1992 bp, Acinetobacter baumannii
atggatatgatttttggtaaattgggttgggactctatcccgacagagccaatcgtacttgtcaccatggtctttatggcacttggtgcaattgctgtgcttggcggtatcacctatttcaaaaaatggggatatttgtggaaagaatggtttacaactgtagaccataaaaaaattggtatcatgtatatcatcgtatctgtcgtcatgcttttgcgtggtttcgccgatgcgatcatgatgcgtttacaacttttcctcgctaaaggcggtggtgaaggttatttacatcctgaccattacgaccagatcttcaccgcacacggtgtaatcatgatcttcttcgtagcaatgggtctagttgtaggtatgatgaacatctctgtacctttacagatcggtgctcgtgacgttgctttcccattattaaactctttaagcttctggttattcgctggtgctgctggtttaatgatgctttcacttgtattaggtgaatttgctgcgactggttggatggcttatcctcctctgtctggtattcaatattctcctggtgtaggtgttgactactatatctgggcacttcaggtttctggtctaggtacgcttttatctggtgttaacttcttcgttaccatcatcaaaatgcgtgcgcctggcatgaaattgatggatatgcctattttcacgtggacttcactttgtacggctgtattaatcattgcatctttccctgtattaacaggtactcttgcgatgcttacattagaccgttacttcggtttccatttcttcacaaatgagcttggcggtagcccaatgctttatgtgaacttgatctggacatggggtcaccctgaagtatatatcttggtattaccagcatttggtttatactcagaaatcgttgcaaccttctctcgtaaagcgttgttcggttacaagtctatggtatatgcgacaattgcaattactgtattagcatttgttgtatggcttcaccacttcttcaccatgggtgctggtgcgaacgttaacgcgttcttcggtatcatgaccatggttattgcgattcctactggtgtgaaaatcttctcttggttattcaccatgtataaaggtcgcatcacctttactactccaatgttatggacgcttggcttccttgtaacattcggtatcggtggtttaactggtgtacttatggctgttccacctgcggacttccttgtacacaactcattattcttgatcgctcacttccataacgtaattatcggtggtgtggtgtttggtatgtttgccggcatcatttactactggccaaaaatgtttggttggaagctcaatgaagcatggggtaaagctgcattctggttctggttcttcggtttctattttgcattcatgccactttatatccttggtttcatgggtatgactcgtcgtttgaatacatatgacaaccctgaatgggacccataccttgcgattgcattattcggtgctgttcttgttgcgattggtattgcatgtttcttaatgcaaatcatcgttggtttcttacaacgtcaccaaaacatggactacacaggcgatccatgggatgctcgtacacttgaatgggctacttcttcccctgctccattctataactttgctcatgaaccagatgcaagcggtattgaccgtttctggactgacaaagaaaacggtgtagcatacgcacgtaatactaaatatgaagacatccacatgccgactgaccgtgctgctggttttgtcattgcaatgttcattactcttcttggctttgcactcatctggcatatttggtggctcgtagttgtttcattcgttgcagctgttgttagcttgatcgtaagctcattcactaagaatgttgattactatgttccagctgcagaagttgagcgtattgaaaacgaacgctatgctttacttgaaaaacacttgaagaaggactaa

SEQ ID NO: 42477 - DNA, 621 bp, Acinetobacter baumannii
atggctgaagtacttcatcacgacaaccacggccatgatggtcatcatgaacatgatgatactgacttaacggtctttggtttctggacatacttgatgagtgacttgattcttttcggatcactcttcattgcgttcgctgtattaagcagtcatgttccaccaggaactccaagtgcatatgacctgttccatgaatcattaggctacgtgttaactgaaacatttgccttattgatttcatcggtgactttcggttttgcggtacttgcatcttataaaaagaatgtaaatcaagtgatcacttggttatttattacattcctttttggtgcaaccttcatcgggatggaactctatgaattccatcaccttgtagaagaaggtcatggtccaacacacagtgctttcttatcatcgttctttactttggtaggtacgcacggtatccacgtaacttctggtttagtgtggatgttggtattgatgtatcaaatcaaaactaaaggtttgactttaccgaatacacgtcgtcttgcttgcttaagcttgttctggcacttccttgacatcgtttggatctgtgtattcagcgtcgtttacttactgggagttctctaa

SEQ ID NO: 42478 - DNA, 330 bp, Acinetobacter baumannii
atgagtagtcatgagcataatgctgctggtgcgtcacacggtaactttaagcaatacactgttggctttattctttctgtcatccttaccatcattccattcgggatggtgatggcaggtggtttcagccgcggtcttttggttacagtgattgcaatcactgccgttgctcaggttcttgtacaacttgtgtatttcttacacatgaatacatcatctgaacaacgttggaatatgattgcatttatctacacaatcctatgtatcgctgtacttttaatcggttctgtgtggattatgaattaccttcactacaatatgatgatctaa

SEQ ID NO: 42479 - DNA, 882 bp, Acinetobacter baumannii
atgttgaaaaagtatttattcctgactaaaccaggaattctcttcggtaatttcattaccaccttgggcggcttcttcttagccgcccaaggctctatagacatcttattattattgctcactctcattggaacaacattagttgttgcttcaggttgtgtggttaataatgttatagatcaagatattgatacaaagatgcagcgcactcaaaaccgtgcactcgttaaaaaaaccatctctcctactgttgcgcttgtatatgctttcgtactcggagtaatgggttttagcattttatggtttggtgtaaatggttacgcgtttttgtttgcaatgattggttttattgtctatgtcggtttttacagtttgtggactaaacgtacctcaatccatcaaaccgtcattggtagtatctccggagcgagccctcctgttattggttatacagcagtaactcatcaatttgatgtggcagccttgcttttgtttttagcatacgctttatggcaaatgcctcactcttgggcaattgcaatttatcgttttgatgattacaaaaatgcgggaattcctatcttgcctgtagcacgttccatttatcgcacgaaaattgaatgtgtaatctatatcctgttgtttgcagctgttttgaatgggttatattgttttggctacaccaatgtatttttcttgattacctttaatgctttgaccgcatactggttttatttatcaattattggatttaaagccgaaaacgaccaactttgggctaaacgctttttcctttactcagtaatcttaattactttgctaagtttaagttttagctttacctatcaatcccctgctccaaatcttcctctctttacttaa

SEQ ID NO: 42480 - DNA, 384 bp, Acinetobacter baumannii
atgcgtcattacgaaatcgtacttttggtacacccagaccaaagcgatcaagttgtaggtatggttgaacgctatatctctcagatcaaagaagctgatggtcaaattcaccgtttagaagattggggccgtcgtcaattggcttacccaattaacaaaattcacaaagcgcactacattcttatgaatgttgaatgtggtcaatctacgcttgatgagttagaagaattattccgttataacgacgcaatcattcgtaacctcatcatccgtcgtgaacacgcaatcactgaagagtcattgcttgctaagagtgctgaagaaaagcgtgcgcgtaaagctcaacgtgaagaagcacagcaagttgctcaagaagctgaataa

SEQ ID NO: 42481 - DNA, 228 bp, Acinetobacter baumannii
atggcacgtttttaccgtcgtcgcaagttctgccgctttacagctgagaatgttgcgtacatcgactacaaagatatcgatactttaaaacagtacatcactgaaaacggcaagattgttcctagccgtatcactggtactaaagctcgttatcaacgtcaattagcgcttgctatcaaacaagctcgctacttgtctttgattccgtacactgacaaccataagtga

SEQ ID NO: 42482 - DNA, 447 bp, Acinetobacter baumannii
gtggacgttatcttattacaacgcattaagaaccttggtaaattaggcgataaagtatcagttaaagctggttacggccgtaacttccttatccctcaaggtaaagcagttgcagctactgaagctaacactgctgctttcgaagctcgtcgtgctgaacttgagaagcaagaagctgaagtattagctgctgctcaagcacgtgctgaacaattgaacgaagttaacatcgttatcactgctaaagctggtgacgaaggtaaactcttcggttctatcggtactcgtgacatcgctgacgcgttaacgaatgctggtcttacagttgaccgtgcagaagttcgtttaccaaacggtgcgcttcgtcacactggtgaattcaacatcgcaattcaattgcaccatgatgttgttgcagaagttctcgttactatcgtatctgagtaa

SEQ ID NO: 42483 - DNA, 1446 bp, Acinetobacter baumannii
atgtctcaggcgaatgccacttctttaaccctttcatctccaacagaaaataagacgagtgaatcaggccaacttaaagagtttcgcactcccccacacaatttagccattgagcaagctgtacttgctgcgctgatgaccgttgctgaatcttttgaacaagtcagtgacttactcaaagaaaatgatttttatgccactcgtcataaatatatttatcgtgcaattgaaaaattagcacaggaaaactcaccgtatgatgcggttttggtcaacgactggcttttaaaacaaaatttactcgatgcgattggcggtgaagaatatttgatgcagcttatggctgactcaccttcgagtttctataatcttgaaacttatgcgactaaaattaaagaattttctacactacgcagtatgattaaggtaagtactgaaattttacaaaatgcttacgacacaaaaggtcgaggtgtaagtgaaattttagatttagccgaaacgagtattttctctttagcagaacaacataacaacaataaaaaagattctggacctaaagcaattagttctgtaactgccgatgtaattagtaaacttgatgaactttcaaaattagacggaaatattactggtttaacgactggcttcttagagctcgataataaaacttctggtatgcaaccgggtgatttgattattgtcgcagcacgtccatctatgggtaaaactactttcgccatgaacttggttgaaagtgttttgcaatacaataaactcccagctctcgtattctctatggagatgccagcagactctattgcgatgcgtctaatttcagctatgggtaaagtgcatcaagggcatttacgttcaggtaatttggatgctgatgaatggactaaagtaacgggtaccattctgcaacttcaacaaatgcatttgtatattgatgattcctctgccctaccacctactgaagttcgtgcccgagctagacgtatcgcaaaaatgcatgatggtaaaatcggctgtatcatggtcgactatttacagttgatgaaagttccgggcatgggtgacaaccgtgttggtgagatctcggaaatttcacgtagcttaaaagctttagctaaagaaatgaactgtcctgtgattgcactatctcagcttaaccgaagtctggaaaaccgacctaataaacgcccagtaatgtctgacttacgtgaatctggtgcgattgagcaggatgccgacttaatcatgtttatttaccgtgatgaagtctataacaaagaatcgaaagaagcaggcaccgcagaaattatcatcggtaaacagcgtaatggtccaattggtactgttcgccttgcctttgaaggccaatatactcgttttagtaatctctctcctgagtattacagccaatatgatgatgaagaataa

SEQ ID NO: 42484 - DNA, 1077 bp, Acinetobacter baumannii
atgagggtgcgtcaagcaacagtttatattgatcgccaagcgcttcaatataatttaaaccgtgtcaaacaactcgcagcaaattcaaaaatcgtaagcatggtaaaggccaatgcatacggacatggagtcaaagactgtttagcagccttaaatgcctcagatgcctttggtgtcgcctgcctacaagaaggattagaaatccgtgaacttggtttcgagcaaccagttactttaattgaaggggtattttctgaagatgaaatgcccatcgcaattgaacaaaaatttgaatgcgtcattcaccatcaacaacagtttgaatggttaattaaacacaaacaagcatatattacccaaggcttaaaagtatgggttaaattaaatagcggtatgaaccgtttaggttttaaaaacccagaaattattgaagtgatcaagacactaaagtctgaaggttttacatgtgtacttgctatgcattttgcaaatgcagatgtagatcatcctttaaatgaacaacaaaaacagcaatttttgcatgttaaagaaacttgcgatccaattttagcatcatgctgtaattcagctgccatctttaaatggccagaactaaattttgactatgtacgtcctggtattatgctctacggcgcttcaccttttgcagataaaacagtgcatgatcttgatttgaaacctgtcatgacttttactgcagaaataatagcgttaaaccatattgaagctggtgaacacgtgggttatggctctactttttgtgctcaacaggctatggatatcgccattgtttctattggctatggtgatggctatccaagagcttatgttaagcaaaattttgtcgctattgatagcaaactttgcccagttgtgggccgtgtaagtatggatatgattgcgattgatgtcacaaatactcaagtaaaacttggcacccaagttgaactttggggaaatcaccgtctagttgatgatgtggctgaagcaaatggcacaatcggttatgaattactttgccgtctaagttctcgcccagtccgtcagggtacttaa

SEQ ID NO: 42485 - DNA, 735 bp, Acinetobacter baumannii
atgacctattgttgtgcgctgagattggaacaggggttggtgtttataagtgacactcgaaccaatgccggggtcgatcatatttctgtgttccgtaaactgcatacttttggagtaacgggagagcggtttattgccttgcaaacagcaggcaatttagcaactacacaagcggttatcgggcatttgcaaaatgcgcttattttgcaacaagaacctaatttatatagcattaatactatgtttgaagtggctgatctggtcggtaaaaccttgaaaagcgttttagaagatatcagttcagatacccaagaacaaatgaattatgcctgtagtattttagtgggggggcaaatcaaaggcggagatatgcagctttataatgtttatccgcaaggcaattttatttgtgccaccacagatacgccttactttcaaattggcgaaagtaaatatggcaaacctattttagatcgagctttatattatgcgatgccattagatgatgctcttcgttgtagtctaatttcatttgattctacattgcgttctaatgtctctgttggtttgccgttagatgcattagtttatagtaaagatagttttgtgatccctatgggtaagcgaattactgaagacgatccatatttttcacaaattagtcgtcaatggtcagatacgttacgccgtggtttacaggaaatgccaaaacctacagatgattattggcgctaa

SEQ ID NO: 42486 - DNA, 780 bp, Acinetobacter baumannii
atgaaattgatggttaatcatcaaacgcattataactatactgaaactgctaaaaacagtattcagtatatcaagatgatgcctcaaacatcgctgcatcaacatgttatgaattgggcgatcagtgtgcctggtgacaagacgctcaaaagagatatttttaataatatttggataacggctagccagcgttatgagtatcagcaccttacttttatggcacaaggtattgtagagcttctaaatacagaaataggaggagtagatgtatctataccaataaatctatttctccaaagtacagagtccactaaatatgatgctgaaatgttggattttgcccagagaattgtaactgtcaaagatcgacaacatattgctttgctcagtgaaaatattctgcaaaagatgccatatcaaccggatagtacatctgttcatacaacggctacgcaagcctttcaggcaggtcagggggtatgtcaagatcatgcacatgttttaatcgctatgtgccgtgcgttacaattaccagcacgttatgtctctggttatctatttgatcaaaattctccacaccttgccagtcacgcttgggcggaggtatttttagataatcagtggtattgttttgatgtgagcaatcaattgtttacaccaaagcatcatatttatcttgctgttggtcgggactatctcgatgttgcgcccattaggggagtgcgagaaaaaggtggtactgaaaatatgatgtctgtggttcaagtgctggcttgttga

SEQ ID NO: 42487 - DNA, 597 bp, Acinetobacter baumannii
atggttttactcaattcgagtgcgcaccacatttattggttgggtcgttatttaatgcggattcaatttgctgtatcacatttgccatttaccgatgatgctagagcggctcaatttgcagcagcatttgggctagttattgatcaagcagaattactgaattgctatatgttggatacgaaacaaacatattcgttactgaatcagttcgctattgctaaagataatattcaagagttaagaggaatattatcttcaaatgcctatgcagaattaaatcatgcgattaagggagtccaagctcatcctgattcattaaagcaggctttagcgaaatgtaatcaaatacttgatgctgaacatgaagatatagcgttatttctgcatttaggacaaaagatagaattatttgatatacaactacgttttcagcaagaccttacacagctcttgcaggaattagaacaattacttcaacagctgaatgacttagggtggaataaattaactcaaccatggcaattattaaaagatcatccaaattgggaagcttattataattttacccagcagttggaatatatgttcgaggcataa

SEQ ID NO: 42488 - DNA, 1551 bp, Acinetobacter baumannii
atgtcagaacaagagaaagacctacaagccgatattgattattttttacaggaacaggcgaccaacgcattacttaaccaaacttcgtttatagaaaatctttccgtacagtcgaacctatttgaacaactaaaatcgcagttttttaatgagatgttggatgatgcgacgtctaatggtgtggcctctaaaaaaattgaacaatggctgagcattcgtactttggatgagttgaaacaattaaatgcggaggctaagcaacattttctctatcacggcattacatttaacgtatacggtgataaggagggagtagagagaacgataccttttgatctcattccaagggttattgaaaaaaaacagtgggaaaaaatcgcagctggctgcgcacagcgagttaaagcgcttaattattttttagatgacatctatcatggtcaacatattttaaaagagcaattaattccggaaagtcagattatttgtcatgaggcttttcagccccatatgcttaaacacacgctcaaaggcaaaatttattctcaaattagcggaatagatattattcgtgatagtgaaggcgagttttttgtacttgaagataatttaagaacaccatcgggcgtatcttatatgattgaatgcaggaatattagtcagcaactcatgcctgagctctgcgctgctaacaatctgcaaggtattgaacactatccaagcctattaaaagaaatacttcaagaaaactctgaagttgatcagccttttattgtggtcttaacgccaggacgttttaacagtgcttattatgaacacgcttttttagcacgtgaaatggatgtgccactggtcaccaatcgagatttatttgtagaaaatgatcaagtttttgtaaaaacgattcgaggacgtcaaaaagttgatgtgatttatcgccgtttagatgatgattttttagatccacttgcatttagacctgatagtgctttaggtgtggcaggtttaatgtctgcttatttacagaaaaatgtagtgattgccaatgcacccggcactggagtagctgacgataaatcgatttatccatatgttgatcagatgatccaatattatttgggtgaaacaccaattttgaagaatgtacctacttaccagtgccgtgagaaagaacatctggactatgtactggctcatttagatcaattggtcattaaagaagctcaaggatcgggtggatatggcatgttaattggtcctaaagcaagctcatgtgaaattgatgaattcagacaaaaactgattgctacaccgcatgaatatattgcccagccaacattggctttatcggttgcaccgactttaactacagcaggagtggctgagcgccacatcgacctacgcccgtttgtactcagttctccttatcggaccgaaattgtgcccggaggtttaacacgagtagccatgcaggcaggttctttagtcgttaattcctcacagggaggaggtattaaagatacatgggtcgttgaaacgctacattcttaa

SEQ ID NO: 42489 - DNA, 1008 bp, Acinetobacter baumannii
atgtctgtaacagaaaaagaaacttcaaatagtttatatcgccaatggcagattctatctcgccttcctaccggtaaatggatcggaactcgagaattgcaagaaatgcttgagcgtgaaggtattgaaatcagtttaaggactattcagcgtgatttaaaccaaattgctcagcgttttccaattgaaagtaataaagctgtacctcaaggctggcgttggcaatcagatgcaccaattcaaagcttaccgcatatgacaagctctcaagctgtaacctttatgatggttgaggaacatctcaaacatttacttccacccagtctacttgatgagatggggccttggtttgatttagcaaaacgtagtctgtctacacaaaataatgtgagacagtggattaatcgtgtccgtattgtgccagcaagccaacctcttattccacctgtagtggaccgtgctgctcagcaggcaatttatgaaggtctactacaagacaaacagattgagtgcgtctatcgggcccgtgtaaatcaaggcgaagataaaacttatattttaaatcctcttgctttggtccaaaaaggtgctgtgatttacttaatttgtactcgccatgataaaactgaagtacaaacatttgccttgcaccgattcaaatccgctaaagttttagaaagtcgggctttacaccctgtcaatttcgatattgaccattatattgactcaggagctttaggtttcagagtagattacaaccaacccactgaatctattcagcttactttaaccatgaccgagcaaactgctaaaactttttatgaaagtcagttaagtaaagatcagaccattaccccaattgaagaaaatattgtcgaagttacggcgaccgttccatttacatctcaactcgtatggtggttacggagttttggtaaaaaactgcttcatattgagccagtccaagtacacaatgctgtgcgagaaattgagcctgatagcaaataa

SEQ ID NO: 42490 - DNA, 1881 bp, Acinetobacter baumannii
atgcactatcctaaagtttatgatgttatcgttatcggtggcggtcacgcaggtacggaagcggcgcttgctgctgcgcgtatgggacgacagactttgcttttgacccataacattgagactttgggtcagatgagctgtaacccagcgattggtggtattggtaagtcacacttagttcgtgaaattgatgcgcttggcggtgcaatggctttagctgccgataaaggtggtattcaattccgtattttaaactcgcgtaaaggtgctgcagtacgtgcaacgcgtgctcaggctgaccgtgttcgctataaagctgcgattcgtgagaccttagaaaaccaagcaaatcttgatattttccaacaggcggctgatgacctgattgttgaaggcgatactgttaaaggtgttgtgacccaaatgggtatccgctttgatgcaaaaactgttgtgttaactactggtacattcttgggcggtgttattcacgttggtttagagaaatcaagcggcggtcgtgctggtgatcctccttctattgctcttgctcagcgtcttcgtgagttgaaattaccggtaggccgtttaaaaacaggtacacctccacgtattgatgcacgttcagttgatttttctgttatgacaccacaaccaggcgacttcccgtctccggtaatgtcgttcatgggtgatgtgtctatgcacccagaacaagtgaactgctatatcacgcatactaacgaaaaaactcatgacattattcgtggtggcttagaccgttcaccaatgtataccggtgtcattgaaggggtaggtccacgttactgtccttcaattgaagataagattcatcgtttctctgataaagactcgcatcaggtattcttagagccagaaggccttgatacacatgagctttatccaaatggtatttcgacttcattaccatttgatgttcagtttgaacttgtgcgctcgattcgcggtatggaaaatgctcatatcttacgtccgggttatgcaatcgaatatgactatttcaacccgcaagctttgaaatttaccctagaaaccaaagcaattaacggcttgtattttgcagggcaaattaatggtactaccggttatgaagaagcgggtgcccaaggtttacttgcaggcttgaacgctgcacgccgtgcatgggaacaagaagaatggacacctaaacgtgaccaagcttatatgggtgtattggttgacgacttgattaccctaggtacgaaagagccataccgtatgttcacttcacgtgcggaatatcgtttgatgttacgtgaagataatgccgatcaacgtttaacaactattggtcgtgaacttggtttggttgatgatgttcgttgggcagcttattgcgaaaaaatggaagctgttgagcgcgaaacatctcgtttacaacatttatgggcggcacctaacaacccaatgggtaaaaagtttgttgaaatgacaggtgctgatttaagtaaagaatgtagtgcgattgatttgcttaaacgtcctaatattaatttttctcaaattgcggaacttacaggttctgaagtttcacaacaggtcggcgagcaaattgaaattgctgttaaatatgaaggttatatcaaccgtcagcatgaagatgtggctcaattaaaacgtcttgaagaaactaaaattcctgctgattttgattatgacgtcgtttcaggtttatctcgcgaaattactcagaagttgaaaacagttcgtccggaaacattagctcaagcgagccgtattcctggtgttaccccagctgctgttcagcttgtaatgatcacgattcgtaaaaataatatgacgaaaaaaacggcttaa

SEQ ID NO: 42491 - DNA, 231 bp, Acinetobacter baumannii
atgaaaacgaccatgttgaaaatcttaacagcatctctaatttgtttttcaggcgtaacttttacacacgctgctgacacgagcaaagctgaaactcaaaaacaaattcgagtatgtgcaaaaaaacagcaaggtgaatgggtttcttacaatcacaacggtgtaacctttaatggtacttgccagccgaacgaaaatggcaaattacaattcaaggcccctgctccttaa

SEQ ID NO: 42492 - DNA, 906 bp, Acinetobacter baumannii
gtgaagtggttacaaatacacattaccgttgatcaagaacaagttgaattcacagaaacacttttaatgtctctaggtgcggtaagcgtaactttggatgatgccgaagatcaggctttactggaaccattaccaggtgaaacaccactctggaacaaagtcattgttactggtatttaccaacaagacgaacaagacccaattgatgttgatactttagaagctttcttaaaagcacaacttccagatgtgccaatgcgtcatgaagaacttgaagatcaagtttgggaacgcgcatggatggattattatgagccaattcagatcggggaaaaattctggattgttcctgaatggttagagccaccagaagcagatgctacaaatattaagcttgatccaggccttgcttttggtacaggtaatcatgcaagtactttcttatgcttacaatggttaggtaaaactgatgttaaagataagatcgtgattgattatggttgtggctcaggcattttaggtgttgcagctttattattaggcgctaagaaagtctatgcgacggacatcgacccacaagcagttttagcaactaaacaaaatgcagaactcaatggtgtattagaccgtttatatgtaggtcttcctgaagagtttgatcaagaattcaaacctcaacaagcagatgttttagtcgcaaatattttagcgggtcctttaatggcacttgcgccagagttcgcaaaattacttaaatctgatggtgatttcgcacttgctggtgtaatcgaagagcaagttgctgatgtttcaggtgtttattctgaattttttgatatattagatgtcgaaaagcgcgaagaaaactggtgccgcatttcaggaaaacgtaaaacaacaaattga

SEQ ID NO: 42493 - DNA, 843 bp, Acinetobacter baumannii
atgaatgaaaaacaaacccgctgccctaagtgtctaacagtttataaagtttctcttactcagttaactgttgctcagggtatggtttgttgccctaaatgtaatttaaattttaatgctctgactaatttagtaaatgttgagcagccggaaacggtaaactcatctgctttagctcatggctctatgcaaacacgatatatgacccattctcatgtgttagatatctttgatcaaaaagttgaaaactctaatattgatcttttgacttatttgaataatttaaattacttccataatgaacctattaatgctcttcctaatcttaatttggctgagcaagcaacctctcctgaacaagataacggtaaaaagcatagctggttgtactatacgctttggagttctgcaaatctgattctgattttggtttttacttttcagattctttggtttaaccctaaactcatgcaacaaagccctgcgattagccatgcctttaattatgtttgtcaaatattgcattgcaacaagtcagctgaacaatatcaacttctttatatagaaaaggtaaagctacgtaaaattggtacagagcatactcaactttcaggtgttctcataaatcagaataataaaagtattgagttgcctaacctaaaactcagctttggcaaagaaaccgatcaagaagaaatcatttttacccctcaacaatacttggtcgaaaatttacgtggtattcaacgtattccgaccaatacaccttttagattccaagttgagctaaataaaagcaaaaaaagcctagtaaattatcgattagaaattgtccacccctaa

SEQ ID NO: 42494 - DNA, 270 bp, Acinetobacter baumannii
atgaatagcaaatctcctatttttactgcacaatctgatgttgctcttcgcatccacgtggatcgcgcagttcgccattattttgcacaattgcaaggtgagcaaccatctcaggtatatgacatggtgctagcagaaatggagaaacctcttttatctgtagttctagaatatactcgtggtaaccaaacacgtgccgcagaaattcttggactcaaccgtggcactttacgtaaaaagttaaaagctcacggtttaatgagtgaataa

SEQ ID NO: 42495 - DNA, 1575 bp, Acinetobacter baumannii
atgactattaaacgtgctttgatttctgtatcagacaaaacaggaattgtcgaatttgctcaaaaccttgcagctttaggggtagaattattatctacaggcggcacatacaagttgcttaaagataataatattgctgttgttgaagtatctgaacataccggtttcccggaaatgatggatggccgtgttaaaacactacatccaaaaattcatggcggtattttggctcgtcgtggtctagacgaagctgttatgcaagaacacaacatcgatccaatcgatttagttgtcgttaacctttacccatttgcggctacagtagctaaacctaactgttctcttgctgatgctatcgaaaatatcgacatcggtggtccaacaatggtacgtgctgctgctaagaaccatgcatctgtcggtattgtggtaaatgcttcagattacgatacagttattagcgaattaaaagcttctggttcactttcttacgaaacacgcttcgatttagcggttaaagcatttgaacatacagctcaatatgacggcatgattgcttcttacttaggcgctcgcgttggtaaggccgaaggtgaagcagatttattccctcgtacgttcaatacccaattaaacaaagcacaagatttacgttacggcgaaaatccacaccaatctgctgctttctatgttgaagcaaatgcaaaagaagcttctgtttctactgcaaaacaattacaaggcaaagaattgtcttataacaacattgctgatactgatgctgcccttgagtgcgtgaaatcatttgcaaaaccagcttgtgtcatcgtaaaacatgctaacccttgtggtgttgccgtttctttagacggtattaaagctgcttatgatttagcttacgcaacagatccagaatctgctttcggcggtattattgcatttaaccgtgagttagatgttgctactgcccaagcaattgtagaccgccaattcgttgaagtaattattgctccaagtattgctgatggtgtacttgaagttactggcgcgaagaaaaatgttcgtgttttagtatgtggtgaattacctgcaattgatgcacgtgctccacaacttgactataaacgcgttaacggcggcttacttgttcaagaccaagacttgggcatgatcaccaaagatgatcttaaagttgtgactaaacgtgcaccaaccgaacaagaaattgatgatcttatttttgcatggaaagttgcgaaatacgtaaaatcaaacgctattgtttatgccaaaaaccgtcaaactattggtgtaggtgcaggccaaatgagccgtgttaactcagcacgtatcgcagcaattaaagctgagcatgctggtctggttgttgaaggcgcagttatggcatctgatgcattcttcccgttccgtgacggtattgataatgcagcaaaagctggcattaaatgcattattcaaccgggtggttctatgcgtgatgaagaagttattgcagctgctgatgaagctggcattgcaatggtcttcactggtatgcgccatttccgccactaa

SEQ ID NO: 42496 - DNA, 1287 bp, Acinetobacter baumannii
atgaatattttagttttaggtagtggtggtcgtgagcatgctttagcatggaaaatcgcgcaagatgccaaagttactcaagttttcgttgcgcctggtaacgcaggaactgcaacagaaccaaaatgcgttaacgttcagctcgatattttagacaacccggcaattattgcttttgctaaagaaaataatgttgaactgattgttgttggcccagaagcgccattagtaaatggtgttgttgatgctgcgcgtgaagcaggcgtaaaaatttggggacctactcaatatgcagcacagcttgaaggttcaaaagcatttgctaagcactttttaaaacgccacaacattccaacagctttttatgaagtatttacggaagttgatgcagcaaaagcttatgttgaaaaaaatggtgcaccaattgtaattaaagctgacggtcttgcggctggtaaaggtgttatcgttgcaatgaccaatgaagaagcttttgcagccattgatgacatgcttgcaggcaacaaatttggtgatgcaggctcacgtgttgtaattgaacagttccttgctggtgaagaagcttctttcatttgtatgattgacggtaaaaacattttaccaatggcaacttcacaagatcacaaacgtatttttgaaggtgaccaaggtcctaacacaggtggtatgggtgcctactctcctgctccagttgtgactccagacgtttttgagcgtgtaatgaatgaaattatgcgcccaactgttgatggtatggctgctgatggacatgtttatactggcttcttatatgctggtttaatgattgatgaacaaggtcaaccacgcgtaattgagtttaactgccgtttcggtgatccggaaactcaacctatcatgatgcgtttgaagtcatctcttgttgatttggttgaagcaggtatcgcaggtaacttaccaagcgaagcagaatgggatgagcgtaagtcaatcggtattgtacttgcagcagaaggttacccagacagcgtgcgtaaaggtgacgttatctcaggtatcggtcaatcaccagaagatactaaaatcttccatgcgggcactgctactcgtgaagatggccatatcgttacttctggcggacgtgtactttgcgtgactgctctaggtgacagcgttcttgaagcacaaatcaatgctttagaagtatgtgggcaagtaaccttcacaggtatgcaataccgcagtgacattggttaccgtgctattgctcgtgaaaaagctgaataa

SEQ ID NO: 42497 - DNA, 867 bp, Acinetobacter baumannii
atgaaaaagctgatcagtctttttttaagcgtgtctgtagtattacttgcagcttgcggcaaacagcaaaatgaaccacaaaatggcaaagactctgctcagttacaaactgtagtcattgcttcaactggttctgacgctgatatttggcgctatattgcaactttaccggaaactaaagctgccggtcttaaacttgaggtgaaaaacttcactgattatgttgcaatgaatacagctactgcaaacaaagaagttgacctaaatgcattccaatcttatgcctaccttgttgcatttaatgcttcaaacaaagataagattgctcctgttgctacaacttatcttgaaccaatgggtatttactcaagtaaatacaaaaaagttgatgagttccctcaaggtgcaagcattgctattcctaatgatgcagcgaacgaagctcgtgcattgttattgttacaaagcgcaggtctaatcaagcttaaagctgactttgatccagcgaaaggcactccaagcgatattactgacaacagcaaaaaaattgacattaaaccaattcaaatggcaactgctgttcgtgtaaaagacgaagttgatgcaattgttttaggtaatactttagcaatggaaggcggtttaaatgtgcttaaagattctatctattatgagccagttgaccaaagtacaaagctgaatgtaaatattcttgcaactgctgaatcacgtaaagatgaccctgttcttcagaaagttggtcagctttaccacactgaagctgttaaaaaatacgttgaacagcactttggtggtacaaaagttgacgtgaatcagccaatcagctacctcacgcaagctaaatag

SEQ ID NO: 42498 - DNA, 1026 bp, Acinetobacter baumannii
atgattcaatttaaaaacatttcaaagcactatcagcttaaaggccaaactatacgtgcactggaccaaattaatttggaaattcctgaaggcagtattttcggcattattggctatagtggtgcaggtaaaagtactttaatccgcctgattaacttacttgaacgaccaaatgaaggtcaggttatcattaatcaaaaggacttcactgctttggatgcgcgttcattacgtcaggaacgtgcaaatattggtatgatttttcagcacttcaatttgcttcaaaccaaaacagttgctgaaaatattgaaatgccaatgcgtctgctaaattacagcaaagcagaacgtgaaaagcgtttaaatgagttacttgaattcattgatcttaagcataaaaaagatgcttatccggatgaattatctggcggtcagaaacaacgtgttggtatcgctcgtgctttagccaaccaccctaaaattcttttgtgtgatgaggccacctctgccctcgacccacaaacgacaaagtcggttttagaattattaaagaaaattaaccaagagcaaaaaatcacaatcgtcatggtaactcatgaaatggatgtgattgagactgtatgtgaccatgttgctgtcatggaagctggtaaagtgattgagcaaggctcaaccattgatatctttagtaatccacaacatccgacaactaaaaactttatacaaactgttttacatcagcagttgcctgtaaatattttaaatcaacttgaaaaccagcatcatcacagcatttactgcttacagttcttagggcgttcagcacaagagcctgtgattcagtcgcttattaaacaatttgatatcagtttaaatatcttatttgccaatatgactgaaattaacggcaccgtcattggtcagatgtttgtacagcttttaggtgatccacagttgattcgtcaggcgattgagtttttagagaaaaatgaagtgagtgtagttcaatcaggagatcaagtatga

SEQ ID NO: 42499 - DNA, 696 bp, Acinetobacter baumannii
atgagagatttaatcgtacagtggttaactgaacttactcaacctttctggcacagttctctttcaattgaccagtttgtaactgcgttacaagaaaccttccatatggtgttctttgcgcttttatttggtggtatttggggctttatccaagggattattctacttgtaacccgcccagaaggcattttgccaaataaattcatttatcatttactcaacccaattgtaaatgctttacgttctctgccatttattattttacttattgcagttattccactgaccaaattattggtaggaacttcaattggtacatgggcagcgatcgttcctttaacaatttacgttggaccatatatgggacgtcttattgagacttccctgcttgaagtaaatgaaggaattatcgaatctgctcaagctatgggtgcaacaccttggcagattatttcgcgctttatcttacctgaagctcgtagttcgcttattttgaacttaacgactgctacgattagccttattggtgcaaccgctatggctggtgcagttggtgctggtggtattggtgacttggcaatttcttatggctatcaacgttttgatacaagcgtcgttattttaacggttattgtattattacttttggtacaaatcgttcaaatgctaggaaattggctcgcaaaaatgcgctaa

SEQ ID NO: 42500 - DNA, 732 bp, Acinetobacter baumannii
atgcgttatagaattcattatattgatgtgcaaaatgccctacaaaactatatctggattttagaagatactgagactcatgaagctgttgcagttgatccaacagaggctgagttagtcatccacttttgccaagaacatcaattaactttaaaacagatttggcttacccattggcataaagaccatatcggcggtgttgctgatttaacggctaacacgcctatggcggtatatggcccaagagatgaactaagtaaaatccctggcattactcatcccttacaacacgatgatcatctaaaatttaatgatttaaaagtagagattattgcaacaccaggccataccttaggtcatattgtatattttattgaagagcttaataccctcttttgtggagataccttatttgcaatgggatgcgggcgactatttgaaggtacagcagaacagatgtaccactcactaaatcgtcttgctgcactacccactgcaacaaaagtgtattgcacacatgaatatacactttctaatgcggaatttgccttaagtgtagaacctgaaaaccacgcactgcaagaacgtgctgaacaagtccgcatgcttcgtcaagaaggtaaaattaccttgccaagtagtattgaacttgaactagcaacaaatccctttttacgtgctgaaagtgtagatgagttcgctcacttacgtagcttaaaagacaatttttaa

SEQ ID NO: 42501 - DNA, 204 bp, Acinetobacter baumannii
gtgaaaaaggttgttaaagcgaaaaatttaattgcgttccgtatttggttagaaaaattagggtattcggttaaaaaccttgctgatggaaaaggttttactttcagttttaaaaaagaatatggcttagtgacctgtgatttggcaggtaatgctttagcaatgcaattaggtgaagagtttgaggatcacttaaaagcataa

SEQ ID NO: 42502 - DNA, 1299 bp, Acinetobacter baumannii
atggatttcaatacccttgaccaagaaacggtacagaaaaaacaaaagtttcatcaaattttgtatgtacaggtcatctttgcaattattttgggcattttaattggtcatttttacccagaacttggcgagagcttaaaaccgcttggtgatgcattcatcaaaatcgtcaaaatgattattgctcccgtaatctttttgacagtggttaccggtattgccagcatgacgaacatgagtcgagttgggcgagtgacaggtaaggcaatgctatatttccttactttctctagccttgcgcttgtggttggtatgattgtggctaatatcattcaacctggtaaaggcctaaatattgacccggcaaccttagtcaacgataaagtaaatagttacgttgaaaaggctcatgctacaaatatcactgactttttcatgaatattatcccgcaaacattagtgagtccgcttgctggtggtgaaattttgcaggttctatttgtggcagtcctatttggtatttctttagctgcattgggtgaccgtgcacgtccaattactgattttttaaataacctcacggctccggttttctatttggttggcatgttaatgaaacttgcaccaattggagcttttggtgctatggcatttactatcggtgcgtatggaatcgaatcaatcggtaatttattactattgattatgactttctatatcacggcagtgctgttcgtattaatcattttaggggctgtagcacgctacaatggcttttcaattattgatttaattcgttacatcaaagacgaactctggttagttttaggtacaagctcttctgaagctgctttaccatctttaatggataaaatgcaaaaagcaggttgtgaaaaatctgtagtaggtctagtcattccgacaggttactcatttaaccttgatggaactaacatctatatgactatggcggctttatttattgcacaagcatgtaatgttgatttatcaattggtgagcaggttgcattgcttttagtggcaatggtgagttctaaaggtgcggcaggggtaacgggcgcaggctttattacactcgcagctactttatcggtagtacctgctgtaccagtggcaggtatggcgcttattttaggtattgaccgttttatgtcggagtgtcgtgcattaaccaatttaattggtaatgcatgtgcaaccattgtggttgcccgttgggacaaagctctggacaaggacgttctagataaagctttacgcaaatcgaaaacgaattaa

SEQ ID NO: 42503 - DNA, 567 bp, Acinetobacter baumannii
atggcaaaagttgttactggattacgccctggtggacgcagcgaaagaatacaaactgcggtgcatcaagctgtaaaagaactacaaaaagattttgagcagagccaaattactattcctatgattgcagcgcaggcaggggttacgccttcaaccatttaccgtcgatggggtgacatcaatcaattattttcagatgtagctttaaatgaactcaaacctgatatggaacccaaagatttaggttcgttccaacaagatattacagcatgggttgagcaatattttgaagaatatgcttcagaggttgggcaagacttattgcgagatgtactctatacatcaaactcggattctaatgcccgtaaatgtgagactttaattatccagcaactcgatattattcaaaacagggcaaaattacgtaatgagtttactatacctaatcaggtaatcattgagacagtaattgcacctatgttatttcgaattttatttactaatcatgatcttagtcttgagtatgtatatgaccttttaaaccgtctttttataaaaaataagtag

SEQ ID NO: 42504 - DNA, 1203 bp, Acinetobacter baumannii
atgaacaattcaagttcaaaacggtcaagagctgtttttcaattagatgcggcaagtgctttgacacttaataccatcacgctcatgacattcatggctgcatctagtgcgccgacaccactctaccgcctataccaacagctttggcaattttcaccggttacattgactttgattttcgccacctatgcttttacgctgcttggctcattactcattattggttctttgtctgattatattggacgccgcccagtcattattgcagctattactctgcaaattatttcaatgagctttttcttatttgcttcagatgtttcgatgttgttcattgcacgaggcttacaaggcatcgcaacagggcttgctgtttcagctataggcgcagcaattttagattttagtaagcttcatggctcactgattaatagtattgcaccaatgataggtatggctgttgggatttttctgacttgttctattttgcaattctctgcccaccccttacagcttgtttttgagttcttatgttttcttcttatttgtgaactcattttaagttttcttactccagagaccgcacaaagaagatccggtgcacttgcttcattaaaacccaatatggccattccgccacagacaaaaagcgctttattgagtattagcccaattaacattgcactttggatggtcagtggtttcttcctatcgcttatgccctctttactggcaaaaattttccacacgtcatcggcatggctaaacgggattatgtttatggcgctcgccctttccggtgcggtaggtatattaacgcttaggaagtcgacaaatttccgtattttattaaccggtacgctctcgattgctattggtgccattgtcttattcatcgccattaacctaaccaatgcagtagttctatttttaggttctattattactggcgttggttttggtacagcatttatgggggctattcgtagtgtcatgccattggcacttcccgaagaacgtgcgggtcttatggctgcttttttcgttgaaagttatttggcttttagtattcctgcaattttagctggctattttgtaggtaaaattgggctgatgagtacggcaaatagttatattggttttattatcttattgtcactggtcgcccttctaatgattattaaaaattttaaaaataaataa

SEQ ID NO: 42505 - DNA, 453 bp, Acinetobacter baumannii
atgcaaatattacggttatctgattaccctcaatacaaagaaatggctgcacagtggttttctgaaaaatggcaaatccctgtggaagcctatcttgagagtattcagatttccattgatcaaaggcatgctattccacagtggtacattgttttaaatgaaaataagcatttaattgctggagcaggagtcattgataatgacttccatgagcgtaaagatttaacaccaaacttatgtgctttatttgtagaagagaactatcgaaaccaaaacattgcaaaacacattttagattttgtacgtgaagacttgagtaatcagggcatccaaacactttatttaataacagaccataccgagttttatgaaaaatgtggttggcggtttttaacattggtaaaggatgaggaaggcgagatggtacgtatgtatgtagcagatactttttaa

SEQ ID NO: 42506 - DNA, 1368 bp, Acinetobacter baumannii
atgcttacacgttttttactgccgattttgggcactaccgttttagttacaggctgtgcttcgtcctctcaatatccgattaacgagagttatggtccagagccaaagttgcctgaaccgaaaacaagcttatttccgaccgtaaatatagcaccggcacaaggttggccaagtggtgttatgccgactccggcagaaggtttaaaagtaaaagcatttgctaaaggacttgagcacccacgttggctctatgtattaccaaatggtgatgtgctggtggctgaaacggatgctccacctaaacctgaagacagcaaagggattaaaggcaagattatgaccttcgtaatgagacgggcagggtcatctcatccaagtgcaaaccgaattagtttactccgtgatacgaatggcgatggtatagctgaccaaaaaacggtattccttaaaaacctaaaatcaccgtttggtatggcactggtaggaaatcatttatacgttgccaatacggattcactcatgcgttttccttaccaagaaggtgaaacccatattacttcaaccggtactaaagtattggacttaccgggtgggcctctaaaccaccattggaccaaaaatgttattgccaatcgtgaaggtacaaagctctacattaccgttggttccaatagtaatgtggccgaaaatggtctagatcaagaaaaaggccgtgcacaaattatggagtttgatattgcaagtggtcagtcacgtccatttgcaacaggactgcgtaatccaaatggtatggcttggcagcctcaaagtggcaaactttggacagttgtaaatgagcgcgatgaaattggtagtgatttagtgcccgactatataacatcggtacaagatggcgctttttatggctggccttatagttactatggtcaacacgtagatgtacgagtcaaaccacaaaatcctgacatggtggctcgtgcaattaaaccagactatgctctaggtaaccacactgcttcgttaggtcttgcattttatacagccgaactcatgccacaatttagaggcggagcatttattggacagcatggttcttggaaccgtaaaccacatagtggatataaagtcatttttgtaccatttagaagtggtcagccctctggtccaccgcaagatattttgacagggtttttaagtgaaaaaggcaaagcgtatgggcgtcctgtcggggtagcaattgatttttcgggtgcagtattagtcgcagatgatgttggtaatacaatatggcgtgtctcaccagttgctgaaacaacttatgagagtccaacccaacaatccattcgtagttcagtgactcaaccttaa

SEQ ID NO: 42507 - DNA, 912 bp, Acinetobacter baumannii
atgtcaaaaaatttagcaaccttgattggtttaagtgccatcctaatgtgggcctctatggtaggcttcgtaaaacatattacgactgcaatcggtccagatgttggcattacactgatctattccttaagtgctttactcctgctcattatttttagggtgccaaattttaaattaatttctaaaaaatatttaattttaggggcaattttatttattgcttatgagctttgcttttcgtttgcacttgcctattcaaagacggcgcaacaagcgattgaagtaagtattgtgaactacctttggccaagcctgactgttttagcttttgttatttttagagagttaaaatttaatgtgtttattattttaggattactcatttcaatttccggtatcatttttattcagaccgggaacggagattttagtttaggtcgtgttgtcgataattttcatagtaatcctttaagttatattttggcctttataggtgccattatttgggctttttactgtgtgttgaccaagaaaatgggtaaaggacaaaaccctatttctattttctttcttggtgttgccataaccttgtggctaaaattactttttagcggccaagtgagtttgccttcactcgatttaaatacaattttatctttaatcgttgcttctgctgcaattggcctcggttatgcagcatggaatattggcattattcatggcaacattaccatgctggtggttgcttcttattttacccccatcatttcatctttacttgccatgttggttttacagacagagctatcaatcagcttttggcaaggtacagccatggtcacggcgggttcactgatctgctggctttcaacaaattgggctgtgattcgttcgtatttcagaataaattaa

SEQ ID NO: 42508 - DNA, 729 bp, Acinetobacter baumannii
atgaaaacaatcggtttactcggcggtatgagctgggaatctacatcactttactatcaacaaattaacagaatggttcagaacaagttagggaaactacattcagccaaaatcattctaaatagtgtcgattttgaagaaatagcagcattacaatcgaaaggtttgtggcaagaagctggagcctacttagctgagcaagcacaaaatttagaaaaagcaggggcagattgtattttagtctgtactaataccatgcataaagtagcgcctcaaattgaagatgctattacggttccatttatacatattgctgatgccacagcaaaagaaattttaagtcaaaatatccgaaaagttgcactgttgggaaccgctttcaccatggaacaagacttttataaagccagattacaagatcttggaattgaggtgattattccaaatgatgcaaatcggaaaatagtacatagcattatctatgacgagctttgtttaggtctgatcaaccccgattcgcaaaacaagtatatgaccattgttgaagagttgattgggcagggtgccgagggcattattttggggtgtaccgaaatttgtatgttgattggtgatatcaaattttctgtgcctctatttgataccaccaccattcatgcgaaagaagctgtaaattttgcattagagcaaaaaacggcagcccgttctattgctgctagttcggtataa

SEQ ID NO: 42509 - DNA, 372 bp, Acinetobacter baumannii
atgttagaaacagaccgcttaatcttaaaaccatttgttcaagaaaatttatctacagtcattgagatgttacaagacaaagattttatggctttttcaccttatggtgacttaacaactgaagctgcaaagactcgtttttttgaaatattagagcattataaaaattataattttggcaaaatggctatcgtcttaaaagatacccatcaaattattggttattgcggttttgaaaattgtgaagttgatggcaagaaagaaaaagataatttacctgcccataacttgttagccaaactgggctttataaaaaccaattcatctcattacttaaacatggaagtttgtttcttcaaaaaagatctttaa

SEQ ID NO: 42510 - DNA, 711 bp, Acinetobacter baumannii
atgaaaaataaaaagaaccgatcattgcaacactctaaagtagccaaatggctgcttgggagtggagtgcttttgacagcgatagccatgacagcatgttctagttcaccaacaccaaactattatacgcttacacctaaagtgactccggtctcgaactcgaccgtgcaggtgattgaggtcttgccggtcgggatcccagatcgtttagaccgtgcactattggtgctacaagacagtaatggtaagtcgactgtacttgataatgagcgctggacatcgactttgggtacacaattacgcgataccttatcggcgggtttgcagcaaaaattaggagcaattgacagttatagcagtgggctttctggaaacaatcagcctctatatcgagtttctactgacttttctcattttgatattgtagataaaagctatattaatattgcggtgtcttgggtggtgaagcgtcaaataccgcccactcaattagagtcaaataatgcaaaagtcatcacgaatgcaggatctcagctcaattgtcgaattgctttcaagcagccgattgatcaaaaaactaaaaagatggatgcgattgtgaatgcctcaagtgaagcaatgactcaaattattaatacggtttcttcttcaattgtggcgctagattcaaataaaaagatgaacatcaataacggtatatgttcatcttaa

SEQ ID NO: 42511 - DNA, 1701 bp, Acinetobacter baumannii
atgattccattaatcccagtcaataaaagaacaatgagtatgtctgaaaacaaaacaaccagtgagacctcagatcatcatgaaacagatgttgaactggaaaacatgaatgatttaccagaaccccaagaaaagaaaaatcggtggaagcctctactaatctggattattccacttattgcgctgctgattgcgctttctttggcggtgaaagcattactttctaatggaccaaccattgaagtatcttttcgtaccgccgaaggtttagtcgcaggtaaaacaacagtgcgctataagcaggtagacattggggtggtacggcaaatcgatcttgcagaagaccgatctcatattattgcgcgtattgatttacgtaaggatgcaagcaattttgctgctcaagattcacggttctgggtagtgcgtccacggattgggacaagtggggtttcaggcatcgacactttattgtcgggttcatatattgaagtagatggcgggaaatcacccgagaaaaaacttgaattcacaggtctggaaataccgccagtaattacgtccgatgtgccgggtaaagagtttttcttgaaagccgatgatttgggatctttagatattggttcgccaatttattaccgaagaattaacgtaggacaaattacagcttataagctatctgatgacggtaaaagcgtagaacttcagacgtttattcgtgcgccgtacgataaatttgtaacgactgacacacgtttctggcaggcaagtggtattgatgtgacattaaatgcttcaggctttaacttagatactcaatcgcttgcaagtattgtggctggtggtattgcgtttggtttccctgaaaactcaaatgcgactgtcgctgctaacaagagccgttttaatctttgggactcaaaagctgaagcattaaaagagccggatggtctaccgcgtggcgtgattatgtactttgatcactcattacgtggtttggcggtgggtgcgccaattgacttcatgggtattgaaattggtagcattaaatcaattaatgcagagttttataacaactataagcagattcgcatgcgtgttgaggcagtgatttatccttcacgtgttgaaaacggccaagcactcaatccaaatagcgacattttcaaagattttgttgagcatggatggcgtgcccaaatgagaaccggcaacctcttaacgggtcaaaactatattgctttagacaagttccctaaagcaaaacctgcaactctacaaatcttgaatgatggccgtgtggtaattccaaccactgcaacagagttaagtggtttacaggcacaggtttcccaaattgctgataaattaacgaaattcccactagtcgaaattgggcaggatgttcgcaaaacacttaagaatatgaatacagccattgagtctaccgacaagctggttaaacagttagatggtaaagttgcccctggtttacaagcaaccttagacgatgttcgtaaaactgtaagatcttccgagtctattttgtcgagcgatgcgccgttacaacaagatgtacgtaaagcactacaacaaatgactcgtgcggctgcgtcattacagttaatggcagactatattgaacaacatcctgaatctattattcgtggtaagagaccagaggccaacgatgaaaaataa

SEQ ID NO: 42512 - DNA, 807 bp, Acinetobacter baumannii
atggcaaaaataaaaaatgtgacttctgaaaaaatcacaaataccaatatgattttaaaacaatatccaagagccaaagatctttcactgatattgtgtcattgctgtggcttattgaattcttcaaaagtaaataaagctgatgctcataaaaaccaaattctccgctgtgttagatgccatagcgttttacacgagcgtaagccgggaagtttaaatcgtaccttcgctttagtggtggctgcgaccattctctatattcctgcaaatgtccttcctatgacggtaactgactctcttttgggccgtcagcaagataccatcatgagtggggtcatttacttttggcaaagtggagactatttggtgtcggtggtcatttttatggcgagtatttttattccgatgctaaagcttattattttgtatttcctgttgttggttgtatatatacagtcatccgcggcgtggaagtttgcaccggagcaatgcattaaactctaccgcattgttgagtttgtagggcgctggtccatgatagatgtgtttgtggtagccttacttaccgctctcattcaaattcaatcacttgcaactattttagcgggaccgggttcaattgcttttggtgcggttgtggttttaaccatgtttgcatctttaagttttgacccacgtattatttgggataatttttatgcatctcaaaatacaaataaacctaaccgtgtttcttcggaaaaaaacacaattattcaggcagaacattcgcctttgaataatgattccattaatcccagtcaataa

SEQ ID NO: 42513 - DNA, 618 bp, Acinetobacter baumannii
atgaagcttaaagaattagcaggttgtgaggagtgcgataccgtctatcgtagagtcccgcttgcttacggaaaaagagcttattgtgtctgctgtggtgcagagctttatcggcataccaagccttttactacattgttagctctaattttaacggccctcattgtatttgttattgccaatagctttcccattgtcaaaattgaactgcaaggcaacatatccgaaaccactttactgggcgccgtgtgggtaatgtttcattacgatagggcatttgtcggtgttcttattttaattactacattcattgtgccacttacgtatttgttattgctgggctatgtactcggtacggtcagtatattaaagaaatgcccccaatttttagtcggtgccttgcgaacactttattttatgagagtgtggggaatggttgaggtgttcctgattggaattctggttacgcttgtaaagctaatgggcatggttcttgttattccggaaattgctctatgggcatttgcggtcttgagcctattaatggtttatattacttccgtaaaggtgagtgatatatggaatgaaattgataggtcacagccatggcaaaaataa

SEQ ID NO: 42514 - DNA, 891 bp, Acinetobacter baumannii
gtggatgatcatcatttaaaaagaaaagtcggcacgcttgaaatggtcatagctatgctgctttcaggtagtattggtctatttgtgattaagtcgggtcaatcacccgttaatattgtatttttccgttgccttatttcagcgctatgtttaataccgatttgttacttctatggtcattttagaaaagtatacttcggtaaaaaagaactgtttttaatggtgacttcgggccttctaattatttttaactgggttctactgtttgccgcttttcctaaaacttctatttctttagcgacgattgtttatcacgtgaacccgtttgtcattttatttttaggggctttggtctttcacgaaaagctcaataagaatgatgtgctatggaccatcgttgcttttatagggctaatcgtgattataggcttaggcagtgcttcggtgaactctaatgagttagtcggcttggggctggttcttattgccacaacactttattcaatatcggtattaatcactaaaaaattaagtaatacaccgccgttattaattgtatttatacaaaccctgagcggggccattgccatgactccatttatgtcggtttttgaaaacccgccgatcggtcaacaatggctgtttgtggtcggattgggagttttgcataccgcatttctctactatttaatgtattcggcaattaagaaaatacctttaaataatattgcgatcttatcttttatttatccaatatcgaccatagtgattgattatttcttctttgatcatgtgttgacgagtactcaagttttaggtgcaggtttaattttattaggcgtattgggtgtgaagttgcattggaatatttttgctttgaagaacgcctaa

SEQ ID NO: 42515 - DNA, 555 bp, Acinetobacter baumannii
atgaaaaatttaggcgcttcatttagagcattacacgtgcttcacatagcatcggatttatttaaacaatacgggtttcataaggttggggtagaccgaattattagtgaaactaaaatttccaaagctactttttataactactttcattcaaaagaacgtctgattgaaatgtgcctcttacttcaaaaagatactttaatggaaaaagtaagagtggagatagaaacgactcactattcaactttcgctcataaactcaggcaaatctatctcttacatgccaatttaaagagcgcttattatctgttgtttaaagcaatttttgaaattaaaacaagttatcctacagcttaccaaacggcaatacgctatagacgatggattaaaaatgaaattttctgcctgcttatggaaactaaaaaagccgtttcatatgccgaagcggaaatttttatatttatgatagatgcggcaattttaggacttttgacttcagacagagtcgaagaacaaaccaagttgttagattattttttagtgagggttaactaa

SEQ ID NO: 42516 - DNA, 510 bp, Acinetobacter baumannii
atgactttaaatacagtaacgctctctactcaaaggcttaccctaaaaccatttaccgcaaatgatgcagatgaaacctataactgtattactcctacgctcacacgctatatggcttgggatcctcaaccaaggcatgaattcgatcaaacttggagtaattggctaaagaactttgctcttggcactgaaattatttttgttattagagagacatcttctcaagtatttataggccttgttggtctacatcgtatgcaaacgagtaactcagagttaggcatatggatacgcgaagattaccactatcatgggtatggtagagaagctgtaactgctgtagcaaagtgggcaattgactttgttaagccagacttttttgtttatcccgtcgctgaagaaaactacccaagtcgaaaaattgctgaatctttagggggcaaagtagtttcaaaattttctggtcccaaatacgaagttgtaacctatgagattcctgttagcttttaa

SEQ ID NO: 42517 - DNA, 759 bp, Acinetobacter baumannii
atgaaaaatataagaattggttcatatcactggatgcaaactacaaatggtcagctcagcttcaaagaaaaaattaaattaattcaaaaaattatggtacctaacatcctgagttctataaaaataaattattatcgatttcaaactggtaacgattttgatatagggcaaattgtaataccagatactcaaatgattaaaatcgcacttgaggaactagaatcaaaagcaagtatatctatttacaatcattcatggcgaacatacttctggggagccgccctaggtcatttacaaaaccagcagtttgaccctgagttactcttattagcttcactttttcatgatattggtctaactgagcaacatatgcatagtaaaggctgtcaatgttttacatatgagagcgctaaacaatttgagcaaaaggcgaaagaatataactttgatgacaagaaaagcgaagtgattaaagatgctatatgtctacacatgaatggatatatagaggattctgatccacctgaagttgttctattacagcaaggtgcttcttgtgatgtaattagtgacaaccaatataagctccccttatcttttagaaatgaaattttagaaaaatatcctagaaatcaatttaataaagaatttattaaacttattaatttagagagaaaaaatgttccgagttcgcgaacaggcttattatatgaccttggattacccctcatgattaaatcaaatttatataatgaataa

SEQ ID NO: 42518 - DNA, 621 bp, Acinetobacter baumannii
atgaatgattcagttaagtggttagaaattctaaataaaattactggtattgctcaaacaggcttacattactcaaaagatgtttatgataaagaacgttatgagcaacttttagggcatattgaacatctattagaactaaaagaaattaatacagaaaattttattaataatgttcttcaagatgtgggttatgcgactcccaaactagatgttagagcagttgtgtttaaagaaaataaattgttattagcaaaagaaattggcgatggacgctggtctgttcccggtggttgggctgatgtaggctactcagcatcggaaaatgcagaaaaagaagttttagaagagacaggattgcgggttaaagccattaaattattagctttaactgatagaaccaagcaccctcatcctccaatgtttttacatgtgtataaggcatttttctggtgcgaaatcattgatggcgaacttaccccgagtattgaaacaccagaagttggcttctttggtagagatgaattacccccgatttctacagcacgtgtaactgaagaacagattcaacatttttttgattatttagagtcaatccctgaagcaacgaagtttgattaa

SEQ ID NO: 42519 - DNA, 1488 bp, Acinetobacter baumannii
atgcgcacatctgaaaaacaagtaaaacctattgagattgatgatatcaatatcatcgagaacgaaaaaaccaaaaaagcgattactgcagctgcattaggtaatgcaattgaatggtttgatttcggcgtttatggttatgtggcatacgttctcggtaaagtatttttcccagatgcttcaccaagcgtgcagatgattgccgcgcttgctacattttcagtaccttttattttccgtccattaggtggtcttttctttggacatttaggtgacaaatacggacgtcaaaaagttctggccattactgtcattattatgtccatcagtacctttggtattggccttattccatcttatgaaacaatcggtttatgggcacctattcttttactcatcgtaaaaattgtacaaggcttctccattggtggtgaatactcaggtgctgcgatttttgtagctgaatattctccagaccgaaaacgtggctttatgggaagctggcttgattttggatcgatagccggctttgtacttggggctgcaactgtcgccttgatcacacacgccgtgggtgaggcacgttttgccgagtggggttggcgtattccattctttctcgctctaccactgggcataatcggtttatatttacgaaaccgccttgaagaaacccctgtatatcaacagcattcagagcaacaagcacaaaaaagcaaaccccaaaaatttagtttcaaagaaatttttgttaaacataagcgtagtttattggtgtgcattggtctcgtaatcagcactaacgttacttattacatgttgctaacttatttaccaagctatttttcgcataacttaggctattcagaagcacatggtgcacttattatcattgcggttatggttggcatgctatttgtacaacctgtgattggttatttgagtgataagttcggacgccgcccatttatttttattggaagcttttctcttattttcttgtcctatcctgccttcgtattacttaactctggggtaaattatcaaatttttataggcttacttattcttgctttatctctcaatatgtctatcggagtgatggcatcaactttacctgccctatttccaactgaaatccgttatagcgctttaggtattgcctttaatttctcagtagttatcgctggtttaaccccaactcttaccgcaacgctggttgaaactacccataatctgatggttccagcctattacttgatgatttgcggggtggtaggtattgctactgcaatgtatttaaaggaaacagccaataagcctttaattgggggcgtgcctattgctcacaatatagaggaagcacaagagttacttgaagaatttcatgaaactattgaacagaaaattgaaaatattgatcagaaaattcaggagcttcaacaaaaacgtcaaaaacttgctgataaacaccctgatatagcatga

SEQ ID NO: 42520 - DNA, 237 bp, Acinetobacter baumannii
atgatggaacagcaaactttattacaagaactgaactcactcattgaatactattcaaaaagaaccgattgcccgcctagtcgaatacgcatcggctatagagcttatgcaaaactcatgcagtgcccgccttttgccgatgaagtaataaactcggcactcgatccaaataagcggaaatataaaaagataaaaattaaaattaccaaagatgatgatcagttagaaattgaatag

SEQ ID NO: 42521 - DNA, 1020 bp, Acinetobacter baumannii
atgaatataaaaacaaaaaaattactcagacatttatgtatattctctggactgatgttgacaggaaatttggctcatgctgcatgtagcgtgagcgcttcaggtacatcctctatttcggtcccgtctatttacttaatggaaaacggtgaaaactcatcacagtttaattcgggtttgtcatgtacgggttttagcttggctttggcgaacatgacctatttaaaatatcgggttgagcaaatgtcgaattcatttaccaatgctcagaccggagaaaaacttaacgccattattttagacagtaacaatgaaatcattagtttaggtcaagaaaaagatatgagtagctttacgctggtcaatctttttagcgggcctgatggcaatttacctttctacatacggcttccggctgggcaaagtgtatcgccgggtgtttatcgagccgactcaccgttaaaagtaaaatggttctattctgtgcccgcagttgcgattgtgggaatcggtgccttctttgagagccctgggtttaaacgtggggtattaggtattggttttaactggggaagtggggcagactcgcttggttcactctcaattactgtactgccagactgccgaattttagctcaagacgtaaactttggtacggcagcatttgcttccaagcttgagcctgttcaatcttctatgggaatacgttgttcggtaaatactccatattatgtgagtttaaataatggactttccccgcaaaatggcaaccaacgagccatgaagtcgcaaacgggaaatacatatttaaaatacgatattttcaagaattcatcgaatgaccgatggggaagcggtaacgagcgttggtcgagtttaaatgcaacgattaacccaggcgtacataatggagtaacgcagcagaattatgtgtttaccacaaaaattgtggatgaaaacgcagacacgataccagcgggaacttatcaagatacggtcacggtacaagtcgagttttaa

SEQ ID NO: 42522 - DNA, 2499 bp, Acinetobacter baumannii
atgatccttcggcataataatttatgcaaaagtattttgctgattttattgtcgggtggatgtttaaatattccaaatactgtgtttgcaggcgatttgcctccaccaccaagagacattaatgaaattaatcaactttttaaactgtatctcgatttggttgtgaaccaatattcggtccagcaagttgtgcctgttattgtgaaaaatgatgagtacttcatacaaaaaaagaagctgattgatgaattagaaattaacatccctcaagagttattaacaaacactgacacatctttatctaatcaagatattttgaccttggggtttagtggtgatgcgagtgattggatatctttagataaattaaaagatgtaagctatgaatatcaatcttcgaaccaatactttaagctcaattttccgcccgcttggatgcccactcaagttttgggtaaagactcatggtataagccggaagtcgctcagtctggtatagggctgctcaataactatgatttttatacatatagaccctatcaaggcggttcaaccagtagtttatttactgagcagcgttttttctctccgttaggggtcattaaaaactctggtgtctatgtcaaaaaccaatacaaaaatgaaggtaacgccgagtctgtagataatgacggctatcgtcgttatgacacatcttggcagtttgataaccaaaagaatgctacatcttttttactgggtgacattattaccggtagtaaaacgacgtggggaagttctgttcgactaggtggttttcaggtacagagaaactattcaacccgaccggatttaattacctatccattgccacaatttattgggcaagccgcgttgccaagtacagtcgacttaattattaatgggcaaaaaaccagctcaacagaagtacagtctggaccgtttattttaaataatgttccttttattaacggtaaaggggaagccgttgtggttacgactgatgcagtcgggcgtcaagtcacaacatcggtcccattttatatttctaatactttgctcaagcccggcttatttgattactcattgtctttaggaaaaattcgagaagactacggacttaagaatttttcttatggaaaatttgcaagtgcagctgatgcccgttatggggtaaatgactggctgactgtagaaggacgcaccgaactttcttcagatttacagttatggggtgctgggtctgtactcaagcttgcaaatttaggtgtgctgagtgcctcttttacccaaagtaaagccgacaaatctatgtctgaagatcgaacgaaagacttggaaggtaaccaatatacagttggatacagctataaccgtaatcggtttggttttagcattaaccataaccaacgtgatgatgaatatactgacctttcacggctgcaatatagcaatttaatttcagtaaatagtaataaaagcttaacggccaatacttattttgcgaccaaaaactcaggaacttttggcgtcggttatatcaataccaaggcgaatgactttaaaaatcgcttcttaaatttgtcttgggcgcctgttttaccgacttatatgaatggcgtgactgtttcattaagtgccaaccgtgatttcatcgaaaaagaatggagtgctgcatttcagctttcgataccgttgtttcagcgaaacgcgactgttaactcaggttatgcgtttaataagcagggcgatactggctaccttaacttcaaccgctctgttccgtctgaaggtggttttggtgtcgatttaacccgacgctttaatgaaaatagtgaagatttaaatcaggcacgcgtcaattaccgcaacagttatattaatactgactttggtctgtctggaaaccatgactataactactggtttggcctatccggttccctaatttatatggcaggtgatttatttgcttcaaaccgattaggtgaatcttttgcattgatcgatacaaaccaagtgcctgatgttttggtcagatacgaaaacagtttaattggccgcagtaataaaaaaggccatatttttgtgccatcggtaacaccttattattcgggtaaatacagcgtcgacccaatcgacttaccttcaaactttacaatcacacaagttgaacaacggatagcggctaaacgcggttcgggcgttgtgattaagttccctgttcatcagtctatttctgccaatgtctatttgactcaagcagatggcaaacctatgccggtagggtctgtagtacatagagctgatcaagagtcttcttatgtgggaatggatggcattgtctatttagaaaatttaaaaccgaataacaccgtaacggttcagcgttcggatcaaaatatttgtaaagcagatttttctgtagatgtagaacaagccaagcagcagattgtggtggttaaacctgttacttgtcacgaggtatctttgccatga

SEQ ID NO: 42523 - DNA, 834 bp, Acinetobacter baumannii
atggtgatttgtatgaacaattctgcatttattaaaaatggcattttaaaatcttttttatttgcaagtacattatcacttgttacacctgtgatggcacaagcaacttttctaatttggccgatttatccaaaaatagaagccaatgaaaaggcaactgcggtttggcttcaaaatacgggtaagaccgatgcgatggtgcaaattcgggtgtttaaatggaatcaagatggcttaaaagataactatagtgagcaatcagaaattataccaagcccgcctgtagccaaaattaaagcaggcgagaagcatatgcttcgcttaaccaaaagcgccaatttgccggatggcaaagagcagtcatatcgtctgattgtagatgagttaccgattcgactttctgatggcaacgagcaagatgcttctaaagtaagtttccaaatgcgttactcaattccattgtttgcttatgggaaaggaattggcagtggattaaccgaagaaagtcaaaaacttaatgcaaaaaatgctttagcaaaaccggttttacagtggtcagttcgtaacaatcaacaaggccagcctgagctaaatcttaaaaataatggtcagaagtttgcgcgtctttcggcactgaaaacttcaaaaacaggtaatgatatctctttaggaaaggctgcttttggctatgttttatcaaatagcactgtaaagtttgctattgatcagtcaacggcacatgagttgtcaaaaacatctaaaatttatggtgtggacagttctggtattaaacaagaattgatcgaaatcaccaaaatggaggatccatcatga

SEQ ID NO: 42524 - DNA, 519 bp, Acinetobacter baumannii
atgaaatacttatattttaaagcaatatttttgctatctgttagtcaatttatatatgcagcagatcctcagctcaattcaagttttaaagtacaagctaaaattgaaaatgggtgttcaatagataatattgagcaaaacatagattttggtaaatactctgctttatcaaaaaataaagtggtgactaatattattaatagcaaaggttcttggaatattcgttgtacggaaagtttgcctgtaagtatttctatagatggtggtgaaaatcttcaaaataatacaagacgtatgaagaatagttcatccactaattatttatcttacaaactgtataactctagcagtttatctaatgaatatattgtaggtaataaatatttattgcctgctacaacacctacaaaccgtctggcaaattttgaaatatatggtgtcgttgatttagaaaataataatgaaccccatgcggccggaatttataaagatactgtttcaataatgattacatggtga

SEQ ID NO: 42525 - DNA, 549 bp, Acinetobacter baumannii
atgatattcaatcgtggttcggcatttataatttcttattttttaatttctttagtaaatgcgggtgaaattggagctaaattaactagtcaaattgaattattgccttcttgttctgttaataataatgttgtagaaaataatgcaacaaatttaaattttggaactatagattttggtgaagctaccacagcttttaaaggggttttagacgctagtttagttaataatggtaattcaggttttcagatcgagtgtgctggtatttcaactgtaaaaataatatttggatcaggaaataatgatagtaatattccagcttcattttcacaaaattattatcatgctttaagtaatggtagagattttattgcttataacttgctctatggtttaaataaacaagtcattaaagcaaatgaagcttttattcttaatgatatgaataataaaaagaatatcgatatttttggtcaagcaacccatgatggtagtcgtatatctaagggtgaatataaagatatagtaccaattacgattgagttttaa

SEQ ID NO: 42526 - DNA, 537 bp, Acinetobacter baumannii
atgaaaaacattcagaaatcacttcttgcagcattaatagttgctggttatgcggtaaatactcaagcagctgttactggtcaggttgacgttaaattaaatatctcaacaggctgtactgtaggtggtagtcaaactgaaggaaatatgaacaagtttggtactttagattttggtaaaacttccggtacttggaacaacgtattaacagctgaagttgcttcagcggcaacaggtggcaatatttctgtgacttgtgacggaacagatcctgttgattttacagtcgcaattgacggtggtgaacgtacagaccgcactttaaaaaatactgcttctgctgatgtagttgcatataacgtttatcgcgatgctgcacgtacaaacctatatgttgtaaaccaaccacaacagttcactacagtaagtggccaagctactgctgtaccaattttcggtgcaattgctccaaacacaggtacaccaaaagcacaaggcgattataaagatactctattagtcactgtaaatttctaa

SEQ ID NO: 42527 - DNA, 639 bp, Acinetobacter baumannii
atgatcaaaattgatacctttgatactatgcaaataaagaagtcctttaccactctaaaagggcaagaaagaataaagcagatcttaagaaatgctgaaatagtttttcttactaaaggttattccggatttagtatgagaggagttgcaactcaatcaaatattagtttaagtactttgcaacattattttcaaaataaagatattttattaaaagctttacttaataaattaatttgtgactatatacagcgtattgaaattttaatcaatttgaatgcaaatgaaccacctttaattcggtttatgaatattatcaccaatataatttatgaaatagagcaaccgatcattacaaatgcatttaaagagtttttctctatttcagatcatttaccctatgtatatgaagctttgtcaatcatacaaaagtataatctcgaacttatctataaaatcatcctccccattcataataaaatatcttcagaagaatataaagaaagagccattattataatcactcaacttaatggatatttagttcaacattcgaacaaaaatacagatgaaagttataaagaatttttaagaagtatactgttaaaaaatatattaagattagtcagtgaaccataa

SEQ ID NO: 42528 - DNA, 201 bp, Acinetobacter baumannii
atgagttttatgattgtttcgaacaactttgctgttccttactatttaaatgtgaggaaagaaaagggaatgacagcttattattgggcaactcatcaatctcagttagctctatttgactcttacgaattggcttatcgcttttactttccatctcgacatattttgattcgaagtgaaattaaagctttcgctcagtaa

SEQ ID NO: 42529 - DNA, 924 bp, Acinetobacter baumannii
atgagtgaaaaattgcaaaaagtattagcgcgaatcggattaggttctcgccgatatatggaagaggttattgccgcaggacgcgtgagtgtgaacggccgcgttgcccaagttggcgagcgcattgaaccaggcgatgaattacgcattgatggccgtaaagttcagttccagatcgaagatgaaattcgtcgtcgtgtactgatttattataaaccagaaggtgaaatctgttcacgtaatgaccctgaaaagcgtccaaccgtatttgatcatttaccacaaattgcaaatgaccgttgggtaatggtaggccgtctagatattaacagtacaggtttattactttttacaaacgatggcgagcttgctaaccgcttaatgcatccatctaatgaaattgaacgtgaatacgctgtacgtgtaatgggtgaagtaacaccacaattacgtcaaaacatggtcaatggtgtagagcttgaagatggccctgccaaattcgaatctttctctgaaattggtggtgaaggtattaaccgctggtatcaagttgtagtgaaagaaggccgtaatcgtgaagtacgccgtatttttgaatcacaaggccttaaagtaagccgcttattgcgtactcgctacggtacagtcattttaccacgcgaattacgtactggtcgctggatggaactcgacaaaactgacatcgataacttggcaaaatctgttgagttaaaaccacgtcaaggtacaggcttatttggtatggcaaaacgtcgcaccgaacgtatgacagaaaagccaatggcagcacgccgtggtggttacttacgtcagcaacgtcgtgatgatgaaaaagaagcaccagctaacacaggtaatcagcgcaaatcgactggttttaaccgtggatttaaaaagttctaa

SEQ ID NO: 42530 - DNA, 597 bp, Acinetobacter baumannii
atgagcagttttgaacaaaataataatgatttgtcattagccgatattcatcatgaagttttattacagcttgaagccattatttttgcgagtgaagcgcctgtctcaattgcccgtttaaaagaagcatttaataatcaatataacaaacaacagcttcgtcagcttttacaacagcttgcccttttacaacatggccgttccattgagttgattgaaactgcgcagggctttcgttttcaggtaagatccaaatatcgcaatatcattgcgcagatttggccagagcgaccaacaaaactgtcgccatcattactagaaacgttggctgtcattgcgtatcatcaaccggtcacacgtgctgatattgaacaaattcgtggtgtatctaataatagtcagattctcagaacgctatttgactggaactggattaaagaagccggttttagagatttacccggaagacctgcgttgctaattacaacgcctcaatttctgaatgcttttggtctagcctctctaggccaattgcctcccctgcagaacgccaaggaagcatttatggctctcgatgcaaatgcaccgaagtcataa

SEQ ID NO: 42531 - DNA, 768 bp, Acinetobacter baumannii
atggaagacgttccacacatccgtgttttagatgagtggcacgatacgattcctgaggatctttatattcctccagctgcctttgagattttgctcgaacagtttgaaggaccactcgactttttaatttatctgattcaaaaaaacggttttgatctcatccagcttgatattgctcctattgcaactcaatatttgacttatatggatagtatgaaatccttaaacattgagctgactgccgactatatggtcatggctgctttattggctgatttgaaatctcgcttacttttacctaagcctactgtagtaagcatcgaaaaagatcctaaacaagatcttattgatcgactcgaaacttatttacgcattaaacaagccgctgaacgtttaggccaaatgccagttcttgaccgtgatacattcagtgccaatgtaagcttaggtcatattgcacctgtttatgaaggatatgatgtttcagcattacacgatgctttgttctgtgtatttaaccgtccggaacctgtaacacacacaattgcgcaagagcctgtaatgttagaagaacgtattgcttatattgaagagaaattagagtcaggcgacgtgttaagttttaaagaattacttaatccccaacaaggccgtatgggaatggttgtaacttttatggctgttttagaattgacccgacaacaaaagattaagattattgctacaggagttgaagctccactagctattcaagggtcttcaatatga

SEQ ID NO: 42532 - DNA, 618 bp, Acinetobacter baumannii
atgctgcatttacatgtacatccggaaaatccacagcaacgcctcattgagcaagcggttgagcgtattcgtgccggagatgttgtggtctaccctaccgatgctgcctatgcaatcggatgccagattggtaataaaaatgcgatggaacggattgcccagattcgtggtttaggtcctaagcatcaatatgcaattatgtgttgcgatttatcagatatcgcgacttatgccaaagttgataatgcgacgtaccgtttattaaaggcaaatacaccagccatcactactttcattttaccggcaaccagtgaagttccacgcaggttaatgcaccctaaaaagaaaacgattggtctacgtattccaagcaatccaatttgtcaggctttattaaaagagctcggtgaacctttactcaccagtacattaattttaccggggcaagaagatccactagatgatccttacgatattgaaaatcaattagctaagcgtattgatgtctttattgatggcggttttggtactttaacaaccacgagtattgtcgatttatcaggtgagcatcctgaaattattcgtcgtggtgtcggtgatgtaagtgcttttgaataa

SEQ ID NO: 42533 - DNA, 576 bp, Acinetobacter baumannii
atggtgcaactctcaccatggccaagctcaaaattagagtctgagcaagttgattggcttattttacactttaatcactggttttcccaccataatgtgacattagttcgtggagaatttgaaccagaatatttcccagccaatgagcatgagccagcaaaaattcaatttgctcatggttttttcaatagtgctcttcacgaaattagccattggacaattgcaggtgcaaaacgtcgcctattacccgatttaggttattggtatgcgccagatggcagaactaaagaacagcaagatttatttgaacaagtagaaatcaaacctcaagccattgaatggttatttgcacagtcttttggcagaaaattcagagtctcgctagataaccttacgggcgatggtggagatggcagaaagtttaaagataatgtttatgcccaagttcaacgttacttttctggtgaagcaaagctgcctgccgatgcagcaagattcattgaatgtatttgccaatgtacgcgagcaggtgcagcattacaattaaatgaatttaaacgtgaactccttgattaa

SEQ ID NO: 42534 - DNA, 561 bp, Acinetobacter baumannii
atgtcagcaaatacctttccggcacagattgagccgtttaaatgggctgaacaaggctttacatggtcaggtcaactgccattgtctcgctttgctcgtattgctcgtgaagctgttgggtcaattgataaccaattgatcaacatagactgtaagctatcaatggatgcctatcatcgcattgtgtggttagatggtcacatggaaacaaaagttccaatggagtgccaacgttgtttggaacctgttgaaatgccaattgtttctgactttcatattgcacttgtagatgatgagtcactgatagagcgcttggatgaggatgctgatttcatcgttttaggtgaaagtgagtcttcgacaaaaggtgattttgatacacctgcctcgatcaacttactcgcattactagaagatgaactgttattgttgatgcctttatctcccaagcatgatgcttgtgaacataaacatcaacctaccattcagaacgttgtcgaagagaaacgggataatccgtttgatgttttggcaggtttgaagggtaaacttaactcataa

SEQ ID NO: 42535 - DNA, 186 bp, Acinetobacter baumannii
atggccgttcagcaaaaccgtaaaagtcgctctcgccgtgacatgcgccgttcacatgacgctttaaccgagaatgcattaacagtagaccaagcaactggtgaaactcatcgtcgtcaccacgtgactaaagacggtttctaccgtggtcgccaattattcgctaaagcagctgatgctgaataa

SEQ ID NO: 42536 - DNA, 987 bp, Acinetobacter baumannii
atgtctgctaaacgtcttgaacaagtagctttagccacaaaaactgcatttgtgtttccaggtcaaggttcacaaaaagttggtatgctcgctgaactcgcagaacagtttagtggagttgggcaaacttttgccgaagcttcagacgcgctaggatttgatctttggcacattgcacaaagtggtgaaggtttagaccaaacagaaaatacccaacctgtattattaactgccagtattgctttatggcgtttatggttagatttaggtggtttagctcctaaataccttgcaggtcactctttaggtgaatacagcgctttagttgcagcaggttcaatgagtttggcggatgcagttaagttagttaatttgcgtggaaaactcatgcaaaatgctgttcctcaaggggaaggcgctatggctgctattcttggtttagctgatgataaagtagttgaattgtgccagagcgtatctgcatcaggccaaggttcagttgaagcagcaaactataattcacaaggtcaagttgtgattgctggtagtactgcatctgtacagcaagttatggcattggcaaaagaacaatctgctaaagcaattgctttaccggtttctgttccatcacattgttcattgatgaagccggcagcagaaaaatttgcagaagctttggaacaaactgccattgagctacctaccattcctgtaatacaaaatgtcaacgcgggaattgctaccgatgttgctcaattacgtcaggctttaacagcacaattgtaccagtctgtacaatggacacgtaccatgcagtctctacaagaccaaggtattcagtacattgttgagtgtggtccaggtacagtattgagtaatctcgcaaagcgtttaccaaatattgaaaaagctttttctattgatagtaagagcaaaatggaagatgccctaaatgctgttttagtggcagaaggaaaaattgcatga

SEQ ID NO: 42537 - DNA, 735 bp, Acinetobacter baumannii
atgacacaagaacgcaaagttgcattagtaacgggcgcgagtcggggcattggcgctgcaattgcccagcaacttattcaagacggttattttgtcgtaggtactgcgacttctgaatctggtgcacaaaagctaactgatagctttggtgaacaaggtgcaggtttggctctcgatgtgcgtaatctcgatgagattgaagcagtcgtgtctcatattgaacagaactatggtcctgtacttgttctcgttaacaatgcaggtattacgaaagacaatttgttgcttcgtatgtcggaagatgattgggatgacatcctcaatatccaccttaaagccgtttatcgtttatctaaacgtgtgcttaagggtatgacgaaagcacgttttggtcgaattattaatatcagttctgttgtagctcactttgcaaacccaggccaagcgaattattctgctgctaaagcaggtattgaagcatttagccgtagtcttgcaaaagagatgggtagccgccaaatcactgtaaacagtgtggcaccaggttttattgcaacagaaatgacagatgcacttagtgaagacattcgcaaaaaaatgagtgatcaagtggctttaaatcgcttaggtgagccacaagatatcgcaaatgcggtgagtttccttgcaagtgataaagcaggttacattaccggtacggtattacatgtaaatggtggtttatacatggcctaa

SEQ ID NO: 42538 - DNA, 237 bp, Acinetobacter baumannii
gtgagcgatatcgaacaacgcgttaaacaagcggttgcagaacaacttggtcttaaagctgaagagattaaaaacgaagcatctttcatggatgacttgggtgctgactctttagatttagttgaacttgttatgtctttcgaaaatgacttcgacatcactatccctgatgaagattcaaacgaaatcactacagttcaatctgcaattgactatgtaactaaaaaacttggttaa

SEQ ID NO: 42539 - DNA, 474 bp, Acinetobacter baumannii
atgggtctttttgattttgtaaaaggtattggtaagaaaaataccgcaccagcagaaccacaagcagctccagcaacaccagcagaaccttctgcacaagaaattgcgaataaattattgggattgattaaaagcttaggccttggggtggaaggcttatctgtaacatataatggctcaactgacactgctattattaaagggcaagtccaaagccaagcagataaagaaaaaatcattcttattgtgggtaatgtagatcatgtggcacaagtagatgaccagatgactgttgcaactcctgagccagaaagcaaattttatacagtgaaatctggtgataatctttcaaagattgcaaaagaattttatggtgatgccaatcaatatcaaaaaatctttgaagcgaataaaccaatgctgaaagatccagatgagatttttccaggacaagttttacgtattcctcaataa

SEQ ID NO: 42540 - DNA, 768 bp, Acinetobacter baumannii
gtgcgtccaaccgtactttgtttctcgggtttagacccttcaggtggtgcaggtttacaagccgatattgaagcgattggacaaagtggtgcacatgcagcaattgcatgtacagccctcaccattcagaattctcaacaagtatttggctttgaagcaacctcaaaagaactattattagcccaagcaaatgctgttgtaggcgatttacccattaaatgtgttaagtctggcatgctaggcactactgataatattgcggctctagccgaatttttacgtgctcatcctgactatcaatatgtacttgatcctgttttagttgcaaacagtggcggttcgttaggagaccaaacaactttagttaaagcatttgtggagcttattcctctagcgacactcattactccaaatacagttgaattgcgcgctttaacaggcgttaccgatttagatcaagcaacccaaaagttatttgaaatgggtgccaaggccgtattggtgaaaggtggacacgaagatacacctaactttattaaaaatagtttatatattgatggcgagcttgcaacaagtagtacatgtccgcgccttgaaggtgaatatcatggctcaggttgttcattagcgagttttattgcaggtcgtttagctctaggtgactctttaaaaattgcagttcaacatgcagaaacatggttatttggtgtgttaaaaaatgctgaaacacctgtacccaatggacaaaagattccaaaacggttttaa

SEQ ID NO: 42541 - DNA, 675 bp, Acinetobacter baumannii
atggctataaaacatattttgattgatttagatggaaccttaacagaccctaaagttggtatccatacatcaattcgttatgcaatggataagttaggttatccattagctgccgatttaaatattgattggacgattggcccacctttaaaagcgtcattagcaaaattattagctactcaagatgatgcactagctgagcaagctttacttgcttaccgtgagcgtttctcggtgattggtttatttgaaaatgaagtatatccatctgttgcggaaacacttaaggccttaaaagcagaagggtatcatttgtttgttgctactgctaaaccaacgatttatgcaaaacgaattttagatcattttgatttaagccaatattttgtacaaatttacggtagtgaattaacgggtgagcggaccaataaagctgagcttatccattatattcttgaacgtgagcaattaaacccagaagaatgcttgatggtgggtgatcgtcaatatgatgttttaggcgcccgtcataatggtattgaagcggtagctgtgacttatggttatgggacaccagaagaacttactcaagcacaacctaaagcaaagattacaaaattttctgaacttttagattatgttgaagaacaggccgcacaaaagaaagtttcttaa

SEQ ID NO: 42542 - DNA, 660 bp, Acinetobacter baumannii
atgtctagtttaattcaaccagaactttttttctcagccctctctcctgctgagcaacgcattcaacaagcattagaagatatccgtcaaggcaaacctgtcttggtgatggatgacttcgatcgtgaaaatgaagcagatttaattgttgcagcagaaaccctaactgttgagaccatggcacgtatgattcgtgatggctcaggtatcgtatgtttatgccttactgaagagttagctgatcatcttgaacttccaccaatggtttctcaaaactcaagtcagtttcatactgcatttacagtgactattgaagctgctcaaggcgttaccactggtgtttctgctaaagaccgtgtaaccacaattaaaactgctattaaagatggtgctgttgcaagtgatcttaaccgtccaggccatgttttcccattacgcgcacgtaatggtggcgtacttacccgtcgaggtcatacggaggggactattgatctagcaagattagctggtttaaaacctgctggagtgttatgcgaattaaccaatccggatgggacaatggcatcaggaattcaagttttagcatatgctcaaactcatcatttaaccgtgattacaattgaagagcttgtacaatatcgtcaacaacacggtatttaa

SEQ ID NO: 42543 - DNA, 1782 bp, Acinetobacter baumannii
atgcatataagagattattatccttttaggaatactttatttattcagcatctccatattttcagttatgtatttatggcgctcagtattctgtacttaattgctgctaattggttgatgcttccagatagcattcaactcattattccacctgttatattacttattacagcttgggtgagtgtcaagaagactttaagtgagggagtaaggcaaactttacatggcatctgcggcttaatggtcggtttgagtttggctgtaattgggcaagtttatcaaactggtgcagacagttatttacttttcttgatttggactttgcttttattgccgtggctatatcgaccaaatattggaatctttgctttaatttgtattacaagccaactcaccctgtttttattttttaaacagactttctgggcagagaagtttccctatctttatctttttgctctaaatttattaagtcttgtgcaattttggatctgtcaaaagaaatatacggctttacgttttatttttattgcttggtttgctgttatttcaataacaggaatgattcaattcctatcaagtgaaaatttaccttatctgatctcggctttttttctaggaatcatcgctttttattatttttttaataaagatgatcagttgtgtgccagtttaatggctgctgttcttggtgtgacggctaccatatggcttgtggatggtattaatcaactatttaaagattctaatgagttcatctttttattgatcgcggggattatttttacttggtttgcactcattagttatttcttaatcaagattttccgtcaaagccgtttttatatcattcctttggcaattggtgcttggcttgctggtctagcgcttgcagcatttactttggtgttttgggatactatttccttaattattggaatcatctttgttgctgtagctataactttactaacaaaatcgcaaagttatttcatccggcagtttgcatattgtttatttgtgagtggacagactgcttttttatttcatcttggttctgaaacagatcaaattttatgggtattgattgcccagatctttattttatgtattagttattttcttaagcctcactggttctttattttaattcaaatgcttgcaacttatggtatagcagtaatctatctactacaaatggatcattcattatggtccttaaactctactcagacttatttaaatttagtcttacttaactatttggtttttagctcggtactactgataggaagtaaagcggtcgtatcgtataagcggagtatcttcttatgtacgctcgttgtaatttgggtgagttcattctttgatacctttataggattagcacttgttgattcggctgatcagtcactatggttcctttatgcattgccgtgcgtatggttattatgctttagttttttctttctctatcggcaacttcacggtataactttttttgcctttttagtttttggcatattacttattgcactcggctattttgaagtattcatcttatttgttattttgacatgggctttaaaaaataaagatcgcattgtttatggtgttacgctcgtagtatttgcctttgtgctttggcaactttattacagtttacaattaagttttttagctaaaagtgcatcaatcttggtgtcgggcattatattgctggctctatatgggctacttatgaaagaagctaaaattaattgtattgagggagaaaagtaa

SEQ ID NO: 42544 - DNA, 561 bp, Acinetobacter baumannii
atgaaaaagtatttctctcttatgcttgcaatagtcactgttttattttttgcaggtttagtgatgaaaaatgaatggcacctgcatcagagtaaaagtatttttattaagctgaaaccagttgatccccgttctattctacaaggagactacatggcgttggcttatgaattaaatttacaatctctcaaagctctgacaggaagtgaaagtgaagctttagatcaggtgatttttaatcatgcttctgttccagcaaaagttattttagattcacgaaatcgagtaatccgtactattttagaccctaactctttatctaatgagcagaatttaattttaaaaaatccggacaatcactatcaatctttgtacccagcttctcgcagtttcttatttgccgaaggcttagctcattgctatgagaaagcgaaatatgctgaatttaaggtaaatgcaaaaggagaggcgattttatttgatttacgtggagaagagctacagcctctaaattgtaagcagcaacagagctggtggaagggaactgccagaagtttataa

SEQ ID NO: 42545 - DNA, 381 bp, Acinetobacter baumannii
atgctatctcgtttattaaaatgcaaaattcaccgtgcagttgtaacccatgctgaacttcactatgaaggttcttgtgcaattgatggcgtattgatggacttagctggtattcgtgaatacgaagaaatccacgtttggaacgtaactaatggcaagcgcttcacaacttacgcaattcgtggtgaagataactctggcattatttcagtaaatggtggcgctgctcaccaagcagatgtgggcgatttagttattattgctacttttggtgatttcacagaagctgaagcaaatgcccataaaccacgcttggtatatgcaaacccagataatacagtcaatcacacagcgaactgtattccggtgcaagttgcctaa

SEQ ID NO: 42546 - DNA, 582 bp, Acinetobacter baumannii
gtgtcaaatatttcgctaattgttggtttgggcaatcctggttcagaatatgcccaaacccgccataatgcaggtttctggttcgtcgaacagcttgcagataaatatggcattacattaaaaaatgatccaaaatttcacggaatcagtggtcgtggtaatatagaagggcacgatgttcgcttacttctacctatgacttatatgaatcgttccggacaaagtgttgttcctttctcaaaattctatcaaattgctcctgaagcaattctgattgctcatgatgaacttgatatgaaccctggtgtaattcgcctcaaaacaggcggtggacacggcggtcataacggtttacgtgatattgtccctcatattggcccaaattttcatcgtttacgtattggtattggacatcctggctcaaaagaaagagtttctggacatgtgctcgggaaagcaccaagtagtgaacaaagcctgatggatggagcaattgatcatgctctctctaaagtaaagttacttgttcaagggcaagtaccacaggccatgaatcaaattaatgcgtataaaccagcttaa

SEQ ID NO: 42547 - DNA, 297 bp, Acinetobacter baumannii
atggcaaacttcgtattaaacgctcaagcgcgtgctgaagacaaacaagggaaaggtgcgagccgccgccttcgtcgcgaatctttagttccagctatcatctacggtggtaacgctgagcctgtagcagttactttagaacttcgtgagcttgtaaaagctttagaaagcaacgctttctttgaagaagttgttgaaatcaaagtaggtgacaaagttgaaaacgttaaaatccaagcgttacaacgtcacccagctaaaaacactcctatgcatgctgacttcaaacgcgcataa

SEQ ID NO: 42548 - DNA, 951 bp, Acinetobacter baumannii
atgcccaatcttgtcgtttttagtggaaatgctcatccacagttcgctcaaaaagtcgtaagtcacttacatatccctctaggtgctgcatcagtcggtcagttctctgatggtgaaatttcagtagaaattactgaaaatgttcgtggtaaagacgtatttatcgttcagcctacttgtgctccaaccaatgacaaccttatggaaatcttggttatggcagatgctttgcgtcgtgcaagtgctggtcgtattactgctgttatcccttattttggttatgctcgccaagaccgtcgtccacgttctgcacgtgtgccgatcacagcgaaagttgttgcagacatgcttaccactgttggtattgaccgtgtcgtaatgattgacttacatgctgaccaaatccagggcttcttcgatattccagtcgacaacatctacggtactcctgctttgcttgctgacttacgtcaacaacaacatgacaaccttatggtggtttctcctgacgttggcggtgttgtacgtgctcgtgccgttgctaaacagatgggtgatatcgatttagcaatcatcgacaaacgtcgtcaaaaagccaatgagtcgcaagttatgcacttgattggtgacgtaaaagatcgtgattgcgttatcgtagacgacatggttgatacagctggtacattgtgtaaagcagctgatgcacttaaacaattcggtgcacgtcgtgttgttgcttacgcaactcaccctgtactttcaggtaaagcaattgagaacttacgtaactctgttattgatgagttagttgtaactgacacaattcctctttctgaagaagcattaaacttaggtaaaattcgccaagtttctgttgctagcatggttgctgaaacgattcgtcgtattaataacgaagagtctatcagcgcgatgttcgatagtttataa

SEQ ID NO: 42549 - DNA, 579 bp, Acinetobacter baumannii
atgagcaaacttgcccaactgtgcacagcaatctgtggatcaagtgttttatttttaaccggttgtcagcattttactcaacctaaagctgcagttacccaccaagtacaagacgaaaaacacttcaatttacaaggtaaaattggagtacgcactccccaacaaactggtagtgcattctttacatggattcaacagcaagacaatttcgatatcgaattaagcggtattttaggtgttggaaaaacacaaattcagggtaaacctggtgaagttactctaaacagtgctaaaactggactgattacggctgcatctcctgaagaacttttagagcgtgcaactggctggcaagcaccaattactcatttaaccagttggattttagcgaaacctgcaactttaagtgctcaaattagtaaagataatgcaaatcgtgtgagccaactcatcgaagatggctggacagttaattttagttatgatggtgaacaaactctaccaaataaactggttttaaagcaggctcttgctgaagataaagaaaaccgtattacaatggtgatccaaaaccgctaa

SEQ ID NO: 42550 - DNA, 1710 bp, Acinetobacter baumannii
atgaatagccgtattaattttaacggtgcttcgataagacagtattctaccacattcttattgttaggtagcatgtcctcatatgtctatgcacgtccagtgcaagagacctatgccgtgcattcatttgatcaggctttacagcagagtatggttgctgaatttgccttagcttatgacgatattcccacagcactgcacaattacacagtgcttgcgataaaaagcaactcaacaacaattaaacagcgtgcattagacgttgcacttgaatataacgacttacaagctgccctaaatattgcaacacattgggttgttcaagagcctaaagatgtccctgctctattttatttatcgcatattgcactaaaaacacacgaatatcagcttgctgccgagactttagataaaattttaaaaatagatccaactgccgatcttgaacaaattttggcaagcattgcacctgaaaatgcacaggatcgagaagttttattaaccgctttacgttctagtgcagagaaagacaacccatccatcttagcgcttattgccaacctagaagcacaaaatggtcagttagaaccagccttaagtaccattaatcgcgcactacgccgtcgccctaaagtgaccagctttatcttaatgaaagccaatttactaatcgcactcagtgatcaggaaggtgctttaaaatggtatgcaaaatcaagccgtaaatataagaaaaacctagatattcgcctagccgaagtacgttacctcatccagattaatcaaccccagcttgctcttgaaaaattagagaaaattattgaaagcaatcctcatgctgaagaggctttatttattgctggtttaaccagtattgaccttaagcaatatgacaaagcagaacaatatctggttgatttacgcaactctgcaaaatatcaaaatgaggcgtattactacttagcgattaatgctgaaagaaaacaacattatgaaactgctaaagcttactaccgtttagtcgatggtagtttgtatattgtttcaagacgcaatctcattgcgatctatgataaacaagaaaacttacacgacgctttacgctttttaacccaagagcgagtcaattatcctcagcatgcaagctttctttaccaagctcaagctgaaattttaaagaagatgggcaataaaaaagctgcattaaatttattagatgaagcgatcaaaaacttaccagatgatccggagctcatctatgcagaagttttattattagacccttatactgaccgcgataaactcgataaaacactcaaacaattattgcagttagaacccaatagcccaacgtatctaaacgcctatgcttatacattagctttgcaaaatcgtaggcttaaggaagcacgtcaatatgctgaacaggctttagaatatgccccagaacaagcttctattctggatacgctaggctatatcgcatttttacaaaatgattatgaagcggctgcggaagctttaggcaaagcatatgaactaagtcataacataaatattggcattcgttacgctaaggcactttatatgcaaggatcattaactcagttcagtgccgtgttacaacaactgaaacaaaagcacgcaaatgatccacaattacaacaacttgatgcgttaattttacctacatctgcaaaaaagagttaa

SEQ ID NO: 42551 - DNA, 1284 bp, Acinetobacter baumannii
atgtctttctttgcattgggtgtcaaccatcaaacagcttctgtagaactccgcgagcaaattgctttcaatgcagagcgattaagtaatttgcttgccgaacaacgtcatcacgagtctttaaaagacttagtggttgtctcaacatgtaaccgtacagaagtctacgccatggcggaagatgccgaaagccttctgaaatggttagccgatgccaataatattgatgtaaagcagttaattcatcatgtttatcgttacgaaaatgctcaagccatcacacatttaatgcgtgtagcaagtggtttggactcactcatgttgggcgaaccgcaaattttagggcaggtgaaaagtgctctagcattgtctaaagaagcgcaaacagtttctcctgaattaaatagtgtatttgagtacgctttttacgctgctaaacgtgtgcgctctgaaacagctgtaggtagtcatgccgtttcaatgggttatgcagttgcgcagctcgctttacaggtttttagtaaacctgaaaaactaacggttatggtggttgctgcaggcgaaatgaacagccttgttgccaagcatttagccgaaatgggcgttgctaagatgattatttgtaatcgtagccgtgaacgtgccgatcaattggcccaagaaattgcacatcaagttgaagttgagattattgatttttcagatttggctgagaatctatatcgtgccgatgttgtttcaagttgtacgggtagtttgcatcaggttattgcttatgcagatgtcaaaactgcattaaaaaaacgccgttatcagcaaatgttaatggtcgatttagctgtaccgcgtgatattgaccctaaagtagagtcgcttgatggagtgtatttatacggtgtagatgatctacaaagtgtgatcgatgaaaacttggctcaacgtcgtcaagcggctgttgaagctgaggtgatggttaatcagctagctacccagctaattacgcatcaaaaagtcaaagaggcgggcagtacaattcatgcttatcgccaacatagtgaagaaattagtcagcgagagcttacccatgcattagaggctctgcatcatggtggaaatcctgagcaagtgttgcagcaatttgcccatcgtttgacgcaaaaactaatacatcctacctctatgttgttgcgtgaagctgcaaaagcagagagcccagactattttgaatggttacagcagcatttacaggatgtattcgatcatgagcgaaaacccaaacgttaa

SEQ ID NO: 42552 - DNA, 1866 bp, Acinetobacter baumannii
atggcaattccacagcatacgattgatcagatcttagatcgcacagatattgtcgatctgattggtcaacgtgtgaaactgaaaaaaaccggacgaacttattctggttgttgcccttttcatcaagagaaaacaccttctttccatgtttaccgcgataaacagtattatcactgctttggctgtcaggcgaacggaaacgctattcgcttcctaatggacattgataaccgaaactttattgatgtgatgaaggaattatcgagtaatacgggagtcgaattaccaaaagataatactgataataaaaaactgtcttatacgcgccaagttacaaagccatcaacaccgcccaaaacggttgctgaaccgactactcaagcacctatagaagatcagtacaatacgtttgaacccgtatattttgatgatccctttgcccagtttgaacagccatttagctttgatgagccagtacaagaaggtaatttatatgaccttctagaaaatgttgcccagttttatgaacatcaattaccgactagtcaaaaagctaaaaattactttaagcaacgcggtttaagtgaccagactattcagttctggcgtttaggttatgctcctgaagactggcagcatctggaaaaagctttcccttatgatattgagggcttaaagcagcttggcctcatccgttcaagcgatagtggtcgtgacttcgaccttttacgtgatcgtgttatttttccaattcgggaccctaaaggccgtgtagttggctttggtggccgtgcgctcaatgatgaaattaagcctaaatacatcaactcgcccgattcggaagtattccacaaaaatcaattactatatgggctatatgaaggccgaaaattaaaagcaaatgactggttaatggtcgaaggatatatggatgtcattgcattacagcaatatggcattactggtgcagttgcgactttaggaacggcaagtaataccgaacaccttaatatcttatttaaacaaaataaccggattacgattgcttttgacggtgatgttgcaggtcaaaaggccgcacgccgaactttagaacttgcattacccttactcaatgatggtcgtgagctcaaattctttgtattgccaaatgaccatgaccctgactctttaatccgccgtgaaggggtggaaaacttccagaagcttctacagcaagctcctttactttctgactttgtttttgctcatcttactgggcaacatgacattagtacgcctgaaggtaaaagtcttgttatgggcgaattaagagaattgaccgagttattgccaaaacaagggtcttttcgctatctactaacccaatctttccgtgaaaaattaggcttaggtaagcgcttcactccacaaattagccacgatgcatccctatcttttaatattcaaacgaaagatgaagactttgcaattgcaattttgatgcaccatccgtttctttatattcattttgaaggattacgggcttatattccgcaagatgagttgttggctaaaatattagcaattttaaaccgtatatttgacgaattgcctgatgaccaagaactagctacctattatgttttaggtgcttgtagcagttattgccatgaaattgcagatattatgcaaaggaccaacattcaagccttaactcaagcaccggaagtagcagataaactcgctaaagaatatgctttaggcttacaagaaagatatttacgtcaaaaactaaaatctaaaatctcattagttgagtcaagaaacttaagacaacaactcaatgaacttacaaaacagattagtttaagacttctttcttaa

SEQ ID NO: 42553 - DNA, 1158 bp, Acinetobacter baumannii
atgtcgctaccacgttataaaattacgatgcttgccttatctttaggtgtagcgtctgcatttgtgggctgtagcagcaatccaagtaaaaaagaagtggtcgatactggccctcaatctagtgaacaagcatattttgacaaggctcaaaaagctcttgatcgtggtcaatatcttgacgctaccaaatctttagaagcgattgatacttattatccaactggacaatacgcacaacaagcacaacttgaacttctctattcaaaatttaagcaaaaagattatgaaggtgcgattgcactcgcagaacgttttattcgtttaaatcctcagcatccaaatgtagattatgcttactacgtacgtggcgtatctaatatggagatgaactacgatagcttgttgcgttacacctctttgcaacaatctcaccgtgatgtgagttatttaaaagttgcatatcaaaactttgttgatcttatccgtcgcttcccaagtagccagtattctgtcgatgcagcacagcgtatgaagtttattggacaagagcttgctgaaagtgaaatgaatgcagcgcgttttaacgttaaacgtaaagcgtggattgccgcggctgaacgttcacaatgggtgattgaacactacccgcaaacacctcaagtaccagaagctttagcaactttggcatatagctatgaccaattaggtgataaggcaacttcgcaacaatacatcgaagttttaaaacttaattatccgagccttgtcaataaaaacggcactgtcaacatgcgtgctgcacgtaaagaaggtaactggatcaaccgtgcaaccttaggtattcttggtcgtgaatctaagtctgtaacaccagatacgactacttcttctgaagctgaaccaaaacgtagtctactaaaccgcgtaagctttggtttaattggtaactcgggtaaagaagaaactgaagaaacaactaacacacctgttgaagcaccaaaaagtgaacgtagttggactaatcgcttaagcttcggtttactagataaacctaagccaaaagcagcagaaggcgcaacaattgcaccagcaacgtcttcgagtgaagcaccgagtgcctcaccagcagataacgaagcagatgacgctgctcaataa

SEQ ID NO: 42554 - DNA, 1053 bp, Acinetobacter baumannii
atgacttcagcacaatcttcaaacacaaacttctctgaaacagacttcaatttactagaagattctgaggatgcagataaccatacttctgatacaactgcaacacgtttatcgttgcaagttcagttagatgaaagctacttagggcaacgtatcgaccaagtggcagccatggtgtggagtgagttttcacgcgaaaaacttaaacaatggatgaaagaaggtcatctgttggtaaatggtaacattgtcaaacctaaatatcgctgcgaaggcaatgaaacgctaactttaaatgttgagcttgaagcacagaccaacagtcaaccagaaaatattccactcgatattgtttacgaagatgaagatattttagtcattaataaaccggtaggtatggtagttcatccgggcgcaggtaatacctcgggtactttggtcaatgctttgctttaccattcacctaagtcagccgagctttcacgtgctggtctagtacatcgtattgataaagataccagtggtttactagttgttgctaaaaatctcgaagcacaattttctttgagtaaacaattgggagataaatctgtttatcgtatttatgacttagtcacttatggcaatattattgcaggtggcacaatcgatgagccgattaaaagacatccggttgaccgtgtaaaaatggcaattttgccgggtgggcgtgatgctgtaacgcactataacgtgaaagagcgttttagagactttactcgtgtacaagcgcaacttgagactggccgtacccaccagattcgcgttcactttagttatattggacatggtttggtcggtgaccaagtttatatgaaccgtgtacgtattccggcaggggcatctgagttactcatcgaaactttacgcggttttaaacgccaagcacttcatgctgctaaattgggattaaaacatcctcgtactggtgaagaaatgttattcgaagcaccatggcctgaagattttacgcagttggttaatgttttacgtacagaaaacgctgcatattaa

SEQ ID NO: 42555 - DNA, 738 bp, Acinetobacter baumannii
atggaatttgttcaaggtttacctcaaggcgtattcgtagggcagacacgagttcatcaccctttggcattaccagcagagcaaacagagctaacaggttttaatcttgctttgcacgttaaagacgaagctcagcgtgtccagcagcatcggatgatgctgttagatgaatttgctcagtttggggttaaaaaaatgacatggatgacccaaacacatagcacgatttgccatacagtaaatgaacaaattccctttacagctttaattggcgacagcttgattacgcaaaccaaaggtcatgcgttaatgatgatgacagccgattgtttaccagtcgtgcttggtaatgctgaaggtacagaaattgctaacttacatgcaggttggcgaggtttagcgggaggtattattgaaaatacagttgctgcaatgcagagccctccaacatgggcatggttgggtgcagcgattagtcaaccttgctttgaaattggagcagaggtaaaaactgctttttgtagtaaatatcctgaattggaaactgcatttattgatggggcagctccaaataaatttcatgctgatttgtatgcaattgctcgttttatcttacagagcctaggagttgaaaaagttttagggggagatcagtgttcataccaacagcaagatgaatatttttcttaccgccgtgatgctaaaactggccgtatggcaacttttgtttttatgtag

SEQ ID NO: 42556 - DNA, 552 bp, Acinetobacter baumannii
atgtctttgcctgaaaaacatctctctattgtctatcacagtccctatggtcacactgcaaaggtagcgtctgctatcgcaagtggcgccgaagtgatgggcgtcaaagtacatgtgatgaatattgagcatattgattgggatgttttagatgcctcacagggcattatttttggttccccaacttatatgggaagcgtaactgccgattttaaaaagtttatggatagtacatctaaacgttggaaaaatcgtttatggcagggtaagttagcagcgggttttgcaaattcgggcggtttaagtggtgataaactggcggttctgcaacaacttaatatttttgcgatgcagcacggcatgttgtggtcaggtttacctttaatgacaacaggccatactgaaaccgatttaaaccgtttatcgagctgtttagggttgatgactcaatccgataatgcacctgttgaaattacaccgccgcaaggtgatttagatacggctaaatggtttggtgaatatattgctgggcttttatatagattaaattag

SEQ ID NO: 42557 - DNA, 474 bp, Acinetobacter baumannii
atgaacaagatagttgtaaagaaacataatggcggaaccattgcacaaaacaaacgtgcccgtcatgattattttatcgaagaaaaatttgaagctggcatgtctttactaggctgggaagtaaaatctttacgtgccggtcgtatgagtttgacagaaagttatgtcatttttaaaaatggtgaagcattcttatttggtgctcagattcaaccactcctttctgcatctacacatattgtgccggaagctacacgtacacgaaaattattattatctcgtcgtgaacttgaaaagcttatgggtgcggtgaaccaaaaaggttattcgtgcgttccattagcatgttactggaaaggtcatctggttaagcttgaaattgcactcgtgaaaggtaaacaacttcacgataaacgtgcgactgaaaaagaacgtgactggcaacgtgataaagcacgtatatttcataagtaa

SEQ ID NO: 42558 - DNA, 201 bp, Acinetobacter baumannii
atggaaattgatcgtcgtgtacgtgctaaagagtttatgatgctaatgtctattggccgcactaaattctatcgcatgattaagaatggtgaaattcctcaacctatcaaggtaagtgacaaagaggtattttggcacgaatctagtgttaagaaagttgtcgaaaaacacaaagataattctgatatgatagcctgctaa

SEQ ID NO: 42559 - DNA, 192 bp, Acinetobacter baumannii
atgagtgaatttaactttgagcaactttatctaatggctctcatgaatagtaaaaagccaaagtacgttttgaattgggttcatgtatccagacatgggccaggtgcgacaaaagctacagaaatttgtgaatattttgggatagatccagaaggcactgattttagaaaagcggaaagtaaggaggggtga

SEQ ID NO: 42560 - DNA, 633 bp, Acinetobacter baumannii
atgacagatttgaataagaaacaagctttttgggcagagcaactgccattgtttaaagaaaaatattggcttccagagcacttagatgttcttgaatttaatatggatggcggctgttttgaaatacctatagatgtaaaaactgatcttagtgaagacgatctttttgacatttaccatcgggtaaatagtggttgggcaatgtggaagaaagccgtaaccttcatgaaagaaaaagccaaagctcaggcggtgcaacaatcttttgagattggtcgtcttcaagatcgaatcactgaattgcttgatgaaagacaagatttgtatgcacagattaataatgatcaggcggtgctagatactcaacaaaagcttactgatacatattatttggaaggctcagattatgtagttgattgccctttcgaatatgacattgaaatagataagggagaagtgcttgagttgcaaaaatggcaacgtactgattcaacaaaagtatattttgcaaatatctataaagatgaagataactttgaaattcttcaattcgcttcaaaagccgaagctgaaaatgcagttgcagaaaacttgaagtttttagaagcaagcgaatcgggagctgagggatga

SEQ ID NO: 42561 - DNA, 609 bp, Acinetobacter baumannii
atgaacattctccagcgtagtgaagattggcattcggaacgctgtggcaaagtcacagcaagccgagttaaggatttaaatgcaaagccaaataaaggcaaggctttaaatgcattgggtttaacaattctagctgagcgcctcactggcgttcagaaggaaatcttcacaaacgcagctatgcaatggggtatcgacaatgagcctcatgcaatagcagcttatgaaaatgaaacaggtaactttgtagtaggtacaggtttaattgaccatcctttcattgaaatgttcggggcttcaccagatgggcttgtgggtgataaaggtcaaattgaggttaagtgtccagacactacaactcatttgaatacccttctgaccaagcaagtgcctgatgagtatatccctcagattacatgccaattggcttgtacccgtcgtgaatggtgtgactttgtgagctatgacccacgtctaccagaaggactacaaatcataattatccgcgtctatgcaaaagacttggcgatagaagcattagagcaagatgttcgcaagttcaaccaagctatagatgacgcaattaaaacattgaaggtggcagcatga

SEQ ID NO: 42562 - DNA, 849 bp, Acinetobacter baumannii
atgaatgcgccagtagaagtgcaaccaaatttaccaatgaatgctcaaacatctgcattgattcttgatcctcaagcaatgcaaaacatggtggcatttgctgactttatgtgtaaggcagttattacagtaccaaagcatttacagggtaattcaggtgactgtttggcagtgactatgcaggcaatgcaatggggaatgaacccttttgcagttgctcaaaagacccacttagtaaatggcaacttggggtatgaagctcaactagttaatgctgtgattattgctcgtgcgcctatcgttggtcgtcctaactttgaatggtatggcgactggtcgaaagtagatggtaaaacttgcaaggctcatgatgttggtgtgcgtgtatgggtaaccattaaaggtgaatcagagccacgtatccatgatgtttcatttgctcaagttggtactacgcgaaactcgccaaactgggtaaacgaccctaaacagcaaattgcatacttggctactaagaagctggctcgccttcactttcctgatgtgattttaggtgtctatacggaagatgaattagttgatcatgaagagtttatgccagcttcaagaactgtgaactcaacagatttagaaggctaccaagcctttgaagatgagcatttgcctacactcaaatcagaagctcaatacggtactgaacgtttgcaggcagcttatgtggcaattccaaagggaaatcttaaaaagcacctttgggaagttcactcaattagcttaaaagagattgctcagtttgcagaccaagctttacagcgccaaggagaaacttatgaacattctccagcgtag

SEQ ID NO: 42563 - DNA, 219 bp, Acinetobacter baumannii
atgggaactaaatacgattggtcagaaattccaccagaggttcagtttatggcaactgattttgatggatgggcatttggatataagtctgagcctgaacgcttagcaactgaatttagtggtgatcttttttatggagttgcagtgctcccatacaacaatatttatgaaggcgactggaaagactcactagaacaacgcccattagaaaagaattag

SEQ ID NO: 42564 - DNA, 384 bp, Acinetobacter baumannii
atgaatatgttagttaacaagcctgagctgctgtgcccttctttcccaatgcttcaagtgtctagtgagtttgaagttaaggacaacatagtttcatttgaactggaaagtggctgtgcaactttgaaatgcaaaattgttgctgattttactaagcaagttcgtgtggttggttctctaatgaatcaagaagacagcaaggaccagttttacgaccaactcgtagtagatgaccgtacacatgttgaagtggttggtactgaatatgtagagacacctattggccttttatttcagcttacatcaacgcaagtggctgacttaaacgagcagcttaaatactatgccgaagaattggcagatgaagaagagggagtggtgtga

SEQ ID NO: 42565 - DNA, 762 bp, Acinetobacter baumannii
atggataactacaaaatcaaagttaaagatgaagctgagagcaaagaggctcaggagttgttttttgagcttgggttccgttgggaatggacacaggacaaagaggttttaagaggatccaccccatatttattcactcttggagtaaatattggatatgggctttctttaacaaagtttgatgagtgcgtaggcaaagaactcaccctccctcaactccgcgaccttgttgtgttgaagcggaatgatattaatgacgccactcacacttgtgagaatgactttaaatacatttgtattgatgaacgttggcacttaatgactactgatggctggtttcacgtatctgttaatcctaaagcacttaagccaatcaaccaaccccaagacccagccttgattagcggtgcggaggcgttgcgagctttggctgatgggaaagaggttgaagccaacaatagtgactttggatattggattgatgcgcgaaatcttagtgttaaggatttctttgatgacattcacattttccgcctcaaacctcaaaccatcaagcttgaacttgagctgccgaagccttttgagcctaaagaagatggatatgtctacatcattgatgactatcaagtttctggatatagaaaatattactttgaagttgaagataataaagaacttagcttcattggtgtatggcacaccgaagacgagatcaaacaagtcgtagcgcaactcagaaagatacgaggtactaactcatga

SEQ ID NO: 42566 - DNA, 192 bp, Acinetobacter baumannii
atgaatcaaagaattgaaaagtacaagcttagccaagccttccgggatggctctaaagctttcatagctttctgggttatcaccttcattgtatttgcattcctaaaaggctgtgccgacgagcaacacgtcaacgaactcaaagcaaaacagaacatgtatgtgcgtgtgcaagttgagggggtgaagtga

SEQ ID NO: 42567 - DNA, 723 bp, Acinetobacter baumannii
atgaattcaagtataaaagattcaatcgagaagcttggttttcatgtctatcatgctgatgatgagcatctatgtgtaaccacgccccagaccttttcgtccggaaagccggcatgttattttatttcgcaaaataataataaaattattttaaatgactttagcttaaattttcatgctatgagtgattgcctacctcagcctgaaaaaactgaaaatattatttctcgattggtgagaaacacccatacaaatggcttaattagatttgaaaaacatcgcatctggtgtaaagctggtgttcaggatttggagtttgctataggtcattatttaaatgtgcttggaagactaacttcctatgaagccaaaccatctactgaccaagaactggaagaaatcctttctgaaattgaaacctttttgctctataaatttggaaaagataacttaatcttaaaaccaaaagtaattggccatacgggcacatcttatgattttaactaccaatgtggctctaagtttattgattatgcaaaacctgaggcagaaaaaacaggaaagttactcagaaaaatgtttgatgtgcagaatcttcaaaatgatgctgagtttcagattattcttgaggatagagtcaacaaagatcattttaagcgcgaggctgaaattttgggaaatatagcaagcatcatgcctgcaagtagcattctctcttcatag

SEQ ID NO: 42568 - DNA, 480 bp, Acinetobacter baumannii
atgggaagagaatattcaatatctaaagagcgtatgcttgaaattcttcaagaaacaaaatgtgtttatgatgatattgatttttcacatgagccgggctctgattacatccattttcgtgcaaaccaagtctttaggctagatacgggagcgacaatacctggcgcctctgttgtttttaggagtattaagacaccggggttcatgcgacactccctagaccttcgagtacgtcatctaaatgtagaaaacatagtgcttcaaattgaagtgcttccatttgaccttcagcacccaacccacagggagccaggcttaactttacacggatctcatttattgaaggccacacaaacgataggctatgatggagatactgataattggacatggtttcagtggctttcagaatttgaaagacagaccaatttgcagtgttttggtaataaatatgaaccttttataggagagctattctaa

SEQ ID NO: 42569 - DNA, 216 bp, Acinetobacter baumannii
atggacaattcaaaactaccaatcaaccaaatcattgcccgtatcaatgatgctgcgaaacatggtgaagctttggtgctaacagccgaagaagtgaagattctttctaaagatattggcgacaaagtctttattcctgtgcttactaatgagcaggtcgtgcagttggtaaaagaaggaaagcttgggcagaaaattaataacaccaaagattaa

SEQ ID NO: 42570 - DNA, 663 bp, Acinetobacter baumannii
atggctactttgggcgaaaacttaaaagcaattcgcaaagctaagaaaatgactcaaaaagaactggctatgaagtcaggtgtcaaacaatctgtaatttctgatctcgaaacagggaatgccaaatcgacaggctctatacttgagttggctaccgcacttggtgttaccgcagaagagttaaaaaaaggcattgtcagtaagtttgataataacgttgagcctataactaaaaagctaattcccgttctttcttgggtgcaggcaggaacaatgacatcagtagaagctatcgatcctaataaaataaatgaatggttgccaccccttagtgcagatgatccagatggatgtttttatttaagagttgttggcgtaagtaattccccaaaatatgaagaaggtgactatattttagttaatccaaactatcaggtttgtgatttacttcctgatgatctaattgttgttcgaaataatacagatgcaacctttaaaaagcttgtaattgaaagcgatcagcgcaaatacctgcaagccctaaatcctaactttcacccgaatattattgaatttgaagatggtatggaactggtaggcttggttattgatgcatttagaccattagggggttcacgcccaaagcgtgttagaaaaagttaa

SEQ ID NO: 42571 - DNA, 201 bp, Acinetobacter baumannii
atgaatcaatggcagaagatgatctctgagttaagggaaaagggtcttactcagacatttatagccgcagaaatcgggtgctcacagaattacgttagtgatttagagcgcgggttatgtgggaaacgcctttcatatgatctaggaagaaaactagaaaatttatggaaggaatattgttcagaacaattaaccgcttag

SEQ ID NO: 42572 - DNA, 375 bp, Acinetobacter baumannii
atgagcaaagtatcaaccgaattgagtgcaagggctagaaatgaagtttctagagttttgcaagcccttgcatcaagcaatcaaagtcaggttgctgaacagttggggattgatccaagcacattatcacgaatgaaaaatgatagaaaatccaatggcttgactgagcttgagagctgtttggtgctattggacattcttggattcaaaactgtactcaagaaatatcgaatgattagtgaagaaaagctgaatgcgctttttgtgatgtcaaaagcgtggatggaaagcaagcaaaccattgacgatctttttcaagatgacattgaagatttcggaatgtgttttgagcttggttacaaagaaaaagcctga

SEQ ID NO: 42573 - DNA, 168 bp, Acinetobacter baumannii
atgagtaaaaccacttttaaatttattcagtggtacgaatctaagtaccctgagtttgtaaatcgatatggagctttaaaacgcttatatgactctgatttagatagtttcttcattgaagaaattgatgagctgtataaggaatttaagcaaggtggtgttgtatga

SEQ ID NO: 42574 - DNA, 894 bp, Acinetobacter baumannii
atgagcttatacaccacaggtcatccggttgtagacaaaattgccagcctcaatattgaaggcaatgtcattcctgctaattggtttaatactttcaaattggaaaatggaaagcccgatacaaatgcggtcattttgctttcagaaattgtttattggcaccgtccgactattgtccgtgatgaagattctgggcatatcgtttcggtaaagaaaaaattcaaagctgatttattgcaacgctcatatcagagtctagcagatcaatttgggttctcaaggaagcaagttaaagaagcattagatcgtcttgaaaagttcggcgtgatcaagcgtcatttccgctctgtagatgtaaatggtcaaaaacttagcaatgttttgttcattgaattagttacccatgttctctttgaagtgaccaccctcctaacttctaaggtaggaccctcctcacttgaaagtcatgacctcccaccctacagggaagaccctccccacctggagggtgacacatatacagagaatactacagagattactacagatagtaagttaagcacggctgagcttgaaaaaatcttgaaagggaagaaaccatgtgaagctcttgtcgctatcggtttagatcttgaggttgctaaacgattcaatgaataccgtaagacccttaaaaaaccattaactcttgatgctgtgatcaagcattaccacgaaagctgcaatgcagggatttcaactaatgatgcagctcgtattgttttgagtgaatcgtggattgggtttgctagtcgttacaactggaagccagcatttgaaactttgaatggttctgcacaacaacaaacaccagcagatatgaaaaatgctgatcttaattatggagattggtaa

SEQ ID NO: 42575 - DNA, 1326 bp, Acinetobacter baumannii
atgagttctgatatccaaaatatttctattgagcagagtgttcttgttgcactcatgacaacaagcaactcacttgaagtagttgcaaacgatttgactgaggaacatttcttcgctggacgacacaaaatcatttatcgcgccattgttgagttatcaaatgctgatatgccgtatgacgcagtattcgttggcaagcatctacaagaaagaaatctgcttaacgatatcggcggtgaagaatatttaattcaacttaatagcgctattggtagtgtccatcaccttgaatactttgtcgcagaattaactaagttaaaaaaccatcgtgaagttgaaggcattggacttgctattgctggaagagcaaaagacttaacggtaagtgatatttaccttgaagctgagaacctattcagcacatcaagtagcactatcgaacagaagcaaactggttttgatttcaatcaagccttagaaaaaactttagaacgtttcgagaagaaaatcgcccagaaggaagaaaaagggttcattggtgttcagttcaatattccacatttagataatcttcttgggactatcgagaaaggacatttttgcgttattggtggtcgtccgggtagtggcaagtcaacactcgcgcagatgtgtgcaatgcaaactgctaagcgctacaacatgcctgttttatttatctctgctgagatggacacgccaaccctaaccaaccgcatgatctcagcattagggcatatcccatataacaatcttcacaacggggaaatttatgacgggatgtttgaaaagcttacagacaccatagctcagttccgcaaccttccaatttttattgaagagaaacagaagccaactatctctgaaatccaaagctatgcacgtaaagcaaaacgtaaatacaagactctaggctgcatcattgtggactacttgggcttaattcgtgacccatctaaaaaagaccgtgttcaggaagttgcatcaattagccgtgatttaaaagctatggctaaagagttcgattgtccagtaattgcattagctcaactcaaccgagcagcagaaggacataaacctgttgcaagcgaccttaaagactcaggtcaaattgaacaggatgcagaccaaattatcatggtccacccattactcgaaaaagagacaaatgcacctacaggcgtaactgaattgatcattgctaaaaaccgtcatgggaagcgcggatctgtaaaggttcaggatcgcttagatatttgtcgtttcgtaggcatgtcatttccagtggaagagagaggtgcagcgtga

SEQ ID NO: 42576 - DNA, 258 bp, Acinetobacter baumannii
gtgaaaactttaaatagaacaaagaaattaaactttgatgaccagcttagcttactcgtgtttggctgtcatgcatcagcgcctttcagtgtcaaagacgtgaaggaatcagtgtttgatttcaatcgaggaaccatctacagcaatcttcaaaaatttgttgaatggaaatatttcgaacgcgttgggaaaaatcattacaaggcaactcaatacgcaaaagacatcctgaatgttaaaggggagctgaaagcatga

SEQ ID NO: 42577 - DNA, 177 bp, Acinetobacter baumannii
atgatcgaatttgtagattacacctcaatgatgaagctgcgtagagcgtacaacctcggtactcgtaatgaagaaacaagagcagcagcgaacctctatgagaaattaagaaagctgaaaatgctagaccagcttaagcaggaagccattactaaacatgacggagaacaacaatga

SEQ ID NO: 42578 - DNA, 327 bp, Acinetobacter baumannii
atgaaaccagaacagtttattcgtgagtacgggcctaacactttcagaatatcaatgtcatttgtcaacactgctaagtatttggtggttcatgaaggtgaaattgattttacagatgaaatcaagcctcaccatggcgatcgtgtatttgagcgtgatgtagtcaagcgccttgtggagtcggttgatttagtcgaatcatggggcggaattgaagatttaaagctttacgacttatctcattgcaaagataaacctgaatcggctggatacaagttgcttcaagcaattgctgattacgaatcaatatacggaggcggtcaatga

SEQ ID NO: 42579 - DNA, 177 bp, Acinetobacter baumannii
atgaatagtatctggtttacgttgttcttctgcttatgttgctttatttggggttttgcatattcgtatggcagttggattgagaaggcaacgaatggtcagccttttgaagcgaaaggcaaggtttacaaaatcattgaattggatgttgtggaaaaaggagccagccatgagtga

SEQ ID NO: 42580 - DNA, 342 bp, Acinetobacter baumannii
atgagtgagtttaaagtcggggataaggtcgtatttcaaaacagtaaatcagacgatacagagatttacactgtagaagctgttttagatggcggtagatttcttgggattaacgattacaggcaggcattttcatcaatcaaattcagacatgctgagccacaagaaatcgcagcaggccaccgcattgactttccaactttgcccaagccagtaggaagcttacaagaattgcatcccgagtttgcaaaagtcttgcacgagaactttctagagctgctaggcgacgactcccacatagaaaaccacatcagcccgctgtgtaaatcaaaggatgtttga

SEQ ID NO: 42581 - DNA, 531 bp, Acinetobacter baumannii
atggataaaccaatgacatttaacgagtggatgggcaagcaagggaatttagctttggttcatgccaattgctgccgtattgcctatgaagctggtcagcagtcaatgcaagcaaaagtagaggagctgcaagaagagttcgccgaagatgaacgattcttaaaagagcaaatcaaagacaaagatcaaaaaatttcaaatctcgagtgtcagcaaggaatggataaagaacttattcaggcattgcagggcagaagcaaagcattacaagacaaagttaatgacttgcaaaaacaatatgaccagcatgataagtggcttcttgagcggaacagagattgcaatgaactgtacaacataaatgcaaagcatgtagcagaaaaggcagagctgcaaaagcgggtggatgctctggagaaaactgaattcaagttggcacaagtcaaggcaatcctacagaacaatccaaagctacttgaaagcattctggttaagaagatagagcaagcgctcaagggggaaggacagtga

SEQ ID NO: 42582 - DNA, 255 bp, Acinetobacter baumannii
gtgaagctaagaacaatcccgcaagagtatgaatcaatacagtttgaaggaatcacagaggaactagaagatttcctaaaaggtactgattcaaaggtgtatatgcaaggtgagtgctttgtattgtctggggttatcgggaatcatggcattgatataggagattatttgtataaaacagattcaccattaacccttgttcatgtcgcacataacgataaatctttcagcaaatactttgaggtgctgccatga

SEQ ID NO: 42583 - DNA, 456 bp, Acinetobacter baumannii
atgaccacattcaaagaggctcaaatcatcattggcatcgatcctgacttggaaaagtcgggagttgccattctagggaatgatcttcaactcaaaaatctgacttttcctgaaactgttgagctattcagaaatgaacaggacagcatcaaaaaggttgtgatcgaagcaggttggaaaaataagaaggctaacttcagagtaggtggtggtcactcaagacaagtgaatgagcagattgctagacgtgtagggatgaatcatgcaacaggcatcttgtgggcagaaatagctcaggccttaggcttagcagtcttactggtgaagcctactaaatcaaagctcaatgcagagcagtttaacaagattacaggttggcaagggcgtacgaatcaagaacagcgtgacgcaggcatgttgatttggggtatgaacgggaagaaggtgacggtatga

SEQ ID NO: 42584 - DNA, 540 bp, Acinetobacter baumannii
atgaatgcggcagtagtaacggataaattatcaaatcttgaatgggttggtcagcaaatgagagctaagacagcaagctatgaaacgtctactgcatcgacaggagagaaagcgcctacttgggaagaacgttgcggggctatagcttcaattgaagatgaggcaactaaggcatattgcgagatgttagtgtggggtgattcaagagacacgacacaggcatttaagacgcttgttgagcatattggtgagatattacatgaagcagcaagcaaagagcgccagcgacatcactttgatttgaagctgttctgcatgaaggtggctcgaatgcaggtattttttaagatgcgtccagtcattaaagaagatcgaactttacagggccaattgaagttctgcggaattgatgaaatcaaagcagatacatacagcaagaactatgcttatctcggtgcaatggtagatattattctgaaagacatggaagatgaaattgatttctatgtggggctataccgtaaaaagctaaacaattga

SEQ ID NO: 42585 - DNA, 207 bp, Acinetobacter baumannii
atgaaagcgcagaaactaattgaaaagttgggcaaagataaggttttagacatcctgaaagaagcccatcctgatgcagtgtattacgtagatgaatggaatgaacactttaaagtgcatggctattgtgctgataaatgcattgtaggaataaacaattcacatactcattacaagctaacggatctacaagaagcattggggtga

SEQ ID NO: 42586 - DNA, 276 bp, Acinetobacter baumannii
atgcgtgatgcaaagcgacttgcagcaataagaaaattaccatgcgttagatgcggctatcctcactctcaagcggctcattctaatagctcaaaacacggtaaagggcgtggtatcaaggcaagtgatttatatacagttccactttgttacgcctgccatgctgctttcgataagtttgaattaggcacaaggcaagaatcagaagctctatttgatggttggttagaaaaaacagagcggatgcttaatcttaaagatgatgaggtgttttga

SEQ ID NO: 42587 - DNA, 483 bp, Acinetobacter baumannii
atggaaccacgattcgtcatcaaaaaccattctgacatcaactatgtaattggctatctcaatactaatcatgcaaaggcagcgagtgaagggaagcctttagtcgtattgattgcaccacaagagaaagatcgttcaaaggctcaaaaccgcttgtactggatgtggcttaatcaatgggctaaacgtcaaggtacagataaagactatgagcatctgttcttcaagaagaacttcttagcaaaaatctatgaccgtgatgacgttggccaatacaagaaaacattcaaggctgtaagagagctgaaggattctaaacatccactctaccaagatgtagcaaacggcctatgtgagctaatgagcactacagatgcaagcacagctcaattcactgaataccttaatgacattcatgctttctgtaataaaaacgggtgttatttggaaacgcctgatgatcttaagtatgtgcttgaataa

SEQ ID NO: 42588 - DNA, 183 bp, Acinetobacter baumannii
atgacaatgaatcctagagaagccgaagctgtaattgaatgtgaaaaaattaaagggaaggcagcaattgctgtagcaatcctaagtaattctggtagtcacggtattagtgatttaagtgaattgggaagagataatttacttaaatatattaaagaggttcaagcaaccttagatgaataa

SEQ ID NO: 42589 - DNA, 462 bp, Acinetobacter baumannii
atggcagctccaatcggtaatagattctgggagcagcgcagctctcacggtcgtaaaccgatctttgaagatccagaacaactatgggaagctgcctgtgaatactttgaatgggttacagataacccactagaagaggcgaaggcatttgcatatgagggcgttgtaactgttgaagatttgccgaagatgcgcgcaatgaccattcaaggtttgtgtttctttcttgatatctctgatgagacttgggcaacttactgctctaaagaaggttttattggaatctgtagcgatatcaaaagggttatcttcactcaaaagtttgaaggtgcaagtgctggattgcttaatgcttctattgttgcccgtgagcttggcttagctgacaaacaagagaataagctgacacttgaagttcagtcattatccgagttgatggatgaaatagggaaggatgattaa

SEQ ID NO: 42590 - DNA, 1494 bp, Acinetobacter baumannii
atgctgaaacctgagcataaagcgaaacttaaagaccagttatggcgcttaaataatctttactacattacgaataaagagggtaagcaagttaagttcaagatgacacttgaacagcttgaatacttcgaaaacgaatggacacgtaacatcatcttaaaggcacgtcagttaggttttaccactgagatgtgcatgattcagttagatgctgcattgttcatgtctgataagtgtgctttgattgcccatacattacatgatgctaagcgtctgttccgtgaaaaggttaagtacgcttacgatcgcttgccacaccttatcaaagcagccaatcctttagagattcaaactaaagatgagcttgtttttagcaaaggtggctcaattaccgtttcaacttcatttcgtggtggaactttagaccgattacatgtgtctgagttcggtaagatttgtgcgaagttcccagataaagcccgtgagattgttactggtgcatttgaagcggtcagtcttaaaggacgaatcacacttgagagtactgctgaaggtaaaagtggttacttctacgaattttgccaattagctgaaaagttattattactcagcaaaaaactaagcccacttgattggaagttctttttcttttcttggtggaagaatgctgattatgaaattgaaccaactgaagaactcccacagcgcctagttcaatactttgaagaactggaagttaagcacaagattaaaacaacgccaaagcaaagggcttggtatcactcaaaagagaaaactcttggcgaggatatgaagcgggaatatccaagtattcctagtgaagcttttgctcagtctgttgaaggtgcttactacaagagccaatttaaattcttgtatgccaataaacgcattggtgtattgccttctaatgatcatttacctgttatgaccttctgggacttaggtgtctcagactcaatggtgatctggtttatccggaagttatcagatacttgctaccaagttatcgattactacgaaaactcaggcgaaggtatgcggcactatttcaaagtgcttaaagaaaaaggctacaagtacagcaagcattatgctccgcacgacattaaaaaccgctctcttatgaatgatggtaagtctcgcctagacattgccaaagagggttatgtgcttgatgacggggagaaatactcagtcaacttcgaagtggtgccaaatataacggtgatggatggtattgagcaggttcgtgagattttgcctctatgtgaatttgatgagtacaaatgtgcagaaggcatcactcatcttgagaactaccgaaaagagtggaatgacaagcttggatgttggaaagacaacccacttcatgacattcactcacacggtgctgatggcttccgtatgtttgctgtggctataggtaaaaaggttgttgcaaaaacactagatataggaatggtttactaa

SEQ ID NO: 42591 - DNA, 1407 bp, Acinetobacter baumannii
atgccagttaatactgaacatcaagcttatgcagacatgaaaaagcgttgggaaactatcgacgatgtctgtgatggttctgccaaagtaaaaaaacgtggcgaactttatttaccaaaacccaatgtatcgtctgacttaacgcagaatgatcaatattatttggcttacttaacccgtgctgtgttctacgagattgctaaagacacattaaacaagatggtgggcgtggtatttgcagaggatccaacattcgaaccagatggaatggattttcttaaatacgatgcagatggtacaggtaagtcaatttaccaagttgcacaatctgccttgcaaggtcagcttaaacatgcacgtggtggtttatttgtggattatccaactactgacggcaatgtgtctgtgcagcaggcagagagcttaggcattcgaccaacaatcgtattttatgagtcgttgagcattatcaattggagtctaaagcgagttggttcggtctataagcctgaacttattgtcttgcatgagaagtccacagaaaaagatccagaagacgaattctctaagaaagaaatcagtatttaccgcgtacttcgacttgatgaaaacaatgaatataacgttcaagtttatacagataagtcaggagaactacagggcggggatatcttctacccaacgaattcattaggccaaagatggaatgaaattccttttattcctttggggtctttggctaatgattggaatattgacccgatcccattagaaccaatcgtcacgatgaacctagcccattatcagaatagcgcaagctatgaagagatggttttcatttgtggtcaagcccaaccagttattaatgaacttgatgaaggttggcgtgactggttgcagaaaaatggagtgcggttaggttctaagaatcctttaatgcttccgaaaggttcatcatttgattacaagcaagtaactgaaagcaccttagcgaaacaagctatggatgctaaagaaaagtacatgcaggccatgggagcaaagattcttgagaccgagcaggtcaacaagacagctacccaatcaaataatgaaaagctggctcagtatagtgtcctttctttgtgtgtggctaataccaatgaggcgatggaatatgcgcttaaatggtgtgctgcctactacggaagtggatctaaagcgaaactcacaattaaacaagatttcgctaaaggcaagattgaccttgatacgcttaaattctattgggaaatggtgcttgctaatcgcatgagtatggaaaccttccatgagttgctaactactgggaaagttccagaaattagctatgaagatgagcaaacacgtatagaaagcgagtcagtcaatagacctatggtggtttaa

SEQ ID NO: 42592 - DNA, 1086 bp, Acinetobacter baumannii
atgaacgtccagttgtcacaacaagctctacttgatgccctggtatcacatcaggcctatctttatcggctctcttcaactgaaatcaataatctcctaacacaatttgattcgctctctagtgagatgctttcaaagttaagagatttgttagatgacttgagtgacgctgaaaagactgcattgatggcaggacaatacacaacaccagcattaaaagaagtaaggacattagttcagacttggcaggcaaatgttgcagcaggattgcttgagagcttcactgtaagcgctactgcattagcggtgtatgaagcttcatatcaagctaaaactctcgctaatcgcaaaatagaaccaaatggaaggacactattcaacaaggcaaagaaaacgcctttaagcggtggtgtgctgcttgattacctattcgagaagatcgcagacgatgcaaaagttcgggtagagcaaactattcgagacggcttatctaaaggtcagacaaaccagcaaattgttcagcggattaagggtaagaaagcacttaattaccaagatggcttgcttgatcaaagtagaaaccagatttctacaatggtacgaactgctcgaagtcatgtgtccaatgttgctctgaatgaaacatatcagatcattggtgttgaatatgtaaagttcatcgcaacactagatagccgcacttctaaaatctgcatgggttattcagacaaggtttataagaaagatgaacctcatcctgtgccaccacttcacccaaactgtagatcgattctaattccggtatcggatgattcaggaaaaacaattgggatgcgtccatttaacaataaagtgaatggtgaaggtgagataagcgtggttgattcaaatacaactttcaaagggtggtttgataaacaagatgcagcttttcaaaagtcttggcttgggccgtcgcgatacaaactattcaaagagggtaagtattctctagataagtttgtagatccgctaacaggtcagccattcacacttgctgaacttaagaagcttgatgaagaaatgtttaagaggttggggttatga

SEQ ID NO: 42593 - DNA, 273 bp, Acinetobacter baumannii
atgagtaaatctgagccaaaagaaactggattaaaacgcactgtatggttatttgagcgtgaaatcttagaaaatcttgaaaaaacaaacctaaaagaccatcacaaagttcttaagtttaatcatttctctatgtgttatgagcttaagccaaactttgataatggtcgggctgatgcaatcgtaatgcgggatacagcaaatcattggttaaagatatggtttgttgcattccagacatgtactgccgaacaccaaaaagctaagtattaa

SEQ ID NO: 42594 - DNA, 726 bp, Acinetobacter baumannii
atgaaatacaaactcgatagcctagagggcttatcagatgaaatgaaggcactttacgaagaaaaagacggtgcattttatttaaaagttgaaggtctgccgcagcaagacaattcagagcttgatgggttaaagcgaaaagttgaagagcttcttggtgaaaagaaaactgcccagcaaaaacaacgtgaagctgaagaggcggctcgaaaagaagctgaagaagcagcacgtaaaaaaggtgacgttgctgcattagaagcatcttggaaagccaaactcgaacaagctgaagcaaaacatgcggaagcaaccaaagcattgcaaggccaagtctacaaattaactgtcgggcaaacagcacaatcattagcaagtgagctttctatcaaaggctcggaggcagtattgcttccacatattacaaaccgtcttcaagttgaaactgatgaaaacggggaggtcaaagtacgagtactagattcgcagggcaaacctagtgctttaagtattgatgacctcaaaaaagagttccgcggcaatgtggcatttaagccattaattgttgcttcaaatgcgtcaggaagtggggcttctggcggtggttcaggtggtggagctgccaagaaaccaagtgaaatgaacgcccaagagcgtgcggattttgaaaagaatgaccctcaaggattcgcaacagcgctttcaaatggcgaatttattaattaa

SEQ ID NO: 42595 - DNA, 1017 bp, Acinetobacter baumannii
atgccttctttagtagaagtatttaaccgtaacgtagttttatcttacctacgtccaaatccaattgctgtatcgccattagttcaatctggtgctttcgtttctgatgaccgtttacgtgcactgctaacaagtggttcgtctactttcactgtgccgtatgtgaatggtatcgacggaaatgttgagcagaactatggcaacaccattcttactgatatcgcaatgccccgccaaattgaagcaggtgcaatgcagggtcgtgttgcataccttaacgaaggttttgttgaatcagtattaggtcaatatctatcacaagtgaactcgcttgagttgatcggtggtttattgaataagtactggctagatgcagctgaaaaccgtgcacgtgcaactgttattggtttgcgcaactacgaccaagcaaatggcaaacgtttaacaactgatatctcagcttcaacagcaactgaagcgactggattcagtgttgatgcatacattgatgcagaaagcaccatgaagcgcgaattgcgtggccgtggtgtaatgtttgtgcatccacgtattgcagcgaagatgcgtaagcaacagttacttgaacaggttactacaagcgctaaccttccgccaatcactgtctacaacggccgtgctgtagttgaaacagatttcaatacgcaaattggtacaggtgcaaatgcgaagttcatcaccattcttgctggtccacgtgcattctcttatgactctgttcctggtcgtaaagacttagctgttgaagagactcaagcaactggtaacggtgctggtcatgaaatcctttggactcgtcgcaacatgctcattcatccacaaggttttagtttcattgctccagctaacacattaactggtggtactgctcgtgagtcgttaagtgcatcttgggctgacttgcagaaagcagaaaactgggaacttgtaaccaaaccagaagacacctcaatccgcttcctaattactaacctttaa

SEQ ID NO: 42596 - DNA, 186 bp, Acinetobacter baumannii
atggctgagaagcaaccagactacaaataccaatacccaacagaccgccgatatgctgatgatgcgactgacacattagcagcaggcactatgtttgaccctgccaaaacagcgggtgactatggcattaaggacccagaagtagcagttcctgtgccagaagcatcgctgaatggtggtgcataa

SEQ ID NO: 42597 - DNA, 387 bp, Acinetobacter baumannii
atgaactatgtaacagtcgaaagtgtgactcaaaagctagggcctgactggtggggaactggtgatccggttattgctgtgatgcaggctaatgcgtggcttaatgctagaaatttaccagactatccagaaggtgaagtgccagatgcgattcttacggctggcgcttacttagcaaaactggcagcagcagggcaactctacacaactaaagaaggtgtagtagcatccaaaacagtctctgcacagtctggcacgtctgtaagcaagacgtatgttgcaggcaaagaagagtcagtaagtggcgatatgcaatttatccttgatctgcttgaaccattctttagcgagaagtattacatcaacacttatgtcattacggagtaa

SEQ ID NO: 42598 - DNA, 393 bp, Acinetobacter baumannii
atgggaatgcgtgatgagattcagcaagagcttggtgctgcctttgatgctgaagatgagcttgctgatgctgtagatacattcacttgtactcgaaagaagctaactggatctaaccccgctgctggtgaagatacttacaccgaatatgtatatggtggccgtggcgtcctctttgggagttgggctaaagatttggtcaagccgatagattaccgcgccactgactctaaagctgttctactgcaaaatgaagtgaaagatgcagcgggtactttagttgagccagatgttaatgacatttgggtgattgaaggtagtaattatcgggttgtgagttacggaaaagatccagcggacgcaacatggattgctcaattgaggaaagtctaa

SEQ ID NO: 42599 - DNA, 291 bp, Acinetobacter baumannii
atgattaacttagatgatgggaacttaataagtcaggctgtaaaccaagagggcgtttatcacgctgaggttcgcaaatccactaatggcccaaagaaggtgctgttagatggcgaagaatgtaagtatgtactctttgcagatactaacaaaggctatcttattcgacataaaaccaccattgacggtcgagtgtttacagtagggaatgaaccagtatttgagatactgtttggtaaagttgaggtgacttttaatgggctggacaagcaaaccgagtgccttcactaa

SEQ ID NO: 42600 - DNA, 423 bp, Acinetobacter baumannii
atgggctggacaagcaaaccgagtgccttcactaaaacgattgaagccgaccttaccaaaaagcaaaaagatattgtgattgatgcattacaaggtgttgttctccaaagtccagttgatacaggggcatttagggcatcacacagagtcagcataaaccagactgaccaatcatttaatgaagcagagaaagataaaggcggtggctcaaccattagcaaaggaacaagtgctttatctcgtcttgttccttactctactgtatacatccaaacgaatgcgccttatgcaaccaaaatcgaatatggcgacttcactgacaaaccagagacaccaaaaactacaggtggctattcaagacaagcgcctcaaggtgtttacggtttaacctttaactatattgctcagaaatacggtggttaa

SEQ ID NO: 42601 - DNA, 396 bp, Acinetobacter baumannii
atggcaatgactttagatcaagcaagacaagccattatcactagagcaatggcatttactggaattgagcaaagccggattaaatatcctaataaagactttactgtgccggttgatggactatggtgtgacattaatgtgttatggggtggttcgatcattgcaggaattggtgatataccatgcacaagacgaacagggattatctcaatcaactgtatggcccgtttaaatacacatgaagtcgcaatcacaaagcttgcagatgcttggttaactcattttgaatactttaagaacggacagttagaactactgcaaggtcaagtacaaaacctcggcaataacggggacttcattcagtacaacatttcaataaattatcgcgtcaattaa

SEQ ID NO: 42602 - DNA, 543 bp, Acinetobacter baumannii
atgaatgcaattgtgaaaattgaaaatcaaactccatttatcgaagttgaattaaatggaaaagtccaactcggcgtgaatgcgcgtgacctacataaaatgttagaggttaagacggacttttcggattggattaagcgacgcattaaacaatgtggctttgaagagaattttgattttattaagctcctcaaaaaagaggagctttcaaaaacaggacaaaacctaattgagtacatcatctcggtggatatgaccaaacaccttgggatgatggagcgcaataaaaagggtcacgaaatccgtaaatactatatcgagcaagaagagttagctcgccaacttaaagatggtctacaagtaagaattggtaagctttctgctcaaattgatttaataacaaagtcactatctgaggctgctagtttcttagcggtcaatggtaaaaaaacaaaaccagcaatgcttaaggaattggatgatctaatcaatgaggcacaaccaagtcttgatctaaaaattaaagatgaggataactcatga

SEQ ID NO: 42603 - DNA, 246 bp, Acinetobacter baumannii
atgaatatccaatacgttgttgctgaatgtcgtccaagtacagatgaagatggttatgcagatgtagttattaatgatgaaacttatatttttactagcatagagcctgtagaaagtatcaaggaggcaatattgctaaccattgatattagccgaattaacccagatcacaagcatattgttcttcatcatgaaagtctgcaaaagttgctaaatggcattcatggtcaagagttaaatgaataa

SEQ ID NO: 42604 - DNA, 930 bp, Acinetobacter baumannii
atgagttctggtgcacgtattaaattatattatgctgaagagcaaacccccgaagtattaccaactacacccgtatggaaaaccgttcgtcgtgtgactgatggcttaactgaaaacgtcactactgaagcatcaagcagcgttgcagatactcgcttccgtcaaggtggcatagctactgaagcagaaatcacaggttctttagaagttgaattatctattggcttgtttgatgacttctggtcagcagttgcaatgaataactgggccagtgatgttcttaactttggcggtaatgtgcgaaagacatttaccttcgtcaaagtttttgaagatattaaccaggtatttatttaccgtggtgtacgcataaatgaagctacgatgtctattgctactactggcaaaatcacagctacatttggcttgatgggtactctgtttgagcgtacaactacaaaccctgtgacttcgcctttaccggttcctgaactagtccttgtttcagcgcttaacgtcggtgatcttaaagttaatggtgaaacagttgtcggaactgcttgtatgcagtctcttgaattgaccattaacaacaatatggaagcaatccgttgtattggctctaaaaagctcactgcaacgacttatctcgaaaagattgtagatgtaactgtgaacactcaatacatgttctcggctcagtcagcggcatatatcgacttcattaaaacccgtgacaccatgccgctagaattctctattgaagatgatgcaggtaatggttatgcattccagttcccacaattagaagtggctgaagctaatcaccctgatggcggtggagaagacaccatcacaatcgacatcaactacaaccatattcgcgtgtcaccggttattacccgtgtgattgcaccagttacaccttaa

SEQ ID NO: 42605 - DNA, 525 bp, Acinetobacter baumannii
atggctcttgaagtcaatattcaaagaaataaagacgttagtttgtggcgcgaatataaagatgaagaaggtaatgtacttgctgagttcaagatccgaggcattggatataagccttatcaagtagctttagaacgtgcgaataaccaaatcacagctaaaggatttgatgttgctaaagcttcacccgatgacaaactctttcatgaattactattggaagcagttgcatgccatttaattgaagactggaagggtgttgtatttgtcgaagaaggtcctaatggcgaacagttaaagtccgaacctgcatacaatgcagagaacgctacgaaattgcttaacatgggcgatttaggggtttctctctggtcctttattcgaactgaatcagaaaagattcaatcagatgcgaaccaatatcgagatgatgttgtgggaaagtcacaaccctctacacctacgccaacaaatacgtgggtctcacggaccacgaaaaaaagcaaagagaagccctcggtgtaa

SEQ ID NO: 42606 - DNA, 288 bp, Acinetobacter baumannii
gtgggtctcacggaccacgaaaaaaagcaaagagaagccctcggtgtaaagcttcctgatgcgcctgactattcttatgtagcaaatgccatactttgtgcttataacacgattgcaagatctagacgctatgaacaaggtgttcctctggcgctagatatttctgcaattaatgcttatgttgagcaatatgatttaccagttgagcgttacatctttaatgactgtatctttacactcgacgatatgttcttggatgaggcgcataagaagtctagtaaaaaataa

SEQ ID NO: 42607 - DNA, 675 bp, Acinetobacter baumannii
atgaaaaaaatcatatttggtacttttgtatctgtaatgcttactggctgtgtagcgccatcatataacgccacatcaaagattactgagatgacaagccgacctaatattggggaagtagttactgtgggcgttggtgagcaaatgctttatcaaggtaatgcaagtgaggatgaagttttggatattgctaatccaataaaagtcaatctttacagcttaccagcaggtcaatatgcaaagactggaagcaatgaaaaaggcgactacttttcacctataaccaagactggcgcattagttgggaaaagcttttttgcggatccagttcaggtgttaatggtatcgaaagaaaataaactatgtgtagtcacagtttttaatgcaagttcctgttcaaaagatgctgaatttaaattaaagaaagttacttcactacgcgacaatacattccagcaaaccctcatttacagcgggaaaataggcaataaaattaatgtaggttatcgagaattctcaggcagtcttgctcgccctgccttcaataacgatgttgaatatgatttaagtgaatctagacaaattggttacaagggcgctcttttagagatcctagatgcgaataaccagagtattaaatacaaagtattaagaaactttaatctagttcaataa

SEQ ID NO: 42608 - DNA, 3927 bp, Acinetobacter baumannii
atggcacaagaatcacgtctcgtcattgtaattgatgcaaaaaatgcggagcgtaatgcgcgtaatctaggcaatgagctggatagcattgagcgtaaaggtgactttgccaccaaatcaatggatgcgttatctgttgctacacgtcaacttgctggatacatggctggattggttactgtaagtgccgccatttctaagatggacacttacactggtcttcaaaaccgtctcaaattagtaactaacaaccaagttgagttaaacaaggcaacagaagataccttccggattgctcaaaaaacctattcagcttgggattcagttttacaggtttaccaacgctttagtgacaatgcaaaaacattaaatctcactatggatgacacagcgcgcttaactgaaacagtatcaaaagctgtagcaataagtggcgcaagtgcagcagcagctgatgcagctttagttcaatttggacaagcgttagcaagtggtacattgcgtggtgaagagcttaactctgtaatggagcaaaccccggcattagcaaaggctattgctcaaggcatggggatcaccgtaggagagttgcgttcaattgcggctgaaggaaaaattacttcacaagaaatcgttaaagcgcttaaaaatgttcaaaatgatgtagatgcattatttgctaaaactgatattacaattggacaatcattaactctacttaataatgaaattactaagtttgtaggcgaatctggaaaggggtcaggcgcagcagaagtattgtctagttcaataagaactctaggtaataacttaaatttaattatcgatggggctatcgttgctggcattggtttattaactaaagcgatcattactaaaactgttgctgttcaggcaagtattgtggcttcagcacagcaaagagcagcaagccttgctgaagctcaagcacaagctcaattacttggtgtagaggctttgcgtgccaagcaagctgctgctttagctattactgaattaggtttagcgagagctgaatataacgctgcaacaaccgcgaaggaaagggcggcagccgttcaacgtaaaacagctgctgaagtagcccatagtatcgccctaaaagaatcaactgctgcaactcttgcttataaagctgctcaagatggtctaaacaaatcagcttcaattggaagtagagcattagacctagttggtggccctattggagctattacattaggggttacagccttagctgcgggctatatgtactttcaggataaggcggcccaagccaataaaaaactagaagagcaagcagcagttgctaaaaaggcaaaagaagaacttctagcactcaaaggtcttgaaaaagattctgcgatcaatgatatgaccgcttcatttgagcgacagaatcaggcactagcagagtctagtagtaaaataaatatccagttgaatgctattgctcaactctacaaaggcaataaagatattgttcaagttgttaatgatgctagagatggcactattagcatgaatgatgctgttaagcgctttaatgagttgcgtattagcaaggatatttacaacgctttgaaagagaactcttcagagtttgaaaagaacgctaaagaagccaaaactacaaaagaatcactaaagcttttcggtattgaggtggagctatctgggcgtaaagctcaaacggctgtggctggaattgatgacaactctaaagccttaattggcaatgaaagtgcagctcaaaaggcaactaaagctcaaaagggttattttgatagcttacgtgcggaagttctgaaatctaatgaagaattggcgctcttaaatcttggctacagtgaagaaactgtaaaaaagatacttgaacttcagaaagcaaagcaggcggtggctgctcctggtacaactgcaattgtcactaaagaggagatggaccagattgctaaagcccaaaaagctttagatgctcttaaagaaaaaaaggatgcactgactgctgctgaacgtaaacatacaagtgagcttgaaaaacagcaaaaagttctacaagtgaatgggaaagttaaagctaatgcggctaaatataattttgccgatattgaagctaagtataacttgccagccggcacattgtcagcgcttcatatgattgagtcacgcggtaatgctaaggcctataacaaatcaactggggcaactggtggattccaatttctggaaggcacagctaagcaatatggcgtgaaggaccgtactgatttagcacaatctgccgagggtgctggtaagtacatggcttatctattaaagctctttaagggagatttggagaaggctgtacgtgcttatcatgctggtgaaggtaatgttcaaaagggtaagggtattggcaaatacaacaaccaatactggaaagactttatgggctatgtggctggtgctaatggatacagtgctggtgatatctcttccaaagactttgacaaacttcttcaagacacaacgaacttagctaaagaacaggcaaaaatacgtcttcagctagaaaacgatgttgccaatgaagtcactaagattagaaatgatcttgccaagaagctggaagacgttgataaggctaacttcacacctgaacgtaaggctgaaatcacagcacagctaaaagcacgtgccgataatgatattgcaatcgctcaacaagcgttaagaaccaagttggatgactataagcaattcaacttgaccgaagagcagttacttaaggaaagttttgatcgtaagaaattttctgcggcacacgacattgaattaagtaagtcacaacgtgatgaggcaattaagtatcttgatgagctatatcaacatgagctggaattaatcaacctcacaaaggctgcacgccaagcggcatataatcaggctaatctaaaagctttgcaggaactaaaacagcaaagagatcttttagctgcaccatttgaacagcgagcaggtctttcactgcaatttggtgaaagaaatgcatacgctgaaaatgacaacaacctgattaatcagcgagatgagctaaaaatccaacttgagcaaaaagtgataacaacacttgaatacaacaaacggattgaagatgctgttttgcttcacgagcaaaacaaatacaagatccaggaggagtactcagaaaaatatagtgacttgcagttcaaccaaaaccaaacgcagctaaatatgtattcttccatgatctcggctgctcaaggaacatggggaaccatgacaagcattattaaggatgctcaaggggaacaatcaagtgcatataaggcaatgtatcttgttcaacagacaatggccgctgctcaggcaattatatacggaaatcttgcttccgcagctgcactagctccacccccaattggtttggggccagtagcaggtattccattgtcaacgctgatgaaaaccacaggatatgttaatgctgcattgattatggctcaaggtgtagcaggtatagctggcttttcatcaggcggctacacaggcaacatggggcgaggtgatgttgcaggtgtagttcatggtcaggaatatgtactgaatgccgcagcaactaagcgagtaggcgttgatacattaaatgccattaactctggtcaatcctttggtagttctggtgcaactgtcctagaaccaatcgtgaatgtctatgtcatggaaggtcaaactgctgacgtgactagaaatgacgatggttctttagatgttcgcattaggcagattgctggcgaagttgcggagcaggttttcctacagggaattcaaaaccctaatagtagaatcagcaaggcattcaagcaaaactacaatgcaacacctagacgtcaataa

SEQ ID NO: 42609 - DNA, 417 bp, Acinetobacter baumannii
atgagtagaaatgatactaatttattgataaaagcaatttcagaaaatgcacatcgaaatgaatcttacccagatttctatgtaacagtcggggttggtggcagcgtaattactggcactgcaatcagtgaagaagaatttttcgaactcgaagaaaattcactctggaaggaattcttttattcccatatcaaagagccaagagaagagataattaaaaagttagatgatggtgaggaaattaaatttccagactcacttaaagaacattttttgtaccttaaagatgcaaaatatattcaaaattcaaaattgttccctgctgcgggcagaccattaagtattcagatccgtgtgtctgatatctcaactttaagccttgttgaattttgtcagggcaagcctgctgatgagtaa

SEQ ID NO: 42610 - DNA, 477 bp, Acinetobacter baumannii
atgaacacattaaaatattgctcaacacaagaaggctattctgtcgcattccaaagtggggtagcttcacaggatttggatggaggagcaccgcgcaatagaaggctgagtaaaaatagctttcacactgttagcgttcaatggaaggtacttgaagctggatttcaatatcttgatgcgttctataacgtttggtgtgaaacaccaggagagatgtttaatgcttcacttcgggtaaatggaccagagttcaagccctataaatgcttatttgttccagatagcttccaactaacaagtatgcaaggtccagtctatacagtaacagctcagttgcgagttaagccaattgtagactctgaacttaataagatcattgttgagactgggaatggtggggaggacttggcgtcattggttaacccgctcgaagaactggtgaatgacgatctgccaagagccatggagggtatatag

SEQ ID NO: 42611 - DNA, 507 bp, Acinetobacter baumannii
atgcctgactatacatcattctttcttaactcgagcagtggtgtggtgccattggaatgtgttgagattactcatcccgactttaccgagccattccggtttgtcaaaaacgatacagaaggtgtgactgtaaagcatgaggcatcaggtccagatgtttcatatgaatatcaacctatgtccattcaacgttctacagtcacaaacgaccttgaccagaagcttagcctaaccattgccgatgtagacgatgagttaattaagtcagttgtttcagcacgtttaggcactaactggaaaaccagaccttctgttagatggcggttataccgagatgatgatctaacagcgcctatggtgtctttacaaacattagaggttgctactttatctaaagatggctctggcaactgtacttttgatgcacaggcacctgaacttaatagcgtaaagactggtgagatttactctcttgagcgattcccactgttgcggggcatgatatga

SEQ ID NO: 42612 - DNA, 2847 bp, Acinetobacter baumannii
atgagtttgaaaaaagtcatcatcgttcctgatgtttatgaccgatctacatggtcagaagctgatgtggaggatgttttagcttatatctatcagcagtttgatgtatggcctgaaaatgcaaagatttatcacaaccagattgcggaaagttgtgatgtcactcctaaccatccaaaaagaattaatgcacaacttgagcatattcaaactcttgaaggtaacttctttgtagtgatagagccagcagagcctatctcgctagctatgtgggtattttatgcgattgtagctgcgactactgcttatagtctctacactgttttaactatgccgaagccacaggcgccaactgtaggttcatcaaataatgaactagcacaacgctctaaccaagctcgattaaatggacgtattcctgatatcttcggtcgagtccgttcttatccggatttaattgctcagccatatacttattttgacgatgcaacaggaaaggaaattgaatactgcttgatggctatcggacgtggctactatcagatagaagactgtcgtgacggcactactgaagtttcaggaattgatggggtcagcgtctcaatttatgatccaggtgtatccattgtgaatggaattccaacatatcaagttggagaggctttcaccgagccaccattatctgtaatcaaatcaagcgcaatcaatggccaaactctgcaatacccaaatgatcaaaaaattgagtcaagcctgatttactttcaatacccaaatctaattaagacatctggttcaacaattgatttcactacattgtttactgctaacgatattgttgccatttataatgctagatatggtgtgcttgatgtgatgctatcaggcgaaatcatggtgacaagttcgggttcagtcatcattgaatctacaaccaatattgccaatgagaacacattcaaaggtttgttactaacaggggcgcttgttgatatctctacaacttcgggtgatccgccagaaacaactgtgaccaagcgagacttgtctggtcagtatgtcatttcaggcattactaaaactgccatttcaggtggttttcattatgagattgttttgtcaaacccaaacacagtgaactcaaattggcagtatgtgaatgatgactatacgcttacatctggagcacttttaaataaaaacactcaaggtattaatcttgatggttcttatacgattgcgacaattacagcagatacgatcacgcttgcaccaccatcatctgtaaataatgaatgggacaagctatcaacgctgccaaaccaaaacaccactggccaagacgttttagtgcgtttagatggttcaactgacaagtgggtggggtggtttaatattgccaaaaatgatgccactggcctgttttacaatcttgtgtatccgcaaggtttgtattggcagtcacgttctggtcggcaagatgctcacccaagccgcatcaaaattgaatatcagcagatcgacaataataacgtaccgttcggagcgatttattcaaatgagttctatatttttgataggaagctcacgcagtttggtaagtcggtcaccgttgattttccgtttactggctcattccgattccgtgttgcacgtttgacaaatgatgattcaaatgcacgtgcagatgtcaaaattaaagatgtgtttgggttttctatctcggataaagacatttacaacaatgtgactgtattgcgttctcgaacagttgctaccgatggcgccctaagcatcaaagaacgcaagctgaactgtttagtgaatcgcaaactaccgcttaatggcacagggcctttacaggtcacacgttcagcagggcaggcacttattaatcttgctttagatgagcacattggccgccgaactagcgcggaagtggatattgcacaaatcaatgctgagattgccaaagttaatgcttattttggttcagaccttatgtctgagttcaattacaccattgacgatgacaatctaagctttgaagaaattgcaggcatggtagcgagttctgctttctgtgaaccttaccgattcggcagtctaactcgtctcaagtttgagcaacctcaagaaaatgccgtcttacttttcaaccatcgaaacaaagtgcctttaacagaaaagcgctcttatacatttggtgtacagaaagactatgacggggtggagcttgaatacacttctgatgtcgatgacgcgcgtgtgaagtacatcattcctgaagacatcacgcctaagaatccgttgaagatcacgaccacaggcattcgtaatgaagctcaagcgaaagtacgagcgtggcgtgagtggaataagcttcgctacaagtacatgtcttgtgaagtggaagttctggacgagtcagaattgttgattcgtaatgaccgaatcctcaatgctgacaacacagttgtagacactcaagatggtgagattgagtcagtagatggcttgatcgttaaaacctcacagccatgcacttttgaggcaggtcatgactactacatttatcttcaaatgtctgatgcaactgtagatatggtgccatgcacagcaggcattgataaatatcatgtagtgcttagtcgtccgccagtacagccacttgtagttagtgatgatagatacgtcaaaaccctatacacattggttcgtgctgatcaaactgaagctcaggcattcatgcttgaagagcttacccctcaaactcaaatgaccaatacgcttaaggcttctaactacgatgcccgattctatgagcgtgaccatgactttatttaa

SEQ ID NO: 42613 - DNA, 2070 bp, Acinetobacter baumannii
atggctgatcagatcgttactcgacaggacctcgtagatgcacactatgatgcagaaaccttaggagagtttattaacggggaagaaaatacagaagtaacttcgcggttaggtagaacatattggaccttagccacaattaattacctaatttcacagggccaattaaagatcagcgaccttcaggctgctattgatattgcagcagcagcgggagcaggagccaatggatggactgctgacttaattgttgatggtgcagaaactcagaagcagattaacaagaaaacagttactcatgtagaatgtattgcagatttaatcaatattactaacgtttgggatggtagaactgtctacgttaaatcagtcttaaagccaatttatggggtagctttacctttcattgcgggaggaaattttgtttataaagcatcttcaactatgcaagcagatggatttttagtagttaatgctcctaacggtcgttggattaaggcgcttgatgagcctgaaattacagttgatgattatggtgctataggcgatggaataacagatgatagtaatggatttcagtcttactgtaatagcccatatacaggtataaatgttcgtcttggcaagagaaaagcagtttacttaataaaaaagcaagtagattgcaagttaaaaggcctgattgggaatggctttagtaaacaaaatgaagtagcgtacgcaactagttcgataagagttgccgccggcgatttttcaaatataaatccagatttggagaacttagcttttgtcaatgtcggggctgaagttagggatttgcaattgaagggcgactcagttcctacaattcatggtttacatgtaagtggctataacactactattagtaatataaatatagctgggtttggtaatcaggtatacgttgttggtgcaactgtttcattccgagtttcggacttaatgtccattagcgcaggaaatgcaggtttttactttaaggacaaaacaggtgaccaaagtacaacggcttattttgctcgctgttcgtggcaatggggcagtaaaccggttgtatttgaaaaagaggcttatggatgttctttccataatattgtgcttgaatatatgggaggagggctgcaagcttcaatttggtcaaactgtgttttcgataatatatgggcagaatcaacacttgatagccaacctcatgattggttagttaatacaaccagtcagcaaagctttaataaccaatatagtaatttatatattagaactccatggataaatcgagcagaccctaatgctttagcagtgtctaataatcctggtggcatccagttggacaactcagcgatagctgttgcatctgctactggcggaaaaattagattagatgtgaatggtttaagtacgctttttgctaattggtatggtgcttcaaacaatcccttaagtagtcgcgcactcctactgacaacacaagaccgagcatctgaaagcaactttgacacacctattgttattgctgctccaaacggttgcttgtgggaaagaaataggagcgctacagattatacaccagtaacaaagcgacgattaattggagctaatgcggataatactgctgcatattatggtgttgattcgtataccaagacggttcgcaaatggtcaacctacaatcatcaagtctcagcggcgggccaatttatggcgccaatgatgctgacatatgatgctgcttgggacaagcaacaaaataatgcaggctgggtaatttctaaggaatcaacaggcatatatcttttacaaagagcagcttcaaatgttcctccaatgagtaatcctaatgttattgtaggaggtatgactcttggtaataaaaaaggatctggtaatactgctaattactcacttcaattcttagacacatacgaaggctcttggaatacttggtctgagtgttcgggtgtaaagatattttttaaagatcaagctgggaatcttgtagatgtctttagattcactgtaatgtttactcttgtaagtggattctaa

SEQ ID NO: 42614 - DNA, 150 bp, Acinetobacter baumannii
atgagagaaagtatctttgttggattaacaattatagctattattgcaatttcagcttttgtgcttatggagaaaactacctctactgggaagaggggtggttgtgatattgtgggttgcatagaagaaagtataaaaaatcaaaaataa

SEQ ID NO: 42615 - DNA, 1044 bp, Acinetobacter baumannii
atgaaagttagaattaaccgagaaactattgttttcttagtcatatctttgactgctgcaataattgtaggaatgcgtggaaatacaaacgatacgcaagattactatgatgtatttcgagcaatcaactcacttccaatcttaagtccaactaaattttattctgaaactggcatggaagttggtttcggttggtttgcttatgtggtgaatatatttacttcatcaagtgtggtgatgtttacacttttctcttttattaatttttattttatttacaagacaactaaattattagatattttctacccttactcggcatttttgtatctatcgagtgcctatttcttcatgcagcaattcatgcaaatgcgtcaaggattagcggtaagtattgctatttttacagttgtttgggcaataaagaaaggttttaagttctggcaactcttattgttagccctatctgtttcattacatcaatctgtagttattttaatagcattttgtgggttgttttatattttcaggaatactttattatttagcccaaagtttcacaaatttgcaaattggggctttttcgtagtatttattgtcttctttaaatttattcttcttaatcttttgataaacctgtctggcagattacagagttatgcaagcagtgagagttacaatgaggctattgggttatttagcctaccaaatatcagaacttttcttatccttatggttctgacttatttttcaagtcgaagaattaatgaaaacgttttttttagattattcatctttttaatgtttacggctttagcaattcgcattggattcgctgattttgctattatgtctggtcggttatctacggctttttcatatgtagaaatttttgcactgccaatgttattgttagatcgatttaaattaagagcaagaatagtattggttttagtagtttgtttactgcaaatgattgttacattgggttttcaagccccatacttatttgaactatacttcgagcctctctatacttattaa

SEQ ID NO: 42616 - DNA, 357 bp, Acinetobacter baumannii
atgactgaaaatgaatcatacgggttgagatttgaaaagaaaatcgactccattcagagtgatattcgcatgttgtcagatcatgttactcgactgacttttattaatgaagcacacaaagagactagcgaacagaacaaaaaggacatcgatacattagatatcaaagtcgccaatttagaaaaccgcacagcagcgcaagatggtggaatttctgtattgcgtgtactgcttggcatctttgcaggcatcgtattttcattgtgtgcgtgggttggatcttcaattattcaattaagccaagatcaatctttaattaaagagaaagtatcacggttagaggaagcaggacgatga

SEQ ID NO: 42617 - DNA, 219 bp, Acinetobacter baumannii
atgaatagtgaaaacacaagagcttatctagctttcgcattagtgggactgatgtttgttttagtgattgctttattttttgtggatatgccacgtgaaaatagcaatctgattaatacggcattgggttttattgctggggctatgacaacagcatgtgggttttattttggtagctctgagttagagaaaaagaaaggtgaatccaatgacaactaa

SEQ ID NO: 42618 - DNA, 555 bp, Acinetobacter baumannii
atgacaactaaaccattcttcgatgctgcccgagtgattgcaggcggcaagcttacacaagcacaagtagacgatttaaataaagtcattgataaacttgcaccaggtggaaaaactacaagtgatgttggtgttgacttaattactggttttgaaggcacacgattcaaagcttacgatgatggtgtaggggtttggaccattggtactggcaccacagtttatcctaatggtgtgaaggttaagcaaggtgacacttgcacacctgagcaagctaaagcctactttaaacacgacttagctaaatttgaaaagactgtaaatgaatctgtgatagtgcctttaagtcaaaaccagtttgatgctttggtttcactgacttacaacattggctcaggtgcttttaataattcaaccttattaaaaaaactgaataaaggtgactatcaaggcgctgctgatcaatttctagtgtggaataaagcgggcggaaaagttttgaaaggcctagttcgtcgccgagaagcagagcgagcactctttttaaagaagtaa

SEQ ID NO: 42619 - DNA, 1215 bp, Acinetobacter baumannii
atggcctctgcaaaactttccgacctaaagattaaagcactaaaacctaaagaaaaagtctacagaatattggatgcagatagactttacatagaagttcgtccttcaggagctaaagtttggcggtttaagtttgtttttaatggtaaagaatcttctatgagtcttggcgaatacccggctattactttggcagacgctagaatcttaaaggatgaaatgcgagcaaaattagccaaaggcatacacccagtagaagatagacaaaataataaggccaaggcattagaagaaggaaaaaatacattcaacgctattgcagccgaatttaaagaaaaacgtatgacgttgaagtctgaaatttatcaagagaagttcgatactgctttagaaaaagatatatgcccagttattggcaaaaaaaatattaaagatgtgactgcggctgacgtattgaagattttaaataatacgattaatcgtgttactaaagaaaccaatggaaaaatgacaggtgaatctgccgctttacaaaatcgaagattcattggtgctgtaactcgttatgcaattgctactttaaggcttgagaacgaccctacttatgctgtacgtgatgtgatcaagcgccctcgtgtaaaacatgcaagagccttaactaaagaagaaagaaaaaaggcaagaactcaattgcctaaatacaatggaacagagactgttaagaatgctggcttcattctcttatatacaatgcttcgggcaattgaaattagaaaaatgcaatggaaatgggtcgagtttgatacacgacttattagatttccagaagaggcaatgaaaaaatccagaatccatattctccctatatctgaccaagtatatgaagtacttaagcgtcaatatacaatctctggtgatagcgaattagttttccctgctattttcagtaagaaaaatgatggcatgttagctaaagaaacgcttaacagtatgcttgaatatattggcttaaaaggcgtgaccactcatgattttagagctacagcttctaccctactatatgaaaagggctatgaggaagcttgggtagaaaaacagcttgctcatgctgaatctaacaagacaaaagcatcgtacgaccattcgcagcacttagaggctagacggaaaatgatgcaagactgggctgatattgtggatagctggaaagactaa

SEQ ID NO: 42620 - DNA, 492 bp, Acinetobacter baumannii
atgtctaaaacgcgtgtaatttatcctggaacatttgaccctatcacgaatgggcacgttgatttagttactagagcatcaagaatgtttgatgaagttgtagtagcaattgcaattggacatcataaaaaccctttgttcagcttagaagaaagagttgcactggcgcaatcatcattaggccatctatcaaatgttgagtttgtaggttttgatggtttgttggttaatttttttaaagaacaaaaggccacagcagtacttcgtggtttaagagcagtttctgactttgaatatgaatttcaactggccaatatgaaccgtcagcttgatccacatttcgaggcggtgtttttaacaccttctgaacagtattcttttatttcttcgacattaattcgagaaattgctcgtttaaaaggagatgtaaccaagtttgttccgcaagctgtggttgaagcctttgaacgtaaacatcaacaaggttggtaa

SEQ ID NO: 42621 - DNA, 264 bp, Acinetobacter baumannii
gtgtcgttatatatcactgatgaatgcataaactgcgatgtttgtgaaccagtttgccccaatgaagcgatctttatgggcgaagtgatttatgaaatcaatccggatttatgtacagagtgcgttggtcaccatgaccagccacagtgccaattattttgtccagtagactgtattccaaaagatccgcagcatgaggaaacggaagaacagttactcgacaaatataaaagattaattgctcaaaaaagcacaagcaattag

SEQ ID NO: 42622 - DNA, 1185 bp, Acinetobacter baumannii
atgaaaaggtcattattatttttaggaattctaagtttaactgctggagcacaagtctctgcagctgatttgagttggggtgatccaactttagattcgggtcaatttaaagtatctggtgcagtacgttctcgctatttacataaagattatgtggtcggggccaatgaaggttctcaaaatgatgactggcgacttactgatattaaattagtgttaggttatgaaaacccaaactggattgcaggagcagatgctcgctgttatcaatatgatcgcttgtgtgatgcgatttttctaaaaaaagcttgggtagggtataagttatctgaccaacaaagagtcacggcaggtttgcagcctgttgattttggctttggtgaattttggggaagtagttattacgaaacgcttttaaataccgttggtttagaagatattgataatctggggattaaatataaatttgcagatgacaaatacaatttaaccttaggattctatccaactgatggaggaaattataaggggacatcaaaagactcaagccgatatagtggtaatttcgttgaagctgatgatttaactataggaaccaatattaaagaaaaaaatatgtggattgcgcgggcctctagaaaatttgagcttgataaagctcaaaaattttcgaccgagttaggtggttcagtttggtattcagatttagaaaataaaagaacagatgaagatggacaccgcaaatcatggaatgtatttgctcaaacgcaatatcaagcatggcaatggatgttcttagcaggtaagcaagatgtcactaatggcgataatttattgccaaatagctcaaccattggagcatttgattacccgtatcaagttgctaacaaaggaaaatatctggtcaatgaaattaactatacctttgctcagccattccacaaacttgaaaatattaaaccctatatctctcatagccgctttttcaaagatgaggatggatataaagactctgagcgtttaattgcaggcgtttattttaattacaaagccattggtattcagggtgaatatattatgagtaaaaatgatccaatggtaggtggtggggcaaatggccttgcacaaggtagcagtaatgattgggataaactgttttatctttcaattggatattatttctaa

SEQ ID NO: 42623 - DNA, 981 bp, Acinetobacter baumannii
gtgaataatctacctaacctatcggatttaaaggttttttgcacagtcgccaaactaaaaagttttgtcgaatctgctgaggaacttgggacatcgccagcttttattagcaagcgaattaatattttagaaaacacgttgagctgcaaactttttcatcgcagcacacgtcacgttagcctgacggaagatggcaaacttattcttgaaagagtttcaaatattcttgaagaatttgatgaagtttgtgaactggtcaataacccgcttagtacgcccacaggtcgtatggacattattagtagctttggttttggcagaaagcatatcgcacctattctgtctaaattaatgatgctttatccaaagcttcagattcattttgacaccatcgacaataccaaagacctgattcaacacagcattgatttagacatcagaattggtaatgaaattgcgccaaacatgattgcgaagaagctggcttctaattttcgtattttgtgtgcgtcaccgagttatttacttaaacacggcgtacctgacagtattgaagatttgcaaacacatgactgtttaacaattagtgaacgcgaccaatcctcggttttatggaaatttaggcatgcttccgaagatgtctcagtgcatatcaaaccccgctttgtttcaaataacggcgaaattattcatcaacttgccatagaaggtcacggtattattttccgttcgatttgggatgttgcagatgaattgattaccggccaacttcagcatattttgcctgagtactggcaagatgcagatgtctgggcagtttatccatcacgactcaaaagctcctccaaactgcaaacctgtattttgtttattcaaaacgaattgctcaatcgtttacagcatgtgcaaaacctaagccgtggacaacttatttcaccagcggtcaaacgagaaccaccgcctgaaaaagtctttctataa

SEQ ID NO: 42624 - DNA, 1113 bp, Acinetobacter baumannii
atggcaaaaagatataaagttgccacgattgcaggcgatggcattggtttagaagttctaccagaaggcattaaggttgtaaaggcagcagcagagaagcatggcattgagcttcagttagatgctttcgattgggcaagctgcgattattaccttgagcacggcaaaatgatgccagatgactggtttgaaactttgcagggctacgatgcaatttattttggcgctgtaggctggccagataaagtgcctgaccatatttcgctttggggttcgctgctccagttccgtcgtggttttgaccaatatgtgaatttacgtccagtgcgcttaatgccgggtgtgaaatgcccattggtaggtaaaaaaccgggcgatatcgacttctacgtggttcgtgaaaatagtgaaggtgaatactcagcgattggcggtaaagcttttgaaggcacagaccgcgagtttgttttacaagaagccgtatttacacgtcatggcgtagatcgaattttgcgttatgcatttgagtttgcaaatcagcgagatgcgaaaaaaattaccgcagcgaccaagtcaaatggtattgcagtgagcatgccgtactgggatgagcgcgttgatgcgatggcaaaacagtatccacaaattcaagctgataaacagcatgttgatattttagcggctcgttttgttttacaacctgaacgttttgatgtggttgtggcatcgaatttatttggcgatattctttccgatttaggtcctgcatgtacgggaaccattggtttagcggcatcggcaaatttaaacccagaaagaaaatttccatcactgtttgaacctgtccatggttcagcaccagatatttacggtaaacaaattgccaacccaatcgctgcgatttggtcgggtgccatgatgttcgaattctttggtgaagaagacgagcgctgtatccaagcgggtcaagatattatgcaggcgattgagaatgtattaattaatggcccaaaaacagccgatatcggcggtcaggcaaagacttatgaggtaggagatgcaattgcatcatgtgtagcccaaactaaaatggacgtattcgctatggaataa

SEQ ID NO: 42625 - DNA, 1647 bp, Acinetobacter baumannii
atggataatcaaaacacaaaaatttatacggataaatttcttgccgtaaccagcttactgtttgtatttatttcagttgctggtttggcgatttattcgcaagaatcgataaagattgctgcaacgtggatgcagtggacgacatcggtatttacaaccccagtattactgtttgcttttttagctatcatttttacttttggtcttgcctttagtaaatacggaaaaattaagcttggagaaggaaaacctcaatacagcacaatgtcatggatttttatgttcatcttgtcgggtattgggtcttctacattgtactggggctttttggactgggcctactattatcaaactccgggtttgagcttaccgcctgagtcagcagaagcattgaaatatagtgtggcttactcgttttttcactctggcttaagtgcttgggcaatttatgctttggcatcaatttctttgtgctacagctaccatgtgagaaaaaacaagggattaagtttagcttcagtgattgaggctgtgacaggctttaaatcaactggtgtggttggtcgtttagtcgacttaatgttcttgctttgcatgttcggtgcattgacgatttcattggtactcactgccgtgacatttaccaatattttgtctcagctcacaggcattccaaatacctttatgaccaaggtcatcattattttggcagtttcagttctgttcgcactcagttcatatgtaggtatggacaagggcatgcagcgtttaagccatatggtgtgcttgggtgtagtgttatttgcaatttatgtactttgctttggtccgactcaattcattttgaataattcattaatgagtttcgggttaatggcaactaactttgtcgatatgagcttgtttaccgatccaatgggtgacggcaagtttacccgtgaatggactgttttctactggttatggtggatttcatatgcaccaggtgtggcactctttgtaacgcgtgtttctaaaggccgtactattaaagaagtgatctttgccatggtaattggtggtagtgtcgggctttggttcatctttggtgtgtttgaaaactatagtgtttatagctttattcatggggctgtaaatgtaccgcaaatcttgagccaacaaggtggtgaggttgcgattggtcaattgcttagcctgttacctgccggaaaactcatgatgtggattttcctcggcattatggtggtgttcttggcagcacacatggatgcagtagggtatgcggtttcagcaacatgtacacgcggtttaagtgaagggcaagatccatcgccaaatgcacgtttgttctggtgtgtcatgctgaccttagttccaattgccatgatctttagtaaagcaccattagacaccatgaaaacggcaactattgtgacggctttaccattcatcgtgattattctgattcagacctatggcttagtgaaatggctcatacaggattatgccaaagtcccatcacatttaattgagcaacaaggttatgatgagcaggaaattggtttaaaccagactcaagatgaacatgcaaaacggatgcagcttgagcttgcaagctcaatcaaactggatagaaaaaccagctag

SEQ ID NO: 42626 - DNA, 975 bp, Acinetobacter baumannii
atgacgacatatgaacaggctacttatgccttaagtgaagaaatgcaaagccttgtgtattggagcagcatttattcaccagcagatgcagatattgactcagtccgtgcggcatatgatgccatgtgccgacactacactttgccacgtgatgacaagttagatgtagaagatcaagtgattgcaaatgaagagcatcctgtgcctgttcgtgtgtatttaccaaaaacaaatcgacctgagtctggttggccatgtgtgttgtatctacatggtggtggttggatggtgggtggactcgattcacatgagtttattaccagttatttgtgtaaggacttaaatgcggttgttattagtgtggattaccgcttggcaccagagcatcgctttccagcagcctttgaagattgtttagcagtctatcactggcttaaacaacatggttcagcttggcaaatcgatagtgaaaatatcgttctagcaggcgatagcgcgggcggtaatttagcagctgcccttgcagtggaactacaacatagtggtttacaagctcaagggctggtattggtttatccatgtttaacgacagcatttgataccccatccgcacaaaagcacgcccatgcgcctttgttaacgacagaagatatgcatttttatttaaaggaatatgctccggactcacaagattggcaggatttacgtctagcccctttattggcgacggacttttcagatatgcctacaagttttgtagccgttgctgaatatgaccctttaagtgatgacggttatttccttacccaaaaattggaacaagcaggtatccctaacgagttccatttaggcaaaggtttattacatggcagtttacgtctgatgcgtgactgtccggaagttcaacagttatatcaaaacatgctgagtgcgatacgccgcatgtttggcagtgccgaaaagacatcaatttaa

SEQ ID NO: 42627 - DNA, 1116 bp, Acinetobacter baumannii
atgagtgcagttgaaaaattacctgaagatttttgcgcaaacccagatgttgcatggactttccctaaagttttctatacttcatctcaagtttttgagcacgagaaagaggcaatctttgctaaaagctggatttgcgttgcacatggtagtgagttggctcagccaaatgactatattacccgtaaagtaattggtgaaaatattgtcatcattcgtggtaaagatagtgttctacgcgcattttataatgtgtgtccgcaccgtggtcatgaacttttaagcggtagtggtaaagcaaaaaatgtaattacctgcccatatcatgcatggacgtttaagctagacggtagcttggcattggcacgtaactgtgaccacgttgaatctttcgataaagaaaactcaagcatggtgcctttaaaagtcgaagaatatgcaggtttcgtatttattaatatggatgaaaatgcgacttgtgtagaagaccagctaccgggctttgctgaacgtttaaatcaagcatgtggtgtgattaaagatttaaaattggcagcacgctttgtgacagaaacaccagcaaactggaaagtgattgttgataactatatggaatgctaccactgtggacctgcacatccaggctttgctgactctgtacaagtcgataaatactggcatacaacacatcaaaactggacactgcaatatggctttgcacgttcatctgagaagtcattcaaacttgatccatcagtaacagatcctgagtttcatggtttctggacttggccttgcaccatgttcaacgtaccaccaggcagcaacttcatgacagttatttatgagttccctgttgatgcagaaacaactttgcagcattacgatatttactttacgaacgaagaactgactcaagatcaaaaagatttgattgagtggtatcgcaatgtattccgcccggaagatttgaacttggtagagagcgtacaacgtggattgaaatcacgtggttatcgtggtcaaggccgtatcatgactgacaagcaacgttctggtatcagtgagcatggtattgcttacttccaacatcttgtggcgcagtaccatcaataa

SEQ ID NO: 42628 - DNA, 1452 bp, Acinetobacter baumannii
atgtcgagtttacaaagtactgaactatttcagcaacaagcctatattaatgggcaatggctagctgcacagtcaaatgcgactgttccggtaagtaacccagctacaggcgaagaaattggcacaattcctaatatgggagcggcagaggcaacccaagcagttgaagctgcctatacggctttacaaagttggaaagctttaacggcacaaaaccgtgctgatatcttattggcttggcataaactggttctcgatcataccgatgaacttgctttaatcatgaccattgagcaaggcaagcctttagcagaagcaaaaggtgaggttcgctatgctgcatcatttattcaatggtttgccgaagaaggcaagcgtgtttatggtgatgtgattccaaccgtaaataaccagcagcgctttattattagtaaagaacctgtgggtgtggtggcagcgattacgccgtggaatttcccaattgccatgattacccgtaaagcagcgccagctctagcagcgggttgtacggtcgtgattaagccagccaatgaaacaccttactgtgcattagcgattgcaaagcttgcagaaaaggcaggtataccagctggtgtgattaatgttgttactggtaaatctcaagaaattggctcggtatttacttcacatgaaaaagtgaagaagttaacttttactggttcaacgccagtgggccgtttattgatgcagcagtgttcaagcaccattaaaaaattggcgcttgagttgggcggaaatgctcctctgattgtgtttgatgatgccgatttagataaagctgtacaaggcgcgatttttgccaagtttcgtaatgcaggccagacctgtgtttgtgctaaccgcatttatgtacatgacaatatttatcaagcttttgccgagaagtttgtacaagaagtacaaaagtttaaagtcggtaatggacttgaagatggcgtacacattggcccattaattaatgaaaaggcagttttgaaagcacagcagttaattgatgatgcagtgagcaaaggctctaagattgcctgtggtggcaagcagcatgctttaggacaaaccttttatgaaccatcagttttaactaacgttgaccgtacaatggaaattgtccaagaagaaatttttggtccagttgcgccgctcattcgctttacagatgaaacagatgtggttgctcaagcaaatgacactatcttcggtttggctgcgtatgtttatagcgaaaatatttcacgtttatggcgagtgtcagaacagcttgaatatggaatggtcggtatgaatgccactgcaatttcaaatgaagttgtaccatttggcggtgtgaaacaatcaggtgttgggcgtgaaggctcaaaatatggtcttgaagaattcatgaccattaaatacatgtgtttagggctttaa

SEQ ID NO: 42629 - DNA, 957 bp, Acinetobacter baumannii
atggcgagtcattatgaaatgttcccaacggttgttactcgtgtggaacagctaacccctttaatcaaacggtttacgttcaaacgtcaagatgggcagaactttcctcgatttagtgggggaagccatattattgtcaaaatgaatgaacaactttctaatgcctactcattgatgagctgtacgcaagatttatcaacttaccaagtctgcgttcgtaaggatgtggaaggtaagggtggatcagttttcatgcatgatcagtgcaatgaaggctgtgaaatccagatttcagaaccaaaaaatttattcccgctagctgaaacaggcaataaacatatcttgatagctggtggtattggtattacaccattcttacctcaaatggatgagctggcagcacgtggagcagagtatgagctgcactatgcttaccgttcacctgaacacgcggctttacttgatgaattaaagcagaaacatgcagagcacgtatttagttatgtcgattcagaaggcagcatgcttaacttagatgaattaatttcatcgcaaccaaaaggcacacatgtatatgtatgtggacctaaacctatgattgatgcggtgattgattgttgtaacaagcatcgttaccgcgatgaatacattcattgggaacaatttgcctcaacagttcctgaagatggtgaagcatttacggtggtacttgccaaatctaatcaggaaattgaagtacaaagtaaccagactattttacaagccatcgagacattaaatattgatgtggaatgtctatgccgagaaggggtttgtggtacatgtgaaaccgctatcttagaaggtgaagcagaacacttcgatcaatacttaagtgatgccgaaaaagcttcacaaaagagcatgatgatttgtgtatcaagagcaaaaggcaaaaaattggtattagatctttaa

SEQ ID NO: 42630 - DNA, 1029 bp, Acinetobacter baumannii
atgactgagcagaaaaactcatcaaaaactacagcacttgctcaagcacttttgcttgagcaggtggaatttttcaaaaaacaattatctatagaaaactcacctatctatttccggcaatttattcagctttttatgcaacatgccgatgaaattaaactttatgaagttgtggatttagaacaattacaagccgttgtgaaacgctatgcttttgaaatgcagcttggtgcaggcttgcttgagtttattggggaaattgcacagcgtatttatttatctgccatgaaatctccagttcagctacaagacttggtatccgatcaccagtttgaaatgtggctttccaaatttttggaaatggagcatattccacattatctcaatcaatttttaagaactagcccatctgtccaacaactttgccaatatattgccacttcaaccttagaacaaaaattacctaaatttctaacagcatctagagtggatgattaccattttgaatggcaacataaacttaaaaaattctcttttttacagcaacagcgtcttgagcataagcttgaaacgtggattgccagctttattcatgaacaactgacagaattaagccttttatcggctgaagatttagaaagcttagtacgtcatatctgggaagatattagacataaaaaaatctatgaatttatgaaacagctcactcctctcgatgttgaggagttctttgttttaatttatgaatactggaaagaattaagacagtcacaatttatgcaaggtcttattttgtatggtgtcgaagttttttatgatttttataaagaccagagtttatttgaagtattaagtgcaattggtttatccgaaactgacttacaaactgaagctttacgtttttatccaaaagttatggatgcctttaatgaacacggtattttggaaccgttacttcaagcgctcttagctcctttttatcaaagttcaaaaacactcgatataattgaaaaacattttagtgaataa

SEQ ID NO: 42631 - DNA, 1626 bp, Acinetobacter baumannii
atgaaaagttttaaagttgcccttgctcagttttctccgcatattggcaatattgactcaaacacccaaaagatgattgagcaagcaaatcaggcgaaaaaacaagacgctgacctgattatttttcctgagctttctgtgattggttatccagctgaagacttattgttacgtccaaatttaaataagcggatgcaaaaggcttttgctcaacttagtgaagttaaagatattgtgatggttttcggcttcgtaaaccagacagaagatggccaacgttataattcagctgctgtcatgaaagacggtcaggttttaggtgtcttcaataaacataacttgccaaactatggcgtttttgatgaaaaacgttatttccaaaaaggccatcagcacttggtatttgagtatttaggccataagtttggtgtactcatctgtgaagatatctggtcaatcaatacagtaaaacaattaagccaattaaatgttgatactgtacttgtgcttaattcatcgccatatgaagtgggtaaaccacagcatcgtaaacagacattaagtgagcttgcaaagcagcttcatttaaatattgtttatgttaaccaagttggtggacaagatgatttaatttttgatggtacaagttttgtcagcaatcaaaatggtgaaattgctttacaagcacctagctttaaagaagatctctatattgctgaatttgaccgcgatacaaaattatataaagttgtcgagtctgctcctgcactagaaacttttgcagagatctatcaaggtctagtcatggcaacacgtgactatgtagagcgctcaggttttcctggagtaattttaggtctttctggtggtattgactctgcccttacgcttgctattgcagttgatgcaatcggtgctgagagagttcaagctgtgatgatgccatatacttacacatctcaaattagtgtagaagatgcagcggaacaagctcgccgtatgggcgtgactttcggtattgccgaaattcattcaatcgtaaatagcttcatgcaaactttgtatccattctttggtaattcaccagccgatgcgactgaagaaaatttacaagcgcgtgctcgtggcacattacttatgggcttatctaacaagtttggtaatttagtcctttctacaggtaataaatctgaactttcagttggctattgcacactttacggtgacatggtgggtggctttgctgttctcaaagatgtttataaaacaatcgtgtttgaattagcaaaataccgtaatagcttaagcgaaactccggttattcctgagcgtgtaattactcgcccaccttcagcagaactgcgtccagatcaaaaagaccaagactctttaccagcgtatgatgtattggatgctatcctttatgcatacattgaggaagatttaggtcaggcagacattattgccaaaggttttgataaagaagttgttgaaaaagtcatccgtttagttgatcgtaatgaatataaacgtcgtcaaggtgcgattggcccgagaattacttctcgtgcatttagtcgcgaacgacgttatccgattgtcaacggttggacagcgaatgactga

SEQ ID NO: 42632 - DNA, 561 bp, Acinetobacter baumannii
atgaacttatttactagcaaaactatgttcactctcaacgcttttaaacttgtcatatatcgacaatttattattttcaccctttttatatttcgtcacttaaaaagctatccgattcgatttcttacacctgaagaaaaagctttagcacaaagggtgtttgggagtttgctagattgtgaacgtcctaaaattattgctactcgttacttaccgtggcaagcgcatggaattttgatggctccaaatgggaatatatacgtcaatctttctgactacagcagtaattacgcgctagagtctaaattcatacaagggatttttattcatgagctagctcatgttatgcaataccaacgaggtattcatgtattactaaaaggtgcgttactgcaatccgcctactatctgagttttaagtattacaacccttataaatatacttaccatcctcagaaagcgtttagttcttacaatattgagcagcaaggagaaattgctagagatatctgttcaggtaaactgccaaatatcatttgtttacctcaacttgatttgtaa

SEQ ID NO: 42633 - DNA, 861 bp, Acinetobacter baumannii
atgaaaagtctggcttttattcatcgtaacgatactcgctttgcggtcggtgatttttatccagttctttctgttttttcctaccatgagttaggcaataccctctcacccttcttactactcgaccattcaggtcccggaaaaattgcaccttctatgaaacgtagaggagttaatgatcatccccatcgtggattcgaaacggtaacacttgtttatgcaggtgaactagaacacaaagattcatctggtggaggtggatttataagtgctggtgatgtgcaatggatgaccgcagcctctggtgtgattcatcgggaattgtttagtgaagagtattctcgatctggtggtccttttgaaatgattcaactttgggtcaatttaccagcagcaaataaaatgaactctccgcgctatcaaagtttaaagaaagctgaaataccgatggtgaaactggaaaatgaggctggatttgtacgtattattgcagggcagtttaaccatgttataggtcctgcacttactcacactcctattaccgtattagatgtagagctccatgcaggtcaacaagccgccttccctgctcaatctggtgaaacagctttagtttatttacgttcaggtcgggcacaatttcaaaaagatgaagacgttttagaggaacaaggcctagcagtcatgtcaaaccaaggagagcatttctctattactgccctgcaaagttgtaaattacttattttgacaggacaacccatcacagaaccgattaatggtcatggtccatttgtaatgaatacttatgatgagattttacaagcctatgatgatattaaaaatggaagatttgccaagtaa

SEQ ID NO: 42634 - DNA, 453 bp, Acinetobacter baumannii
atggatgcaccttctgatgcctttttgtgggtaaaagcattacatattattgctgtggtttgttggttcgctgctttgttctacttaccacgtctttatgtttaccatgcaatgagtgatgatgctaccagccatcagcgctttgaagtgatggaacgtaagttgtatcgaggtattatgtggccatctatgattgccacattaattactgctcactttctcgtagattggggtgatgcaactagacattaccatgaagccacttggttttatctaaaagttggattagtggctttattagtgatctaccatttagtttgtggttactatcgcaaaaagcttattggaaatgctcactacaaatcacataagttctggcgtttcttcaatgaaatgccaaccttaattttatttgctgttgtgattttagttgttgtaaaacctcagttttaa

SEQ ID NO: 42635 - DNA, 1230 bp, Acinetobacter baumannii
atgaaacgtgttgtaatcactggtatgggtattaactcatgtatcggtaactctttagaagaagttactcattcacttaaaaatggaatctccgggacacgttttaacccaacttatgctgaactcaattttaaaagtcatgtcagcgctgcggcagaacaagattttgacaatattgatcgtaaattaaaacggttcatgggcgtatgtgcaatgtacgcttataactctgctgttgcagctgttgaacatgctggcttaaaagcagaagatttagcagataatccacgttatggtattgctggtggttcaggcggtggttcaactgcttctgttgtagaaatgactgagcttttagaaactaaaggtgctcgtaaagttggtcctttctttgttccacgtaacatgacaaatacaatcactgcaaacgtgggtgtagcatttaaacttcaaggtattgctcactcaattgcaagtgcttgtgcaacttctgcagacgcaattggttatgcatataaccttatcgctctaggcaaacaagatcttatgcttgctggtggtggtgaagaagatcactggtctcaaagcctattgtttgatgcaatgggtgctttgtgttctaaatacaacgacacacctgaaacagcatctcgtccatattctaaagaccgcgacggtttcgttattgctggcggtggcggtttcgttgttcttgaatctcttgaacatgctcaagcacgtggtgcaaatattcttgctgaagttgttgcttatgctgcaaacagtgacggtgctgacatggtcgctccaagtggtgaaggtgcaactcgctgtatcttgatggctcttgaagaagcgaaacaacacggcgtagataaaattgactatgtaaatacgcatggtacttctacaccagcaggtgacgtgactgagcttaaagcaatggaacgtgctttcggtgaaggtaaagttccacctcttagctcgactaaatctatgactggtcacagcttaggtgctgctggtgttcatgaagcaatttactctgtattaatgcttcaaaatgactttatcgcgccaaacatcaacgtgactgagcttgatgaaggtactgaaggctttgatattgtgcttgaaaaacgtgatacaaaattgaatactgtaatgagtaacagttttggctttggcggtgttaacgcttgcctaattttcaagaagtgggatgcataa

SEQ ID NO: 42636 - DNA, 1326 bp, Acinetobacter baumannii
atgacaaaatttaataataatcaatctgacaatttgttttctcaggtcttcggagtggctaaaaagctcagttctactggtttaaacatcttgcagcaaagtcaaattggtgaggtaagtaaattggttgagccactttcaaatggcaaaacagtagaaggtagtgccagaaataaaagtccgtttgaagtggagcagtatgaaagcccacaacaaatgttacgtgaacatttacctaaagttactcgtcaggtatttggacgccattttagaaaggtcaatggtatcgctacatttatttcacctgactggaatgaaaaaatatcaagctatttatttgattggttgaatgactttagttcgaaaagtacgttaactgaaaaaattttagaagaagcgggggctaaagacttatttgagcttacaaaagatacctcacgctcccaacgtttaagtcaggcacttattgaacaaaataaattgattgccagtattcaaggtgcaattacgggtgtatctggaatggttggagcagccgtagatattccagtttcattagtcctagttttgagaacaatttaccaaacaggtagatcacacggctttgatttaaccgaagcaactgaccaagacgttgttgaatttatttttaaagaagttgatatcagcttaattgcggaaaagcagactttactcttggcacttaaagccttacgaaatatgttggagactcaagatattcaacagttccagcaagtacttggctcttcaaatgatattgaaaccttaaaaagctggttagttgatgaaaatggtgagtttaaatggaactggttaaataaagttccgcaacttgctgtggtaggcaagtttactccagtagctggtgcagtgcttagtgctgtttatagttggaagttacaagaagatgtaggccataaggcacaagctattttcggtgcagcaagacattatttaaatgaacatccaaatgagcatttatcaccattacaggcgtactacgcggcggtaactctaattcaaaaagcgagtccacgtcttttaaatgtgggtgaaaatggtagtgttcatgctacacagcatcataaaattgaaaatcatgatgtaatttcaaaagtatctgttgtggtcaaatcaaatacttctgaaaaaagcgaagagaaagttcaagaaaatgttcaccaaggaattgagcatcttgcagagaaacatgtagttgaacatgaacatagtgaacaaaagccagcattagagcctgaaagtgaagaaaatgatgacgttatagaggggcaaaagtactcttaa

SEQ ID NO: 42637 - DNA, 375 bp, Acinetobacter baumannii
atggcaacaacgaatcagttgatccgtaagggtcgtacgactttggttgaaaaatccaaagttcctgcgttgaaggcttgtccacaacgtcgtggtgtttgtacacgtgtttatacaactacacctaaaaaacctaactcagctatgcgtaaggtttgccgtgttcgcttaacttcaggttttgaagtatctagctacatcggtggtgaaggccataacttacaagagcacagtgttgttcttatccgtggtggtcgtgttaaagacttaccgggtgtacgttaccataccgttcgtggttctttagactgtgctggtgttaaagatcgtaaccaatcacgttctaaatacggtgctaaacgtcctaagaagtaa

SEQ ID NO: 42638 - DNA, 471 bp, Acinetobacter baumannii
atgccaagacgtcgcgtagtcgctgctcgtgagatccttccagatcctaaatttagcagccaaacaatcgctaaattcatgaaccacgtaatgcaagatggtaaaaaatctattgctgaaagtatcgtttacggtgctttagaacgcgttcaagaaaaaaacaaagtagacccagttgaatttttcgagactactcttgaaaaagttcgtcctatggtcgaagtaaaagcacgccgtgttggtggtgctacttatcaagtacctatggaagtacgcccatcccgtcgtactgccttagcaatgcgttggttagtagatgctgctgctaagcgttctgaaaaaactatggctttacgtcttgctggcgagttgcttgatgcagctgaaggcaaaggtgctgcgatcaaaaaacgtgaagacgtgcaccgtatggcagaagctaacaaagccttctctcactaccgtttctaa

SEQ ID NO: 42639 - DNA, 2139 bp, Acinetobacter baumannii
atggctcgccaaaccccaattactcgttaccgtaacatcggtatctctgcgcacatcgacgcaggtaaaacaactacaactgaacgtattttgttctacacaggtgtatctcacaaaattggtgaagtacacgacggtgcagcaacaatggactggatggaacaagagcaagagcgtggtattacaattacctctgctgcaacaacttgtttctggtctggtatgggtaaccaattcccacaacaccgtatcaacgtaattgatacaccgggacacgttgacttcacaatcgaagttgagcgttctatgcgtgttcttgacggtgcttgcatggtttactgtgcagttggtggtgtacagcctcagtctgaaactgtatggcgtcaggctaacaaatataaagtgcctcgtttagcattcgtgaacaagatggaccgtactggtgcaaacttcttccgtgttgttgaacaaatgaaaacacgtcttggtgcgaatcctgtgccaatcgttgtgccaatcggtgctgaagacacattcactggtgtagttgaccttatcgaaatgaaggcaattatctgggatgaagcttctcaaggtatgaagtttgaatacggcgagattccagctgacctagttgatactgctcaagaatggcgtacaaacatggttgaagctgctgctgaagcttctgaagagttaatggacaaataccttgaagagggtgatctttctaaagaagacatcatcgcaggtttacgtgctcgtacattagcttctgaaatccaagtaatgctttgtggttctgcattcaagaacaaaggtgttcaacgtatgttggacgctgtaattgaattcttaccatcacctacagaagttaaagcgatcgaaggtatccttgacgataaagacgaaactaaagcgtctcgtgaagcatctgacgaagctccgttctctgcgcttgcgttcaaaatcatgaacgacaaattcgtaggtaacttaacattcgtacgtgtttactctggtgttcttaaacaaggtgatgctgtttataacccagttaaatctaagcgtgaacgtatcggtcgtatcgtgcaaatgcacgcaaacgaacgtcaagatattgatgaaatccgtgcaggtgatatcgcagcgtgtgtaggtcttaaagacgttactactggtgatacattatgtgatgagaaaaacatcattacacttgaacgtatggaattcccagatccagtaattcagttagcggttgaaccaaaaactaaagctgaccaagaaaaaatgtctatcgctttaggccgtttggctaaagaagacccttcattccgtgttcacactgatgaagaatctggtcagacaattattgctggtatgggtgagcttcaccttgacatcatcgttgaccgtatgaagcgtgaattcggtgttgaagcgaatatcggtaaaccaatggttgcttatcgtgaaacgattaagaaaactgttgagcaagaaggtaaattcgtacgtcaaacaggtggtaaaggtaaattcggtcacgtatatgttcgtttagaaccgcttgacgttgaagctgctggtaaagaatacgaattcgctgaagaagttgttggtggtgtagtacctaaagaattcttcggtgcagttgacaaaggtattcaagaacgtatgaagaatggtgtcttggctggttacccagttgtaggcgttaaagctgttctttttgacggttcttaccacgatgtcgactctgacgaattgtcgttcaaaatggctggttcttacgcattccgtgatggtttcatgaaagcagatcctgttcttcttgaacctatcatgaaagttgaagttgagactccagaagactacatgggcgatatcatgggtgacttaaaccgtcgtcgtggtatggttcaaggtatggacgatcttcctggtggaacaaaagcaattaaagcagaagttccacttgctgagatgtttggttacgcgactcaaatgcgttctatgtctcaaggtcgtgcgacatactcaatggaatttgctaaatatgctgaaactccacgtaacgtggctgaaggcatcatcgctaaattccaagctggcggtaaaaaaggtgacgacgagtaa

SEQ ID NO: 42640 - DNA, 318 bp, Acinetobacter baumannii
atgttaaagctgatttattacgtacctgagtcacatcttgagtcgactaaacagtctatatttgcggccggagcaggtgggatagggaactatgaacaatgtgcttggcaagttaaaggaatagggcaattcaagccagttaaaggagctgacccttatataggagagctaggtgaacttgaacaagttgacgaatggcgtgttgaaacaattgtgcttgaagaaaaggcaagtgcagtggcaaaagcattaaaggcaagccatccttacgaagagcctgcctttgagtttattcaaatcatagaagttgatttttaa

SEQ ID NO: 42641 - DNA, 1206 bp, Acinetobacter baumannii
atgaagtcaaaaatccatttccgtgagtttgcactgttgatggcattactcatgtctatcgtgtctttttcgatagatgcagtgttgcctgctttaggtgaggttggacgagtttttgaattaaagaataataatcagacccagtgggtcattattggtattttctccggcatgacaatagggcagttgattgcaggtccactttccgatgcgattggacgaaaacgtattttatttaccggtattatcatctactttttgggaagtttattgtgctttaccacacaaagttttgaatggtttttagtaggtcgctttattcagggtattggggtttcaggtccttatgttgcctcaatttccattgtgcgagataaatacagcggcgctcaaatggcccgtattatgtccttaatcatgatggtatttatggtcgctccagcgattgcaccaagtctgggacaactcattattcacttctttggttggcgtgatatttttgttttatatatgatctatgccacagttgttggagcgtgggtcgctttacgattagaagagacgttacttcctgaaaatcgtttacctatgcgtttacaagcatttcaagatgggttcaaagaagttgtaagtaataaaaccaccatgagctatttattatgtgcaggcttttgctttggtggatttattggttacttaggtacttctcagcaaatttttatgcagcagtttggtaaaacagggcaagagtttagtgcttattttgctgtgcttgctggtgtaatgggcattgcttcatttaccaattctaaaattgtcatgaagtttggtatgcgtccaatctgtatttatggctttctcggtctgtgcttaatttcattaattttcttagggattcaacttataggtgtgactgtagcattttggatgtttatgctttatgcctgtattttatttttattatttggaactttatttggtaatttaaacgcgattgcaatggaacctatgggacatgtagctggtatggcatcagctattattggtgcagcttcgtccgtattgtcacttattcttgcctctattattgggcaattatataacggcacactaattccaatgacttgcggttttgtcattttatgtggtttagcatttatgatgacagtatatgagaacagatatttaaagaaatcgaatgtttaa

SEQ ID NO: 42642 - DNA, 3834 bp, Acinetobacter baumannii
atgtttatcgtggccggtgcagcagcacattcttcttttaagaaagctcaactattaacacgtttatcgtcaattagttctgttcaatcttttgacagccaatgggtctatttgtttgatcaagcgctcaacgagcagcaacatcaatctgctttgcaattattaaatgacggtgagtcttttgaacttcgtcaacctgcaagtgatgagattcagattttagtaacaccacgtgtgggtacgatttcaccttggtcatctaaagcgactgacattttcaaaaactgtaatactccagttcaccgtttagaacgtggtcttttattcactttaaaaggtgtttctgaaatttctaatgaagtaaaacaagtacttcatgaccgtatgactgaaactgtttttgcacaaattgaagatgcaaaagcactgttttcagaaacagcaccaaaacctttaaattcaattgatattttaggtcaaggtaaagaagcattagtaaaagccaacaacgaatttggttttgcgttatctgaacaagaaattgattatttaactgaagcatttactcgacttggtcgcaacccaaatgacatcgagttgatgatgtttgcacaagcaaactctgaacactgtcgtcataaaatcttcggttctgaatggacaattgatggtgaaaaacaaccattatcattgttccaaatgattaaaaacacttataaagaatctccaactgacgtgttatcggcatataaagataacgcatctgtaattgttggttatgacacgatgcgtttttatccgaaagcagatgaaaacggtcattttgtttacaaatataagagccaagctgctcacattttaatgaaggttgaaactcacaaccacccaacggcaatttctccatttgctggtgcagcaacaggttcaggcggtgaaatccgtgatgaaggtgcaactggtcgtggtggtaaaccgaaagcaggtttaacaggctttacagtttctaacttaaatattcctggttttgaacaaccttgggaagaaaactacggtaaaccttcacgtatggcatcgccattacaaattatgattgaaggtccattaggtggcgcggcatttaacaatgaatttggtcgtcctgcattaaatggctatttccgtactttcgagcaaaacgtaaatggtgaagtgaagggcttccataagccaatcatgatcgcgggtggttacggtaatattcgtcctgatcatgtagaaaaagatgcgattcaaccgggtgacttgctcattgtattgggtggccctgcgatgttaatcggtcttggtggtggcgcagcctcttctgtagacagcggcacaatgggtgaaagccttgatttcgcatctgtacaacgtgaaaacccagaaatggaacgccgttgtcaggaagtgattgatacttgctggcgtttagaagacttcaacccaatcgtgtctattcatgacgtaggagctggtggtttatcaaatgcaatgcctgagcttgtaaacgatcatgagttaggtgcagttcttaaccttcgtaagattccttcattagagccgggcatgagcccaatggaaatctggtcaaatgaagcacaagagcgttatgttcttgcaattcgtccagagtctttagaacagttcgaatcaatctgtgctcgtgaacgttgtccatttgccgtgttaggtgaagcaactgaagctcgtcacttaactgttgaagatccattgttccaaaacaacgcagttgatatcccaatgcaagtgatgcttggtggtacaccgcgtatgcaacgttcttatgaaacaattgaacgtaaaggcaacgaatttgacgcttcaaaagttgatttgaaagatgcgattttccgtgtattgaaaaatcctacagttgcgtctaaatcattcttgatcaccattggtgaccgttcaattacaggtatggttgcacgtgaccaaatggttggtcgttggcagattcctgttgcagatgcagcagtaacgactaccagcttacaaggcttcactggtgaagcaatggcaatgggtgaacgtccaccagttgcattgttaaatccagcagcgtctgctcgcttggcagttgctgaagcaattaccaatattgcatgtgcaaacattgaacaaattagcgatatcaaactttctgcaaactggatggctgctgctggtcaaaaaggtgaagaccaagcattgtttgaaggcgtgaaagcaattggtatggaaatgtgtcctgctttgggaattgcgattcctgtaggtaaagactcactttcaatgcgtacgacttggaatgataacggtgaagataaagccgtaacatctccaatgactggcgtaattactgcatttgctccagtagctgatgttcgtaagactttaacacctgaacttaagaatttagaagactcagtacttgtccgtattgatttatctaaaggacaattccgtttaggtggttcgattcttgcgcaagtatataaagcaattggttcagtcactccagatgttgatagttttgatgacttcaaagcgttctttgctttaattcaagactggaataaccgtggcttgattcaggcttaccatgacattggtgatggtggtttactcgcaactgtagctgaaatgatgttcgcttcgcgtttaggggtagcattagaagatcagactactgctggtttatttgcagaagaaattggtgcagtagttcaaatcaaagcagctgattgggaagctttacaagcagaagtagctgcttctagcttaaaagatgcaattgctgtagttggtcgcgtaaataatactgatcaattatctgtaaatggcttaactttagagcgtgcagagttacaacaagcttggtctgaagtatctcatcagatccaacgtttacgtgataacgttgaaactgctgaccaagaatttgctttaattactgataaatcacatcaaggtttgattgctaaacctacatttgatttaaatgaacctatcgaagcaccgtttattaatagccgtcgtccgaatatggcaatcttgcgtgagcagggtgtaaatggtcatattgaaatggcagcagctttcgataaagttggctttaacacaattgacgtacacatgagcgacttacttgctggtcgtgtgagcctaagtgatttcgaaggtttagtgacttgtggcggtttctcttacggtgacgtaatgggtgcaggcggtggctgggcaaaatcagttctgttcaatgcaaaactacgtgatcagtttgagcaattcttccaccgtgaaggtacatttagcttaggtatctgtaatggttgccaaatgttgtcacaattagcgccacttattccgggtgctgaacactggccacgtttccaccgcaatatgtcagaagtttttgaagcacgtagcgtaaacgttcgtgttgaaaaatcagtttctgtattacttgatggtatggaaggttcaattttaccgattgctgtagcacatggtgaaggccgtgtggttgctagcgaagctgatattgcaagcttaaatgcagcgaatcaagttgcattgcgctatgttgatagccacggtaacccgactcaacattatccattgaacccaaatggttcaccggaagcgattacgggcgtaacgtctaaagatggtcgtgcaacgatcatgatgccgcaccctgagcgtactttccgtgcaattcaacactcttggagtccagaagagtggactgaagacggtgcttggttacgtatgttccgtaacgcacgtaagtttattggttaa

SEQ ID NO: 42643 - DNA, 1341 bp, Acinetobacter baumannii
atggaacaaatgcgttggttagaactgctgtctgcagttcgtttaggtagtaaaaaaagcagtacagagctggctcgaagcccatttcataaagattatgaccgcattatattttcacaaagttttcgtcagttaaaccgcaagactcaagttcatcctttagcacagcatgatggcattcatacccgtttaactcactcgcttgaagtttcctgtattggccgttccatgggcatgctggcagccgaaaaaattaaagatgaattgcctgtctggatttctcctgccgatgtcggcgcaattattcaagcggcctgccttgctcatgacattggcaacccacccttcgggcatgcaggtgaatatgcaattcgtgaatggtttgacgatgcctcacataatgattttttaaaaaaattaactcccgaagaagaagccgatgtccgtcagtttgaaggcaacgcccaaggattacgcctattaacccgtattgactatcatccagatgatggaggcatgcgtttaacttacgcaaccttaggcgcttatttaaaatatccttggctttcaaaaacaatcgcgtctcaaggtgatcgtccatcacaccaacgagcgaaatttggttgttatcaatctgaaaaagaaattttaaaacaaattgctgagcagctcggacttattcaattaggtgaatatcactactgccgtcatccacttacctatttgttagaagctgccgatgatatttgctatgccctcatcgatttagaagatggcattattctaaatatgctgaattaccaagaggttgaaccaatttttctcaacttgattgcagattatggccaacctgaagagctatcacttccaagcagtacatggcaacaaaaaatttcggcattgcgtggtcgtgttatgaagcgtctggttgatgaagtcactacagcttttgccaaacatcattatgaaattattactggtcagctcaaaggtagtcttttacagtactgttcgcctgatattgcggcaggtattgaaacagccaaaaatctggcacgtgaaaaaatctttgaacacccacaaaagtctggtttagaaattattgctcaccaaagtttgcaaactattcttgatgcatttgttcccttaacgatgccgcataaatctttaagctttaaagaacagcgcttgatgtctattcttaatttgtacggtgctcgctttagtaataaccactacagcaatatcatgcaggtactcgatattatcagtaagttttcagatcatcaggcttatagcttggctcaagagctacaaggtaataaaatcggcttgttttaa

SEQ ID NO: 42644 - DNA, 600 bp, Acinetobacter baumannii
atgatcggatgtttaattggcgaagtgtttgccctagaagccccaactgtcttactgaatgtaaatggtgtgggctatgaaattgatacaccactttcaacattttgccaattacaaaaaggccagaaagttacgctatggacgcatttggtcgtccgtgaagatgctcagcagctttatggttttagtgatgctcaagagaaaactattttccgtaccttactaaaagtaaatggtgtgggcccgaaaatggcattaggtattctttctacgttaagtgttgaattgctggtacacacaattgaacatgacgatgtgaatactttggttaaagttccgggggtaggcaaaaaaacagctgaacgtttaatgattgaacttcgtgaccgttttaaaactttggcacaaggaacttctagcgctgcggccctgcctcagattcaatttgtttcgaactcacctgttgcagaagcagaagcagcattacagtcactaggttataaaccactagaagcacaaaaagctgttgcggcggttaaagccgattacactgaatcagccgatattattcgtgctgcacttaaatcaatgatgaagtaa

SEQ ID NO: 42645 - DNA, 1005 bp, Acinetobacter baumannii
atgcaagaccgtctaatcagtggaacagaaaaacctgaagatcattttgatcgggctattcgaccgacttcacttgccgattatatcgggcaaccagtcgtacgcgagcaaatggaaattttcatcggtgcggctcgtggtcgtggtgaagcactcgatcacacactgattttcggtccaccgggcttaggaaaaaccacgcttgccaatattattgcgcgtgaaatgggtggcaatctcaaatccacttcagggcctgttttagagcgtgcgggtgatttggctgcaatgctgactaaccttgaagaaggcgatgttttatttattgatgaaattcaccgtctttcaccagtgattgaagaaattctttatccggcaatggaagattaccaacttgatatcatgattggtgaaggtcctgctgctcgttcaattaaactcgatttaccaccttttacgctcgttgctgcgaccacacgtgccggcttactcacctcgcctctacgtgaccgtttcggtattgtgcaacgtcttgaattctattctgtagaagacctaactcacatcgtgtcacgatctgcaaacctcatggatgtacccattacagttgagggtgcagaagaagttgcacgccgttcacgcggaacaccgcgtattgccaatcgtttattacgccgtgtacgtgactatgcacaagtaaaaggtacaggcgaagttaaccatgaaatggcacaacgtgcgcttgatatgcttaatgtcgataaagctggtttagataccttagaccgacgttatttaagtatgttgttagaacgttttgatggtggacctgctggtgttgaagcccttgcagctgctatggctgaagatagcggaacacttgaagatgttattgaaccttatttaattcagcaaggttatgttatgcgtaccgcacgaggtcgcattgcaaccaaccaatcttatttgcagtttggcatgacgccacctgagcctaaaaactaa

SEQ ID NO: 42646 - DNA, 1335 bp, Acinetobacter baumannii
atgtacaaaaaaactgctttaatttttccacttgccctaataagtcaattgagtctagcggattgggtaaaagatgctatacaacaaaatgaaaatcaggtcattcaattaagacaacacatccatgagtaccctgaactaggcaatatggaatttaaaacatctgcattggttcaaaaagaattaaagtcttatggcattcaagtcagaacaggttatgcaaaaacaggggtaatcggcattttaaaagggagtaaccctggccctattattgcgcttagagcagatatggatgcgctacctatggaagaaaaaagtggtgtgccatttgctagtaaacaaaaagcaatttatcaaggtaaagaaacttatgtgatgcatgcttgtggacacgatgcgcacactgcaatgttattaggtgcagcaaagatattggcggccaataaagataaaatattaggcactgtaatttttgtatttcagcccgctgaagaaggtggagcagatatcgataacttcacgcatggtgatcaaatcggctcaagaaaaatgattgcggatggtgcatttaaagactacaaaccagaagctatttttggcatgcatgtcatgtccggcatgaaaagcggacatctatattataaagatggtgctattttaaacagtgccgatcacttacggattcaagtcaacggcaagcaggtgcatggctctaccccttggttaggcagagatccaatttatgcatcagctcaaatgattaataatttacaaagtcttattagccgaagaatcgacctaacccaaggtatgggcgttattagtattggcaatattcaaggcggtacagctggaaatgtgattcctgaacaggtcaatatgatcggtactattcgatccaataacgaacagatccgagaaaatatcctaaagagcttaccaactctggtggaaaataacgctcaagctaatgatgtaacagcaaaagttgaaattgcgccttatgctccagtaaccatgaataataaagctcttactcaacttatccagccaacattagccaaaactgttggagattcgaatcttcatgttttaaaccataatgcaagtgcaagtgaagattttgcctattatgggaaattaatgccctctttctttgttttcttaggagcaacacctgaaaatcaggacttaagccaagctgcaccgaatcataacccttcttttatagtagatgataaggccttaaagacaggaaccgagctgcatataagattcgttttagactatccgaatattgctaaacaagttcaggctgcatggaaacagtcgtaa

SEQ ID NO: 42647 - DNA, 408 bp, Acinetobacter baumannii
atggcgaatcattttgaattcaacattcgtgtttatattgaagatacggacgcaggtggtattgtttaccatgccaaccacattcgctatatggaacgtacccgtacagaatggctccgcgctgctggcgttgaccattactggcatcaaaaagactacaactttgtggtatataaaattgacgtaaaatatatgcgtcctattttaatggatgacttaattactgttacagcacgtgtagtttcatgtaaagctgcgtcatttgtgttgcaacaaaatatttatcgtggtgaaatcttgcttgcttctggtgaggttgagttggcatgtttaagtaaagatctaatgccacgtcgtcttccggaagaaatacgtgatcttattcgtaaagaattggaacaagactaa

SEQ ID NO: 42648 - DNA, 699 bp, Acinetobacter baumannii
atggcaacaaacattgaatcaaccctgcatatttctgaccttattttacaagcaagtccagtcgtccagttggtcatgctgattttattgttagcatcaatttttagttggtacctgattgccaagttacatatgagttataaaaaagcacgccaagatgatgaacatttccaaaaaatgttctggtctggtgctgaactcaatacgctttacaacaacgcacaactcaattcaaaacgctcaggccttgaagatatcttttatcaaggattgagtgagttttttaaactcaaaaaacgccaagctcctacctcacaaatgatcgaaggaacagaacgtattttacgtgtcggtttaagtcgtgatcagggtagtctggaatatggtttaggtactttagcaagtatcggttcggttgccccatatatcggtttattcggtactgtttggggaatcatgaatgcttttattggtttggctgctgttgaccaagtgacgttagcaacagttgcgccaggtattgccgaggcccttattgcaactgcaattggtctatttgctgcaattcctgcggtattggcttttaaccactttacggctaaaagcgaaagtgtctactctgatcgtgcattatttgccgaagagatgattgctttattgcaacgtcaatctgtgggttcatcacaggaagatgcataa

SEQ ID NO: 42649 - DNA, 453 bp, Acinetobacter baumannii
atggccattcaacgttcagggcgctttgagcgcataaaaaaaccattaaaaagtgacatgaacgtcgtgccttatatcgatgtgatgctggtacttttagtgattttcatggtgactgctcccatgattaccagtggtattaaagtcgatttacctcaggcaaataatcatccaattgaatcaaaagatatgccagccatggtcacgattggtaaagatggcaatatttaccttcaatatgaagattacaaagataatgagccactttctcttgaaaaacttgagtctgttttaagtgaagcacaaaaacaagctgagcaggaaaataaacaacttacagttttagtgaatggagataagactcgcccttatggagaagtcgtatcattgatggcaagtttacaagaagcaggtttaactcaagttggccttctgacagagcctttaaaataa

SEQ ID NO: 42650 - DNA, 1347 bp, Acinetobacter baumannii
atgaataaaaatcaaaagcctccttttaaacaaaatgcaatagcattgagcttcacccttggagttcatgcaattgccattgttggcttgctttttttaggcttgagtaaaccacctgaacaaccaaaaaagctgaccactgttttagttaaaccagaagatttaccaccacctttggcaaaagaagttgagcaaccaaccgtagcagaaaatcaggctgaagaagttctaagcccgattgtggatgaaactctttctcaaaatcttccagccgcccctcctcctccaacagcacaacaacttgctgctcaaaagcaaaaagctgagcaggcacaacaagcaaaattagctgaggaaaagcgtaaagctgaagaagctgctaaagcaaagcaagctgcagagcaacaacgtttagaggaagcacaaaagcaacaggctgaagctaagcgtcaagcggaggctaaagcgagagctgaagctgaacaaaaacgaaaagccgaacaaaatgcaaaagctgaggccgatgcgaaagctagacaaaaagcaactgaggaagctaaacgtaaagctgagactgaagcaagactaaaacgtgaagctcaaaaagctgaaaacgctaaacttcaagcacaacaagaagctaaacgaaaagccgaagcagatgctaaagccaaacaacaaaaagcagcagaagatgccaaacgcaaagctgaagcagatgctaaggctaagcaacaagcagctgataacgcgaaacgtaaagccgaggccgatgcgaaagctaaacagcaaaaagcagctgaagatgctaaacgtaaagctgaggctgatgcgaaagctaaacagcaaaaagcggctgaagatgctaagcgcaaagctgaggctgatgcgaaagctaaacagcaaaaagcggctgaagatgctaagcgcaaagctgaggctgatgcaaaagccaaacaacaaaaagcagcagaagatgctagacgtaaagccgaaattgaggccgaagaaaaagctgcatctgctaaaaaagctcaagaagaagctgcccagaaaaaaggtgaagctaaaaaaattgcatcttcggctaaacgtgattttgagcagaaaattcgtcgtgcttgggatgttcctacaggaagcagtggtaaaactgttagcgttagatttaccctgtctgactcaggtagtgttagctcgattgttattacacggtcaagtggagatgatgcattggatgcaagtatcaaagctgcaattcaggcgtctgctccctacccaatgccatcggaccctgatgcaagacgagaagcgcgaagcgttacctctactttcagagcacaataa

SEQ ID NO: 42651 - DNA, 1281 bp, Acinetobacter baumannii
atgaaaacgagccgcaaacaccttctagccttaacgctacttacagcattaagtcctcttgcaccaacagctgcctttgctcaattacatttagagattgcaaaagcacctgatcaggcgcctaaaatcgctattgtgccttttaataacgacaatggactttatcctattgttgaaactgacttgaaccgctcaggacgtttcacaagttcatcaaaaaatttacctgcgaatgccgctattaaccagattcaagcatctgattggcaagctgcgggtattccttatgttgttactggacaaattaagcaaacagctgacgggtttgaagtccattaccaactttatgatgtacaaaaacagcaatatcttctgaatgaattgttaaatgttcctgcttcacgcatacgtcaagcaggacatatagtaagtgatgctatttatcaggccttaaccggaattccaggcgattttagtggccgtatcgcttatgtattacgtaatcctgccactcctgctgaacgttacaccttacaaatcgctgatacagatggtgaacaaccaaaaactgttctctcttcacgtgacccgattttgtctccggcatggactcctgacgctaaaaaaattgcttatgtttcttttgaaactaaacgtccagccatttatttacaagatctctctactggaacacgtgaagtacttacgagttttaaaggcttaaatggtgcaccaagcttttcaccagatggcaaatcaatgctatttacaacatcgatgaatggtaaccctgaaatttatcaaatggatttatcaactcgccaagtcaaacgcatgacaaatgactcgggaattgatactgaagcgcgttacacaccagatggaaaagcttttatttttacatctgaccgtggaggctcgcctcaaatttatcgctatgattttgggaatggctcagtaaaacgcttaacatttaaagggtcatttaatgcccgtggcactttaagtgcagatggtaaaaaaattgcactcgtgcatcgaccaagtggtagtaactataaagttgcgatccaagatattaatacaggcattgtcaatattcttaccccaaccagtttagatgaatcaccaagtttctcaccaaatgggcaaatggtggtttatgcaactcgtgaagggaaccgtggtttactgtctatcatgtccactgatggtcgtttccgtatgaatttaccgagtgagcaaggtgaagtacgtgaaccagcctgggcacctaaataa

SEQ ID NO: 42652 - DNA, 564 bp, Acinetobacter baumannii
atgaaatcaattaaatatttggcctttcctctacttagtgcagcacttgtcatgacaggttgtgcaagtcgtaagccagcaacaacggcaactacaggtacaactaacccaagcacagtaaatacgacaggcttaagtgaagatgctgcattaaatgctcaaaatctagcaggtgcctcttcaaaaggtgtaactgaggcaaacaaggctgccctagcgaaacgcgtcgttcacttcgattatgacagtagtgatttatctactgaagattaccaaacacttcaggctcatgctcagttcctcatggcaaatgcaaactcaaaagttgcattaactggtcatacagacgagcgcggtacacgcgaatacaacatggccttgggtgagcgccgtgcaaaagcagttcagaattatcttattaccagtggtgtaaatcctcagcaacttgaagctgtaagttatggtaaagaagcgcctgttaatcctggccatgatgaatcagcttggaaagaaaaccgccgcgttgaaattaactatgaagcggttcctcctctattaaaataa

SEQ ID NO: 42653 - DNA, 189 bp, Acinetobacter baumannii
atgacaactaagaagtttgatgcgaccccaacagcaggtgaaccaatcaatttagaagaaatttcgaaagaaagtgttcaggaagcttggaaagattatgaggcaaaacctgaatataaagcttttaataagcatgatttgattgagtcaatgcaacattcagaagaagagcaaaacaaatcttcttaa

SEQ ID NO: 42654 - DNA, 972 bp, Acinetobacter baumannii
atgtccaacctcacattgtcccaatttttacaacaagaaaaagggaatcttacacctgagttggctcaagtcatcgacacaattgctgcgacttgtaaaaccattgatcaagccttacaaaaaggtgccttggctggaattttgggtagcgcaggtaacgaaaatgttcaaggtgaaacacagaaaaaacttgatgtgatttctaatgactatttaatcgatgctttaaaagtccatcctcacgtcggtggtcttgcatctgaagaacttgatgattttacaccagcacaagaaaacggcgaatacttggttctatttgatccattagatggttcaagcaacattgatatcaacatgtgtgtcggaacaatcttctcgattcttcctgccaaaaatgcggttacacaagcacaagatttcatgcaggcaggcactcaacaagttgctgctggctatgtgttatatggcccatcaactatgatggctttaacagttggaaacggtgtagctttctttacgttagacccagaaacacaaacattcttacttactacagagaatgttcaagtatcagcagatactcaagaatttgctattaatgcatctaaccaacgccattgggaacaaccagtaaaacaatatattgaagagttacttgcaggtaaaacatctgtacgtgaaaaagacttcaatatgcgttgggtcgcatgtatggtgggtgatgttcaccgtattttatgccgtggcggtattttcctttatccatatgacttaaaagacccgaaaaaagctggtcgtttacgtttaatgtatgaagctaacccaatgagtatgctcattgaacaagcaggcggcgcatcaactactggccgtgtacgcattctagagattgaacctacagaacttcatcaacgtgttcctgtaattatcggttctaagaatgaagttgaacgcgtaacaagctatcattaa

SEQ ID NO: 42655 - DNA, 777 bp, Acinetobacter baumannii
atggcggttatttttttagaatcaaaagacaatgcaaaaattaagcatttgcgtggtttaattgaactcaatagcgcccgaaaaaagcatcaacaaacagttcttgaaggtacccacctttgtctagcttggttacaacaacagaaaaaactcttttcgttgtttacgaccgaacaagccttagaacatcccgatttaaagaaaatcattgaacttcaccaaggtcatgtctttattattagcgaagttttatataaagacttaagtactttaggtaatactcttccttgcttgggtattatcgatttaccgaaaactgcatcaaccattgactatagcgtagatacgttaattctagaaaatgtacaagatccgggtaacgtaggtacattgttacgttcagcggcagcagcaaatataaaacagattatttgcacacaaggctctgcctcactttggtctccacgagttttaagagcaggtatgggggcacattttagcctgtcttgttttgaaaactttcaattgaccgatattcttcctaaattcgatattcctgtttttgttacaagctctcatcgctcgactagtctttattcaaaagacctttcaaaaccatgtgtttggattttaggcaatgaaggacaaggtgcaagtgattatgctttagaacatgcacaatcagtgactataccgcagccaggtggtcaagagtcattaaatgtagcaattgcaggatcaatttgtttttttgaaatggttcgccaacgccaataa

SEQ ID NO: 42656 - DNA, 615 bp, Acinetobacter baumannii
atggatttagcaccgaaaaagtctcgatcggaagcatctagtgctcatgccagcacggctgagcaacgcctaaaggttttcatgcaagatgttactggtcgtgctttagtgatgatggaaagtgctacccaaggtcaacaaggcattgctatggacttggttcaagaagcatttattgctttacacaagtcttacgccgatcgaagtactgaagaatggtatcctctattttatactattctgaataacaagcttcaggattggcgccgtaaagaagcgcgtcgggcaaacccattttcattcttcaaaaaagttagtctagacaatgatgatgaagaaatcattgatattgtcgatgaaaaagcaatcaatccagcagattttctagatcaagcagtgaccatagaagagatccaggaagcgattgcaaaactacctgttcgtcaacaacaagcttttatgttacgtgcgtgggaaggttttgatacccatactacagcgcaaattatgaactgcaccgaaggtagtgtaaaaacccattatcatcgagcaattcagggacttagagagtatttagcgcatttaaatcccatgggaggttccaatgaatcatga

SEQ ID NO: 42657 - DNA, 321 bp, Acinetobacter baumannii
atgaatcatgatgatttcactaaaaaggtgacatccaaactcgatagtttggcccatcaccataaaaataaaacagtggtgatgaatcatgtgcttgaccatatccaacaaaaaccagcctcttattatagtgtctggaaaatgactggttttgcacttgcagcagcgattactggttttgttattttaccaaattcagtagatatgcttgataagccacaaaatcaagtcgttgtaaatcctaaattatcgccacaaatggtagaagatttagaaatgctcatggtgttgggtgaggataaagttcaacatggtagctaa

SEQ ID NO: 42658 - DNA, 390 bp, Acinetobacter baumannii
atggtagctaaaaagttagcacttatcctttgttcattaagtttcttgcaaacaagttttgcaggtttcgaacgtttctggattttttcgaaagatgccaatacgcaagtagatgatacttggaatgctctatctgaagaagagcaacgagctgtaattaaacgttatcaaaccttaaaggaattaccatccaaccaaagtgctaacttgcaacaacgtatggattggtttaaccagcttccagatgcagaaaaacaaaaaatgcgtgaagcttggcaaaaaatgagtacacaagaacgtaatgatttacgtcaacggatgctcaaagcaagtgctgatgaaagaactgctatacgcgaagaatatataaataaatatttagagcactaa

SEQ ID NO: 42659 - DNA, 2448 bp, Acinetobacter baumannii
atgaaaaagtataaaaaagtattagggataattacagttgttgctgcaatacctttaatggcagcagaaaatagcactattattaaagtcaatacatatgcagatgaagatcttgataatgacttatgttccttaagagaagctattattactgctgagaaaagtaagtcatatcatggctgtaacctacctgcaattaatacgcaatacacgattcagcttgaaagtggtacttacaacttagagaaaggagaattagtacctaaaaatagtcttattattcaagggactaatcttattgattggacaaaaacaggtatattgagcggtgagtatccagcgcccaaggctattgaaactcgtataaatgctggaggaaaattccgtatttttaatacagctgttggtaaacaacctttggtattaaataatattattttagaaaatggtaaagcttctgatgtcggaggagcaatttatgcaggttcaaacgtaaatttacaaaatacacaaattttaaattcacaagcgcctagaggaggagcaatttatttaggtgcagcgaattcagaattaataatatttcattctttgcttcaaggtaatggattaaatacaggtgttggaagtgttattgcaatgagctgtatgtttaataacctctacacaacgcataagataacatttgattcaaatagtattattaagaacggaacttcttcttctttaagcacatttgaattctgtggtgcaccaacaatcacttttgagaacaatacaattgctcaaaatactgctaacttgaccaatggaacgattcttaaatttacgggtgatgcggatccacaacaaaaccaaaagacaaatttaagttcaactagtagtttaaagctaaaaaataatacaattgttgataatacatctaataccgtttttttatatgataaattgggagaaaaagatttaatttttaatgttttagcttttaattcgggttcctatgcttgccgatatttattaggtcctgctactgatgaaaaagacgctagaattttattaaagtttaatgcattaaaattaagtggtagtaatgaaaaatgtgatatgccttctgagacattaccatctggacatactaatatagatgtatcttctaaagtattaactcaattattagaacgacaagaatcgactgaaagtacaagtttcttaccactttattatccgaaaaataatcaacaatctgatgatttagttgatgtagatttaaaaaatgaaggaggatgtagttcatttgatcaaagacgattgataaggacaacaagtagtagtacagatcaaacgatctataattcaaataataaatgtgatattggttctgttgagcaaaataagttggcgatcattacaacagaaggtgatgctacttcttctattgttaatagttcacttacagaattattaaataaatatcaattaggaatagaccaaacaaaagcagacttagctaatccttcttttactcttcaggaagctgctctcaagattaatctatcaacttttgaaaacctttttaaacagactaaagagaatttaaaatatagaggaatttatgtagaccttaaaaattactattctgatttcaataatggtaatattaataaagttaatattattccttatgaagatattaatcatgtaattattccctttaaagccgataattatgatattgatgtcaaagttataggtaagggacaaacacttgagactgcgacagaggatgaagctaaaagcttgaaatgtgaatggaatccgtctcttaaacaaattattttgtatcgtacagatgatactccttcaggagatgattttgaattctgtaaatacacagttattttaaaatcaaatagaaatattactgcaacaggtataattaaagcttcacttgtgaatatacccccagtttcagaaaatactaccatcacatttaagtatttagcgaatgaaattattcctttaaacttgcttaaatatgcaaatgatgagggtgatgggcctactaatacacttattacaaagcctaataaacctcaatttgcagacctacctatttatttacctagcaaagtatcagaagacggtatctttaaagtagtaaaagcagatcgtgaaggtccatgtcctggtaaagatagtaaaaatacatgttatggtggcaatatctatattcaagcaaaaaatgtatttaatacctttaatgatacactcacatattatgtatatgatgcagatggaactatctcagctaaggccggaacaattaacttagtaaatacagcaaccacaactgatgattcacgtggtggtggaggtggcggaagtattggaattctttctatcgcatcactactaagtttaattgcttatagacgttatcgtaagtga

SEQ ID NO: 42660 - DNA, 1854 bp, Acinetobacter baumannii
atgctcaaacggagcattgcttttgcattattggctgctgctgggcacgcttattctgctgatattgaagtcacaactacaattgatgaagatgtcgataatacagtatgctcattacgtgaggctgtagaactaataaataagcgtaattcaagtgattctaccgtggttgcctcagtaaaagatgggtatcatggctgtggaaataaagatagttcatcaaatattattttacagcgcgataaagaatatacgttaaatagcagaataacgattacagcaccccttacaattagtacagcaaaaaacgattctacattagttgatactgatcagcccggttctcataatgcaactatcaaaatggcaggtacagatcagctatttaaaattgatgatgagagtgttgaaaaactttcttttgctgtgacgttgagtgaccttaacttacaaggagctcggtctagtaataccatattagaaggtggattgatttataaccatgaacaactcaccattcgaaattctcgtttgataaatggttatgcaacacgaggaggtgcaatttataatgcaggtaatttatctaacacactcaatacagcgggcacagttactcttgtcaataatttaattcaaaataataaagctgctgaagggggaattttatatagtgaaatgccactttattttattactcaatcagttttacgtgataatgaagtcacaacagcagataatgctttattttatacacagactaagttttccgatgaaagtactggagggtatttaacttcacgggctatcggtataagtaatagtacaatttttcataataaaggcggttttattgcaaatattcgggatgggatgtttgttaataatattacgatgattaaaaatgacaaaggattattccttgaagctccacaaggtaatgcctcagtttcaaatagtatattagtaggaaatactattaattgtcaggctagctcaactgataaagcaattattcaaagtaatctggttatatctgactgtaatcggaatgctacctcaaagcttcctaatatactctttcccgccaatgaaaaattaattgctggcaacaatgatgaaggtatatgtgatgtaactgaaaaagatggcttgttatgtccatttaatacaccaaaagatagctttctaggtttctttaagccacgactgcttgaaagctataacactttggccgactctttaattattaataaaggacatttatatagtgatgcttcttcagttggtctagctggctgtgaaaagtttgatcaaagaggaaaaaggcgtagtggttacgatgaactttgtgatttaggtgcaattgaatatattttaaatagtgaaatctcgccggttggtcaagatatccgttatggccaggttgcaaaatttagtattttaggttctttaagtgaatcagacttagttacacctgctacttgtaaacgtctatttggagaaaggtttgatggtaaggattggcagccaggatgtttgaaaattatacaaaataaagatactccaatttcaaaaggaactttaattcttgatcagagtggtaatgtcacttacacgccaaatggaaattggcatggtgccgatatttttagtattcaggttgtgacgagtgtaactcgtttcaatgaaggggttgattttcaatatatttctattcctacgactatttcacaagcacctttatctggaattgaagataaatctgtaagtactggtgggggcggtagtataggaggaggatttttattaagtttattttccttaattgcattgcgccgtttaaagtcataa

SEQ ID NO: 42661 - DNA, 699 bp, Acinetobacter baumannii
atgcgtcaactccaactggatatagaacctcaacttgatgcccgaatcagtgatttttcgggaccaggttgggggcatgtagtggatgcagtgcgacaactacatgcgggtctagtaaatagattttatatctatggtggcgcaggaacaggcaagagccatttgctttcagcgatttgtgattcttatttagaggtcggtaaatctgcaattaaagtttctttgcttgaacttctcgatgctccaattgaggcaattacttgcttagagcactatgatctggtggctttagatgatattgagtcaattagtggggtgcctcactggcaaaaagctgtttttcatttaatgaataaccatgaaggacaacttgtattttcttcacgtgttgcaccgattgaattaaagctggagttaccagatttacaatcgcgacttacacaagcagtgagtgtaaaagtgccgagcggaagtttatatgctgaccgctatgctttagtcacttctgtaatggctagacgtgggatccattttgatcagcagattgtagactatttacttttacatgggcctcatcaagcttctattctattgcaaaccgtagcacaattagaaaaactccttaaaggtgagaagactaaactttcaaatgcaacattaagacaaatctatgctttaattgatgaatatcaacaataa

SEQ ID NO: 42662 - DNA, 1194 bp, Acinetobacter baumannii
atgcaagatcgtatactgcgccgtattttcttactcgcaggtattgtattgctggtatgggtattatacttgctcaagcctgtggtcatcccatttattggtgcttttttcctggcttatttatttagtccactagtcgaagttctagtaaaaattaagatacctcgctggttggcaattagtattgtttttattggtataggtgtaactttaaccgttgcattatggtacctggttccactgatctggaaacaacttgtttacgctcgagacagtattccagcggggatccattggattaatgcagagctattaccgtggatttcttcgacattccatgtccagcaaatggaaattgataccgatcaaatgtccaaagctgtgatggattatgttcagaccaattacagtgccgatagtattcaagcagttttattaaagcttgcacaatcaggacttaattttattcaaattggtggaacagttgttttaatcccaattattgctttttacttcttattagactgggaccgtatgttacaaaacttacgtcgtctcattccacggccatatgaagctacgaccttacaaatcgtccgtgaatgccatagcgtgttaggagcatttgttaaaggtcagttccttgttatgcttttgctcggcgtagtttatgcagtaggcttacaattaattggactagaggtcggcctaattattggtatggtggcaggtcttgccagtattattccttatctaggatttgcagtcgggattattgcagcggttattgcaagtttgttccaatttggaatggactggacacacttattacttgttggcgtagtctttatgattgggcaggcagtagagggctatattctgcagccattcctactcggtgataaaattggtctttcacctgttgcagttgtatttgctgttttagcaggggctcaattggctggctttttaggaatgttaattgcattacctgtagcggctgtcattgtagtgcttttaaaacacctcagagaaaattacgaacggagttcattctatgctccatcttctacattattaatccaagagggtaatattgagcaacttcatgtagaaactgaaaatactaaacttgatcttgaagttaaaaaacagcaagatacagataccccgaatctttcagatcagaaataa

SEQ ID NO: 42663 - DNA, 1071 bp, Acinetobacter baumannii
atgagcaactcaacttctaccccaaataccggtttaagctacaaagatgcgggtgttgacattgaagcgggcgacgcactggtcgatcgtatcaagtcagtcgctaaacgtacaactcgtccagaagtaatgggcggacttggtggctttggtgcactatgcaaaattcctaaaggttacgaagaacctgttttggtttctggaactgacggtgtaggtactaaattacgtttagcacttaaccttaatcgtcatgacacaatcggccaagatcttgtcgctatgtgtgtaaacgatcttttggtttgtggtgcagaaccactattcttcctcgactattatgcgactggtcacttaaatgtcgatgtagctgcaaacgtagttactggtatcggtaaaggttgtgaacttgcaggttgcgcacttgtaggtggtgaaacagctgaaatgcctggcatgtatgaaggcgaagattacgatcttgctggttttgccgtaggtgtagttgagcaaagcaaaattattgatggctctaaagtaaaatctggtgatgtacttattggtgttgcatcaagcggtgctcactcaaatggttattcattactacgtaaaatcttagatgttaagaatgtagacttaactcaagtaattgatggtcgccctcttgcagatgtagcaatggagccaacacgtatttatgtaaaaccagttctagagctttgcaaacaagttgatgtacacgcgatggcacacatcactggtggcggcttaccaggtaacttaccacgtgtattaccaaatggtgctcaagctgtaattaatgaagcttcttgggaatggccagaattattcaaacttttacaacgcgaaggcaatgtagaacgttttgaaatgtaccgtacctttaactgtggtgtaggtatggtcattgctgttgatgcaaatgatgcagaaaaagcaattgaagtgcttaatgctcaaggtgaaaaagcttggaaaatcggacatatccaagaaaatgctgaatcagtggaaggtgcagacgaaaaaattcgtgtgatctttgaatga

SEQ ID NO: 42664 - DNA, 630 bp, Acinetobacter baumannii
atgatgaaaattgctgttctagtctctgggaacggcagcaacttacaagccttgatagatgcaaatctatcagggcaaattgtaggtgtactgtctaataaagccgatgcttatgccctagagcgtgctcaaaatgccaatatcgcgacagccgtaatctctcacaaagactttcctagtcgtgaagattttgatgaagctatgcatcagcaacttatcgcatggcaagctgacgtggttattttagctggctttatgcgtattttaactgctgactttgtcgataaatggcaaggtaaaatgcttaatatccatccttcattattacctgcctataaaggcattaatacacatcaacgtgtattaaatacgggggatcgattacatggctgtaccgttcactttgtgacttctgaacttgatgctggtcaagcaattgctcaatctgccattgaagtaaaagaacatgacaatgttgcatccttggccgaacgtgtacataaacttgagcattttatttatcctcaagttgcagagtggttatgtaatggccagctcgcatggaaaaatggacaagcctatttccgcaatcaaattcttgaacaccctattcgttttgcatcttggtaa

SEQ ID NO: 42665 - DNA, 810 bp, Acinetobacter baumannii
atgtcagtaaaaccggttatacactttgcgcatgccaacggcgtgccatctatggtgtatcaaaaattgtttgatcaattaaaagatgagtatgacgtaatttatgttccactcattggacctgacaaacgttatccgattaccaatcattggccttttttggttgatcaggtaattgatagtattgtacgtcaagcgaaggggcgaaaagtgattggactgggccattcgcttggttcagttttaactttaatggcttcttttagacggcctgagctgttctcacaagtgatcatgttagatccgcctcttattttgggtagatattcttttgcttttcatatggcaaaattatttaaacccaaaatagttgatgatatgacaccagcgggtttatctgcacgtcgtcgcgagcattgggaatcacgtgagcaagcagctgcattgttacgcccaaaaggtttttataaagactttgatgaagattgctttcaagcctatattgactatgctttgaaagaagactcggtacgtggtggtgtaacattaactatttcccgtgaagatgaagttgcgattttccgtaaaaacccttcttggtggtggttacccatgccaaaaccgaaaatgccagtacatttagttgtaggaaaagagagcgcctttttaaaaagaggttttcctcaaatggcaaaacgcaaaatggggattccatttagtgttgttgaaggagggcatatgttccctctagagcatccgattgatacagtgaattatattaaggaacttattcaccgtaattcacgctaa

SEQ ID NO: 42666 - DNA, 1098 bp, Acinetobacter baumannii
atgaaatcatattatttagacagtttttatcaaatcaacgtatataatgacatcatttcgattgatttggattggaattttatgtccgattggccaccaaaaccacaaaatgaacctataacccctaaacagaacggaccggaatggcaaatccttgagaaagctgtactggcttctgtagaagaacaacgccgtagtcgtcgctggggtatattctttaaaacacttacttttatttatctattgttcattatcgtcttaatgggcaaaggttgttcgaccactaaagatggctctacagcaagtagtagcagtgctcaccttgcagtggttgatattattggaactattgatgcttcaagcaatcaggctgtgaatagtgaagatacaaacaaagcgcttaaacgtgcttttgaggcatcgaatagtaaagcaattgcccttaatattaattctcctggcggatcacccgttcagtcagatgaaatctggcaagaaattcgctatttgaaaaaagagcatcctgacaagaaagtctatgcggtaattggtgatatgggtgcttcgggtgcttattatattgcttctgctgccgatgaaattattgtgaatccatcaagtttggtaggttcaattggtgtcattatgccaaactatggcattactggtttagctcaaaaactaggaattgaagaccgaactcttacagcggggacgaataaagacattttaagtatgacaaaaccgattaatcctgtacaaagacaacatatccaatctgtactcgataatgttcatactcattttattaatgcggtcaaagaagggcgtgggaaacgcttaaaatctaatgatcctgctattttctctggtcttttctggactggcgagcaagcaattcagttaggcgtagctgaccgttcaggtaacattacaagcttgatgcgtgaactgaagcttgataataaagttgactacacgattgaacgtaacccattacaatccattctagggcgaatgggatcagaaatggggaaaggtttaagtgagtcggttgctgaacgcttacaaacaagtcaggacgcaaaactacaataa

SEQ ID NO: 42667 - DNA, 984 bp, Acinetobacter baumannii
atgactagaccagattcaaaaagcatgaactatcaattactcaaaacatttagccgccaacccattcaatttgggcgttttcttgctcgtctgttagcaggacttgtaaatactctaaaaattactagaacatcaaaaagtattgagcttaacttaagaattgcgcttccgtatttaacacctcagcagcgtatagcgattacagaaaaagctgtaagaaacgaattaacttcatattttgagtttttaagtatttggggctcatcaaatagtaaaaatatctcacgcattcaccgtattgaaggtgaacatttttttcatgaagcattggctgcaaaaaaaggtgtagttcttattgttccacattttggtacatgggaagtcatgaatgcatggtgtgctcaattcacatcaatgaccattttatataaacccgttaaaaatgctgatgcagaccgttttgtgcgagaagcccgtagccgtgaacaagcgaatctcgtccctaccgatgaaagcggcgtaagacaaatttttaaagcattaaaacaaggtgaaacgacagtaattttgccggatcatacccctaatgtgggtggagatatggtgaactattttggtgttccacttgcctcaagtaatttaagcgcaaaactcatccagaaaactaaagcaaaagctctgtttctttatgcgatccgtaatgaaaacgatggctttaccatgcatatcgagccaatggatgagaaaatctatgaaggcactgcggacgatggaacgtatgtcatccatcaagcgattgagcaactcatttatcaatatccagaacactatcactggagctataaacgttttaaagcgaaccctgctttagacaatatctataatatcgatccgacagaagcacttaaaattgtagataggctcaaagcagaagctttaaaaacctctactcaaccagagcctatccaaacgtcggtcatgtaa

SEQ ID NO: 42668 - DNA, 2433 bp, Acinetobacter baumannii
atgtttaagattattctattggggtggattggcggtattgcattgatgggaatagatttccctttaatcatgcaatatgaaaaagtgggcgaggctctactgttacttgcctttattttttatctttataaacgccccatgttcgttgatcgaccatttttaaaggcagtgttttgcttattatgtacaacaagtctttttatggttggttaccactatgctgaaaaagcattgattgaacgattagaacaaagagaaacggatacccgaaatctcgacattattgtttatataaaccatttaagtgaagaaaaagataataaggttcaacaaactgcacaagttctaaatctttctaaagaaccggtgaattggttgctatatttaaaaagtaataatcaaaatttattaaagaataatcagaatcttgaattaggccactattatcgaatatctggaaaaacaagacctgcgcatagttatgccaccccaggagcttttgatcaggaaaagtggtttattcagcgaaatattgtgtctagttttaacgtgagatatattgagcctttaagtctcgatgaaatctatcgattgggctatcagcaacatttaaaagaacaacagtctttttccaatagttttcgtttaaatatagaaaaacttcgcttaacttttaggcaaatattaaacagctcatctctacagcaaaagggtttaattttagctttgctgacaggtgatgaaagccttttatcagatgaaactcaactacagttcaaacaattaggaattagtcatttattggcgatctcaggcccacatgtgctcatttttgccattatgttatcttgggcatgtcatcaatttatcagtcgttattatcctcaaatttacttatggaaaccgaaacagattttgatggctgtaccatgctgccttggtgttttaatttatactgcatttgtaggtttcgaaattcctgcactacgaacattattatcagtatttatatttattggatttctattattaaaacaacctattaaaccttttacattactcgtatatagcgcaagtctactgttgctaattgacccgtttagtgtgttttctgcaggtttttggctgtcttatggggcatgctttattttattaagaatttaccaaactatagcgcagctacctgagcaacattttttaagtctgagctcaaaaatgatttttatgagtaaggtgttaattgaatctcaaggcaaaatatttattgcattgagtcccttaaccttacttttctttcaacaaatttcttgggttgctccattaaccaatattattgccgtgcctattgttggtggtgttattgtccctttaaacatcatggctgcttgcgcatggtttgtaataaaaccatttggaaatatgctttttcatttcaatgatatgttgctcagcatattgctgagttgtttgggcttattagaaaaactctctttaccattacaaggtataagcttgacgccactgtctttattagcgattagttttgccataattattttatttttacctaaaggaattttgcccaaaacttgggggatattatgttgtttacccttagttattatgaacaaaacgagtcagcaaattcagcttaatattttagatgttggacaggggcaagccatttttttacaacattccgaacaaaactggttaattgatacaggcggttcttacgatgaaaaaatatttagtattggacaaaatgttgtagtgccttttctacgtcagcaaggcgtaagacaattagatcatgttgtgctatcccatcttgatcaagaccatagtggcgcgtttcctcttattcaacaagagattcctgtaaagcagcttatttcgaatgaacaattaccaaatgatttaaagcaaccattccaatattgccatcaagggcaacaatggcattatcctgagttagatattcaaattttatggcctaaagaaaaagatctggcttttgttgcttctaaccagaatcaatattcttgtgttgtatatcttcaatttaaaaaagttggtggttaccaaaattttcttattatgggcgatgctggatgggaagctgaatacgagttattaaaagattatcctaacttgaagatagatgtgttagtgctagggcatcatggaagtaagcacagttcggcttatgatttcttggcgaccttaaaacctaaactggccattgcatcggcagggtttgataaccgttatggccatcctagccaacaagttatagcacgtttaaaagctctacatattccgctaaaaagcactgtggaacaagggaccttaagttttgtgttggaaaatcacaaaatagttttacatgaccgacgtttggataggctctggttgagtagaggtttttaa

SEQ ID NO: 42669 - DNA, 687 bp, Acinetobacter baumannii
atgagtaaagtcgttttagaagcaaaagatatttataaacattttgatgacggtaaatctaaggttgaagtcattaaaggtctctctttacaagtggaagcagggcagtttgtatctattgtcggagcaagtggttcaggtaaaagtactttgttgcatgtacttggtggcttagatcagccgactaaaggacaggtatttttgaatggtcagcgctttgataatttaggtgaagcggaacgtggctttcaacgtaaccaatacttaggttttgtttaccagttccaccatttattacctgaatttaccgctcttgaaaatgtagcgatgcctttaatgcttcgagcagacagtcaatataagtcggtaaaggcacaggctgaatatttgctagatcgagttgggctatctcatcgtatggaccataaaccaggtgaactttcaggtggtgagcgtcaacgtgttgcacttgctcgtgcattagtgactaagcctgcggtagtactagctgatgagcctacgggtaacctagatcgtaaaacagcagtaggtattttcgagttactcaccgatcttaagaaagaactaaacatggcaatgttaattgtgacccatgacgagcaattagctcaggcagcagattcaatcttgcatatggaagatgggctgtgggtaaacggttcttaa

SEQ ID NO: 42670 - DNA, 1281 bp, Acinetobacter baumannii
atgaacacttctctttttccatcaatgaccttggatttagaaggtatgtttaaaccaatctcactgtatatagggttgagatatactcgcgctcgacgcagtaatcattttatttcttttattgcattggtttcgatggtcggtttgacacttggtgtcgctgtactaattacggtactttctgtaatgaacggtttcgaccgcgaattaaaaaatcgtgttttgggaatggtaccgcaagcgacagtttcatcgacgcaaatccttacggattggcctgaactggttaaacgagttgaaaatcatccccacgtgactggagttgcaccttttacccaattgcaaggtatgttaactgctcaagggcaagtggcaggtattatggtgacgggtattgaccctaaatatgaaaagaatgtctctatcattcaaaaccatattgttgccggtagcctcgactcacttaaaaaaggtgaattcggtattgtacttggtaaagacatggccgattcgcttggcttacgtttaaacgatagcgtgacattggttttacctgaagcgactccatctccagctggtgttgtacctcgttttaaacgctttaaagtggtgggtattttcagtgtaggtgctgaagttgactcgatggttggatacattgctttatatgatgcttcaactttattgcgtttacctgatggcgctcaaggcgttcgtctaaaattagatgacatttttgccgctcctcaagttgccgatgacattgtgaagaatttgccaagcaatttctatgcaacaaactggacctatacacatggcaacttatttaatgccatccaaatggaaaaaacattagtcggtttattgcttgtactaattattgtagttgctgcatttaacattgtttcgtctttagttatggtcgtgactgacaaaaaatcagacattgcaattttacgtactttaggtgcatcgccatctatgattactaaaatctttatggtgcaaggtacggttattggtgtgattggtacagttgcgggtacggttttaggggttattctggcacttacgatcagcgatattatttcttggtttaataatgttctcggacttaatctgttcgatgcctattttgtacattacttaccttcttacttaagatggcaagacgtgacaattattgtgattgtttctttactcttaagtttcttggcaactatttatccggcgcttcgtgcagccaaagttcaacctgccgaggcattgcgttatgagtaa

SEQ ID NO: 42671 - DNA, 909 bp, Acinetobacter baumannii
atgccatcccaaaccaacttggcttcaacttatgtcttgcttgtatttatctgggcaacgacacctttagccattgtatggagcgtatctgacttacatgtcatgtgggccttactgttacggttttatatagctttgcctctgtcggttattgttttacttgttctaaaaacttcttttccaactcataagcaagctttacatagttattttgcagggtcttttagtttaatcggctcgcaaatttttacctatgctgcgacccaatatttaagttctggcatgattgccttgatgtttggtctagcacccattatggctgggttgattggtcgttttgcttttggtcagcatctttttaaattgcagtggctaggtatggctgttgctgtttgtggactagcgattatttgtttaaatggttcaaatcaacatgtgcatccatttggcattgtcttaatgttggtcagcgtttttgtttattcattttctatattttgggtaaagaaagtgaatgccaaaattcagccaatggctcaggcgactggttcgatcttggtttcttcaattttggcaagctgccttattccatttatttggcaatatgcaccgactcatttaccacaagctaaatctttatttgcattaatttatacagttctgatggcttcacttgtggctatgttctgttacttcaaacttgttcagaatataaaaccgaccactttatcattaacgacagtcattacaccgatgctagcaatgatcattggagctgttttaaaccatgaacaattgtcgattatggtttttgtgggagctttcattatcttatttggtctatttctatatttttataaagacattcaagcaaatcgtaattttgctcaacatattaagtctaagtag

SEQ ID NO: 42672 - DNA, 468 bp, Acinetobacter baumannii
gtgctgccattcaagttgtgggtagacgcagatgcattacctaaaattttgcgtgaagtcattttaagagcttcggatcgttatcaattagaagtgatttttgtagccaatcaaaatgtcggtattactccttcagtacgtattaaatctctgcaagttttaagtggggccgatcaagccgatcaggaaattgtgaatcgtatgtctgaaaatgacattgtcattacgcaagatattccactcgcagctcaagttattgagaaaggtggtattgcgattcacccacgtggtgaggtgtataccacagcgaacgtaaaagcacgtttgcacttacgtgattttatggatacgttgcgcggcgcaggtgtacagacgggtggtccaccacctatttcagaacgtgataagcgcgaattttctagtgcactcgaccaaacgattttaaagcaaaaacgtaaaactgcttag

SEQ ID NO: 42673 - DNA, 942 bp, Acinetobacter baumannii
atgaaaaatcaaaacagtccagaagttattacggtaaacgaccaaaattttggtagtcatggagagcattggaatctactgacttcccgtccagagacagatgtaccaaaatggcttggactagcgcttgatgctcctgtaatgccaatgggtttatgccaaaatgaagacgaaatggatcaatctttttggctcattcaaggcccacaaggtcagaaggtcactattaatcaaattattgcagttgaaaatcaaaaacctcgcgctttaaaaactgccttcccgagttttgatagtccttatcaatataatgcccaaattgagcgcatcattacttgtgactctgctactcaagcggtattaagtttaaaattaaataaaagtacaacgatttatgcatttgataatttatttagcgttaatcgttgccaatatgacaaaacccaaacttatcaagtccaatttaatgcatgggcctatgaattagaatcagtgcctgcgggagaaacaattgtcgtagatgatccagcgtcaattaaacatcaccgtgcattaaatgcgattttaactgaacataatggaattgcacccgaaaacctacaagaactgattaatgaatggcaaccaaaaactaaagaagatcaagaacctgtaacggttgatttttctaaaatggttgcatatttatatggagaaaatcttggtcaagaagatgaagcttggttccaaggtaatattgtcggtaaaacttcaatgtcatttatgggtgcagaatataccctttatgatgtcactttagttttagaagacaaccttcctgccatattagtgcgcattgctacaaaaaatgatttgtacaaaaactttaatattggcgaatatattcgtggcaatatctggattcaggcgaatatttatgctaaaaatagtgaaactaattga

SEQ ID NO: 42674 - DNA, 147 bp, Acinetobacter baumannii
atgaagattatacctgaacaaaccaccagcctcattcaaactagtaacccacgtataagggtcgatactggtgcgttttgctttttcgttttgggtatgttcttagccgcaattatgatacatcaatttggttttatgcctttttaa

SEQ ID NO: 42675 - DNA, 1080 bp, Acinetobacter baumannii
atgcgcgcgtacaatttctgtgctggtcctgctgcattacctactgccgttttagaaaaagctcaacaagaattgttggattggcaaggtaagggtctatccatcatggaaatgagtcaccgtagtgctgactatgttgctgttgcggaaaaagctgaagcagatttgcgtaagctcatgaatattcctgaaaactataaagtgctatttttacaaggtggcgcgtcattacaattttcagcaattcctttaaacctgcttggaaaaaataacaaagcagattatatccatactggaatttggtctgaaaaagctttaaaagaagcaaaacgttatggcgatattaatgttgtagaagctggtattaaagtagacggtaagttcgcaatttctgagcaaagcgaatggaacttatctgacgatgcagcttatgtccattatgctgataacgaaacaattggcggtttacagtttgctggcgttcctgatgttaaagcaccactggtatgtgacttctcatcaagcattttatctgctccacttgatgtttcgaaatttggtctcatctatgcaggtgcgcaaaaaaatattggtcctgctggtttaacaattgttattatccgtgatgacttactggatcaagctaaagcagagattccaagcattttaaaatatgctgatcaagccaagaatggctctatggtaaatacaccatcgacttatgcttggtacttgtctggtttagtatttgaatggttactagagcagggtggggtagatgctatccataaagttaaccttgaaaaagctcagttgctctatggttatatcgattcaagcgacttttataataacccgattgccattccaaatcgttcaattatgaatgtaccatttactttggcagatgaagctttagaaaagcaattcttgaaagaagctgaagcaaatcacttattgaacttagcaggtcaccgctcagtaggtggtatgcgtgcaagtatttataacgctgtaccattagaaggcgttcaggcacttatccgctttatggatgattttgctaaacgtaatggttaa

SEQ ID NO: 42676 - DNA, 1488 bp, Acinetobacter baumannii
atgccaacacatcaatatcgacagtctaaacgtccttttttgtttaaacccaattaccttgcgttggtattgggagtattaattgcaacgcctatttatgcgcaaagtttaagttatgctgaagcagaacaacaggctttaaaaagctcatacagcactcaagccaaccaagcattacaacaagcctctcagttagaagccgaagcggtaaaaggtttaggactccccagagttgatttaaatgtgagggcatatgcttttcatagtgaaacagatgtacccttaggctcttttaaacaaaaacttgaaaatgatttaagccaaggactcaatgataaattatcccagtggaacaatgtcattccatcagatgttttaggtcaagttcaggaaggctcaaaccaaatcatacatgacggtataaatcgttttcctgactacgctaatttgactgtagaagaccaagtagtccgaccatctatttcagtggtgatgccgctctacacagggggcttaacgactagtgcaaaaaaaatagccaacattcaggctcaacgctccgagctttcaagccaacaacaacaagatatccagcgcttcgaagtcgtacaaagttattttaatgtgcaattacaacaacaactggtcgcaagtagtctatttaactttaatgcgatgcaaaaacattacagcaatgcgttaaagctcgaacagcaaggttttattagtaaagggcaacgtatgcagtttgaagttgctcgtaacaatgccgaacgaactctacaaaatgcgcaggcaaatctgaatgctagccaatttaatttaaacaatcttttgcaccagcaaaataatgctgatttaagtactcccctttttgtaaatactgttcgtagccaatcgttagaatctcttttaagcagttactctcaaaaatctagccttgtgcaaaaaatgcagttagacactcaattggcaaatgcaaatattcaggctcaacaagcagcaaaaaaaccgagtcttttcgcttttggtgagtattcactcgatgaaaatgaaaactggattgtaggtgttatggcaaaatacaatctgttttctggcgtagataaaaataagaatattcatgctgccgagttaaaacgttatgcttcagaactcatgactgaacgaactaaacaagagattgaagcattattgaataagtcttataacgagctcaattcagcacagcaaagtcatacgctattacaaaggaatatcagcgcagctcaagaaaacttacgtattcaggaactttctttcagagaaggcatgggtacagcgactcaagtgattgatgcacaaaatgcattaagtgctttaaaaacagaaatggctttaaatgcttataaatatgtcatgtcgctcgcaactctgttgcaaagccatggttctatggaccagtttaaagcttatgtgactcaaccacacactgactatattcgctaa

SEQ ID NO: 42677 - DNA, 1122 bp, Acinetobacter baumannii
atgaatcaagactcagctcattcagaacaaaattctcctgttgcggatacggcagaaaatcaccaaaatcagcagaatactcaaaccgacaatactcaagaagtaaaaacgagtaaaagtgattctcaacatcctaaaaattcgaaacttaaactaattattgcggtcgtggttattgctttattaggattaatccttttcggtttgtggaaaagctatcaatctaagcctattgaattacaaggccgagttgaggctgaaacagttcatgtcagtactaaggttccgagccgtattgaagaaatttatgtgcaagagggccagaaaatttccaaaggtcagccccttgttcgtttagtcagccctgaaatagaagctaaaaaacaacaagctttagccaccctacaatcagctttggcatttcaatctacggtagaccgaggctctcaacaggaaaatattgatactctttatgccaattggcagagtatgaaagcacaggcaaaccttgctaaaaccacttatcaacgtggagaaaatttatatagacaaggtgttatttctcgtcaaagaagagatgagatgttagccgcacagacttctgctcaagagttaagtgaagcagcttatcaacaatatgctcgagcaaagcgcggaagtaccagtcagcagaaatctacagcggatgcacaagttgagattgcaaaagccgcggtaagtgaagctcaagcacttgaggcagaaactcgtttactcgctcctatttcaggtacagtttcaaaaacttatggcaaaccttctgaactcgttgctatgggtgtacctgttgtcagcattttagaagatgatgatttgtgggttagtttaaatgtcggtgaaaaccaatacgcttctgtttataaaaacaaaacgctggaaggtttcattcctgcgctgaatcaaagtgtgatgtttaaagtgaaaaatattgatgccgaaggcgaatttgccaccattaaaactacacgtcagaccggtggttatgacattcgtagttttaaattacatttggtgcctgagcgtcctgtcaaagacttaaaagtgggcatgagtgttctatttaaaattaaagaagaaaaataa

SEQ ID NO: 42678 - DNA, 1071 bp, Acinetobacter baumannii
atggtgacactcatccctgcttttatcatttttttgtttagcagcatgttttatgcaggtaaagctgaacatttacccattgccattattgatcaagaccagagtgaactaagccgtaatattggaaagtatctttcactaaatcatacagtcgatgtaaaaacaattactacaagctcaagtgaagccgagagattactcaatgaaaccaaaatatggggttatgtttttattccggatggtgccgaaaaacgttttgtgaaagctcaagatgcacaaatcagtattgcttttaaccaatctttttttagtgtcgggaacacgatttcctcggcgatgttagtcagcactctcaatgctttagcagactatgctggccagaattatcttgcaaataatattccctatttagatgtccctacagcacacgtcaaaatttcaacgctttataacccgagcatgagctatgagttctatttagaacccttcatggttccagccgtattacatttattactatgttgctgtgtggcatttgccattggacaagaaattaaacgcggtacactaacacagtgggtgaaccgagagagttttattcaaggcttattggctaaaaatttgctgtatagctttattttctgtttctggacttggttatggatgttttggctggttgaaattcgaggctggtttgtagcaggttcactaagtttcttattagctgctcagttcttgctttatttttcttatgctttaattagtagtaccgtcattctcgcgaccaaaaatttaagtaaaacttttggttttattgcagtatatggcggatcttctttaagttttgcaggcgttactctaccattaaataatgcaccgattttcactaaattttggtcattgattattccgtacaccccttatgcaaagctccagaccgaacaatgggtgattggaagtccacttttcatttcaatgtctcccttcttaatacttattggctactgccttatttatttctttttaagttgtttgctgcttaaaaaactggttcaaggagcaacatcatga

SEQ ID NO: 42679 - DNA, 1092 bp, Acinetobacter baumannii
atgaaggaatttttaaaggcttacgttcaaacatttaaagatattgtgagtaacagttcagttttcacaacacttattttatccgtcattctttatagctttttttatccgacagcctataaagctgagcgcgcagaatcaattccaatcgtcattgttgatgaagaacaaagtcttttaacttctcaagtcattggccaaacagccaatagccctcacgttaaaattgttgatgtcactgctaattttcttgaagctgaacaaatggtccgcgaacaaaaagccgatggtattttacttttaccaagtaatttaacgcagagcttacgccgcggagaaactggcggaatcggcttatacttaagcacaaccaactttttaaaaactaaagaaattgggttaggtcttgccacttctattgaagcaactttaaaggaatatattgaaaggtttggacaacgtacacacttccagcctgctctttctattcatcaaatgcctttatttaatacgctttcaggctacggtagttatatttttcctgcagttgcatcacttattattcaccaaacaattgtgttaggtctggccatgctggttgcaagttatcgcgaacaacatgaaaaaattacccctattcgttttgcaggaatttttgccagtatctttacaattggttgtttaggaagtttttatctttttggttttaccttgtggttcaatgactatccacacggtggaaactttgtcggtttgctagtcgctgttcctatttttattagctgtgtaattggtttaggtatgctgattggctcacttttagatatgccggaacgtgccggacatattattgtatttagctcagttcctcttttcttattaactggtgccgcctggcctcatcaagccatgcctgaatggttgcaatggtttgcttggtgtttaccctctacacacggcgtacagatgtttgtacaacttaatcaaatgggcgttcctttaaatgtcgcggtcccgaaattaatttttcttgcgactattggggctatatttttaattactgcctattcacgtttaaaagtatctaaataa

SEQ ID NO: 42680 - DNA, 795 bp, Acinetobacter baumannii
atggcaaaggtgtgctattgcgcagatgactttgcaatgaatgcagaaatatctgacgcaattattcaacttattgaacaaggtgcgcttcaagccacctcatgtatgacccaatctgatttatgggaaactgctgctgccaaattaaaaccgtttagtgatcgagttgatatcggtttacatttaaatcttacccatgctttcgcttcgggtaatctggttcttcccttacctatgcttatagtccgagcatggtctgcaagtcttaatcgcgaattaatcactcaatgtattgaggagcaatggaacttatttgtttcagtattaggaaaacaacctgactttatagatggtcatcaacatattcatcaatttccatttatacgtgatattttgctgcaattactaaaagagaaaaaatttacgggttggattcgaaatttacaacaaccgatcaatacccctcattaccgttttaaaactcgtatgctctcagcattaggttctaactctttggcaaaagcttgccagacatatcactttaatcaaaatggccaatttgctggcatctatgatttcaaactgaccaattatggcgaactcaatcaatattggcttgcgaatgcaaaagaccatttactgattatgtgccatccagcacttgcacaatcaaatgatcaagatccaattcaacacgcccgaattcaagaatatcaatacttcagttcggctcagttccaacttgattgtcaacaatacggtatccagctcaccagactaggggcaatgcaatga

SEQ ID NO: 42681 - DNA, 981 bp, Acinetobacter baumannii
atgaatataaaaccctttttatcctgcgttgttccagcctacaacgaagcagagaatttaaaaacctttattcctgctttggcaaatagtctaaaacagcaaaatcttagctatgaaattattgtggtagatgatggaagtaaagacgataccatcccaattttacaaacaatgattgaagattatcctttagttgtgctggagctttcacggaactttggcaaagaagcagctttaagtgctggtttagaccatgtgactggtgaagttgctctactgattgatgctgattttcaacatccatttgaagcaattccaaccatgattaatctttggaaaaatggttatgacatggtctatggtattcgtaatcgtacaaccgaatcatggcttaaacgtgttctaacccaagcttattaccgtattttaaacttaagttcacctattgatattccagaaagtgctggagatttccgacttcttgatgcaaaagttgttgaagccatcaaacaattaccagaaaaaaatcgttatatgaaaggtctatatgcttgggttggctttaaaagtataggcattaatttttctgagcaagaacgtcaacatggccattctagcttcaacttaaaatctctttttaacttagccatgtcaggtttaacgggtttttctgatttacctttacgcgtatgtatttacttaggtgcaattctggccttaggtgcgatgagctacggagtgtggattatcattaaaactttgattgagggaatttccattccgggctgggcaacacttgcggcaggtatgacgctattaggtggcattcaattgttatttattggaattttaggtgaatacattggccgcatttatgctgaagttaaaaaccgcccaaaatatattatttctaccgaacattctcgtactaagcaggaacattcaatcgcccaccaagaaaatacgttctctagtttctaa

SEQ ID NO: 42682 - DNA, 381 bp, Acinetobacter baumannii
atgtttgctcatattcttcagcttgcgcggtttactactacagggaccgcagcagcatttactcattatagtgtagccatgcttctatttaagaaacatgttgcactgcaatatgccaatttatgcgcttttctactcgcctattgggtgagctattttgggcaccgcgtttttacgtttaaagcacaacatcttacgcatcggcagactctcccaaaattcacgttggttgccggcttagggtttttatttaatgaaagttttcttttactttcaaacctctattttaacgtacctgtttcaaccttagtgtgtactgcaattgttctgacatctatggtgacttttttacttaaccgtttttttgcattccaacattaa

SEQ ID NO: 42683 - DNA, 1647 bp, Acinetobacter baumannii
atgcagcaatggcttcgtagttccaaatttttattaatattcttaccgatttggctatttgttttgtcttggattagacccttatctgtaccagatgaaggtcgctacggagatattagccgtactatgttcgaatctggagactggttaactccacgaatcgatggcttacctttcatgcataagcctcctttactacattggttaagttctatgtttatggagctttttggtgtgcatgtatgggtgttacgtttagtacctgttttggctggtaccctcatgttagtgggactattcttatttgtaaaaaagcatatttcagaaaacgttgcacaacttaccgttattattttagccactaacctgcttttttttggtagtagccaatacattaaccatgatttactgctcgcctcttggatcaccattagtgttttatgttttgttgacttcaccatttctgcacggaaatctattttatttttaggttatatctctggtgcagcagccttcttaagtaaaggtttaattggggttttaattcccggcatgattcttttaccgtggttaatttacaccaagcaatggaggaaaataccttctcttcttaatccattggctatcttgttatttttactcatcgttagtccgtggctctacttagtacaaagtaaatatcctcaatttttacactatttttttattgatcaacaatttaatcgttttagttcaaaagagtttaataacaaacagccatggtgtttttatctgatgattttatttgtcagttttttaccatggctttttgcgagtagatttacgtctataaaaaccatttttaaagattacaaatcatgctctttacttgccctgcttgtatggtggtttgtctctgttacggttttcttctctattccgccttctaagctagcaggctatattttacctgctgttccgcctcttgccatttttttcgcgcttgtgatgaataaggttcttgaaagcagtaataaaaccagattgcagacttggggtattcctgtatttactgtacttgttggaattggcgttaatgcaacaccacattttattcgtgcacatcagctttttatccaaaaccaagccatatttatttatctcattggtgccttattaattgtgcttccacttgtgttagttgggctatataaaaaacagaaattgaactatttgacttatatttttataagtttaattgttctatgtagtgcagtcccatttgctgttcgtattttagataccaaaaacaatgtaggccaaacagattttgctgagtacattgccccatctacaaaaatcgttttctacaattattatttctatgatgttccattccttttacaacttaagcagcctgtttatatcgtaaatcaatgggatactgtgcattcagatagtgcctctttagaaattaaagatggtttgttatttgaaccgcaactcaaaaagtacttgtggagcgaacagcagcttcaagatgctctaatgcaaaaacaagatctgatcgtggtaagtcaacctcataattttgcaactaaagacccgtcagtaaaaactttgcattacagaaactatgatgtatttattttccatccctcgaaataa

SEQ ID NO: 42684 - DNA, 2715 bp, Acinetobacter baumannii
atgagcgtatcggaaatccgaccgattgccattgaggacgaactcaagcattcatatttagattacgcgatgagtgtaattgtatctcgtgcattgccggatgtgagagacggtcttaaacctgttcaccgtcgtgtgctttatgccatgcacgaattgggcaatgactataacaaagcctacaagaaatctgctcgtgtcgttggggacgtaatcggtaaatatcacccgcatggtgactcagctgtttatgaaaccattgttcgtatggctcaagactttagcttacgttatttattggttgatggtcagggtaacttcggttcgatcgatggtgatagcgctgcggcaatgcgttataccgaagtccgtatgactaagctggcacatgagcttcttgcagatttagaaaaagacacagttgactgggaagataactacgacggttcggaacgtatccctgaagtacttccgacacgtgttccaaacttgttaattaacggtgctgctggtattgctgtaggtatggcaactaacatggcaccacacaacatgacagaagttgtgaatgcatgtttggcttatgctgacaatccgaatatctcgattgaaggattgatggaatacattactggtcctgacttccctacaggcggtattatttacggtaaatcaggtattgttgatgcctaccgtaccggtaaaggtcgtttacacattcgtggtaaataccatttcgaagaagatgaaaagacaggtcgtacaaccatcgtctttactgaaattccatatcaagtaaacaaagcaagagttattgaacgtattgccgagttagtaaaagagaaaaagcttgaaggtatttcagaacttcgtgatgagtctgataaagaaggtatgcgtattgcaattgacttgaaacgcggtgaaaacgcagaagtcgttgtaaataacttattcttaaatacccagcttgaaaactcattcagcatcaacatggtttgtctagacaatggacaaccaaaattgatgaatctaaaagatattattgcggcatttattcgtcaccgccaagaagttgtgacacgccgtaccatgttcgaattacgtaaagcacgtgaacgtggtcatatcttggaaggcttgacagttgccttagccaatattgatgaaattattgaaaccatcaaaacttctgcaaaccctgctgaagcgcgtgagcgtttacttgcgggtgagtgggcaggtggtggcgttgttgcactacttgaaaaagctggtgcaatttctgttcgcccagatgaaattgaaggtgaagatccaaatcgtccatttggtttaagtgattcaatttaccgtctgtcaccaacacaagtaggcgcaattttagaattacgtttacaccgtttaactggtcttgaacaagacaagttacatgcggaatatactgaaattttaggtcaaattgctgaacttactgcaattttaaatgactttaacttgttaatgggtgttattcgcgaagagttggcacaagttttacaacaatatggcgatgcacgtcgtaccgaaattgttgaatctcgtgttgatttctgccgtgaagatttgattcctgaagagcaagtggtattaactgtttcacaaacgggttatgcaaaaactcaaccactttcagactatcaggcacagcgccgtggtggacgtggtaagtctgcaacctcaatgaaagatgatgactttattcaacatctgattgtggcatcgaaccatgcgaccgtactttgctttaccaatgtgggtaaagtgtaccgtctgaaagtatttgaagttcctcaagcatcacgtggggcaaaaggtcgtccaatcgtgaacttgttacctctagatgcaacagaaaccgtaaccgcaatcttgccgttaaccgagttcccggaaaaccactatgtgtttatggcgacagcttctggtacggttaagcgtgttgagttagaacaatttgcaaacattcgttcaaatggtctacgtgctattgaacttaatgaagaagataccttaattggtgttgcgattactgatggtaatcagcaaatcatgttgttctctaacgaaggtaaagcaattcgttttgctgaaactgacgtacgtgcaatgggtcgtacagcgaaaggtgtacgtggtatgcgtgtaagctttgcaagcagcaccttaagtgaagaagatgcagatgttgaaaatgatgattcagatgataatgatgattcagcagattcaagtctagtaagtcgcatcgtatcgcttgttgttgtacctgagacaggcgaagtactgtgcgcgagtgccaacggttatggtaaacgtactccagtaaatgacttcccgaccaagaaacgtggtggtaagggtgttattgcgatcaagacaagtgaacgtaacggtgagctagttggtgcagtttctattgatgaaaccaaagagttattattaatttctgatggtggtacgcttgttcgtacgcgtgctgcagaagttgcaatgacaggccgtaatgctcaaggtgttcgtctgatccgtttaagcgaagaagaaacgcttgttggcgtagtttcaattgaagctgtagaagacgaagaagaacttcttgaaggtgaagtagatacgactgaaactgatagcgaagaagctgtatctaataatgaagatacttctgaagagtaa

SEQ ID NO: 42685 - DNA, 933 bp, Acinetobacter baumannii
atgagtattttagttatcgctgatcacaacaaccagacacttaacggtgctactttaaacgttgttgctgcagctcaaaaaatcggtggtgatattactgtattagttgctggttcaggcgctcaagcagttgctgacgctgctgctaaagttgctggtgtgagcaaagtattacttgctgacaacgctgcttatgcaaaccaattagctgaaaacgtagctggcttagttgctgacttggctaaaggttacaaatacgttttagctgcttctactacaactggtaagaacattcttccacgtgttgctgcgcttcttgatgtaagcatgatcacagacattatttctgttgaatcggctaacacattcaagcgtccaatctacgctggtaacgcaattgcaactgttcaatctgacgaagcaatcattgttggtactgttcgtggtacagcatttgatccagttgctgcggaaggtggttcagctgctgttgaaacagttggcgaagtaaaagatgctggtgtttctaagtttgtatctgaagaaatcgttaaacttgatcgtccagaattaacagctgctcgcatcgtagtttctggtggtcgtggtgtaggttctggtgagaactaccacaaagtacttgatccattagctgacaagcttggtgcagcacaaggtgcttcacgtgcagcagttgatgcaggctttgtacctaacgacttccaagttggtcaaactggtaaaatcgttgcacctgagctttacattgctgtaggtatttctggtgcgatccagcacttggctggtatgaaagattctaaagttattgttgctatcaacaaagacgaagaagcaccaatcaacagcgttgctgactactggttagttggtgatttgaacgctgtagtaccagagttggtatctaagctttaa

SEQ ID NO: 42686 - DNA, 750 bp, Acinetobacter baumannii
atgaaggctcttgttgctgtaaaacgtgtggttgatgccaacgttaaagttcgtgttaagccggacaatagtggggttgaccttaccaacgttaaaatgtcaattaacccattttgtgaaatcgcagtggaagaagcggttcgcttaaaagaaaaaggaacagtatcagaaatcgttgttgtttctattggtcctaaagaagctcaagaacaaatccgttctgcaatggctttaggtgcagaccgcggtattttagttgaaactactgacgaaattggcgctctagaagttgctaaaatcttaaaaggtgttgttgacgctgaaaaaccagaacttatccttcttggcaaacaagcaattgatgatgactctaaccaagtaggtcaaatgcttggtgcattattaggcgctggtcaaggtacgtttgcttctgaagtgaaagtggatggcggtaaagtacaagtgactcgtgaaatcgacggtggtttacaaactgttgaacttgcacttcctgcaatcattacaactgacttgcgtttaaacgagccacgttatgctgcattgcctaacatcatgaaagctcgtaaaaaaccgcttgatactaaatctcctgctgattacggtgttacagctggtactaagcttaaaacgattaaagttgaagcgcctgcagaacgtaaagctggtgtacaagtgaaatctgtagatgagcttgttgaaaaattgaaaaatgaagcgaaagtgatctaa

SEQ ID NO: 42687 - DNA, 915 bp, Acinetobacter baumannii
ttggattttgcattacaactgctctcaatgtggttaaaagaaagaaaaattcaaaaccagtctgagcatacaattactgcttataagcgagatgttaaaagcttccttgagttttgtgagcttaaaaaagttgatttaagaaatgttgaagcttcagatttacgtgaatatttggctcaacgtgtcgaacaggaccagttaagttcaagtagcatgcaacgtcatcttacttctattcgtcagtttatgaagtgggctgaacagggcaaatacctagaaattaatcctactgacgattttaaattgaaacgtcagcctagacctttaccgggcatgattgacatagaaatggttaatcaaattttagatcaacccatgcctgaaaaaccagttgatcagcagctttggttaagagataaagccatgttggaactactgtactcaagtggtttacggctcgctgaactacaaggcttaacgattaaagatattgattttaatcgtcaactcgttcgtattacaggtaaaggaaataaaacccgtattgtaccgtttgggaaaaaggcaaaagaaagcttattgaattggctaaaaatttataatatctggaaaggccattttgaccaaaatgcttccgttttcatttcacagcgaggcggtgcattaacccctaggcaaattgaaaagcgtgtaaaacttcaggcacaaagagcgggtgtaaatgtcgacttacacccacatttacttcgacattgttttgctagtcatatgttatcaagtagtggtgatttacgctcagttcaagaaatgttaggtcatagcaatttatcgactactcaaatttatacacatattgattttgatcatttggcccaagtgtacgatcaggcccatccacgagccaccaagcattaa

SEQ ID NO: 42688 - DNA, 624 bp, Acinetobacter baumannii
atgaccaccatactcattccttatttaattgccattactttacttacccttacccctggtttagatacaactttaattattcgtactgcaacaattgaaggaaaatctaaagcgtttcaagcagctctaggaattagtcttggctgtattgcttggggaattgtcgtggcatgcggtctaggtgccctactgatggcatccgacttagcattcaatatattgaaatggatgggcgccgcttatttagcatggctgggtttaaatatgattttaaaacctcgtagtcagctcgcagatatacaagacaatcattcaaatcgctctacttcagagaattggtttattaaaggtttctttggcaacttgctgaatccaaaagttggcattttttatatttcatttcttccccagttcattccagcgcaagcatcggctgttacttgggtgatggggctagtaatgattcatgtggtgattggcgtgttatggtcaagtctattaattctggctatgcagccactttcgcgctatctaaagcaacccaagtttgtaaaatatatggaccgaattacgggcagtatttttgttctatttgctttgaaattggcgttgagtaaaaggtaa

SEQ ID NO: 42689 - DNA, 846 bp, Acinetobacter baumannii
atgttattagaatttaccaaaatgcatggtttaggcaatgatttcatggtggttgatctaattagccaaagagcttatttagatacagcaacaattcaacgtttggcagaccgacactttggtgtggggtttgatcagcttttaattgttgaaccaccagatgtacccgaagctgattttaaataccgtattttcaatgcagatggttctgaggttgagcaatgtggtaatggtgtgcgttgttttgcccgttttgtccacgaacgtcatttaactaataaaaccaacattaccgtacaaactaaagcgggtattgtaaagccagagcttgggcaaaatggttgggtgcgcgtaaatatgggctacccaaagtttctgccaaatgaaattccatttgtggctgatgaacctgaagctttatatacccttgagttggcaaatgaccaaaacattagtattgatgttgtgaacatgggtaacccacacgcggtcactattgttccagatgtgcttactgctgatgtagcaggtattggcccgcaagttgaattacataaacgtttccctgaacgcgttaatgctggtttcatgcaagtgattgatgacaaacatgttcgcttacgtgtatttgaacgtggtgtgggtgaaacacttgcgtgtggtacaggagcatgtgctgctgcggtaagtggcatgcgccgtggtctacttgcgaactctgtagaagttgaacttgctggcggtaagctacaaattgaatggcaagaaggcgatgtggtctggatgactggtccaacaactcatgtatatgatggacgtttggatttacgttatttccaaggttaa

SEQ ID NO: 42690 - DNA, 1251 bp, Acinetobacter baumannii
atgagtttcacccgcattaatggagtattgcatgcagagcaatgttctctagagcagcttgcgcagcaatttggcacaccgttatatgtttattcaaaagcagcttttgaaaaacattatttagatatggatcgtgcctttgactttattgatcatcaaatttgttttgcggtgaagtcgaactcaaatatagctgttcttaatgttttggcaaaacttggtgcgggttttgacattgtgtctggtggtgagctagcacgtgttttaaaagcaggtggcgatgcttctaaaattgttttttcaggtttaggtaaaactgaagccgatattgaaacgtcattaaatgtaggtattgcctgttttaatgtcgagtcttatgcagagttggaccgtattcaaaaagtagccgctcgcctaggcaaaaaagcgcctatttctttacgtgtaaatcctgatgtcgatgcaaaaacgcatccttatatttcaacaggattaaaagaaaataaatttggtattccaagtgatgcagtttatgaaacttatcaatatgctgcatctttacctaaccttgaaatcgtaggtattgattgccacattggttcacagctcactgaaactaaaccatttgttgatgctttagaccgtgtcattgtgatgattgatgagttgaaaaaactaggcattaatctgaaacatatcgatatcggtggtggtttaggggtttgttataaagatgaaacaccaccaagtgttgaagaatatgcaaactctatgaagccggctttagaaaaattaggcttgaaagtttatatggagccgggtcgtagcatcagtgcaaatgcaggtgtacttttaaccaaagttgatttgcttaaaccaacgacgcatcgtaacttcgcgattattgatgcagcaatgaatgatttaattcgtcctgctttatatgaagcttggatggatattcaacctgttgtaccacgtacagataccgaagaaaaaacttgggatttggttggtgcaatttgtgagacaggtgatttcattggtaaagaccgctcactcgcattacaagaaaatgacttgttgactgtacttggtgccggggcttatggttttgtcatgagctcaaattacaacacgcgtggccgtgcagcagaagtcatggtatcaggtgaaaaaagctatttaattcgtgaacgtgaaacggttgagtcgctttgggaaaaagaacgtttattgcctgaggagtaa

SEQ ID NO: 42691 - DNA, 225 bp, Acinetobacter baumannii
atgcgtcgtgtcatttgcctcatcagtttattgagcagcagtattttgcttagcgcttgcggtcagtcaggagcattgcagctaccttctgatccaaattatgacaaacgtgcaaaatacttgctctatcgtaataaagaacagaaacaagttgtgcaacaagatgaacagactgaacagtcagtcgaatcatcagccgctcaaccacaaactacatcaccttaa

SEQ ID NO: 42692 - DNA, 1479 bp, Acinetobacter baumannii
atggtgcgatatcgtctttttgatttgattttagctaacggactaaaaaaattactggagtgtattcataaaatgtcgaatcaaaatctgagcgaccctcatgaacaaggtgagctccatcgtagtctctctaatcggcatttacagctgatcgcgattggtggtgccatcggtaccggattatttatgggttcaggtaaaacaattagtcttgccggaccttctatcttatttatttatatgattattggtttgatggtgttttttgtcatgcgtgcgcttggcgaacttcttctgtcaaatttaacctataaatcatttattgatttttctaccgatttaattggcccatgggctggttacttcgtgggttggacctactggttgtgttggatcacgattggtatcgccgatctgtctgcaattatttattacttacagttcttcaataatggcttacctttctcacctgttgaaggcgcaatgattagtgttgccgcgattgtgttcattatgggattgaacttattaacagttcgattgtttggtgaattagagttctggtttgcacttattaaaatccttgcgattattattttaattgcagtgggtctgtggatgatctttacaggctttacgtctactacaggtgaagtcgcttcatttactcatctttgggcaaatggtggtttcttcccaacaggtgtgcatggtttcttggccggtttccagattgcaatttttgctttcgtgggtgtcgagcttgtaggaacaacagctgcggaaactaaagaccctgagcgtaatttgcctaaggcgattaactcaattccaatccgtatcattattttctatgtattggcgctactcattgtaatgtcagtaacaccatggaacagaattgatccggcgatcagtccatttgtaaacctgtttagtcaagcaggggtagcggcagccgcgattttgatgaacttggtagtattgtcatcagtcatgtcatccatgaacagtggtgtattctcaacaagtcgtatgttgtttggtttatctcgtgaagatcaggggccaaaagcttttggtaagctgaacagacgtgcagtaccggcaaatgcattgtatttctctgctgcatgtttattgttaggtgcagcattacagtattttgtaccaaatacagttgaagcatttacgcttgcaacaacactttcaacgattctcttcatctgcgtatggttgcttattatctggagttacatccgttattacaccacgcgtcctgaactgcatgccaaatcaacatttaaattgccaggtggcttatttacatgttggatcacgattattttctttattggtatgatttacgtattgtctttagagccagacacttttaaagcgcttaaagtcagcccaatttggtttgtgattttgatcattggttatttcttcttctataaaccacgtcataaaaaataa

SEQ ID NO: 42693 - DNA, 1389 bp, Acinetobacter baumannii
atgagcaaagtcaaaaccgtttaccgttgcgagcaatgtggtgccgatcatctaaaatgggcaggtcaatgttcagagtgtggtgaatggaattgtcttaatgaagtcaaactagaacccactactgctcatcgtgcacgtcctaaagttgggggttatgcgggtcaagtcgccaatattacaacgcttaataaagtctctgtttctcatgaaacccgtttaccaacaggtattagcgaatttgaccgcgtacttggcggtggcttggtgacaggttctgtagtactcattggtggtgacccgggtattggtaaatcgaccattcttttacaaacagcaactcacatggcaagtgcaaaaagttctgcactttatattacgggtgaggaatcgctgtcacaggttgccttacgcgcccaacgtcttgacctaccaacagaccaattaaaagtcatggctgaaacttgtgtcgaacgcatttgtgaagttttagaacaagaacgtcctgttgtcgcaattttggactctatccaaacgctttacacagaaacgcttcaatctgcgccgggtggggtttcacaaattcgtgaatctgctgcgttattaacccgttatgcaaaaaatagtggcacagcgctatttattgttggtcacgtgaccaaagaaggtgcattggcaggtcctcgtgttttagaacacatggtggactgcgtactttactttgaaggccaatcagactcacgttatcgaatgattcgtgcagtgaaaaaccgttttggtgcagtcaatgagcttggtgtatttggcatgaccgataaaggcttacgtgaagtggctaacccttctgctatatttttaagtcgttatgacgaagccattcccggttcaattgtcatgatcagccgtgaaggaactcgcccgcttttagttgaagttcaggctttagtcgatgatgctcaaggacaaccaagacgtgttgcacttggtcttgaacaaaaccgtttaaacatgctgcttgctgttatgcatcgtcatggtggtgtacaaaccaccggacaagacgtgtatgtcaatattgtaggtggtttaaaaattaccgaaacaggttcggacttggctgttttacttgcatgtgcttcgagtttacgaacaaaagccttacctcagcaacttgcagtttttggtgaagtggggctttcaggtgaaatccgccctgtacctaatggtcaggaacgtttaaaagaagcagcaaaacatggctttaaatacgtcatcttaccaagaggtaacgccccgcaaaaagcaattcctggcgtacaagtgattgcagttgcccgcctgcatgaagccttgactgaggcgatgcaacttagtgatgaattgacataa

SEQ ID NO: 42694 - DNA, 981 bp, Acinetobacter baumannii
atggaagtacaccagcgtggcttgattaccggtattttaatggctgctttagcaatttctccgctcgctgaagctaaacgtgcaggtggtggtaaaagccacggtatggcacgttctactacttcaagccagtcttatcaacaacctcgtcaagtgactccagttcaacaacctgctactacagcacctcagagatctggtccgggtgttggttcaatggttgccgctggtgtggctggtgctgccgtaggtgctgttgcagcaaatgctttagcagatgacaaatcaacatcagctgaacaccaagtaactcaaccgggtaatgaacaagctgttcaagctcaagaagagaaaaaaggtggtattcctggctggctttgggtattacttgcagccgctgtagctttctttgtattccgtaaattgggatcaaaaaaaaaattagcagctaataacccttatgcaccaaacaatggcggtcaaaacccatttggccgctcggcagctccaaccaatacaggtgacaataccaatatttttggtcaatctgtaggtggtggtgcagcaacacaagctccttttggtagcgcaacgacgaatagtggtaaccaattaccagatggtagcgaacctgcttctttcttacgcgttgcccgtcagcgttttaaccacattcagtcaatcaatagtgcaagtaacattgaagaaattcgtcgttacttaacccctgaactttataactctatgtataacgacatcatggagaaccaagatcaggacgttgctgagtttagtaacttaaatgcaatggttgtagacagtgcgactgaaaatggtcaatacattgtgagcgtacgtttcacaggtacagtaagtgaagatttaaacagcttgccacagccatttactgaaatctggcactttgtaaaacctgttggttcacagcaagattgggttgttgcaggtattcaacaagcctaa

SEQ ID NO: 42695 - DNA, 975 bp, Acinetobacter baumannii
atgagtttaagttatcaacctacttgttcaattgatgctttaaaggctcgtgccaagctttatactcaaatccgtcagttctttgcagaacgtggggtcatggaagtcgaaacacccgtggtttcacaagcaggtgtgactgacgtacatttagcctcagttcaggctttacgtcatatcaatggcaaattgcagactcagtatttacagacttcgcctgaatttgccatgaaacgtctactggcaagtggcagcggaccgatttatcaaatctgtaaggttttccgagacgatgagcacgggcgcaaacacaacagtgaatttaccatgcttgaatggtaccgtccgggtctggacttaaaagcgttaatgcacgaaacagccgatttattgcaaacctgtttgcaacatcgttttggtgaagttcgtccgtttattttaagttataagcatgcttttcaggaccgtttagatattaacccgttgcaagcgactttaaagcaacttaaagacacagcaaatcgtgttgggttaaatctcgacttgggcgatgaccgtttagcttatatggatttgttgttttctcattttgttgaaccaagtttagggtttgatgcacctgtctttttaactgactttccaccagaaatggcgtctttagcgaaagtgaaattagatgaagatggggaagaggttgcagcgcgttttgaggtttatatcgaaggcttagagctagccaatgcctacgatgaattactcgatgcagatgtgttacgttcacgctttgaagcagataatgcagagcgggctaagcaagggcttcatgttatgccattagatgagcacttgttggctgcgttacctcatatgcctgaatgctcaggcattgctttgggagttgatcgattactcatggttgcaaccgatcaacttaaaattgaaaaagtcattgcttttccagctgaaattgcctga

SEQ ID NO: 42696 - DNA, 1068 bp, Acinetobacter baumannii
atgaaaatcgtcgcagatgaaaatttggcgtttaccgattactttttttcagagtttggcgatattcaacataaagcagggcgcaccttaacgcatacagacgtacaagatgctgaagctttattggttcgttcagtcaccgcagtaaatgaaagtttaattcaaaataccgccctaaaatatgtgggcagtgccacaatcgggaccgatcatttagatattcaagctttagaaaagcagggcattacatgggccaatgccgcgggttgtaatgcacaggcggttgctgaatatgtgattacagctttactgcatttagatgctagccttttagaacaacaagaaaaatttacgctaggtattgtgggtcttggcaatgttggtaagcgcttggcctatatggctcagttgcttggttggaaagtgattggctttgacccctttgtacagttagattcaattgaaaatgtaagctttcaaaccttgttgcaacaagctaatgcagtttcaattcatgtaccgctgaccaaaaaaggcgaacatgcgacgtatcatctgtttgacgaaaaagcttttgcagcgcttcaaccgaacacgattttaattaatagtgcacgtggtccggtcgtaaaagaagccgctttaatcgaagacattcaacgtacccagcgtaaagtggtgctcgatgtatttgagcatgagccagtgatatctgaagagcttttaaatatgttggctttggcgacaccgcatattgctggttatagccttgaaggaaaagcccgcggtacccaaatgatttatgaagcgttttgccaaaaatttggatatgacattaataagcgttttgaaactcagttacctgcatgtgaagactatttttcaagacatgatttaaaagcagtgttaaagcaaaaaatatctcaaatttatgatattgctcaagatgatgccaacatccgtgcctgtgttaaagagggcaaggtagagcaaaaagcatttgatttattacgtaagaattatccgctgcgccgtgaatgggcagctcacgggggaccacaggcatga

SEQ ID NO: 42697 - DNA, 393 bp, Acinetobacter baumannii
atgtcttgggtacaatcaataaaagaatgggcaaaacgtctaaaaaaacaaattattatgctttggtttgcctcaaggcatcctcaaatgccgtggttacccaaaattattgctgtggtggcggtggcttatgcgtttagtccaatcgacttaattccagactttattcctattttgggctttattgatgatgcggttattttacccatactgatttggttagcagttcgttttacgcctcaacaagtcattttcgatgctgaacaacaagctaaagaatggctagatgaacatgaaaagcgaccaaaaaactatttggttgccgtacttattattttaatttggctcacacttgcagtgatggcttacttttattttggcggtggtttgtaa

SEQ ID NO: 42698 - DNA, 792 bp, Acinetobacter baumannii
ttgacaccacatgcttatggggttgaaacattgccagtacagcggtttaacaaaaccgaatctgaaaatgtcttagatcatattgtgcaagagtacccaattgccttggtatataacggtatttcgcatgcggtgatgatggcgacaccgaccaatgtcgatttatttgctaaaggttttagtctctcggaaggaattttaaccagcttaaaagagctatatacccttgatgtgcatcaaaatgaactaggcattacggtggaaatgaccatttcatcgagagcattcgctgccctaaaggaacaccgccgtatgatggtcggtcgtacagggtgcggtttatgtggaattgaaagcttagagcagtttcagttagacgtgccaaaaattacaacgcatgcatcaaaaatatggcttgagcaaattccgagtgccatttcccatttaaaaactcaacaagaaattaccgctttaacgggtggagcgcatgccgcagcgtgggtagttgatggtcaaatcgtggctttatttgaagatgttggccgccataacgccttagacaaattgctcggttatttagcgcaagaaaattacgacaccagtttaggttttgtggtgatgaccagtcgggcaagttatgaactgatacgaaaatgtgctcagctcaatattggcttgcttgcttcaatttcagcgcctaccagtatggccattcagttagccaagcaatcgggcctcactttggcaagcttttgtaggggcgatggatttgttttatatacggaaatataa

SEQ ID NO: 42699 - DNA, 2409 bp, Acinetobacter baumannii
gtggataattcagaagaacaaaagcacatacaggaaaataacggttttgcgcgaattgagccatatactcatcctgctggcgggtggggcgcactgctcagtgttgctcgaaacttaaagcgacaagatattttaggtaaaggttcaattaccttactcaacattaaccagcctacaggttttgactgtcccggctgtgcatggccagaaaagaaagatgctcatgcctttaacttctgtgaaaatggtgcaaaggcggttgcctttgaagcgactagtaaaaccgtcactcctgaatattttgcaggtcataccgttagttggctatcagaacaaagtgacttttttctagaagacctaggccgcttaacagacccagttcgttatgatgctgcaaccgataaatatgtgcctatttcatgggacgatgcctttaagctcatcgctcaacatttgcatgcgctagatcatccagaccaagcggcattttatacctcgggccgtgccagtaacgaagcagcatttttatatcaattatttgtacgaagctttggtacaaataactttcccgactgctcaaacatgtgtcatgaaaccacaagtgttggtttgctcgattcgattggtttaggaaaaggcacagtcaccttagaagattttgatttagccgacgccatttttagttttgggcacaacccgggaaccaaccatccacgtatgttaggtactttgcgtgaagtgtctaaacgcggcggcaacattattgcgattaaccctattaaagagcgaggtctcgaacgtttccaagacccgcaagcaccgcttgaaatgatgaccaatggcagtacaccaattagccgctattatttccaacctaaaattggcggcgactatgcactgatgttaggtattttaaagcacttacatgagtgggataaaaaggcgcttgcctcaggtaaaccaagcgtttttgaccgaaactttattgcagtcaataccgttggtttcgacgaaatgattgccgaggtagaaagaacggagtgggcggatctttataagcactcaggtctgtcacctgaacatttggaaaaactggctaaactctttttagagtcagagcgttcaattttctgttggggtatggggattacccagcatcgtcacggaactgctaacgtacatatgctggcaaatttattgttggcgcgtggtcaaattggcagaccgggtgcagggctttgtccggttcgtgggcacagtaacgtgcaaggcgaccgcactatgggcattaatgaactcccaagcccgaaacttctcgacaatattgaccgtgtgttcggtattaaatcaccaagaaaaaatggatatggtgtggttgaaaccattaaagccatggccgaaggtgatatcaaagtctttattggtttgggcggaaactttgccgttgcaacacctgacaccgcttatacacaagaagcgcttagaaaatgtaatttaaccgtacatgtggcaaccaagttaaatcgtagccacttggtgtgtggtaaagatgcgcttattttgccatgtttaggccgtaccgaaattgatgagcagcttcatggcccacaagctattacagttgaagactcaatgagtaatgtccacttgtcggcagggcgtaatactccaatttctaaaaatattttgtctgaacccgatattgtggcaagaatggctgaggccgtgctgccagagagtcagattaaatggaaatggtacattgaaagctatgaccgcattcgtgactcaattgccgatgtgtttgatgaattccatgactttaatttgcgcgtttataagccaggcggtttccaccttgaacatccagctaatcagcacatctggaatacaaagagtggtaaagcgcaatttctgattacgccacttgaagaagtttatgcggataaagaaaatcagtacgctgccgcatataccgaaagtaaggtttataccttaatgaccacccgatctcacgaccaatacaacaccactttatatggtctggatgaccgttaccgtggggtgtttggtcagcgccgtgtgttgtttatgaaccaagccgatattgatgaagcaggctttgaagcaaatcagtgggttgatattgaaagtgttttctcggatggtgtgaagcgcattgtgcacagcttccgtattgtgccgtacaacattccacgaggcagtttagcggcttactatccggaaaccaatcctttggtggccttaagcagtcatgataaatatgccaagattccggcttctaaaagtgttcctgtgattttacatcccggaaatgcaccagagcattttaacttggcaacagctgttgaccctgaagatgccaataagaaagttagcagtttttaa

SEQ ID NO: 42700 - DNA, 1158 bp, Acinetobacter baumannii
atgaaggttgtgatcgcccctgattcatttaaagatagcttatcggctttaaaggtagctcaagccattgcccaaggatggcaagcggtatttcctcatgcagaaacgattttgtgcccaatggccgatggcggcgaaggaaccattgaagctgttttagaagtctgcgatggtcaatggagtgaaaaaactgtagtcgggccattaggtcagcctgttcaggccaaatggggttggttagaaaaacaaaaaattgccatgattgaaatggctcaagcgagtggcatacagttagttccaccgtctgagcgtgatgcctgccacagcacaacgtttggcacaggtcagcttattttggatgccttagaagcaggcgcaaaagacattattttaactgtaggcggtagtgcgaccaatgatggcggcacaggcttacttagtgctttaggtgcagttttactcgatgctaaccaaaaggttttacccgcgggcggccttgcccttagccacctatccaaaattgatttaacacatttcgactcacgtattcagcacacacggtttttactggctgccgatgtgaccaatccactttgtggcccaaacggcgcatcacatatttttggcccacaaaaaggcgcttctcctgctcaagtccagttactcgatgcagcccttgcccattttgccgatgtcacggcacaacttttaggtttcgacaaacgagatgaagcgggttctggtgccgctggtggtttgggctttgccgccaaaagttatttaaatgcagactttaaagctggagttaaagttgtggctgaactgaatcagcttgagcataaaatctctaacgcagattgggtaattacgggtgaaggtaaatttgaccaacaaaccttaagcggtaaaaccgtttttggggtaagccaaattgccaaagcccacaatgttccggtcattgtgattgcaggaactttaggtgaagactaccaagcactttatgagcacggtgtaagcgctgctttttcactagccaatggccccatcaccctagaacacgcctgcgaacatgcagcagaacttatttatgagcgaacagtcgatatagcgagattaattcagtttagccaaaccaacttaaaagataaaaaaacttaa

SEQ ID NO: 42701 - DNA, 567 bp, Acinetobacter baumannii
atgaaagtcagtaaaactcaggtaaaagaaaaccgagataaaattgttgaaaaggcgactcaactgtttcgtagcaaaggttacgacggggtaggtattgccgagttaatgtctagcgcaggctttactcacggtgggttttataaacatttcagctcgaaaacagaccttgttactattactgccaaatatggtcttgagcaggttttaaaaagaatagaaggtttaaacttaactcaatttattcaaatgtatgtgtctcgtacacatcgggacaaccgagatcagggttgtaccttaacagcgctatcttgtgatgccgcaagacagcccgacgaagtaaaagtcgagtttgaagagggcattgagcagcttattgagttcattatgaacgaacgcgcaaaacaagtttctttagaaacagaagagctgagaaagcaagctattaatattcttgctcagtcagtaggggcaattgcattgtctcgtgcatgcccagaccaatcaaaccttagcgatgaaatcttagagagctgtagagagagtcttttaaaattagccgattaa

SEQ ID NO: 42702 - DNA, 783 bp, Acinetobacter baumannii
atgtcagttcaatcaaaagtacttattacaggggcctcgtcaggaattggttctgtttatgcagatcgatttgctcaacgtggctatcacttaatcttggtggcacgagacaccaaccgtttagataaaatttcaaaagaccttcaagaaaaatacggcgtacaggtggagttcattcaagccgatttatcaaatgatcaagatatttgcaaaattgaagatgtactcaaaaacgatgctgatattgaaattttggtaaataatgctgggattgcactgaacggaaactttttaactcaagatcgtaatgagattgaaaaacttctgactttaaatatgactgcggtggtgcggttgtctcatgcaatgtcgcaatcccttatacgcaaaggtaaaggcgccattattaatttaggctctgtgcttggcttagcgcctgaatttggttctaccatttatggcgcaagtaaatcctttattcaattttttagccaaggtttacatttagagctaaaagatcatggggtatacgttcaagcggtattaccttctgccaccaaaaccgaaatttgggaacgttcaggtatagatttaagccaagttccgccattaatggacgtcaatgatttggtcgatgcagccctgattggttttgaccgtaaagaaacaattacaattcctgtgctgaaagatgaaaatcaatggaataattttgaaaaatcgcgtatgacattattaccaaacttctcttcggctgaagtagcccaacgttataaaaactaa

SEQ ID NO: 42703 - DNA, 606 bp, Acinetobacter baumannii
atgaatgttattgatgctctccgcaaacgccgtgcagttaaacgcttcgaccctgcttttcaactctctgaagatgacaagaagcagttattacaagaagttttagcaaatgcaccaagcgcttttaacttgcagcattggcgtcccgtcattgttgaagatgcaaagttaagacaaaaaattcgcgcgattgcttgggaccaaccacaagtaacagagtcatcattactgattgtgttatgtgccaaagtaaatacatgggaagttgacgctaaacgtgtatgggatggagcttctccagaagttcaagatattatggttggtgcaatcgaccagtattaccgtgaccgcccacaaacccaacgtgacgaagtgatgcgtagtgcgggtatctttgctcaaacccttatgttacttgctcaagagcatggtttagatagctgtccaatggacggttttgactttgatgcaatggcaaagctcattaacttacctgaagatcacgtggtgtgtttaatgattgcggttggtaaatcagcttctgaaccttacccgcgcgtaggcaaactcccttatgatgatgtcattattaaaaatacattctaa

SEQ ID NO: 42704 - DNA, 618 bp, Acinetobacter baumannii
atggtaactataagaaaaccaaaacaaaatagagcaataaatacctttgattctatagtgggtgccggatttatatctgttatgaaaaatggcttggaccatacaacagtacttaaagtgtgtgagatagcaggcgtaggatcggggagtttctatgagtactttaaaaataaagaagcactttttgttgagatgcagcagcactttattgcggaaatctcaaaagttatttatggcgtgattcctgaaattttagatttagagattcctgaagcaatcagaacaatttttttaaaaatcggcgagtttttggcgaaagacaataataaatatttttattggctcagtgtttcttctaaatatagtactgaggcaagtcatgtaaaagccgtaaaagcgatcaatgtcttggccattgaatatgccatgaagcatcctgaagtattaaaaatcaaaaatttaaaaatgatggtttatattttgattcattcaagtattgctttaacaatgaacttttttacttctgaaaatatgggttttacttttgaagagttagtggactgcttaattaatattacgatgtcatatatagaagatgatagaaataaggtcgcttaa

SEQ ID NO: 42705 - DNA, 864 bp, Acinetobacter baumannii
atgaatacagctctaaaatcggatcaaaaaatttttcgtcgtaatgttgaactgacatacgatcatcataaaagttactctttttattatgaggaaaatcctgttgttacttccttgttcgttgtactttcagcgatgtttcccgctggtgaaatgttttttatagaaagtatcagaaatgttcgaaatcaaattaaggatgaaaaacttttagaagatataaaagcctttattgctcaggaagctttccatagccgtgaacataaaatgttaaacaatcacctcatccattcgaactatcctgaagttgtcgaaattgaagcccaaaccaaagcacgtttggataaattacgtcaactttcagcagtcgaacaagtcgctgctacagtcgtgatggaacactataccgccacacttgctcgcctattactcacagactcgttaattaaagcaaaaaccacgcaagagagcagaaatctgtgggagtggcatgccctcgaagaacttgaacataaatcggtcgcgtttgatgtattaaatgcgataggaggaaattctagcaaaaacagaaaagtagctttagctagagttgcaaaactcatcacgcctattatttttaaatattggataaaaatcttaaaaagaaaagatattaacttcactttgaaacagttgaaggatggtatttatttaggttttggtggaatcaatcgggtcggaattttgtctaaagcatttgtagatatgttagatgttagagcagaaaattttgacccgttaaacatgcaaacagaacaattagaagccgaattccgagaaaaactatttggccaagcaggctttcttagagactacctcagctag

SEQ ID NO: 42706 - DNA, 579 bp, Acinetobacter baumannii
atgccaaatttagttctcccaacacgtgccttatacgttgtaaataaagcaattgatctgtttcaccaccgtgggtttcaccttattggggtcgacagaatagtgaaagaatcagagattacaaaagcgactttttataattattttcactctaaagaaaggcttattgaaatctgccttatggtgcaaaaagaaaagctccaagaacaagtagtcgcaatggtcgaatatgacttaagcactcctgccatcgataaactcaaaaagctttactttctacataccgatatagaagggccgtattacttattatttaaagccgtttttgaaattaaaaatagctatcccaacgcttatcaaaccgcagtgcgctatagaacatggctaaaaaatgaaatttatagccagcttagaacactaaaacctgatgcctcttttaccgatgccaaactatttttatatatggtagaaggcacaatcattcagcttttaagctctggtggggtagatgaaagggagagattgctagattattttcttggtctaagtgatttaagtcgattcaaaatagaaagttaa

SEQ ID NO: 42707 - DNA, 606 bp, Acinetobacter baumannii
atgaacaatttctggactatattttttacaataacaggatggattataggtcttgtatcaatcttttatgcttatttttcaggaaaaaaaagtgatgaaaaattctcaaatgttcttaataaattagctgctcaacctatagaacttctgagcatccttagctcaccaaatgaaaataaagtagttgaattatatgattttcaaaatagagttaatgaaccttatgttctatccaagtttgatatagataatgatggtgaagatgaaatttttatacaatcaggtgcaggaccatatagttgtaaattagaaatatacaactatatacaagatcctgatgaaccaacactccaattaatggatacaattgttgttagtacgactgcgggatacattttcaatgatattgataatgatggaatactagaaatcataacaaatgataactctattaaagctaataagccctacgtacaaggtttcagagatagagtaatttttaaatttatagataagaagattcaagaaatatcacgtctagagctatacacagaagaagaaatggaatcaatgctagaatcatttgagaaagagaattttagttaa

SEQ ID NO: 42708 - DNA, 309 bp, Acinetobacter baumannii
atgaaaaaactgaaatatcagtatcaacaatctgtaaaaacaccacactctcatgaattttttctgaactactttcctaatatgaaaagtgtgtattataaaaaattcagtactaagcaagagaaaagcttttattcaattcattgtactgaatataaagattaccttcttaagcttcgtgtagcccgtggctctggtttaactgatgcatgggatgatcttccaacatatgtcacaaaagttgcaaaaagttggaagcataattctaagagagcgcatcaatactacaaagatcatgagcaaaaataa

SEQ ID NO: 42709 - DNA, 510 bp, Acinetobacter baumannii
atgagctataaaaacaaaacttatatcgcttttgcgagtgaagatattcatctatatcgtttaatggaagcatggagagaaaatgaaaaaattgattttgatttttttgatgctcatgacctctatatttcaagagatagtagtaagcctgaaaccattaaaagaaaccttcgtgagagacttaaaaacgctaagcaaataatattaattggaagtagtgattgtaaaagaaagggaggagatggaaaatctttcctagctcatgaaattgatgtcataaaagaatttaatttacccatagttatagctaataaggatggagatagaaatattgatcgaagttttataccggaccctttgctacaagcaaactactatacagtatcagtttcgctacaaccaaaaattattaaatatgctctagataactatgccaaattatatagtagttctaacaataaaggccctcattactatttaagtagtatttacgaaaagataggtctctaa

SEQ ID NO: 42710 - DNA, 858 bp, Acinetobacter baumannii
atgaacatattaattgacttatcaacttggcgattctggcgccatttttttttacaatctttagcatgtggtgggggtatttctgctgctattcaatttatattaattatatttcctgaatacgcgcaaaagttccaaggacttattccaataatactaatctttatagtttcaacaatatttggtttagttagatcttggcctcgtcctatcgaaatggaatatagcgcacctaaaactaaaattaaaataattaaaggtgatttattagatcaagatgaacatctagtaatcgggatctgtaatacttttgatactgaaactcctcatattgtttctaaaaaaagtttactaggacaatctatagatagattatttggaggagatattaaaaagcttgatgagcttcttaatcaagcattagttgggaaatcatttgaaaatagagagcctgttaaagatggaaaaaacaaacaatatccactcggaacagtagctatagttgaacactctccacgtttaatttttttcttagcatattgtcaaatgagtgataaaaatgaagcatttggtacagtagattctgtttggaaaagtttactatctttatggactgcgcaatcagaacgaggaaatcaacaccctatatcaattcctgttattggtggcggacaagctagaatgtctagtgtactacccgcacaagattctattaaattgattgtgttatcttttatgttcgcttcacgtaaacataaaattactgatgaattacgtattatcatacaaccaaatgattatgatcgcttagaccgtatggaacttcaatcatttttagcttcattgaggccgtcataa

SEQ ID NO: 42711 - DNA, 441 bp, Acinetobacter baumannii
atgaataatattagtataattaagcctgaaccaaaaccatgtgctttttgtgcatatcttaataatcaacgaccctttacgtttgtttttaaagataaaaatattgctatattagtcacaagagagcaaaggggaaatccgcatcttttagtaattcctataagacatgctgaaacgcttttggaaattacggatcaagaagcaacaaatctaataattggcgtaaaaaatgctgctatagctatcgaaaaagaatacaaacccctaggaatatctatttggcagaataatggagttccagcaagtcaatctattgggcatgtacattttcatgttgcgggtaccttagaaaaaggcggaactgagtgggaagatgtacctgaactatctttggaagaaactgaaaaaattgctgttcgtttacgctcttattttaaataa

SEQ ID NO: 42712 - DNA, 783 bp, Acinetobacter baumannii
atgatacctgtacagacattctcggtttttgcaatttttctgttgtttattgctccattgattggtgttgtactaacgctaggtttattagtgaaagcactattcttttggcgaaataaggctcaaaaacctgtgaggtttttctctcaaaaaacattattcattacgctagtggcattaatatgtgacctgtgggcaggttatttattttatatgactgaatcggtaaagtatgagattgctcttaagcagcattacaaagaacgtcgcagccatttcgttttatctcaagatgcacaatatggcgaactgttgattcctaaagggagtttaattagtcgttacgatgcttttgacaacggtgagccacaagtaccttttaatttacggggattacaggcggtacgtttccctcatcctatacgggttgcaggaatgtgggtaactgcgatggagcctcctcgaatggaattggcatgggatcagcatgtaggtccagttatgcgctttgatcctaaggaagaaaatggctatggtaaatgggtttacgatacgaaacgtcctaccatcgcttgttctcgtggagacatcgtgctacttgaaattccactcattgattatgatattcaaaaagaatttggtaaacctgagcctgatggagctaatgcacgttttcgcccgagtgagtggggtgttcaagaatgcgaaaaaggtcaggagccaattaaagttagccctgcgtatactgggactgcaccaaagaaaccttggttttataaataa

SEQ ID NO: 42713 - DNA, 420 bp, Acinetobacter baumannii
atgaaaaaaacaatttttagcctaattttcgctacctgtgcagctttttcaaatagtattcaagcagaagaagtttattatcaacaagaagatatcgcttatgcttttgaactagattcaatcgaattttatttaccaagtaaaagtcaatttaaaattactgctaccagaaaactagttggcgtacctgaaacaaaattttatacaggtgattttgataaagataatatcgcacaattccatatggcttttgactgttcacataagaccatacagattttagactttatgattggtgataaaaataatggtgaacttaagtacaagagcgataaaaagagtgaagtaatgaaagccacgggtgacaatgatttagctatgcttaatttagtatgtgaaaatgctaaaactataaaatag

SEQ ID NO: 42714 - DNA, 258 bp, Acinetobacter baumannii
atgaatctttcaaagttcgaacaacgaactctccatgtccttgctaaaggcggacatattaaataccaacgtgacgcatcaggcacagtctatttcgttgaatgctacacacgagaaggtttcgtgctatctgattgttctttagatgtatttaaaaagctaaaagcaaaacgtttaatcaagtctaaaaatagccaaccttatcaaattacattgttaggactccagacggtccgccctcaactagacaatcgttga

SEQ ID NO: 42715 - DNA, 507 bp, Acinetobacter baumannii
atgaatattacaattcgagatgaacaacccgaagatattaaaaatatcgaagcgttgacgaaagccgcgttcttaaatgaagagcattctagccacactgaacaatttattgtaaatagccttcgtaaacataagcaacttacaatttctttggttgctatagaagatgacttaattgtaggtcatgtggctatttcaccagttacaattacgtcaggtgacactggttggtatggcctaggccctatttctgtatgtccaaagaaacaaggaattggtattggttctcttttaatgaatgcagctcttcaaaagttaaaagaattaggcggaaaaggttgcgttctattaggtgatccaaattattacagtcgatttggttttaaatcttaccctgatttaaatttacctgatgtgcctaatgaatactttcaagctttaagcttcattaaccatattccctcaggtgaagttacttaccatgacgcttttacggcaactgaataa

SEQ ID NO: 42716 - DNA, 3999 bp, Acinetobacter baumannii
atgaaccagtttgtaacgaacacgaaaaatgtaattcgtggaaagtatcatccggaatttttgcagaatgaagtcttatccgatatttttgctcatactgcacaaactcttcctgataaaacggctttaattgaagcagacaaaacgctgagttatggtgagctgtatcagcaagccttaattatggctcaacatctggctttaaaaggggtaaagccaggtcatattgtagggctatggctgccgcgtggtattgagcttttaaaagctcaactggccatttgtttaagcggtgcagcttggcttccttttgatatggatacgcccgcggaccgtattgcggtatgtcttgaagatgctgaagcggtgggaatgattactacagatgaatggtatgaacatttagctgaagtgccacaaacgaaatggaccaacaccgagctgcaaaaaccactaagtgaaagtgtaagtttagcgaaaaccactccagatcaacctgcctatattatttatacctcgggttcgacaggtaaacccaaaggaattgtgattactcaaaaaaatatttgtcactttttacgtagtgaaaatagtattttgggtattcaagagcaagacaaggtctatcaaggcttttcagtcgcttttgatatgtcatttgaagagatttggctttcttatttggtaggtgcaacgttgtggattgcaccgaagtcacttgtcagtgaccctgagcggttatgccaaaccttaaagcaggaacaaattacagtactgcatgctgttccaacgttacttgccttatttcctgaagacgtacctaatttaagaattattaatttaggtggggaaatgtgtccggactcactggttgaccgctgggcattacctcatcatcaaatgtttaacacctatggaccaaccgaaaccacggtttctgcaagtcttgagttattagaacgcggcaaacctgtcacgattggcaaacccttaccaaactacggtatgttggtcattaactctgaaagagagttgctcgagcaaggtgaaacaggggagttatgtatttttggtccaagtgtggcacaaggctatttaggacgtcctgatttaaccgcagataagtttattgaaaacccttgggcaatgagtatagaggaagagttactctaccgtactggggatttggctaaaattgatgagtttggtcaagtacactgcttaggtcgtgccgatgaccaagttaaaatccgtggtttccgtgtagagcttggcgagatcgaagctgcgctttgtgatattgacggaattggtacggcagccgttattcttcgtcctgaagacggcattgatcaacttattgcgtttattgcaccagaaattgatgcaaagcaagctatagaaattaaagaactacgccataacttgagtcagcgattaccgccttatatggtgccaaatcgttttgagattattgaagaagttccacgtctgttatctgggaaaattgaccgtaaagctttaaaagcaagaccgctcacgagtgtggtagatcgcagtgaatctgaccagccacagaacccagccgaagaaatcttgtttgaaattttgaatcgcttgttcccgaacatgccgattaaactcgattccgatttctttgatgatttaggcgggcattcactactcgccgctgttttaatttcaaatctgcgtgagcatgcggaatatagccatctgaccattcaaaacttatatcaagcgagaagagtaggcgcgattgctgcactcatgttagagcagcctgaacctactttatttgatagccaaattggacaagataaccctcgtaatcagacctataaatggttatgtggtattgcacagctcgtaactattccggttttaatctcgattaatattttgcagtggttagcgccattctttacttatcactactttaccggtggaactcgcgacagtattccgtatgcgattgcgttgtctttattggtgtatgtcagtgttattatgagcagttttgtactgtcgattacggtaaaacgactattaatgttaggaattggtgcagggcgttatccattatggggattaacctatttccgttggtggctagcagaccgtattagtaatatttcacctgtttatcttttatctggctcgactttacttaacttatatttgaaagcacttggcgcaaaaatcggccacgaggttaccattagttccgtacatattcgtatgccatctttactgactattgaagatggcgtgagtattggttctcaggtgaatttagaaaatgctaaagttgaacatggccacttggtattaggttcaattcaccttaaacaagacagttatgtaggttcgtatgctgtattagaagaaaatacagtgttagaaaaacaggcccatgtaaatgccttaacttcaattgaatatgacacggttgtacctgagggcgaaatttgggatggaacacctgctcagaaaatagggcatatagatgagcaagctaaattgccagagcgtcctaaactatcgtttatacgtaaaattgctgaatatggatactatggcgttagcgcattagtcattgcctgtcttttctttattccaatttttccaagcttccttttggtcgactggttagatgtaaatgtatttaatattaatccgaacaaccatttgcaaatcgcgctttactatttcattttagcgattcctgctagtgcaatgatgatgatgattactgcggtgatttcttcaggtctgcgtaaaattgcattgccgcgtcttgaaaccggaacctatgcagttcatggcagcacgtattatcgtaaatggtttgcggcccaaattttagagacgagtttacaaaccttacatggcttgtttgccactatttatgcgcctacatggtttcgcatgctgggagcaaaagtaggaaaaaataccgaaatttctaccgcaactggtgtcattccagaaatgctgactttgggtgaagaaagctttattgccgatgcggtaatgctgggtgatgaagagattaaaggcggttggatgtccttaaaagcaaccaaaatcggtaaccgtagttttgtgggaaatagtgcttatattgctgatgggacggtgttaccagacaatgttttaattggcgtgcaatcaaaaacaccagataaccgtgaaatgtatgatggacaaacttggtttggttctccggcattgctgttacctgcacgtgaagctgctgaaaaatatcctgaccatttaacctttaaaccaagtattaagcgccgtttaatgcgtggttttattgaagggcttcgtattgtattgccggccgcacttgcgattggggtgggttatatgatcgtactagacgttattgatgtgattaataactacaatattgagacaggactggttgcattaacgctcgcagggctgctttatggtgttggctgtttccttattgttgcgctattaaagtggattttgattggtcgctatcaaccgcgttcggcacctatgtggaccatgtttgtatggttaagtgaagggattaccagcttatatgaatcagttgcgattcctaacttcttaaactacttaagaggaacgccaatgttgccattcttcttgcgtattttaggggttcgtattggtaaagatgtttatatggatacggctgatattaccgagtttgactgtgtcagcattggtgaccgtgccgagtttaatagcttttcaggcccgcaaactcacttgtttgaagaccgtattatgaaaattgggcaagtaaatgttggcaatgatgtagtggtcaatgcgcgcagtattattttgtataatgcaaacgtgagcaatcatgcagtgttaggaccattaacactggtcatgaaaggtgaaaatattccggctaaatctgcgtggattggttcaccggctgtgccttgggttcataaataa

SEQ ID NO: 42717 - DNA, 429 bp, Acinetobacter baumannii
atgagtcaacacataataaccccaaaagaaatacctttagcatttcaaaccgcttggaataagcatgatatgcaggcctttgctgctctttttgataaagatgcgactttcgttaaccgtttcggtcactacgttaaaggagttgatgaaattattgcaatgcatcaacctattcatgaaaccatttatcgtgattcaacactagagaatgagctgatagacctcatacctatgagtgaggatatatgtatttcacatttttggagccgcctcactgcaggcgtagctcatcctcaagggcctcatcagattgatactctcattcttactgtgctcatcaagaagaatcattcttggtacattcaggcgctagaaaatgtcactttgacgaaccctcgaacgggagagaccatacttagaaatatatag

SEQ ID NO: 42718 - DNA, 957 bp, Acinetobacter baumannii
atgagctttaagaaaaaatattttagaaaaattccagcaactattgaagcaataaatcaggtattttttattggagtaccttgctcacgatttaatgataatgatctacataagttagggatagttgatgatcagctaccattatctttgggtactaattttttaccttcaaaaataggtaaattctctactatcaatgctgatggacaggtggtcgtccgtaaagatttaccaaaagaaactttctatcaggaaatttcttataaatggaaagaatggcatggaccagatcagattgagagagagggaactaaatcaattgcaagagagcgttatcagcgtcaacgtttggatgcaccaaatgttagaataactgtttcagaaatagataacgaattattttttctcattaagtgtgaacctaatgaagacaatttgttgcataaattaaatcttgttctagagctatttagcgagtttgatgttcatattacttcaaggaatggtttgataactttacctcataatttacaaaaggtagattggaccattttaaagtctggaacaatgactgctgatgaaattaaagaggctgtagaaaaaagtatttctccaaaaattaagtccacactgagaccagtgatactccaaagattaaactatattgcaagttttaaccctgatgtaactgtaattggggtagccggttatagtggatatattatccataattttccaaggttagctatttcagttcttgaatcagaatttccagataacgctacttatatctttgactataaagactgggaacctttgtcaaaattatccaagacagaaattatccgaaataacttggaaaaagccagaattattcatgatgaatattggaaagaaaaaatttataagttgcttaatgctccaattgaggataatgacaatagaaaaaatagctaa

SEQ ID NO: 42719 - DNA, 288 bp, Acinetobacter baumannii
gtgaaacaccgtcatcaatatttccttgatgcattaaatactttaaatgctgaatatcaagtatttgatgaaattcgtggtcaaggtttattgattggctgtgtactaaaagctgaatatgcaggtaaagcgaaagacattaccacatgggcaggcgaagaaggattactcgctttaatcgcaggacctaacgtggttcgtttcactccttctctaattattcctgaacaagatattgatgaagggattgctcgtttaaaaagagctttggcaaagttggctaaataa

SEQ ID NO: 42720 - DNA, 1032 bp, Acinetobacter baumannii
atgatgattgtccgtcatgccgagtttcgagaccttgaagatatttataaattagcaggtaagtcaggtgttggcctgacttccttgccacaaaatatggatacgctttcggctcgaatttcacgtactcgcaatactttaaatggcaatgttcataagagtgagcagggatatttgtttgttctggaagataccgaagctcaacgtgttattggtgtaagtgcaattgaggttgctgtaggtttaattgaaccttggtacaactttcatgtgggaacacaagtacacgcttcaaaagcattaaacgtttataagtcattaccgactttatttttaagtaatgacagaacaggaagtagtgagctctgtacattatttttagatccggaacgccgtgaaaatcaaaacggtaaatttttatcgaaaatccgttttatgtttatcgcagcatttaagcaatattttgagaaaaaactaattgcggaaatgcgtggctactctgatgaaaatggatgttcacctttttgggatgcgattgggcaccattttttcaatatggatttctcaactgctgactatttaagtggtattggccaaaaagtttttattgccgagctgatgccacgttttccagtctatgttgaccttttgccaaaagatgcgcaagaagtgattggaaaaatgcatccacatactttgcctgcttatcatgtgcttgaatcagaaggtttacgttatcaaggatatgtcgatatttttgatgcgggtccaactattgaagcgaatattgatgagttgcgtgcagtcaaagaaagtcaactcttaaatgtcaaaattaccaatgaagcaacagtaggtaaaacacaataccttgttgctaatgataattaccacgactatcgggccatgttattgaagcttgatctcgtagataacactttaaatttaacgcatgaacaagctgaaaaactcggtgtacaagaaggtcacgctgttcgtgtgttatcactaaatcctatggaagtatcctga

SEQ ID NO: 42721 - DNA, 1470 bp, Acinetobacter baumannii
atgtcaaactctttatttataaacggtgtctggttacaaggcagcggtacatcatttgtaaaaacaaacccggttgataaccaaactgtatggtcaggtgctgaagctacggctagtgatgttgagaaagcttgccaagctgctcgtacagcattcccagcgtgggcgcgtttaccttttgctgagcgtgtggcgattgtagaaaagtttgcagctttgcttgaagaaaataaaaagcatttagcggaagtgattagccaagaaaccagtaaacctttttgggaaacattaactgaagttcagtcaatgattggcaaggttgcaatttcgattcgtgcttatcaccaacgtaccggtgaaagctcaactgaaatggcagatggtgtggcatctttacgtcaccgcccacatggcgtacttgcagtttttggtccatacaacttcccgggccacttgccgaatggacatattgttcctgcgttacttgctggtaacacagttgtattcaaaccaagtgaattaacgccttggactgctgaagaaactgtaaaactttggcaacaagccggtttgccaaatggtgtaatgaatttggtgcaaggtggtcgtaccacgggtgaagcgctagctgcctcacatgaaattgatggactattatttaccggaagcgcaaacacaggttatcacctacacaaacaaatggcgggtgctcctgagaaaattcttgcgcttgaaatgggcggcaataatgcattgattatcgatgaaatcgaaaatacggatgctgttgttaacctcactattcaatctgcatttgtttcggcagggcagcgttgtacatgtgcgcgccgtatcttggtaaaaaatggtgcgcaaggcgatgcatttattcaacgttttgttgaggttgctaaaaacttaaaagttggtcgttggaacgatgagcaacaaccatttatgggcggcgtaatttcatcggctgctgcaacaaacatgatgaatgcccagcaaaagttgcttgagcttggtgcaaaaagcttgttgccaatgatacgtcctcaagaagacagctcattacttactccaggcattattgacgtaacaggtgtggcgggtattccagatgaagaatatttcggtccgcttaccactattcagcgttatgacagttttgatgaagcattaaaaattgccaatgcaactcgttttggcttgtcggttggtttggtttctccaaaacgtgaattgtttgatgacttactcattgaagcacgtgccggaattgtgaactggaacaaaccattaacaggagcatcgagtgcagcaccatttggtggtgtaggagcttcaggtaatcaccgtgcaagtgcattttatgctgctgactactgtgcttggccaatggcttcactcgaaagtgaaagcttgacgttgccagaaaaattatctccagggattgtgttgccttaa

SEQ ID NO: 42722 - DNA, 1344 bp, Acinetobacter baumannii
atgaaaggatatgaagtaaattttgatggtttagtgggaccaacacatcactatgcgggtttgtcttttggtaatgaagcatcgaccaaaaaccgcaataatttgtctaacccaaaattggcggcgaaacaaggcttattaaaaatgaaagctttggctgacatgggcatgaaacaaggagtacttgctccgcatgagcgtccacatgttccgatgttacgccgtttaggttttaccggagatgacattagtgttgtggctcaagcaatgcgttattcaccagagctactgtcatctttaagctcagcttctccaatgtggactgcaaatgctgcgacagtttcaccttcggctgatagccaagatgagcgcgtgcattttacagcggctaacctgaacaataaatttcaccgttcaattgaagctgaaactacaagccaagttttacaagcgatctttaaaaatgaacgtcattttgtacaccatgaagctttaccgcaagtggctttgttcggtgatgaaggggcagcaaatcacaatcgtttaggtggtgattatgcgaaacgtggtgttcaggtgtttgtttatggtcaacaacatttaaataatggtttaccgggaccaaaacgttatcctgcacgtcagacacgtgaagcgagcgaggccattgcacgtttgcaccgtttagatgaagcacataccgtttttgttcagcaaaacccggatgtgattgatcagggcgttttccataatgatgtaattgcggtaagtaaccagcaggttttattccaccatcaacatgcatttttaaatcaagatcaggcatttgccgaaattcgtcagaaaatggcaagcatcggtgaagattttatttcaattgaagtgcctgaaaaccgtgtgacggtggacgatgctgttgcaacatatttatttaatagccagattttgactcgtccagatggcggaatgactattgttgtgccagaagagtctcgccaaaatgctgcggtatggagctatttgaatgacatgattcaaatgggtacaccaattgatgcaattcaggtttatgacttgcgtgaaagtatgcgtaacggtggtggtccggcttgtttgcgtttacgtgtagcattaaatgaaaccgaattaaatgccgtaaatccaaaagttctcatgaatgatcaattgtttacaacgcttaatcagtgggtagataaacactatcgcgatcgtttggcacaagaagatttggcagatccgcatttactcatggaaagccgtatggcacttgatgaactgactaaaattttaggtttaggttcggtttatcctttccaaaaataa

SEQ ID NO: 42723 - DNA, 975 bp, Acinetobacter baumannii
atgcaagattttctagcattaaccttacaaggtgagcaacctgcaacgtgcgagggaaaacaagcaaatttctcttggcgttggttaggtgagggacttcttgaatgtacaccacatgcgcagtacgacaaagctgtcgtactgtcagctggagtacatgggaatgaaacggcaccaattgaattgctatctcatctttgcaccgatttatttgctgggcgtttaaagcttgcggtgagattattgcttgtattgggtaatccctatgcgatgcgtcaaggcaagcgttatgtacatgacgatgtaaaccgtatgttctgtggtgggtataaaaatctgcctgtaactgaagaatctaagcgtgctgaggttttagagcagactgttgccactttctttcaggaaagttcgagtcaggcaaaacgttatcattatgatttgcacacagcaatacgagcttcattattaccaacatttgctttatttccatatcaaacgcatggctatgatgctgatttaacggcaagtcttgaagcagctgatttggatgctttggtttatcataatgcggtaggtaaaacgtttacccattttacgagtgagaattttaaggcggcgagtgcaactttagagttaggcaaagcattgccatttggacaaaatgacttgagtcaattcgcttcaattgatgaagtcattcgtaacgtggtttctgagcaaactttaccagtgcggaataaaccaaaaattcgtgtgtttcaggtatctgactctttaataaaaaaagatgaagagttccacatgaatttatctgctgaggctcccaacttttcaacttttactaaaggcgaaatcattgcgactcaaccttctggtaactatgtagttgaacaagatcaggtctggattttatttccaaacccgaatgtgaagattggtttacgtgcaggcttggttttaactgaaacaatctga

SEQ ID NO: 42724 - DNA, 762 bp, Acinetobacter baumannii
atgaaaatgatgaaaacagctatcgttactgcaagtgtacttgcttctgcctctatttttgcacaaagtgcgggcgttaatgcaggtgcatctgctcaagtcaacgtacaaccaggtggtcttgttagtggcgtagccaatacagtcaaaaatactgcacatactgtagggaacacagcaaaacatgctggtcacgtagctgctgacacaaccgttaaagctacaaaaaaaacaacaggtaaagtaactgaactttcttctaaagctgctactggcactaaacatgtagcaagtgaagctgtaactggtactaaacattttgctaccgaagcagcaacaggtacaaaaaatttagcgactaaggctgcaactggcactaaaaacctagcagttgaagctaaagcagatacaaaagcgcatcttgatgctgtaaaaactaaggtagcagaaaaacaagctgaccaaaaagaatttactgctgaaaaacaggccgatgctcaagcacgtgtagatgctgttaaagctcgtgtagcacaaaatcaagctgaccaaaaagaattcgttgctgacactaaagctgatgctcaagcaaaattaaatgcagctcaaccggctcatggagttaacgctcaaacaggtgtaaacgttggtgttaatgttgctggtattaatgcaaatgcaaacgtaaatgcaggcgctcaagcgactacacaaaaaggcgaaaagaaatcttttattaaaggtcttttcggtactaactaa

SEQ ID NO: 42725 - DNA, 312 bp, Acinetobacter baumannii
atgatgaaaattatagcttccctacttgtaatagtcggcttgatcgccgttgttctttatttcaaacccacaagcggtgcatctgatgtgttcaattctgctttacatgagacgaattcaccacaaccagatacttcatcttccctttctaaacttaaggagcctactcaacctaaaaacgtatctttaaattcaaaccactctcaatcggtatcagcagataccgttcctttttatgacacaaaaagtgatccttcgattcaaccgattgatccagaaaaagatccagcaaatgaaataaaagcgaaataa

SEQ ID NO: 42726 - DNA, 1356 bp, Acinetobacter baumannii
atgcaaagtaaaacgttgtttctattaggtctatgtacaattttcagtacaactgtgtccgctcttcctttggattccaaaggggccaaacagcggttaagtcaggcagcaaaacaaaaagtgttccaaggtaaaatagatttagatgccttggttagtaatgattcaaacgatttaattgtcgaatacaatattccttcatcgagcgtaccttccggtttagaacggcgaagttatattgctacaaataaaaagaatcttcagacaaggtttaatcgtgccggcggtgtacaagtacttcgggattacaataacctgcctttggctttttatcggattagtaaccgtgaggctttagtatctttattaaatgatccgaacgttaaagcagtttatccaaaccgtattaaccgtactacaactactgaaagtttgcctttgattaatcaaccacaagccaataccaatggttttacgggggagggatctagtgttgctgtgctggatacaggggtaaattatctacattcagatttcggatgtaccgctgtgaatactccatcaagtacttgccgtgtggtttattcttttgatagtgcaccagatgatggcactttggatgatgatgggcatggtagtaacgtttccgctattgtgtcgaaagtcgctactaaaactaaaattattggtattgatgtatttagaaaggtcagatcgcaaggtaagtgggtaagcaccgcttatgatagtgatattctcgcggggattaactgggctgtaaacaatgcacaaacctataatattaaagcggtgaatttgagccttggtgtgccgggagtcaaatatacctctgagtgtagcgatagcagttatggaacagcatttgccaatgcgcgagctgctggcgtggttccggttgtagcctctggtaatgatgccttccctgacggaatttcatctcctgcttgtgtggcaggggcagtaagggtaggcgctgtttatgatagtaatattggtggtgtgtcatggggtaaccccgtgaaatgttctgaccctactacagcagcagataaggtagcctgctttagtaatgggggaagccttgtgactttattggcgccgggtgcaatgattaccgcaggtggctataccatgggtggtacctctcaagcgacaccacatgtggcaggcgcgattgctctattgagagcgaatagtgtgagtccaacagaaagtatcgatcaaaccattagccggttaaaagctacgggtaaacctattactgactcaagaacgggcttggttttcccacggattgatttactggcggcaaccaatggtttaaccgttaactaa

SEQ ID NO: 42727 - DNA, 432 bp, Acinetobacter baumannii
atgaacagtcaaaaacttctcttttctaccctgtgctgcttagcattaactgcatgtgcaactaccacacctctttcttcttatcctcaggcacaagttttagaacaagataccaatatcgaagcttatccaactactacaggcaatgtagccaaactcattaaacacgataagcaagcttgtatgattgaatttacgggttatttaggtggtggacaagtaactgaacattggatttttaataataaaggcctgatttcagctcaatcatttacagagcaatatccagactcttctggcatattaagtcaagcgaccaattcgacaaccaaaagctctaccacttttaatatccaagatcccgaaattcaaaataacttcaaaaaacttcaaagtaattttagtaaagacaacttagcaaagtgtgattaa

SEQ ID NO: 42728 - DNA, 420 bp, Acinetobacter baumannii
atgaaagccataaaaattttatgtattacaagctctatcttggtttcatcatctctctttgctgaaacacctcaacctcaacaagtgaatgaagcaacttctaagacaatgccttatggtgataatccaagcttaggccgcgtactgttatacaaaacaggaaaaggcattcaaaatttaggagattctattcaaggcgcttctgaaaaaacttcaaataaaattagtgaaaaatggaaagatacgaaagaatttaccgccgaaaaagcagaagttgttcaacaaaaagcggatacagccaaagtatttactgaacagaaaatagaacaagctaagcaaaatatcaccagcagtagaaacggtgaaaatattccaatcgaacaaggtgagctaagtaaatctagtacgactgccaattaa

SEQ ID NO: 42729 - DNA, 867 bp, Acinetobacter baumannii
atggatattacccagttaaaaatgtttcaaaccgtggttgaatgcggaaccatggctaaagcatcactacaactacattgcgtaccctccaatatcactacacgcattaagcaacttgaagaagaactaggcgcaccgctgttttatcgcgaaggaaaaagcttaaaactcaccccatcaggagaaatctttctcgattattgccataaaattttagcgctatgcgatgaagcgaaacgaagtattcatccagatgcaccgccctctggcccgctcaaaattggagctattgaatcttctgctacaactcgcctgcccaacttacttgcaaaatatcatcaacgttatccagaagtttctattcaaattattactggcacatggaaacagctactagtcgatatttctcagcacaaacttgatggtgcaattgttgcaggcaatattgagtttcctatgttaaataaactcagtatttatcaagaagacatggtcttaattgcatctcattctttaggagaaattcattgccaagaagatttgattggtaaagaaattttcatgtggactgaaggctgtccttaccgtgcagctcttgaagaatggcttaaactgaagaatatctctctccctatcaccagtattaccagttacgccaccattattgggtgtgtcagtgcgggttctggcgtggcgttagtgcctaagagtatttatgaacaatataaaaatttagcgcatattcaaagttataaatttgaataccttgcctttatgcaaaatcattttttctggcataaaaatgtgagtaaccataaagcgagagacatgtttatagagttgattaagtctgagttttgtttataa

SEQ ID NO: 42730 - DNA, 903 bp, Acinetobacter baumannii
atggcaatttctcttgctgccgaaacccagcctccagcatttaagctctacttatgtattgctgtaaccgttttttgttggggctattcgcctattggtgtacatagtgctttgcattcatatacaccgcagcatatagccttgcttcgctttttaattgcatcggtttttttactgcttttggtcatgaaaaaaggaattcagcctttaaagtggaaagatgttcctgcgcttgctgtattaggatttttctctgtaacgctgcatcatttgctgataaatacagggcagcaatatgtaactgctgtcgcttctagtattttgagtcaatctattccgctattcacttttattatttcagctttggtttttaaagagcatattcagttcaaacagtggttgtgtattttgctagggcttagtggtgccgtgttagtggtcagtggagatcatggttttggtatgccgagcccttatagtttgttgattgttttagctgcaattgcatgggggctttattttaatttatataaaaaatttgccttaaattatgatgccttgagcgtgatgtgctacatcatttggttcgggacccttcctttactattttatagtgctcatttacctagtgaaattttacatgctacttggcaggccaatatgtcggttgttttattaggtatttttccaagtgcgatggcttatgtactttggggctatgtacttaaaaatatgccgttaactattacatcaaattttttatattgctcgccgattgtcgcgatgagtttggccgttgttttcttaaatgaaaaaccatcaatgatggtgctgctgggaggagtaattattgtggggagtttggtatggatgaattgggggaataggcgtactatcgaataa

SEQ ID NO: 42731 - DNA, 285 bp, Acinetobacter baumannii
atgattgttgttaccctcacctataaaaaaccattgaccgaagttgacgctgtactcaaagaacatattgcatttttagatcattactatgagcaaaagaaatttttagcgtcgggacgccgtgaaaatagagtaggtggtgtaattatagttctaagctcttcgcttcaagaggctgaagagattatgaaaaatgatccgttttatatttatgatgtagctgattatgattttatgtggtttgagccatcgaaaagtttagaagaaattaaagagtttgtttaa

SEQ ID NO: 42732 - DNA, 831 bp, Acinetobacter baumannii
atgaaaaacttaaatttattactcatatcaacattattatttactggatgtgcaacgactaaatcgattcaatatccagctgcgggtaaacaaacctctctttccgtttcttcagaacaattatcttcaatgactgaatcaggtgcaggtgattactttataaaagacagccaaatattagttggtgattcaagcaatgcctctgccagcccagtttctggaatgttcggtcttatcggagtaggtgttgcaatggcaattgataaaaacgcaaatagttcagccattgaaaaaagctctctcaatcaacctattaaatttgaccagttaatacatcaaaaaattactgactctctcacccaaaataaaacagatcctactctcaaacttctaagtttaaatcaggcatctgaaattaaaattgtgccttattcacgtctttctttccgtgaaaaacccattgtaaaagtaaattttggattaaaaacacaatttaaaaatgcagcggacaataatgcagatacaaaacgcttatatcactatgtaagtaaggatcgtatttctttatctgaatgggaagctaataataatttattatttatgaaaaaagcggatcaagcatttagcgctcttagccaagtattcactttagatttacaacatcaattaaatttaaaagcatttgatgagaacaagcaaaagagctgtaaaactaatgcagatacatccttggttttttttattcaaactcctgacaatttatgtgttggtgtagttaaaacgagcaaaggggatgtatttcaaaataatatttatatcgttgaacaataa

SEQ ID NO: 42733 - DNA, 2070 bp, Acinetobacter baumannii
atgagcaaacatactgttttattcgaacttggctgtgaagagcttccaccaaaaagcttaaaaacgttacgtgatgcactacaagcagaaactgtaaaaggcttaaatgaagcaggtttagacttcgcatctgttgaagcttatgccgctccacgtcgtttagcgcttaaaattgtagatgtagatgctgctcaagcggatacacaaaaacgttttgacggccctgctgttcaagcagcttacgatgcagaaggcaaaccgactaaagcacttgaaggctttatgcgcggtcaaggcattactgttgatcagctttctacattccaagcaggtaaagttgaaaaagtttgctatttaaaagatgtgaaaggtcaaagccttgatgctttacttccacagattttacaaactgcattagacaatttaccaattgctaagcgcatgcgttctgctgcaagccgtaccgaatttgtacgtccagtgaaatgggttgtcttactcaaagatgaccaagttattgaggcgactattcaagatcacaaagctggtaatgtgacttatggtcaccgtttccatgcacctgaagctgtgaccttagcgcatgcaaatgactatttagctgcgttagaaaaagcatatgttgtagcgaactttgaaaagcgtcaagcaactattcaagaacaagtgaaaaagttagctgatgaagtgaacgcaactgcgattgttccagctgacttacttgatgaagtaacaagtctggttgaatggcctgtagctttacgtgcaacttttgaagaacgctacttagctgttcctcaagaagcgctcattacgacaatgcaagacaaccagaagtatttctgtttgatcaatgcggaaggtaaattacagccttacttcattactgtttcaaatattgaatctaaagacccgactcaaattattaaaggtaacgaaaaagttgttcgccctcgtttgtctgatgctgaattcttcttcttacaagatcaaaagcaaccgcttgcatctcgtaaagaaaaattagcaaacatggtattccaagcacaacttggtacgctttgggacaaatcaacacgtattgcaaaacttgcagttgcattatcttcaatcactggtgcaaacccagcagatgctgaaaaagctgcattacttgctaaatgcgacttaacctctgagcttgttggtgaattcccagaacttcaaggtattgcaggaacttactacgcacgtattgaaggtgaaaacactgaagtttcagaagctttaggtgaacaatacttaccaaaatttgctggtgatgttttaccaaaaaccaaaacaggtacaactattgcccttgctgaccgtttagatacgcttgttggtatttttggtattggacaagcgcctacaggttctaaagacccatttgctcttcgtcgttcagcaattggtatcttacgtttaatcattgaaaatgaattagatgtaacaattgaagagttagtgaatcttgcacttcaaggttatggcgatatcgttaaagaccatgacaaaactcgtgctgacgcagttgcattcttggaaggtcgttaccgtgctaagtatgaagaccaaggcgttgctgttgacgtccttcaagcagttcaagctcttgcaccaaaatctccacttgattttgacaagcgtgtaaatgcagttaaccacttccgtacattacctgaagctgctgcacttgcggctgcaaacaaacgtgttgctaacattcttgcaaaagaagcagcaccagaaggttctgtagttgaagcaaacttggttgaagatgctgaaaaagcattatttgctgagcttcaagcagtgacacctgtggttgaaccattacttgcagcaaaggactatactgctgctctttctaagcttgcagcacttcgcgcgccgattgatgcattctttgatggtgtaatggttatggcagacgatgctgacctaaaagcaaaccgtttacgtttattagctcagttacgtaacttgtttactgctgttgctgatgtgagtgtgttgcagggttaa

SEQ ID NO: 42734 - DNA, 978 bp, Acinetobacter baumannii
atgagtcgcgccatctcgcacattgatacatttcagggcttaattcttgccctacaaaactattgggccgaacaaggctgcgtcgtactacaaccttacgacatggaaatgggcgctggaacattccacaccgcaacattcttacgtgctttagggccagagacttggaacgcggcatacgttcaaccttcacgtcgtccaaaagatggccgctacggtgaaaacccgaaccgtttgcaacactactaccagttccaagtggtacttaagccaaacccagacaacattcaacagctttatcttgattctttaaaagcaatcgggattgatacgcttactcacgatatccgtttcgtagaagacaactgggaatctccaactcttggggcttggggcttaggttgggaagtttggcttaacggtatggaagtaactcagttcacttacttccaacaagttggtggtgttgaatgttacccagtaacaggcgaaatcacttacggtttagaacgtcttgcaatgtaccttcaaggcgttgactcagtttatgaccttgtttggacgaaaggccaattcggtactgtaacttacggcgacgtattccatcaaaatgaagttgagcaatcgacttataactttgaatacgctccagttgataaactatttgaactatttgatttctacgaatcagaagctaaccgtttaatggaagctaaacttccacttccagcttatgagcaagtcgttaaagcgtctcatacctttaacttgcttgatgcacgtggcgcaatttctgtaactgagcgtcaacggtacattttacgtgtacgtactttggcgcgcgctattgcacaaagttatgtacaagcacgtgcagagcttggcttcccaatggcagaaccacacttacgtgatgaagtattggcacagctaaaagcacaagctgaaagtgaagcagcaaaggcggagaaaaactaa

SEQ ID NO: 42735 - DNA, 483 bp, Acinetobacter baumannii
atgccttttaattttttaaaaatctttattcaaaatttagatccagataaagatcaaatttggcattgtctaatcatgacaccaatatatttatacatagttactttattcatatttttaacttcttcaatcatccacaaagatttttcttttcagaatctactaaacacccctgtcatactgctgactattgcagccatttattacatattagtttttatacctgcttattttttacaactattcttattgaaattcaatttcattaatttcttctctattctagccagcgcaatttttcttacttttttaatcccaaatattttagcaattttatttatggactcatggcaaatccttccaatagaaatcatatgtatggtcagtttattttctttaactttcgctattacatattgggttttactactcagaagtatgaaaaaagcaactaaacaatcaaatctgaaattcccaaactag

SEQ ID NO: 42736 - DNA, 315 bp, Acinetobacter baumannii
atgctgaatgaagggttcactttagaaattctaaaaactatagcgagtttaccactattactctttgcggttgtaatgacctattacatactcgcatttgttcccgcttatctatttcaactcttcttgcaaaagtataatttcataaattttttctcaattattgttagtgcgatcatacttattacgttaattcttagtttaataggtttagaattcgccccaatagaaacaatcattttctttagttatttttctgtgactttcgctattacatattggattttattgctaaaaactttaaaaaaaaattag

SEQ ID NO: 42737 - DNA, 513 bp, Acinetobacter baumannii
atgtttaaatttttttgttttgcttctgtattcctactttgctcttgtagtagtacgcctgtagcactttattctgaccctaatatcaattcatccgagattgtgacaattacgaataagtgtgatgctacatgtaaaaatataataaaacagcagcttggtgcagattctcattatcagatgagtgaaggtttattgcttgaagttaatggtaaacaaggtacttggcaggtaagaaatggaaaagcatttaattcatctacacatggtggattaattgttaaagttaaagaagggaaaaccgagcttgtaattgaccataattcacagctggttattggaaagcctgaaagaatttctgttgatcttgtaggtggacatacatatgtagtagggcgtatgcgagtagaaaggatcagaatggcgtactatgaatggtttccagttgtatttgatgccactgaaaataaacttatttatggtaacccaaagcaggactcttcaaaacaataa

SEQ ID NO: 42738 - DNA, 1263 bp, Acinetobacter baumannii
atgtctgatcgcattcgagaaaaactacaaattcttgctgatgctgctaaatatgatgtgtcttgttcatcaagtggcagtgatcgtaaaaacaaaaataaaggtctgggggatgccagtcattcgggtatttgccatagctataccgaagatggccgctgtgtatctctcttaaaaattctatttagcaatgtttgtatttttgactgcgcctattgtgtttcacgccgttctaacgacgtccagcgtgcagcatttacggtgcaagaggttgtagacttaactattaatttttaccgccgtaattatattgaaggcttatttttaagctcgggcatttttaaatcggcagatcacacgatggagcgcatgctccaagtggttaaaaagttgcgccttgaagaaaattttaatggctatattcatctaaaaactattccgggtgcatcgcctgaactaattcatgaagcaggtttatatgctgaccggatgagcattaatttagagatgccgactgagattgggttaaaaacttttgcaccagaaaaatcacatcaggaagtacaaaaagatttaggtttggttcgtgacagactcattcaattgaaagatgagcgacaaattattaagcacgtgccgaaatatgtaccggcagggcagaccacacaaatggtagtgggggcccatcaagagtcagaccaagatgtcttgtttatggcagacaagcactacaaagaatttaaactcaaacgcgtctatttttctggctatatccccattaataccgaaaataactacttgcccgccgttggttctgcgccgccattgttgagggaaaaccgactctatcaaagtgattggttgatgcgtttttacggttttgaagtcaatgaaatcgtcaatgaaaaacaccctaacttagaccttgatgtagacccaaaattaagctgggccttaaggcatcccgaacagtttccggtagatttaaaccgtgcagattatcaaatgattttgcgtgtaccgggcatcggtgtgaaatcggccaagaaaattgtgcaggctcgccgttttgggaaaatccatatcgatttacttaaaaaactcggtgtggcctaccaacgagcaaaattctttattcgctgtgaagacagtccaaaattccaaaaagaattgtcttcaagttttattcggcagcagattttaacgcaaggctcatcgaaatatgtacagcaactctcgccacaattaagccttgggttttag

SEQ ID NO: 42739 - DNA, 798 bp, Acinetobacter baumannii
atgtttaatgatgaagtggcttactattttgatggttcaatggttgggctgctgagctgtgtgtttcgtgcttttcaatttaaagaattacaggtcaggctccatctgaatgatgcagctcaacatggcttatttgccgataaaattgaggttgcaaatagtgagcaacatgctgaacgtgtttgggctgcgctacaaaaaaagctttcatcttcttcgttaaaacaattttattttgcttatttatccgaatctttagatgcctatcagcatttatttaattactgtatttatgtgtttagtagtcattcttctgtagaaaaagattattcacatcccagtgttttagcgattacacagtggacgaaaaaagtcggacgagaaaagcatcggatggaggcttttattcgttttaagaaaaccaaagatgagctttttttaagtctggttcgtcctgattttaatgttttaccgcttattcagccgcattttaaacggcgttatcaagatcagcgttggctcatttatgatgagcaacgcaagtttggactgtattatgatttacgggaaatacatgaagtttcactcgaagcctctgacgttgaccgtaatttaaaaaatggaatgagccaaagttttcagcttgagctagatgagcaggaagttttatatgatcagctttggaaggattattttaaaagcgttaatattacggaacgccaaaatattaagcttcatgtgcaatatttgccaaaaagatactggcgctatttaaatgaaaagttaattgaatattaa

SEQ ID NO: 42740 - DNA, 1101 bp, Acinetobacter baumannii
gtgagtgttatacagccagaatggttacagattttaaaaccgaattttaaggttttacccctaaaagaacggttgctttgtggcgttggagcgctatgtggtttagcaatttcctcattaattagctggtatgttttaggcggaattaatgcttggtacattgcaccaatgggggcctcatctgttctcttatttgctgtacctaccagtccattggctcagccttggaatgttattgtcggtaatacattagccggaattattggggtcgcctgtgcacagtggattcctgatttaaccacagcttttagcgtggctgtgggttttgccatatttttgatgatgaccaccgactcgttgcatccgcctagtggagcagttgcgattacggctgtgttaggcggcgctgccattcataaattaggcttttatttcgttttttatccggttctgctcaattcattacttctactcggttttgctgtattttttaatcgattgattgggcgacattatccggttactgcacatttaaatgagcgtagtaaagatccaactcccactcaaaaagtatcaattcagccaaaagatattgagtatgcgttagaacatcatactgaactgttagatatcagccagtacgacttagaaaaaatcattttagaagcgcaagaacatgccaatgaacgtatggtgaaccaatatacctgtcaggatattatgagccgtgatgtgattaaattgcatgaaaatgatgatattcatcaggcattagataaatttaaacaagaaaatctcatgagtttgcctgtagttaatgcagacaaccatttagtgggtactttggcgctatatgaagttgtggaatggtttaaaggggcaacagatccaagaaactcttggcagcattacgtaagacaaattatgagtcgtcgagtagttactgtactgccaactcagccgattcaagaccttgtaccttactttgttgagaagtcttttaactatattccggtggttgaggaacgaaaactgattggaatcattagccgtgcagatatgattgcggctttacaacagcagttaaatcgtaaattgtaa

SEQ ID NO: 42741 - DNA, 255 bp, Acinetobacter baumannii
atggccaattctggtttatatcgctcgaaccgacaaagcatgatcgccggtgtaatgggcggtattgctgaacgatttggttggaatgcaaatttattacgcattattttcgtgttagtttcgataatgagcgcggcttttccagggattttagtgtacttagttttatggttagtaattcctaaaaaacaaccagaacaagtgcaaggttatcaacaacctgttcgcactgtacgagaagaacaaatacattaa

SEQ ID NO: 42742 - DNA, 657 bp, Acinetobacter baumannii
atgatgtatatgtctttgaagtggtctggtcttttaatgaaacatttgggtgtggcagccatcttgtgtatggggttaagtgcctgcgatgtaaatcatgccgactctaaagatcactctgcggtagcaacgacttctagacatgaagatagtttgattaaaagcaccactaaggttaaaactttagatgatgcagcggggcgaactttcttgcctgagggcgtcccaggtcaaagctcaaaactatccgaagcagaccaacaatatgcaggccgttatcacactcgtatttcatgtgaagataattttgccgattgtgaaacaggcgaggcagaatatattttaaatttattacctgatggaactgcgtattggaatgttgttcattttggtcgtgttggtagtaaagatggctcaaaaagtgcggtcatcaatcaattatgtccttccttgaaatggaaggtcgaacctgccgctcatgagttaacgattcaatgtcctttatcagatgttaacttctattttgatattgatgcaaaacaaagattagtcgtaaatttagaaaaattattttatagcgattttggtaaaaaccgtgagtttttggaacaaaattattttgttcctacaaaagcttatgtacttgataaagagtaa

SEQ ID NO: 42743 - DNA, 1824 bp, Acinetobacter baumannii
atgccagcatataaagctccgctacacgatatccgcttcttaatgaatgaagtactagactatcctgctcactacaaaactttatcaaatggtgaaagtgcagatcctgatacagtagatatgattcttgaaggtgcagcagattattgtgaaaacgtactgtctccacttaaccaatctggcgatgaagaaggttgccattttgacaacggcgaagttaaaacgccaaaaggttttaaagaagcttatgaccagtttgtaatgggtggctggcaaggtctttcttatcctgaagaatttggtggtcaaggcctaccaatgtctttaaacctgattaaatcagagatgatgggtactgcgaactggtcatttaccatgtatccaggtttaagctcaggctgtatgaatactattttgcaattcggtacagatgagcaaaaacaaacgtatatgccgaaacttgttgaaggtacatggagcggcacaatgtgcttaaccgaacctcaatgtggtacagacttaggtcaggtaaaaaccaaagctgaaccacaagctgacggcacttataagatttctggtacaaaaatctttatttctgccggtgagcatgatttaacagaaaacattattcatattgtgcttgcacgtcttccagatgcaccagcaggtactcgtggtatttcattatttatcgtccctaaatttatcccaactgcggatggcggcgtaggtgaacgtaatactgtaagctgtggttcaatcgaacacaaaatgggtatccgtgcttctgcaactgctgtattaaactttgataatgcaacaggttacctcattggtgaagtaaacaaaggcctacatgccatgtttacctttatgaacacagcgcgtattggtactgcggttcaaggtattgcccatgcagagttatctttccaaggcgctctaccatatgccaaagaacgtatgtctatgcgtgccctttcaggtaaaaaagatccagataaagttgctgatgcgatcattcaccatgctgatgtacgccgcatgttattaactcaaaaagcaatcgctgaaggtggtcgttcaatgatctactacgcagcacagcttgctgacaaaatgacagatgctttgacacgcggtgaccaagctgcatttgaagattatgatgataaacttggtttctatacaccaatcttaaagggtttcttgaccgagcttggcctagaagctgctaaccacggtatgcaagtgtacggcggtcatggttacatcaaagaatggggtatggagcaaatcgtacgtgatgcccgtatctctactctgtatgaaggaacaactggtgttcaagcacttgatttgattggtcgtaaagtgttgttaagctcaaaaggtaaagtagttcgtgaatacactgctgaaatcttaaagttctgtgctgcacatgctcgtaataaatacttacgtcgttttgcttgggacttaacaaagctttgtgctcagtggaacactttaactgttcgtatcatgcttgctgcacgtaaagaccgtgacatcgtatcttctgcttctgtagatttcttgatgttctcaggctatgtgatgatggcttatttctgggcacaacaagcagttgtcgcttctgaaaaattagaagcaggtaatggccaagaaactcctgagttctataaagcaaaaattaaagttgcagatttctactttgaccgtttattaccacgtgcgcaaggtcatgcagaatcaatggtaacgacttctcgtacgctgacttcattaccagcggaacactttagtttcgactactaa

SEQ ID NO: 42744 - DNA, 2304 bp, Acinetobacter baumannii
atgcatttaaaatatctcagtttatgtttatttagtttgggcttgacggcatgtgcacaacacggcgtgcgtccacaggtggcatctgcgagtttagagcaaaaagccattcaaagtgttaatgcgatgtatgaatacccaagttatgattatcgcggaaactttaaaattaccgttgatccttcacaaataaagcaaaatgtaaaagctgagaatactgctaagctagatgctgaattacaaaagaaagttgatcaatatttacgtgaacaaaaagttgccttaagtaaagcacagaaacaaaccttatatgcggcgattgcaaacgaacaaggtgatttgggactgacttcctcagcacgttctgaaaaaattaataccgtattatttaatttgttaaatgatcttcagtttagttatgacggctcgatacattatcgtcaaaaaatgggttcatttaatttaactgctaaatatgaaaaaccgacacttttagttcaggcaaaattgccaatggtgcttgatcttgagaattataagttttacataaattattttggtttgatgccatatttggtcaataaagataatcaaaataatttagcttatgttgatttctcaaaatataaagccttctttaaaaatgtcgataagaagaaatttattgaataccttaaagcttcaagtgctgtttcatatcgattagctgaaccgcaaaacttacaacgtgtatcgttgactgaggctgatcgtaaagcaggggcggttgaaagaattcgtttaaagacgacggttgagcaactacttttagaagtagatttgtttgggcaagttaatgaaaaatatcttcaaaaaagtattttaggtcttgatgaggaaaaacttgctgaaacgcttgccgcagagattgctgcttctgatgcgaaaaaaggcactgctggtaaagaagaacaaaagatttcttctgatgacgccgctgctgttagccaacagttgtactcacttgttaatgctcatttaggcaatacctctacttctgaagatgaggaaatagagtctgcttctagtgaagaggcgagtgatgtagctgtagcagaggctgaacaaacttcagaaaatgaagaagtagttgcactgactgaaggccaatgtattgaattaaaatcacttaaaaaaccggtcgctttaggggatattaattattgccaaatctacggtattgatgtcctagatcagagcgatacaagtattcaaaaagcgcaaagcaagtctcgtcaggacgctttaaagcaaacttttgaagcttataaccaaaaccagtttattaatgatgaagcattcaaagctctttggttaaaacataaggatgaaattgaacaagctttaccgaagcaaagaaacccaatcacaattgatgtggctttagatgacaaaggccgtgcagtcaatatggattacgatgttgattatacgccagctgagtttaagcaccgcttcaatattaaagcagatatgcaaattctgaattatgggaaagcgacttcaattgatcaacagcagcttaaacaagctaaatctgtagctgaagcaagtaaaggttctatgctggaaaactttattaaaggttttagtgaaaagcttgggcaaagtgatgtttcagagcaccctgtgggcacacatagtgatgtacaagatttagatgcaaatctggctgtacttgcagataaaacctatgatgcaacgcatgcttatgacaaaacttataaagcagtatttattgccaaattgactgccgaaaaaccgtcatatattaagtattattcagttcaacaactccaagaaattgctgaggtttatgcttactggttctctgatgaagatacatataatcctcaaggaaaagccttagagcgtattaccgctttacagaaaaaacatcatcttgaacaagatgatcagtttgaccacgagttaggacgtgctgtagatcatattgtattaacgactatacaaggtaaaacagggcgtgaagcttggcagaagctacagaagcaatataaacagccagcccaacttttctcaaaacagtatcagttagagtttgaaaaacaaaatggtgtttctgctgaagaaaagcatctgttatcagaaacggctgatattttagggaatgtttatgtggctgctcgtaaaaaacagctttcggaaaaaacaattcagaacttaaaacctgaacataatgaatttatcgattatgaaattttccgagaagtttataagcaaatggttgccgctaaaaaataa

SEQ ID NO: 42745 - DNA, 789 bp, Acinetobacter baumannii
atgaccaaacagtttgcagtaattggcaatccgatcgaacaatcacgctctcctgaattgcatcatgctttcgctgaaaaaacaggtgttgagctaaactatcaaaaacggcttgctcctcttgacggttttgaatcgagcacgcgaagtttctttgcagaaggcggcagtggtatgaacgttactgttccttttaaagagcaagcttttgctttatgtgatgtgttaaccgagcgtgctcaaattgctaaagctgtaaataccttatggatggaaaatggcaaattgcatggtgacaatacagacggccaaggcttagttgccgcaattcaagctttagaatggaagcttgaaaatacaactattttaattttaggagctggcggcgcaactcgtggtgttatttatccccttgtacaggctggtgccaaaaaaatcatcattgcaaaccgaactttagctcgtgcagaacaacttgtagatgacttaaaaacagcagttccacaagcccaattacaagcaatttccctaaatgatttagaaggagattttgatattgtgattaatgcaacttcggcaagtctttcaggcgatgctttacaactacctgaaaaattacaattcaaatatgcctatgaaatggcttatggcaaaccttctagtttccttgatcaagcgaaacaacgtaatgtgccttacgcagaaggtttcggcatgttagtaggccaagctattgaagccttctatatctggaatggcgtacgaccacaattaaaagattttctataa

SEQ ID NO: 42746 - DNA, 951 bp, Acinetobacter baumannii
atgcaacatccgacttcaacagatattcaacgtgtccgcgaatttctcctcgatttacaagcccgtatttgtgccggtttagaacaacaagaaaaagctggtggtgggacagcagaatttatcattgatgattgggagcgccctgaaggcggtggcggccgttcacgtgtactgcaaaatggtacagtgattgaaaaaggcggcgtgatgttttcacatatcaacattagcaaacttcctgcttctgcaacagaacgtcaccctcaaattgcaggggcaaaagctcaagcgctaggtgtgtctttagtcattcaccctaaaaacccgaatattccaacctcgcatgcgaatgtccgcttattcgttgcagaacgtgaaggtcaagatccgatttggtggtttggtggaggttttgacttaacgccattttatccagatgatcaagatgttttaaattggcaccaagccgcttatgacctctgtaagccttttggtgacaatgtttatgctgaacataaaaaatggtgcgatgactatttctatttaaagcatcgcgatgaacaacgtggtgtgggcggtttattctttgatgatttaaattgctgggatttcgaaacctgctttaaatatattcaagcagtaggtaatggctatttaaatgcgatcttgccaattttcgaaaaacaccgcgaacagccttataccgaagctcaacgcgaatttcagctttatcgccgtggcagatatgtcgaatataacttggtgtatgaccgcggtacgttgtttggattacaaacaggtggccgtattgagtcgattttagttagcttacctaatctagctgcatggtcttatcgccctgaatgggatgaagactcttcagagaagcgtttaactgactactatttaaaacctcgtgattggttaggtttagaagaaaaagtcgcctaa

SEQ ID NO: 42747 - DNA, 603 bp, Acinetobacter baumannii
gtgcctatagagttcattgcaacatcaaaactcccgaccgcttttggtgaattcaatatttctgtgtttcaagatcccgtaacaggtgaagaacatgtggcactttccaaggggttagaaaatccgccaacgggtcctgttttggtccgcgtacattctgaatgcttaacgggtgatgcgtttgcatcattgaaatgtgactgtggcccacaactacaagccactcagaaactcatcaatgaagcaggacaaggtgtaattttatacttacgccaagaaggacgcggtattggtttaaccaataaaattcgtgcttatgccctgcaagatcaggggcacgatacagtagatgccaatttactactgaatttacccgccgatgcacgtcgttacgatatgtgcagtattatgctcgaccacttaaaagtgaaagaagttaaattaattaccaataatcctttgaaaattcaggcactcaaagatcaaggtattaatgtcgtagaccgtgtacctttaaccgtcggccgtaacccttttaatgaacaatatttaaaaaccaaacgtgaaagaatggatcacctttaccaaaaagatgatttttga

SEQ ID NO: 42748 - DNA, 1905 bp, Acinetobacter baumannii
atgttgtataccgaaattccaactcaacgccctgttacgccattgttagatgcgattgatcatcctcaacaattacgtcagctcgagcatagccaattactacaagtggctgatgagttgcgtcaatatattttatatgcagcaggccagagtggtggccatttcggtgctaacctcggcgtggttgagctgacggtagcgctgcattattgctttaatacaccaaatgaccgtttagtttgggatgtgggacaccaagcatacccacataaaatcctaactggacgccgtgaacaaattacgaccattcgcgctaaaaatggattggctgctttcccagccagagaagagtccgtttttgatacctttggggtagggcattcttcaactgctatttcagctggtttgggtatgtctttggcacgtcgctatcagaaagacccatgtgaagtcgtttgtattgtgggtgatggtgcaatgactgcgggcatggcatttgaagcaatgaatgatgctgttgctcatgatgcagatttaattgttgtactcaatgacaacgatatgtcgatttcttgcagtacaggtggctttgccaaacatttagctgcaatttgggaaaaaggtcatttagttaatgtcaatgaacatggtgaagcttatatccagccacacccaaaatggacatataactctcgattacaccaatcggcaaccgatgcggcagataatttatttaaagcaattggttttgattatttcgggccttttgatggacacgatgtcactcagttggttcaggtgttcaacgcgctcaaaaaacgtaaaggtccacgtttagttcacgtttataccaagaaaggtaaaggctttgctcctgctgaagcagatccgattacttaccatgcgattggcaaaattagtgctgcttcgggcgggaaaacaccaccaaaatactctgatgtgtttggtgagtggttgtgtgatgaagctgcacaagatgagcgcttgcttgcgatcacgcctgcaatgtgtgaaggttcgggcatggttaaatttgctaagcaatttccgcagcgtttcttcgatgtcgcgattgcagagcagcatgctgtaacacttgcagcaggaatggcatgcgaagggctaaaacctgttgtcgccatttattcaacattcctgcagcgtggttacgatcagcttattcatgatgtcgcattgcaaaatcttgacgtgacttttggtattgaccgtgcaggcttggttggtgaagatggtccaacgcatgcaggtgcatatgactatgcttatatgcgtactgtgcctaatatggtgatcatggcaccgaaagatgaaaatgaatgccgtcaaatgcttcatacagcctattcctataatggcccggctgcggtacgttatccgcgtggtgcaggtgtgggcgtcgaaatccaaaaagagatgactgttcttgaattgggtaaagctgaaattgttgcagaaattaaagcaaacagtgatgagcagattacggttttagcatttggtagtcgtgtcatggttgctctggaagcagctgagcaatttgcgcaaaaacatgacgtcagtgtgtgtgttgtaaatatgcgcttcgtaaaaccgcttgatgaacaaatgattcgagacttagctgagcatactcatttatttgtaacagttgaagaacacgcgattatgggtggtgcgggtagtgcagtgaatgagtttatggctcaagaacaaattgttaaacctatcattaatttaggtctaccagactcgttcttgcatcaggcgacacataatcaaatgctacaagattgtggtttagatgctaagggtattttgaactcgattgagcgagcatggcttaaggtaaatcaggtggtttaa

SEQ ID NO: 42749 - DNA, 882 bp, Acinetobacter baumannii
atgcattattctttgtcaaaatcttcaaatttgtattgtagtgggtgttcaatggaacctatggtggtgatggctgcgcgtgcggctcaaacagttggtcaagagcttttaaaagcgcatcaaaatcgtcataagctcgatttgcaagttgaagagaaaggcattgatggtcctgtaacacgtgtagatcgttatttagaacaattgacgattgatacattacgtaaaagttataaaaaccatagcttcttaggtgaagagttcggtttgcaagagggcaaaggccacgatgcagactggtgctgggtgatcgaccctcttgatggcacgcaaaactttattaatggtttccctcatttctgtatttctattgctgttcagcacaaaggtgttactcagcacggcgtaatttacgatccagtacgtgacgaattgttttctgcaagtcgtggccgtggtgcagtgatgaaccagcgtcgtattcgcgtaaatgtaaaagacagcctagaaaatacattcttggcagtaggtcacccttaccgtgctaaacgtgctggtgaaattgtgtcttatgcagagcagcactttgcttcattattagctgtgactcaagcgggtgctcaaatccgtcgtggtggttcagctgctctcgacttagcgtatgttgctgctggtcgtttcgatggtttctttgaacttggtttaaaaccatgggatatcgctgctggtgagcttattatcaaggaagctggtggtgttgtggttgacgcacgtggtggtaatgattcacttgaaaatggtcaagtgattgcatgctcactgaaaatgttaaagccattaatgcaaactgtagttcctgcttgggacaaagctgcaaaataa

SEQ ID NO: 42750 - DNA, 1761 bp, Acinetobacter baumannii
atgagcaaaacttttgccgaattttctttgcacgaaaccttacaacaagctcttgaaggtttaggttttactaacccaactcctgtgcaagaacaatctattcctgctgctttagaaggtaaagaccttcttgtttctagccagactggttctggtaaaactgctgcattcttattaccgacattacataatttggcaggtcaagatactttcgttccgttcaaagaacgtatgaaagcagtgactcagcctagcattttagttttatgcccaacacgtgaattggctcaacaagttagccaagacgcaattgcttttgtacgtcacatgaaaggtgttcgtattgctgcaattatgggtggtatgccttttggtaaacaaattcaacagcttaaaggtgctcaagttgtagttgcgactccaggtcgtttattagacttagttaaccgtcgtcaattaaagctagacaaagttgatgctttaatcgtggacgaagctgaccgtatgttagaccttggtttctctgaagacttggaagcgatcagtgacttggctgcgaatcgtggtcaaacgttaatgttctctgcaacttttgctgaccgtattattcgtcttgctgagcgcatgatgaatgaacctgagcgtattgcaattgaaactggtcacagcaccaatactgacatcacccaaactttacactggacagatggtttcgaacacaagaagaaacttctgactcactggttggctgatgaaacgcttgaccaagctgttgtattcgcgagcacacaagaagatacagatatgttggctgaagaacttgcagaagcaggtcattcagttgttgcacttcacggtgcaatgccgcaaacagttcgtaaccgtcgtttacgtagtatccgtgaaggccgtgcgaaaatcttagttgctactgacgttgctgcacgtggtcttgacgttccaacaatttcacacgttattaacttcggcttaccaatgaagcatgaagattatgtacaccgtattggtcgtacaggtcgtgctggtcgtacaggtcaagcgattactttagcgacttatcgtgaacgcggtaaaatccgtgcgcttgaagattacttagaagctcgtttaaatgtttctgaaattgaaggtttagagccatctccacctccagctcgtccacgtcgtgaaggcggtcgtggtggtaacggtggccgtgatggtcgtcgtggtggcggtttcggcggtggtcgtcgtttcgagggtgaaggtaacttcaaacgtcgtgaaggtggtcgtgatgatcgtccacgtcgtagctttgatgataagcctcgtggtgagcgtcctgctttcggtggcgaagatcgtccacgtcgcgagttcaactcagaccgtccacgtcgtgaaggtggttttgaagaccgtccaaaacgtagcttcggtggtgaagatcgtccgcgtcgtgaattcagctcagatcgtccacgccgtgaaggtggttttaacgataagcctcgttttgattcaaatgatgacaatcgtggtaaccgcgtagactataaaccacgtcgtgaaaacggtttcggtgaccgtccacaacgtagctttggtggtgaagatcgtccacgtcgtgaaggcggttttggtgatcgtccaaaacgtagcttcggtggtgaagaccgtccacgtcgcgcagttcgcgaagaacactttaatcaagaatctcgtggtgagcgccgtcgtaaattcgaccgttaa

SEQ ID NO: 42751 - DNA, 186 bp, Acinetobacter baumannii
atgtttattgtaataatgcgtaaaagtaagcgaaaagagtcgcctttggcatggttgagtaaattcttatttcaacgtggtttgccatatctttttattgcacttgctttgtgcaatggaatttactttgcctatgctttattaactggccatttcgtagaccagtttcaagttctcgatcaataa

SEQ ID NO: 42752 - DNA, 819 bp, Acinetobacter baumannii
atgaataataaaactcctctctcgactcaatcactgattgaagtgaaaaacttgagttttaaccgaggggaacgcgtcatttatgacaatattagtttaaatatacgtcgaggccagatcacggccattatgggaccatctggtacaggtaaaacgactttattacgcttgattggtggtcagcttgttcccgatcagggcgaagttttgcttgatggcaaagatattgctcaaatgtcacgccaggaattatttgcagcacgtgcgcgtatgggaatgctgttccagagtggagctttatttaccgatatgtcggtttatgaaaatgtcgcttttccaattcgtgcgcatactaagctttctgaaaatctcattgcagaattggtcgctttaaaacttgaatcggtgggcttgcgtggaacagaacagcttatgcctactgagttgtcaggtggtatgaaccgacgggtcgctttagctcgtgcaattgcgcttgatcccgatttaattatgtatgacgaaccttttgcggggcaagacccgattgtgaaaggtgttttaacacgtctcattcgttcattgcgagaagctttagatctaactacgattattgtttcgcatgatgttcctgaaaccctctctattgctgactacatttatgttgtagcggaagggaagattcaaggggaaggaacaccagaagaattacaagcttatgcttctccatttgtaaaacaattcttaaccggctcggcagaaggtccggttgaataccagtttagccaccaagcttatttagataacgaggttcgtccatga

SEQ ID NO: 42753 - DNA, 777 bp, Acinetobacter baumannii
atgaatacgattgcctggttaggtagactcgttattgagcggattcgagggattggtgttgcggcactgatgctcttacagattattttttcattaccttcatcgggcggttttggacgtttcgtctatcaaatgcatcgtgtaggggtaatgtctttactcattatcacggtatcaggcttatttattggtctggtactcggattgcaaggctactcaatattagtcaatgttggtagtgaatcaatgctaggcacaatggtgtctttaactttactgcgtgagcttgcaccagttgttgcagctttgctcttcgctggacgagcaggttctgcattgactgctgaaattggttcgatgaaacaaagtgaacagcttgccagtatggaaatgattggtgttgatcctttaaagcaaatcgtatcaccacgtctttgggctggtatagtcagtttgccaatgttaaccgttatttttgctgcgattggtattgttggcggtaaattggttggagttgactttcttggcgttgatgaaggctccttttggagtggtatgcaaaataatgttcaatttggccacgatgtcgtaaatggcattattaagagcattgtatttgctttgctgtgtacatggattgctgttttccaagggtatgcatgtgatccgacacctgaaggcattgcaacggcaatgacccgcacggttgtatattcttcattatgtgttttaggttttgatttcgtgttgactgcggtcatgttcggagggatttaa

SEQ ID NO: 42754 - DNA, 681 bp, Acinetobacter baumannii
atgaaatcacgtactagtgagctggccgtaggtatctttgtcattatcttcggtattgctttattctttttagcaatgaaagtgagtggtttagtgggcacgaacttgagcgatggctacaccatgaaagctcagtttgataacgttaatggtttaaagcctcgtgctaaagtgacgatgagcggtgtaacaattggccgcgttgattcaatcacgcttgatccggttacacgtttggctacggttacttttgatcttgatggaaaactgacaagttttaatgctgaacagttaaaagaagttcaaaaaaatgctttagacgaattacgttacagttctgattatacgcaagcaactccagcgcaacaaaaaacaatggaacagcaactgatcagtaacatgaactccatcacaagtattgatgaagatgcttatataatggttgcaaccaatggtttattgggtgagaaatatttaaaaatcgtaccgggtggtggtctaaactaccttaaacgtggcgatactatttctaatacccaaggaacgatggatctagaagatcttattagtaaatttattactggtggtggcgcaggtaaggttgccgctggttcatcctcagcagaagaaaaagctcctgcaagtactgacagcagtgcacagccgtcatttgttgagtaa

SEQ ID NO: 42755 - DNA, 642 bp, Acinetobacter baumannii
gtgaatacgttgtttaaacaaacccttacagcaagtattttgtctactatgattgctggtacagcttttgctgcaccttcagaagcaccacctgactttattaagcgtgttgctgatggcttgatttctcgtttaaaagccgatcatgctaaattgcaaaataacccagcattagtaaaaacaattgtacgccaaaacttagacccgtatgttgattcacaagcgtttactcgtattgtgatgggtacttatgcaacaaaccaatatagtactgctgcacagcgtgctcagtttgaaacgaacttccgtaatacattaattgagaattacggtagtgcatttgctaagtatacaaaccaaacttacacgatgcgtccatacaaggcgacagctggtaaaaaccctgttgtgactttagattttaatcacaatggtgaaaaaattcctgtgtcgttccagttggcagacaaaggttcgcaatggaaaatccgtaacatcaatgtttctggtattgatttaggattgcagttccgtaaccagtttgctgcaactgtgaaacgtaatggcggtgatttgaataaagcaattgctacgttccaacctgatgcagatgctgctgttaatcagaataaacaaaaataa

SEQ ID NO: 42756 - DNA, 288 bp, Acinetobacter baumannii
gtggttcagtatcttaaccaagagttagttgtttcaggcaaaattgattttgaaaatgctgaacaacaataccaagctggattggcaattattaaaaagcaaacaagctttcctttaattgttgatttaaagcagcttgagcatggtaatacgttagccttggctgttttggtgcaatggctacgtcaaactccacaaaagtctggattacattttaaaaatgtaccagagaagatgctgaaaatcattcaagcctgccatttgcaagaagacctacatttggtttga

SEQ ID NO: 42757 - DNA, 1014 bp, Acinetobacter baumannii
atgcttgaagccttttatgccacagaacgcggaagtctggaagatgccaccatcaatggtggatttgatctacatcccgaattagtatggcttgatcttattgcaccctctcaagaagaacaacaatgggtcttagatgcttacaatcagaacttacctacactaaagtcgttagaagacatttcatcttctgctcgattctaccgtgatgatgacggtattttgcatatcagcacctattttttaacgaaaaataaaaattatcaggttgatggggatgccgaagattcttcccatatgcttgccatggtgcagactgttgcattcatcttacataaagaccgcttatttactttacgtggtgaaaagttagttgcctttcgtgcttttcgtgctcgagctcgtcgtaatgactacgaaatggattataaagatccaacatggattttattgggcttacttgaagcaaagctagatgagcttgcggatatcttggaagatatccacaaggatctagaaaaatactcaaccgaggttctcaataaccatcaacgtgaacagattttagatcttgatgacatgattacccgcttggcacaacaagaagacatgcttgggaaagcacagctctgtttaattgatttgcgccgtgttttaacgttcttgtctcgtccacgtgctttaggcagtcatatctacgatgcagatattcgagaacttagtgaagatgttcgctcgcttgtcgaacatgacgctttcttattccaaaaagtacgattcttacttgatacaacgtcaggatttattaacactgaacaaaacgatacgatccgtcgattctcgatattaccaagtatgttggcaccacctatgttaatcgccagtatctatggtatgaacacggatgtacttcctttcgcacacggtacaaccagctttattatcgttttactaattattattggtttctttattgggcctatcatttatttccgctggaaaaaatggatttaa

SEQ ID NO: 42758 - DNA, 582 bp, Acinetobacter baumannii
atgaattcaatttgtattttctgtggttcatctcttggttcaaacccaatctttcaacaaattgctcaattaaccggtgaagctattgctaaacaaggtaaaacactcgtttatggcggtggccgttctggtttaatgggtgttgttgctgatagtgctttgcaagccggcgggcaggtcattggggtaattcctcgtgctttagttgatcgcgagttagctcatcctggactgacaaaattatatgtcgttgaaaatatgcatgagcgtaaaaccaaaatggcagatctgtcggacggttttattgctttaccaggtggggcaggtacattggaagaaatctttgaacaatggacatgggcacaattaggtattcatcaaaagccgtgtgcttttctaaatgtagctggcttttatgaagatttgcttaaaatgattcagggaactgtagataacggatttagccaagcgcggtttgttgataaattgattgcctcagacagaattgaagatattcttcaacaatttgagcaatatcaggctcctgctccgaaatggacaaatgctgacgttcaaccataa

SEQ ID NO: 42759 - DNA, 402 bp, Acinetobacter baumannii
gtgaaaacaattacggtcgccgctgcggtgatcttaaatgaacaaaatgaattattgcttgtcagaaagcgtaatacacaagcttttatgcaggtaggcggtaaactggagccgaatgaggctccggaaagtgctatacagcgtgaaatcttggaagaaataggcagcccgtgtgtaatagaacagtttatagggcgttttgagacagcagctgccaatgaaccggatcacaagcttattagccatttatatttggttcgattaaaacaatccccacaaattgcagctgaaattgctgaaatgaagtgggtaaaatttaatgatttcgagacaaaactcgcaccattaaccaaagaaattgtaattccgtggtgtgagcagaacttatctataactctataa

SEQ ID NO: 42760 - DNA, 636 bp, Acinetobacter baumannii
atgtttaagtttttaaacccacagtatcttttccagttgctgtccccttgcctactttgcgaaataggaacacgggaaaaatattctctttgtaaagaatgctgggaacagctaccgtggcttaagcaaaccattcagcgcaatgatcagtctgttcttgtggcctgtcactacgcctatccaattaaccggattattcagcagtttaaatatgaacaaaaattacattaccaaaccttactcgctgaagttttacagcaattaaaatttcctaaggtacaagcgattgtacccatgcctatttctaaacaacgtttaactgaacgaggttttaatcaatccttattacttgccaatcttttgggtaagcaattaaaaataccagtttggcagcctgtacaacgcttaaatgagcattctcaaaagggattatctcgactcgaaagatttgaaaatattgaacagcaatttgttgcgctcactcaagaaaaccggcgttatcgtcgtgtgctgattattgatgatgtaatcacaacaggaagttcaattcacgctttaagtcaggcgctaaaacagctagggtgtacatctattcatgccagttgcctagctgctgcttcatctacatcatattaa

SEQ ID NO: 42761 - DNA, 2046 bp, Acinetobacter baumannii
atgacttcagtccatcagttacaaggcgttggatcggcttcagcagccctactcgaaaaactaaatatttttaccacagatgatttgctgtttcatctgccccgtgattatgaagatcgcagtaccattattcctatgaatcaattggtggttggtcgtagttatttactcgagggtgaagtcaaatctgttgatttccctccaggtaaacgtaaatctatggccgcattaatacaagatgaatttggtaaggtgactttacgcttttatcatatttataaaaatttaaccgacaaaataaaacctggtaaccgtttacgtatttttggtgaagttcgtgtaggtgcacgaggacttgagctttatcatccagaaattcaacttattaatgaacataccccccttccaaaaacgcagctcacagcaatttatccaagtaccgatggactaacacaagctaaattacgcgaatatgttaaacaagcgttgaagcatcatagtgatgccttacccgagttactccctaaacaatatacaaatgggtatgcactcaaagaagctttacattacattcacgagccaccagttgatgccaatatgatccaactggctcaaggctctcatcctgcgcagcaacgtcttatttttgaagagctggtcgcacatcaaattagtcttctcactcgacgtgcttatattcgccaaattgcttcacctgcttttccgagtagtaaagtgcttgcaaaaaagctgctagaagctttaccttttcaaatgaccaacgcacaaaaacgtgtatcaaaagaaattttaaacgacttaaaacaacatcaacctatgctgcgtttggtacaaggtgatgtaggggctggaaaaactttagttgcagcggttgcagcatgtcacgcattagaagcagattggcaagttgcgttaatggcacccaccgaaattttagcagagcagcattatttaaattttaaacgctggtttgaacctttaggtattacggtagcttggttgtcgggtaaacaaaaagggaaagcgcgggcacacgctgagcaacaaattaaagaaggccatgctgaactgattgtgggtactcatgccttatttcaagataacgttgagtttgcaaaactaggactcgtgattattgatgagcagcaccgattcggggtcgatcaacgattagccttacgtaataaaggcgccgaacagctcaccccacatcaactggtcatgactgcaacgccaattcctagaacactggcaatgagtgcttatggcgatttagatacatcaattattgatgaattaccgccaggtcgaactccaattcagaccgtcacgattccgctagatcgtcgtgaagaagtactgcaacgaattgcttcaaactgccgagaaggcaaacaggcctactgggtatgtactctggttgaacagtccgaaactttagatgctcaagccgccgaagccacctatcaagaaatgaaagagcgctttcctgaacttaatattggtttggttcatggcaaaatgaaagccgatgaaaaacaggctgtcatgcaagcatttaaaaacaatgaactacagctgctaattgccacaactgttattgaggttggggtagatgtacctaacgcttcgattatggtcattgagaatgctgaacgattagggctttcacagctacaccaattacgagggcgtgtaggacgaggtgcaaaagccagtttttgtgttcttctctataaaccaccactttcacaaaatgggcaagaaagactttcaattttaagagaaagtaatgatggctttgttattgctgaaaaagatcttgagctaagaggcccgggtgagttattaggaacaaaacaaacaggtgatatgggtttccgtgtcgcacgtttagagcgagatgatcatttattgagtcaagcacactacgttgcacaacaagttctaaaagattaccctgagcaagctgacgccttattgaaacgctggcttcccgaagctcctcgatacgcatatgtttaa

SEQ ID NO: 42762 - DNA, 816 bp, Acinetobacter baumannii
atgcatatattatttatcggttatggtaaaacatctcagcgtgttgctaaacaactatttgagaaaggacatcaaattaccacaattagccgtagtgaaaagacagacccttatgggacacatctcgtacaggatatttttacgctcgatttaagcgaaattgcacctgtagatgtagtgtatattttactttctccagacgatagtactgttgaaggttatcagcatacttatgtggatagtattgagcctattcgtcaggctttaaaatcgcatccggttaaaagattaattgtggtgtcatctacgcgggtatatggtgaaaattctggtgaaacaattgatgaccatagtgagattcacccaaacgatgcccaagggcatatcttgcacaatatggaattgctatggcaaaagtattttccgtcacagtgcgtgattgtgcgtcctacagggatttatggggcttctattgatcgcctaaaacgaatggctgagcacacgcaaacctatccaaatattcactatagtaaccgtattcatattgatgatttagcaaggtttttggcatttttagccgattttgaaaaaccccataaaagttatcttgttgctaataatgcacctgtacctttgcatgaagtcttactgtggtttcaaagtcagttagatttaccgctacttaccttagattcagctcatgtgtcaggcaaaaaaatttatgcgaaacatttgtttgagacgggttttcaacttgagcatccaatttgctttaatgactatttattatgtttaaatgctcatggtacaaattaa

SEQ ID NO: 42763 - DNA, 987 bp, Acinetobacter baumannii
gtgaaaaaattttgtttagctctctttttgagtgtaacgtcagttacgagttgggctggggatcaggtgtggtgtgcatatgatccagcgggtacccaaggggatattacgcgtcgactaaatgacattcgtttatatgctcagcaatatcaagtcaaattcaaagtcgttagttatcaaaaagagcagcaagccattcaagcctttgatgagggtaaatgctcaggcttagcagccagtaactttaatacttatcagtataatcattttatgggtagtacctcaggtattggtcttatacctaataaccggactgcacgaaatctattgcagcttttaaatcatcctacaattgagaaaagattaattaataaagactatgaagcagtcggtatgattccggttggaactgcaaatatggtcatgaaaaccaaaaaaatatcaaaagtggcacagcttagaggtcaaagaattggagttctggccaataacccgccacaacaagctttggtgagaagtgtaggtgcgcagccagtatatgttgatttatcgaatgcgattgcgcagtttcgacaaaataaaatcgatattatgccagcgcctgtttatggtcttttgccttataacctacagaaagattttgggccagatactcaggtgattaattttcctttggcgtatttcggggtaaatataattattaaaccacaagcttatccagccaattttgggcgaaaaattcgggcttggtttgtccaaaatagtcaattattaacaaatcgagctatacaatgggaaaaccatttaccagcctattattgggttgacgtttctttttacgaaaagcagagctatgacattatggtggcaaaaatacgcaatcaatatgttcgctccggttattacgatgcctactttgtggagctaatgaaacgcttacgttgtattgatgatccgcgttactttgaatgtccaatgagtagataa

SEQ ID NO: 42764 - DNA, 2571 bp, Acinetobacter baumannii
atgtccaagagtgggtttggtcaaatgtatcgtcggctttcgagtaaactacttgacctcgtggtaacaccacatgttcttggggaagttcctactgaaccagtatcaacaacagaaacagaagcgaagaccgagcgccaaaaagtagtgtgctatgtcttgcaaaatcattctcgcagtaatgctttagtggtggatggggaaactcgccgcttaaatttaaagccagcgctagatccattagtcatcggtactcatcaggaaaaagcttcagttttatttttacaacacaatgatgaaaataacctactgaatccccctcctcatgcttttccgccacgtttaattaaactaatcgaagttttacaagcaaatcctgaactcgacatagaactggttccggtaaccgttttatggggtcgttctccagataaagaagactcttggtttaagttgttattctcagatacatgggcaacaccaagtacagttaaacagcttgtgaatattggtttgcatggtcgccaatcttatttggaattccatgaaccacagtctttacgtgacctcgttgaatatgctcagaagcattatccaaacctttcaccagcaacttatattgttagcactttaaatgactaccttgatcgccaacgcgaagttgttttaggccctgacttatctgaccgccgcaatgtcatgcagtcggtattaaagtctcgtgatgttcaagaagcaattcgacgcgaaagtattcgcggtaaaatcagcatgcttgaagcagagcgccgtgcgattggctatgtgaatgaaatcgtatctgattattctcactcagcagtacgttttgcagatttggcattaacacgtctatggactcagctttatgacggcgtagaagttcataacttcagtactgtccgagagcttgcaaaagactatgaaattgtttacacaccatgtcaccgtagccacattgactacttactactgtcttatgtgatttataaacgtggcttgatggttccgtatattgctgcgggcgacaacctaaacttacctttcgttggtcagcttttacgtggtggcggtgccttctttattcgccgctctttccgtggtaatggtctttatacttctgtatttaaagaatatttatatagtattctttctcgcaatacaccacttgaatactttattgaaggtggacgttcgcgcacaggccgcttattaccaccgaaaaccggcatgctcgcaatgacagtccatagtcatttacgtggccgtgccaaaccaattgtatttgtgccaacttacattggttatgagcgccttatggaaggttcaacctatgtaggcgaaatgcaaggtaagccaaaagaagccgagtctatttttggtattttaaaaacactccgaaaaattgaacgtattttcggtaaagtacacgttaactttggtgaacctgtttttctagatgacttgcttaaacagcataatgctgagaacgtttatattgaaaagaacgatgacccagtgccacctgctgtttcagaagcagtaaacagttctgcaaatgcgattttagaaaatattaaccgtgcggtagtgattaacccggtttctttactttcaattattttgcttgcaacaccaaagcatacgcttgatgaagaaatctgtattaagcagcttgaagcttaccgcaatttagcatcaaatttcccttacgatcagcgtacagaagtgacgccgctctctggtaaggaaattattgcttatggcttaaagcttaaattgattaagcgtgtacagcatgcccttggtgacattattgcgattgaagataaccaagcagttctcctcacctatttccgtaataacattttgcatgcattcgttttaccttcattgattgcatctcttgttgaacataacgggaaaattagccgtgctgatttaagcaatgttatctatacgctttatccattcttaaaagccgaactcttccttaaatggaaaagtagcgaacttaaagaacagattgagcaatatgcagatgcattggttcaatcaaatcttattcaacaagatgacgaaggcaatttaattagctctgcaccaaatactgaagagcataatcagcttgttgtattagcaacacctgttaaacaaagccttgaacgttattacatgactttagctttaatcactcagcgtggttcaggcaatatttcagcaaaacaagttgaagaattaagtcatttattaggacaacgtttatcagttctatatgagtttaactctcctgaattctttgacaaagcattgttccaaagctttatcaaagttttaactcaacaaaactacattcgaacgaatgaccaaggccaaatcgagtttgatgataatttccgtcaaatggcagcaggcgcacagttggtgcttgatgaagtgacattacaaatgttgcaacacatcacaacctttactgatgaagagttaaaagaagctcttgaagcaatggcttctcagcaagctaaacgccgtttaaaacgtaaaaaagcttaa

SEQ ID NO: 42765 - DNA, 873 bp, Acinetobacter baumannii
atgaatgcgttaacccaagaactggttgagctgctcactttagaaaagcttgaagaaaatatttaccgtggaattagccgtaatttggtcggtaaacgtgtttttggaggtcaggttctcggtcaagcattacgtgctgcttcttacacaactgatcgtcctgcgcattctctgcatgcctactttttatatggtggtgatattaatgctccaatcatctatgaagtagaccgtttgcgtgatggcaaaagctttgtcagccgtcaagttcgggcaattcagcatggacgagttattttctcggcaatggtgtcttttgctaaccctgaagaaggcttgaactatcagcatccagaaccagattacccagctcctgaagcgctaaaatcggaaagtgagttgaaagaaggtatcctgaattttgtaccggaaaatgttcgtgcaagttttatgcgtgagcgtcatgttgaaatccgtccgattgatccagtcaatccatttcaaccacaactggaagcgccttttaatgcgcactatatccgtacccatgaccgtattccaaaacaactggatgacatttcattgcatcaagcaattgtagcgttttactcagactttactttgatgacaacagctttaagaccacatggcttaagttatatttctccaagtttgcaatgtgccagtattgatcatgcgatttatttccatcgcccacttcgtgctgatgaatggatgctctatgacatggaagctacagttagtgcggcttctcgcggtttaaactttggccgtatgtggcaaaatggccaactcgtatgtagtacggtgcaagagggtttgatgcgtttacgggaaattgaaactcaataa

SEQ ID NO: 42766 - DNA, 1320 bp, Acinetobacter baumannii
gtgacaaaaaattgctcgaatgaaaagcaagctcatgtcatatttacaaaaggattgcctactgaaaaaaataatgttgatatgaacttaaatacacaaattctgattgctgccattttaggtttagcctttggcttcctacttaccatgtatccggacactgcttttgtaaagcacagtttatatggattaggcatattaagtagtgtttttattgggctacttaaaatgttgttggtgccattaatttttagctccattgtggttggagtttcaaatttgcaggcaggtggacaattaggcccagtttggaaaatcacattcttgtgttgtatcaccaccaccaccttggccttaattttaggtattagctgtgctcatttgtttgaggtcgggcgaggtgtagatatttcaatttttcaggcatctatgcaaagctatcaaacaccagatagtttaaacccggcaactttcttcactaattttattcaaaatactttaattaacccatttaaagcttttagtgacgggaatgttttagctgtcgtcgtgtttgctctatttgtgggtgtcgctttagttcatggtggcgaacgttttaaaagtattcgggtattgagtcatcagttttttgaaatgatgatgatgttagtaggttgggtaatgaaattggcgccgttaggtatttttgccttactcgctaaattaatggccaccgaagacatttcagtattaagccgattggcggagtttgctgctgtggtaacaggtactactatttttcatggcgctgttgttttaccgctactgctttggatttttggtcgtatgagtccttggactttcttcaaaggcacacgtacagctttaattaccgcatttgcaacgagctctagctctgccactatgccgctgagtatgaaatgcgcacaggaaaacttaggtgttcgtcctcaaactgcaggttttgtgattccattgggtacacagctcaacatggatggtacagctttatatgaagctgctgctgcgctctttgtggcaaatctagttggactagacttaaacctgacacaacaaattgtagtgtgcctaaccgcaatgatcgcatcacttggagcgccaggaattccaagtgcgggtatggttaccatgattatggtattacagtctgtgggtttacctgccgaagcaattgcgattttacttccaatcgatcgtttactcgatacggtaagaacggttgtaaatgtgcaaggtgatatgatgattagtgtggtagtagatcgatataccaaagataaagatatcagtatctaa

SEQ ID NO: 42767 - DNA, 948 bp, Acinetobacter baumannii
atgaaattgctatcttttttgaagaataaggctttaggttcttctattgattataaaattcttccacgtaaggtaaaatttgactggaaagatacccctgtagactggattccaaaccaaccatttgcaagttattttattaatgaaattaacaatatcttgcctgctggagagttctggttttgccggctctataacaaggttttacctcgtattactgatgaaaaacttaaacaggatgtacaagcatttattcgccaagaagcaatgcatgcaaacgcacacacttctgccaataaagaatatttaagtgcacgtaatattgatatccagagaaatctggacattatgaattatctatttactactgctttggcagataagccttttgacaaagaagttccgcaattcttgcaagagcaatgggatttattccgtttaggtgttatcgcgacagtagagcacatgacatgtgtcctaggtaaatatgcgctttataacaaacgctgggaagagttaggcgcagatccagaaatggtagacttggtaaaatggcatggttcagaagaaattgaacaccgcacggttgctttcgatttatatcgccatttaggaggtggttatatcccgcgctattatttaagtcttgcagtgattgtgcttgtgttagggctatgggtagacggcgctgcacatattatgaagcaagatccacgttttgctgatgctgccaaatctagatttttcccagcttgggttgctctagaatggtataaaattagccgaaaagataatcaggttttaccaaacccaatctggcttattgctcagcaaattgactacctcatgccgtggtatgatccagttaaagaaggcagcactgaagatgcggtaagttatttatcgcagtcgccagcagccaaaagagctgaattacaagcagcttaa

SEQ ID NO: 42768 - DNA, 777 bp, Acinetobacter baumannii
atgcgtcgtagtgaaaaatcgaaagacaccaaagccagactcgcacccaagcaaaagatcagttatgaaaagaaaccggatccagcgattacagcctatgctgtgcaatctctaaactggttacgccaagctgaatttttaatgagtgctccgaaattggcactatgtgttgaagatagtggctacgagattgcgtttgccggacgttcaaatgcaggaaaatctagcgcaattaatgcattaacaaaccagaaacagcttgcacgtgcctccaaaaaacctgggcgtacgcaaatgattaactttttcagcctaggtaatccagatcaacgcttagttgaccttcctggttatggttatgcagccgtaccagaagatatgaaacgtgtatggcaaaaagaattagaaaactatctaattcatcgtaaaagcttacaaggtttggttttactcatggatattcgccaccctttacagcactttgacatgatgatgctagagtgggcttattcacgccatttatttgttcatattcttttaaccaaagcagataaactgaaccgcggtccagcgaacaaagtcttgctcgaagttaaacaacaactgaaaaaaatgaagcttgatttctcgattcagcttttttcttcattaaacaaactaggtttagaagagctagcaagtgtgatggctggacgattgcactttacgcttgaacaacagccagaatttgacgttgatacaatcccagaagcgagcgatgaggatgcagaagagtaa

SEQ ID NO: 42769 - DNA, 438 bp, Acinetobacter baumannii
atgcaacttaataaatttaccgattatgctttgcgaatattaatgtatgtcgctcgtccaagtgatgcgccgtacacgattgcagaaatcgctcaagatttatatgtttcgcaaaatcatcttgtgaaggttgtccattttatgggtaaacaagagtggattattaccattcgcggcaaagggggtggaattcgattaaatccaaaagctttagatttaaaacttggaacaattgtccgaattttacaaggtgaccaccaaattgttgaatgcaatacaccgccttgtgttttacgctcccattgcggtttgaaaggtattcttgatcaagctttggaaagcttttatcaaagtttagatcaatatacgttaggtgaagttttacaacagccaaaatctgcttcagatcactctcctatcgcctttttacaactctag

SEQ ID NO: 42770 - DNA, 765 bp, Acinetobacter baumannii
atgactccacaacaaattgaactcgttaaatctactgtacctgtattgcgtgaacatggtgttactctaactacatacttctataagcgtatgttgaataacaacccagaattaaaaaatgtttttaatcttgatgatcagaccagcctgcgccaacctcgtgctcttgcagcagctgtactcgcgtatgctgaaaatattgagaatcctacggtgcttgccaaagcggttgaacgtattaccactaaacacgtgagcttagatattcaaccagatcaatatgcaattgtgggcgacaacttgcttcattcaattagtgaagttttaaatgttccatttgaatcagaactcattgaagcgtggaaacaagcttatttacagttggcagatatcttaattggtgttgaaaaacaaaaatatgaacaacttgaaagcttgaaaggtggatgggctggctggcgttcatttgaaattacgcaaattgacccacttgagtctggcaaacgctttactttaaaggcaactgatcatgaagatgtactcaccagcccagcaaatgcttttatttctgtaaaagttcaagtacctaaccaacagcttgaacaacctaaagcatttaagttcacagaggctcaagaggacaatacttatcattttgatgttcaaccagaagaagaccatacagagttctctgtttcaaacattttgcttgagcactatagagttggtgatcaagtacaagtttcagctcctttaacgctgtaa

SEQ ID NO: 42771 - DNA, 1548 bp, Acinetobacter baumannii
atgggtacaccgattgttattgcaaaaaatattaacgacacatcaaaagaaattgttttactttcccaatttgccaaccggcacggcctgattgccggtgcgaccggtacaggtaaaacagtcaccctaaaggtgctcgcagagagtttttctcgaatcggcgttcccgtctttcttgccgacgcaaaaggtgatgtttcaagcctcgcaaaagctggtgaagcttcggataaatttaatgaacgcttaaagcttttacagatcgacagtgttccatttgcagccaatccagttgttttctgggatttatttggtcagcaaggccaccctattcgaaccactatttctgaaattggaccaattttattagcacgtatacttaacttaaatgacacccaagaaggtgttttatctgccgtattccgtattgcagacgaccaaggattacttctggtcgactttaaagatttaaaagccatgatcacttttgtaagtgaacatgcagctgagtttaaagccgaatatggcaacttatctccagccagtttaggcgctatccaacgtaatctccttgctcttgccgaccaaggtggagagcagttttttggagagccagctttaaatattctggactttatacaaaccgacgcaaatgggcatggttatatcaatattcttgcggctgacaagctcatgaatacacctaagctatatgctactttcctgttatggatgctttcagaattatttgaacagcttccagaagttggtgatatggataaacctaaactcgtgtttttctttgatgaagctcacctgttattcgacaacgccagtcaagctttacaagaaaaaattgaacaagttgtacgtttaattcgttctaaaggtgtgggaatttattttattacccaaaacccgctcgacttaccagaaagtgttttagggcaactcggcaaccgtgtacaacatgctttacgtgcttttactcctaaagatcaaaaagcagtaaaaacagcagcagacacattccgctctaatcccgattttaaagtagatgaagcaattaccgagctcggtgtaggtgaagcactgattagttgtctagatgaacaaggtacacctcaaattgtagaacgtggttgggttatgcctctttactcttcatttacgcctatcactccagaagagcgtcagaccttaatttcgcaaagtattattgccggggtttatgaacaagctgtagatcgtgatagtgcctatgaaatgctccaaaacaaagtggctgaacgggaacagcaaaaacaagatgcagaactcgcaaaacagcaagcaaaagaacaggaaaccttagcgaaacaacaagccaaagaacaagagcgtctagcacgtgaacagcaaaaagaagaggaacgtgcggcacgtgaaagagctaaacttactcaagatattgtcggaacttttgcaaaaagtgctgctcgcagcttaggtggtagtactggccaaaaattagtacgggggctactcggctcattatttggaaaataa

SEQ ID NO: 42772 - DNA, 1191 bp, Acinetobacter baumannii
atgaaaaagcataacaatttccaaacccaactcattcatgcaccacgaaaagcacctcaatttattgaaaccgtgcaacctcccttatttcgtgcatcaactattatttttaaatcaacttcgcacctttttgaccgtcactggaccgatccttatgactatagttatggcacccacggtacgcctacgacatttacactaggcgacaatattgctcaaattgagggtggtttatactgcctacttgctccaagtgggttatctgcgattaatctcgtaaattctgctgtgttagcaacaggtgatgaagtttgggtgccagacaacatatatggtccgaatctggaacacctaaactacttaaaagatcaatatggaattaatgttcaagtttataacccgatcgatgtctcaagtttccagccttctgataaaaccaagttgctatggttagaagcagcaggttctgtcactcttgaatttccagatctcaaagcgctagtaaaaaaagcaaaagcacatggcgttttaactgcactagataatacttggggagctggcctcgcctttaatgcttttgatttttccgatgagcatttatcagtggatttaaccattcatgcgcttaccaaatatccaagtggtggtggcgatattttaatgggaagtgtggtaactcgtgatgagaagttacatcaccgtttgttccgaatgcatgccattttagggatttcggtatctggtgatgataccgcccaaattcaacgtagtcttgcgcatatgtcattaaggtatgagcaacaatcgaataatgctaaaaccctactgacatggttaaaagaacaatctcagtttgcacaagttctacatccaagcgataaagcttcacctggtcatcaatactggcaagaaatttgctcaacaggtagaagtgcaggcttagtgagtgttgtgttcaaatctgattatgatatttcagcagtacgccgtttttgtgatgctcttaagctattcaaacttggttttagttggggaggaccggtgagtctcgtcatgctttatgatttaaaaatgatgagaaaacttgaaaatacacatttacaacaaggtttgttggttcgcttctgtatagggctagaagatccacaagatttaattcaagatatcgaaaatgctctgaaacaaatgtaa

SEQ ID NO: 42773 - DNA, 729 bp, Acinetobacter baumannii
atgaagtcgcatttacgtgttcactattttcaacatattgctggcgaaggttttggaagctgctattcattcttaaaagcacaccatgcaacgataacagctacagagttttttgcacttccagttgatctccctttggaaatagaagcattgccacacattgaagatgtggatttgctacttattatggggggaaccatgagtgtaaatgatgaggcaaattatccatggttaaaaatagaaaaaagatggatacgtcgttatttggcggcgggaaagcctgcgataggactttgtctcggagggcaacttattgccaatgcactaggagccgccgttagtagaaaccgttatcaagaattgggatggtcgacagtacaaagggtaccgaatttacctaaagaaagctttttattaccagaaaaaataaatgtaatgcagtggcatagtgaaacttttgagattcctaaaggtgcgattcatttagcagagaactcagtttgtcgtaaccagatgtaccaaattggttcaaatgttcttggttttcaatttcacccagaaatgacaccgaaggtattaaatcttcttttagagaacgaacaagagctttctatttttaaaggtgagtatgttcaatctttagatgaattacatcattgcgatatccaaaagtttgaacaaggcaatcaacttttaaacagggcaatagagttcgtagtcaatcaataa

SEQ ID NO: 42774 - DNA, 312 bp, Acinetobacter baumannii
atgtctaaccagagaattcgtatccgtcttaagtcttttgatcatcgtctgattgatcaatctgctcaagagatcgtagaaaccgctaagcgtaccggcgcacaagtgtgtggtccaattccgatgcctactcgcatcgaacgcttcaacgttcttacttcaccgcacgttaacaaagatgcgcgtgaccagtacgaaatccgcacctacaaacgtttgatcgacatcgttcaacctacagataaaactgttgatgcattgatgaagttagatcttgcagctggtgttgatgttcagatcgctttgggttaa

SEQ ID NO: 42775 - DNA, 639 bp, Acinetobacter baumannii
atggctattggtttagtcggtcgcaaatgtggtatgactcgcatctttacagatgctggtgtttctgtacctgttacagtcatcgaagtcgatccaaaccgcattacgcaaatcaaaacacttgaaactgatggttatcaagctgttcaagtaactactggtgaacgtcgcgagtctcgcgttactaacgctcaaaaaggtcacttcgctaaagcgggtgttgctgctggtcgtttagttaaagagtttcgtgttactgaagctgagcttgaaggccgtgaagttggcggtactattggcgttgatttgttcacagttggtcaaattgttgacgtaactggtcaatcaaaaggtaaaggtttccaaggtggtgttaaacgttggaatttccgtacccaagatgctactcacggtaactctgtttctcaccgtgttttaggttctacaggtcaaaaccaaactcctggacgcgtgttcaaaggcaaaaaaatggctggtcacttaggtgatgaacgcgtaacagtacaaggtcttgaaatcgtatctgttgacactgaacgttcagttttggttgttaagggtgcaattcctggtgcaactggcggtgacgttatcgtacgtcctaccatcaaggcctga

SEQ ID NO: 42776 - DNA, 603 bp, Acinetobacter baumannii
gtgaatttaaaaactgtttccggctctgctgttgaattgtctgaagtagctttcggacgtgaatttaacgaagctcttgtacaccaagttgttactgcttacttagcaggtggtcgtcaaggtactcgtgctcacaaatcacgtgcagacgtttctggcggtggtaaaaaaccattccgtcaaaaaggtactggtcgcgctcgtgcgggttctattcgtagcccaatctgggttggtggtggtaaaacttttgctgctcgtccacaagattggtctcaaaaagtaaaccgtaaaatgtatcgcggtgcaatgcaatgtatcttagctgaacttgttcgccaagatcgccttgttttagttgaagagttcgctgttgctgctccaaaaactaaagaattgcttgcaaaacttaacgatttaaatgcagctcgtgctttgatcgttacagatgctgtagatgagaacttatatcttgcagcgcgcaaccttccacacgttgatgtggtagatgcaactgcaatcgatcctgtaagcttgatcgcgtttgataaagttgtgatgtctgtagctgctgctaagaaaattgaggtagaactcggatga

SEQ ID NO: 42777 - DNA, 321 bp, Acinetobacter baumannii
atgaacaacgaacgtatctatcaagtcctaaaaggaccagtcttctcagaaaaggcacaagttttaggtgatactgctggtgttcaagtatttaaagtagatatcaacgctactaaacttgaaatcaaaaaagcagttgaaaaactttttggtgtagaagttgttaaagttaacacaactattactaaaggtaagactaagcgctttggtcgtacattaggacgtcgttctgatgttaaaaaagcatacgtcaccctgaaagccggccaagatgttgaaatggctgacttgggcgataccgctgaaagcgcagcggaataa

SEQ ID NO: 42778 - DNA, 825 bp, Acinetobacter baumannii
atgccgattcaaaaatgtaagccaacgtctccaggacgtcgctttgtagagaaagtggttcatgaccatcttcacaaaggcgcgccttatgcaccgttggtagaagcaaaaaaacgtactggtggtcgtaataacaacggtcacattactactcgtcacgttggtggtggtcataagcaacattaccgtatcgttgacttcaaacgtaacaaagatggcgtacctgctgttgtagaacgtattgaatacgatccaaaccgtacagcgcatattgcattattgaaatatgctgacggtgagcgtcgttatatcattgcgcctaaaggcttacgtgctggtgataaagtacaatctggtaacgatgctccaattcgtccaggtaactgtttaccacttcgtaacatgccaatcggttctacacttcataacgttgaacttaaaatcggtaaaggtgctcaattagcacgttctgctggtgcttctgttcaattgttgggtcgtgatggttcttacgcaatcattcgtcttcgttcaggcgaaatgcgtaaagtacacgttgaatgccgcgctgtaattggtgaagtttctaaccaagaaaacaaccttcgctcattaggtaaagctggtgctgcacgctggcgtggtgttcgtcctaccgtacgtggtatggcgatgaacccgattgatcacccgcacggtggtggtgaagggcgtaacaaaggtattcaacctgtaagcccatggggtcaaaaagctaaagggtacaagacacgtaccaacaagcgtacgactaagatgattattcgcgaccgtcgcgtcaagtaa

SEQ ID NO: 42779 - DNA, 276 bp, Acinetobacter baumannii
atgcctcgttctctgaaaaaaggcccattcgtcgatgcgcacttgttcgctaaggttgaagcggctgttgctagtaactctcgcaagccgatcaaaacttggtctcgtcgttcgatgatccttccagactttgttggtttaacaatttctgttcacaatggccgtaaccacgttccagtaattgttactgagcatatggttggtcataaactcggtgaattcgcgccaactcgtacctatcgtggtcacggtgttgacaagaagtctaaacgttaa

SEQ ID NO: 42780 - DNA, 330 bp, Acinetobacter baumannii
atggaagtaactgctaaattacgcggtgccgctatctcggcacaaaaagcacgtttggttgcggacttaatccgtggcaagtctgttgcacatgctttaaacatcttgaacttcagcaacaaaaaagctgcagttttagttaaaaaagcattggaatctgcaattgcaaacgctgaacacaataacagtttagatgttgacgaccttaaagtttctacgatttacgttgacgaaggcatgagccttaaacgtattatgccacgtgctaaaggccgtgcagatcgtattactaagcgtacttgtcacatcaccgttaaggtaggggtttga

SEQ ID NO: 42781 - DNA, 753 bp, Acinetobacter baumannii
atgggtcagaaggttcatccaatcggtatccgcctaggtgttgtgaaacgtcataacgctaactggtatgcgaatccgaaacaatacgctgaatacttgcttaaagatcttcaagttcgtgagtttttaactaaaaaacttaagaatgcgatggttagcaatattcttatcgaacgtccatcaggtgctgctaaagtaacaattagcacagctcgtcctggtatcgtaatcggtaaaaaaggcgaagacattgaaaaattacagcgcgaacttaccaacatcatgggtgttccagcgcaagtaagcatcaacgaaattgatcgcccagacttggacgcgcgtttagttgctgaagcaatcgcttctcaattagaaaaacgtgtaatgttccgtcgtgctatgaagcgtgcggttcaaaacactatgcgtgctggtgctaaaggtatcaaagttgaagtttctggccgtttaggtggtgcagagatcgctcgtacagaatggtatcgtgaaggtcgtgtacctttgcacactcttcgtgcggacatcgactatgcaactatgcgtgctgaaactacttacggtacgattggtgttaaagtttggattttccgtggtgagattttaggtggcatgaaacaagtcatgaaccctgctcctgctgaagaacgtccagctaaacgcggtcgtggtcgtggtgaaggtcaagagcgtcgtggtcgtcgcggtgaccgtgctgctgacaagggagaataa

SEQ ID NO: 42782 - DNA, 414 bp, Acinetobacter baumannii
atgttgcaacctaaacgtaccaaattccgtaaagtgcataaaggccgtaacactggtctagcacatcgtggtagtacagtatcatttggttcgattgcaattaaagcaactgagcgtggtcgtatgactgcacgtcagattgaagctgcacgtcgtaccattagccgtcgtattaaacgtggtggtaaaatcttcattcgcgtattcccggacaaaccaattaccgaaaaaccattagaagttcgtatgggtaacggtaaaggtaacgtggaatattgggtttgtgagatcaaaccaggtaagatcctgtacgaaattgaaggtgtgaacgaagacttggcacgtgaagcttttgctttagctgctgctaaacttccgtttaaaaccactatcgtgactcggacggtaatgtaa

SEQ ID NO: 42783 - DNA, 198 bp, Acinetobacter baumannii
atgaaaactaaagatctacgtgaaaaatcggtagaagagttgaaagctttgcttgatgagcaacagcttaaccaattccgtcttcgtatggcgaaagcaactggtcagttgggtaaatcgcacgaagtgcaagttgctcgtaagacaattgctcgtattaagacactccttaccgaaaaacaggggaacggacaatga

SEQ ID NO: 42784 - DNA, 258 bp, Acinetobacter baumannii
atgagtgaaaaaacagtccgcacgttaaccggcaaagtagtaagcgacaaaatggacaaatctattgttgtccttatcgaacgccgcgttcaacacccgttgtatggcaaatcaattcgccgttcaactaagttacacgctcatgatgagaacaacgttgctaaaattggcgatgttgtaaccattaaagaaagccgcccaatttctaaaactaaagcttggactttagtggaagtagttgaagcagctgctgagtaa

SEQ ID NO: 42785 - DNA, 369 bp, Acinetobacter baumannii
atgattcaaaccgaaactatgctcgacgtagcagacaacagtggtgctcgccgcgtacaatgtattaaagtacttggtggttcacatcgtcgttatgcttctgttggcgacattattaaagttactgtaaaagaagctattccacgcgcacgtgttaaaaaaggtgacgtgatgaatgcagttgtagttcgtactaagttcggcattcgtcgtccagatggttctgtgatccgttttgatgataacgctgcagttattttgaacaacaacaaagctccgattgcgactcgtatcttcggaccagtgactcgtgaacttcgtactgaacagttcatgaaaatcatttcattggctcctgaagttctataa

SEQ ID NO: 42786 - DNA, 318 bp, Acinetobacter baumannii
atggctaagattaaaaaaggcgatcaggttatcgtgatcgcaggtaaagaaaaaggcaaacagggtactgttttgtctgtttctgaagaccgcgttaaggttgaaggccttaacttagtgaagaagcatcaaaagccgaatcgtgtaactggcgctgaaggcggtatcgttactcaagaagcttcgcttcatatctcaaacgtggcaattttaaatgctacaacccagaaggctgaccgtgttggttaccaagtgattgatggcgtgaaaactcgcgtttacaaatcaactggtgaatcagtggcggtagcgaagtaa

SEQ ID NO: 42787 - DNA, 537 bp, Acinetobacter baumannii
atggccagacttaaagcacgttacaacgacgaacttaaagcgaagttacaagaagaacttagcattaagaatgtgatggaaattcctcgcatcacaaaaatcactcttaacatgggtgtaggcgcagcagctactgataagaaattattagacggcgctgtagctgacatgcaattaattgctggtcaaaaaccagtagttactcttgcacgtaaatctatcgctggtttcaaaatccgtgatggttggccaattggttgtaaagttactttacgtggcgaccaaatgtacgaattcttggaccgtttgatctctatcgcaatccctcgtatccgtgacttccgtggtttctcagcgaaatctttcgacggtcgtggtaactactcaatgggtttgaaagagcaaatcgttttccctgaaatcgatttcgacaagattgatcgtattcgtggtatggatattactattactacgactgctcgcaccgatgacgaaggccgtgcgcttatgcgtgcattcggcttcccgttcaaataa

SEQ ID NO: 42788 - DNA, 306 bp, Acinetobacter baumannii
atggctaagaaaggtatgattaatcgcgaattgaaacgcgaaaaaactgttgctaaatacgctgcaaaacgtgctgaattaaaagctactattgcaaatgtaaatgcgagcgacgaagaacgtttcgaagcgatgttaaagttacaagcattgccacgtaatgcatctccggtacgtcttcgtaaccgttgtggtttaactggtcgtcctcatggttacttccgtaagttcggtttaagccgtaacaaattacgtgacacagtaatgcaaggtgatgtaccaggcgttgttaaggcaagctggtaa

SEQ ID NO: 42789 - DNA, 396 bp, Acinetobacter baumannii
atgagtatgcaagataccgttgccgacatgctaacacgtgttcgtaacgcacaaatggctaagaaacaaactgtttctatgccgtcttctaagttgaaagttgctattgcaaacgtacttcaacaagaaggttatatttcaaacgtagaagttgctcaagaagagacaaaatctactttgactattactttaaaatatttcgaaggcaagccagttatcgaaatggttaagcgcgtaagccgtccaggccttcgccaataccgtggtaaagataaacttccaagcgttaagcaaggtttaggtattgcaattgtttctacaagcaaaggcatcatgactgatcgcgctgcacgtgctgcgggcatcggtggtgaagttattgcttttgtttcttaa

SEQ ID NO: 42790 - DNA, 534 bp, Acinetobacter baumannii
atgtctcgtgtggctaaagccccagtaactgtaccaaatggtgtaacagttactcagaacggccggcaggtcgaagtgaaaggcagcaaaggtacattgtctttcaacctgcatgcgctggtcgagctaaaacaggaagaaggtaaacttcaacttgctccagctaaagaatcgaaagatgcttggatgcaagctggtactgctcgcgctgtattgaacaaccttgttaaaggtgttagcgaaggcttcgaacgtaagttgcagctagttggtgttggttataaagctgcggttaaaggtacagttgtaaaccttaaccttggttactcacacccaattgactacgctttacctgaaggtgtaacagcggaaactccaactgctactgaaatcattttgaaatcagcaaacaagcagttgttaggtcaagtagcggcagaaatccgtgcataccgttctcctgaaccatataaaggtaaaggtgttcgttattcggatgaagtcattcttcgtaaagaagctaagaagaaataa

SEQ ID NO: 42791 - DNA, 351 bp, Acinetobacter baumannii
atgaacgaaaagaaacaatcccgtttgcgtcgtgcgaaaagcacacgcttgcacatccgtgcattgggtgcgactcgtttgtgtgtaaaccgcactccgcgtcacatctatgctcaagttatttcagcagatggtggcaaagttttagcgcaagcttcaactttagatgcatctttacgtagtggtactactggtaatattgaagctgcgacgaaagttggtgctttaatcgcagaacgtgctaaagcagctggcgttactaaagttgcatttgaccgttctggttttaaatatcatggtcgtatcaaagccttggctgatgctgctcgtgaaggcggcttggagttctaa

SEQ ID NO: 42792 - DNA, 498 bp, Acinetobacter baumannii
atggcaaaagttgaacaaaacgaaggtctcgttgaaaagctggttgccgttgatcgtgtagccaaggttgttaagggtggtcgtatcttctctttcacagcattaactgttgtgggcgatggtaatggtcgcgtaggttttggtcgtggtaaagctcgtgaagttccagctgctatttctaaagcacttgaagctgcacgtcgtaacatgatcactgtagaccttgctggtactactttacaacaccctgtgaatgctcgtcatggtgcaagccgtgtatacatgcaacctgcttcagaaggtactggcgtaatcgctggtggtgcaatgcgtgccgttcttgaagctgcaggtgtacataacgtacttgctaaatgttatggttctactaacgctgctaacgtagtaaacgcaacttttaaaggtttgcgtgatatgacttctcctgagaaagtcgctgcgaaacgtggtaaatcagtagaagaaattcaagggtaa

SEQ ID NO: 42793 - DNA, 177 bp, Acinetobacter baumannii
atgaaaacgattaaagttacccagactaaatcttcttcacatcgcttgaaaaatcacaagctttgcttacaaggtttaggtctgcgtcgtattggtcatactgtagaagtgcaagatacgccttctaaccgtggtatgatcaacaaagtctactatatggttagtgtagaggaataa

SEQ ID NO: 42794 - DNA, 441 bp, Acinetobacter baumannii
atgactctgcgtttaaatgagcttgcacctgcagaaggtgcaaaacgtgaacaccgtcgtttaggccgtggtatcggttctggcgttggtaagactggtggtcgtggtatcaaaggtcaaaaatcacgtaaaagtggtggcgttcgtccaggtttcgaaggcggtcaaacagcgatttatcgtcgtttacctaaattcggtttcactagccaaatcgctttaaaaactgctgaagtacgtttgtctgagttaagtaaagtggaaggcgacatcgttagccttgaaactttaaaagctgcgaatgttgttcgtcgcgatcaaattcgcgctcgtatcgtgctttctggtgaaatcactcgtgcattcactgttcaaggtgttgcattgactaaaggcgctaaagctgcaattgaagcagctggcggcaaagtcgaggagtaa

SEQ ID NO: 42795 - DNA, 1353 bp, Acinetobacter baumannii
atgtctcctagttcttcaggtcatgtcaacatgatgaaaggtcagccatttcacgtgaaatatcgtgaaattattcgccggatgagttttctaatcggtgcattgctggtctttcgactaggagcgcatattccagtaccaggcattaataatgctgcgttagaaaatttatttcatgcaaaccaaggaactattcttgggctattcaatatgttttctggcggtgctttagagcgaatgtcgattcttgctttagggatcatgccttatatttctgcatcaattattgtgcagttaatgtctacagtgattccttctctcgaagccttgaaaaaggaaggggagcaaggtaaacgtaaaattaatcaatatacgcgtcagggtacattattacttgcagtggttcaggcagtgggtatgtgtgcaggtcttattggacagggtattactctatctagtggtcttgctttttatatacctgcagttacatcacttgtcgcaggaactatgttcttaatgtggctaggtgaacaaatcactgaaagaggtatcggtaatggtatctcaatgattatttttgcaggtattgttgctggtttgcctaaattaattatgcaatcagtatcatctgtcgataatggtcaaacaagtttaattggtcttgttatctttggtcttttgtctcttggtgtattggcagcgattgtgtttattgaaaaagcacagcgtcgtattccagtaaactatgcacagaagcagcaagggcgtcgtatatttacagctcagcaaacacatctaccgttgaaaattaatatggctggtgtgattcctgcgatttttgcgagctctttactcttgttcccagctagtttggggcaatgggtaggaagtgcagatccgaatgctggtttaattaaacgtagtttacaagatttagctttagtattgtcgcctggacagcctttgtatttggtgctctttggtgcgttaattatctttttctgttacttttatacggctttagtatttagccctaaggaagtatcagaaaatctaaaacgcagcggagcttatgtgcctggtattcgcccaggtgagcaaactgctcgttacttagatcatattcttaatcgtttgacgtttattggtgcgatttatattacagtcatttgtttgatgccaatgattctacaaagttcttttggtattccattctatttgggtggtacctcattactcattgtagtcgttgttgttatggactttatggctcagctacaagcgcatttaacttctcatcaatatgacaatcaaacattaatgagaaaaacgactgctcatcctaagggataa

SEQ ID NO: 42796 - DNA, 357 bp, Acinetobacter baumannii
atggctcgtattgccggtgtaaacattccggataacaagcatgctgttatctccctcacttacatctttggtatcggtcgccacactgctaagaacatcttagctgcagttggtattactgagactactaagatccgtgagttggacgatgcacagcttgatgcgattcgtgcagaagttgctaaggttcctaccgaaggtgacttacgtcgcgaaatttccatgaacattaaacgtttaatggatttaggttgctatcgtggccttcgtcatcgtcgcagcttgcctgtccgtggtcaacgcaccaaaactaacgcacgtacccgtaaaggtccgcgcaaaccgattaaaaagtaa

SEQ ID NO: 42797 - DNA, 387 bp, Acinetobacter baumannii
atggctaaagatactcgcacacgcaagaaggtcactcgtaccgtctctgaaggtgttgcacacattcacgcgtcttttaataacaccattgttacgattaccgatcgtcaaggtaatgcattggcttgggccacctcaggtggacaaggcttccgtggttcacgtaaatcaactccgtttgctgctcaggtagctgctgaagttgctggtaaagcagctttagattacggtttgaaaaaccttgacgtccttgtaaaaggtcctggtccaggtcgtgagtctgcggttcgtgcattaggcgcagtgggttataagattaacagcattaccgatgtgactccaattcctcacaacggttgccgtccacctaaaaaacgtcgcgtgtaa

SEQ ID NO: 42798 - DNA, 627 bp, Acinetobacter baumannii
atggctcgttatattggtccaaaatgcaaactctctcgccgcgaagggacagacctgcaacttaaatctggcgttaaaccatttgacgtcaaaactaaaaaagctaacaaagcacctggtcaacatggtcaggctcgcggtggtaagcaatctgagtattcactacaattacgtgaaaaacaaaaagtccgtcgtatttacggtgtgttagagcgtcaatttagtaactactataaagaagcagctcgtgttaaaggcgcaactggtgagaacttgttgaaattgcttgaaagccgtcttgataacgttgtttatcgcatgggttttggttctacacgtgcagaagctcgtcagttagtaagtcaccgtagcattactttgaatggtcgtcgtgtaaacatcgcatctattcaagttaaagctggtgatgtaattgcggttcacgaaggtgctaaacaacaattgcgtattaaaaacgcgattgaattggctgctcaacgtggtattccagcttggatcgaagttgatcactctaagcttgaaggtacgtttaaagctgcaccagatcgttctgatttacctgctgaaatcaacgaaagcttgattgtagaattgtattctaaataa

SEQ ID NO: 42799 - DNA, 1008 bp, Acinetobacter baumannii
atgacgcgtactgcaaacgagtttctaactccgcaagcgatcaaggtcgaagcggtaagcgggacctcggcaaaagtgattctggaacctttagagcgtggttttggccatactctaggtaatgctttacgtcgcattctattgtcttctttgccaggcgctgctgtggttgaagtagagatagaaggtgtcgagcacgagtacagtactttagaaggcttgcagcaggacatcgtcgagctcttgctgaacctaaaaggattgtctattaagctgttcgatcaaaatgaagcttatttaacattagaaaaacaaggtcctggtgacattactgctgccgaccttcgtttacctcataatgttgaagtggttaacccagaacatttaattggtactttgagtgctacaggctcattaaaaatgcgcttgaaagtttctcaaggtcgtggttatgaaacatctgactctcgtttccctgaaggtgaaacacgtcctgtaggtcgtttacagttagatgcttcttatagcccaattaagcgtgtttcttacaccgtagaaaatgcgcgtgtagaacaacgtaccgatttagataaactggtaatcgatcttgagaccaacggtacggttgatcctgaagaagcaatccgcaaagcggcaacaatcttgcaacaacaaattgcaatttttgttgatcttcagaaagaccaaactcctgttgctcaagaacctcgtgaagaagttgacccaatcttgcttcgcccagtagatgatctagagcttactgttcgttctgctaactgtttgaaagcagaaaatatttactacattggtgatcttgttcaacgtactgaagttgagttgttaaaaactcctaaccttggtaaaaaatcgttaacagagatcaaagatgttttggcatcgaaaggtttacaactcggtatgcgtcttgagaactggccaccagctagtcttcgtatggacgaccgttttgcctatcgtagccgttaa

SEQ ID NO: 42800 - DNA, 378 bp, Acinetobacter baumannii
atgcgtcatcgtaatagtggtgtgaaattaggccgtacaagcagccatcgtaaagcgatgttccaaaacttggctaattctttatttgaacatgagttgatcaaaacaactttgcctaaagctaaagaattacgtcgtgttgctgagcctttaatcactctagcaaaaaacgatactgtagcaaatcgtcgtttagcatttgctcgtactcgtaatgctgcaactgttggtaaattatttaccgtactcggccctcgttacaaagaacgtaacggcggttatctacgtgttcttaaagcgggcttccgtgctggtgatgcagcaccgatggcttacgttgagcttgtagatcgtgaagtgaacacttcagctgaataa

SEQ ID NO: 42801 - DNA, 1491 bp, Acinetobacter baumannii
atggaaaagcaagttgatgtattaatcattggtgcaggcatatcaggaataggagttgctgcccatttatctaaaaactctccacaacgtcagtttgaaattttggagcgtcgtgaatcgtttggtggaacttgggatcttttccgctatcctggtatccgttctgattcagatatgtctacttttggttttaactttaaaccatggcgcaaagccaatgttctcgctgatggtgcctctattaaaggatatctaggggaagtgattgatgagtttaagttaaaagaaaaaattcatttcggccatcgtgtcctttctgcgaattatgattctgcctcgaaaaagtggcatgttattgttgaggacaataagaaaaaacagcagacttgggttgctaacttcgttgtaggttgtactggttattataattatgaccaaggttacgcgccgactttcccaaatcaagaagctttcaaaggtcaactcattcatccacaacattggcctgaaaacttggattataagggtaaaaaagtagtaattattggtagcggagctacagcaattacactggtgcctgcaatgtcaaaaggtggagcaggtcatgtaacgatgttgcaacgttcaccaacttatattgcttctgttccgtctattgatttcatctatgaaaaaactcgtagatttatgtctgaagaagcagcctataaatttacgcgtgctcgtaatattggtatgcaacgagcaatttatgcattgtctcaaaagcatcctaaaacagttcgtcgtttactcttaaaagcaattgaaatgcaacttaagggtaaagttgatatgaaacattttacaccttcatataacccttgggatcagcgtctttgcgtagttcctgatggtgatttattcaaaattcttcgtgaaggtaaggcgagtgttgagactgatcaaattgaaaaatttactgagactggtattcaattaaaatcaggcaagcatcttgatgccgatattatcgtatctgcaacaggtttgcaggttcaaatcatgggcggtgtgcaggcaactattgatggggagccagttaaatcatctgaacacatgctttataacggcgtgatgctcagcgatgtaccaaacatggcgatgattattggctatgtaaatgcttcatggacattaaaagttgatattgcagcagattatatctgccgtttattaaactacatggataagaataattatgatgaagtcattccatctggtgataagagtgtgatggaagacgacacagtcatgggtagcttatcatctggttatattagtcgtgctgccgacgtgattcctaaacaaggtaaacaagctccatggcaggtaaccaataattatcttgaagaccgaaaatcattaaaaaatgcaaaatttgatgatggtgttctacgttttcataagcattcagaagtttctacacgtaaaccaaaattagtgtcttga

SEQ ID NO: 42802 - DNA, 1173 bp, Acinetobacter baumannii
atgcaatctggtgctattcgtcccattccaaatatgttacctcgccatttatttagcgaagaacatgaagcttttcgggaaacggtacgtaaattctacgagaaagaagttgtacctaatattgaaaaatatgaaaaacaacaacacgttgaccgagatctttggaataaagctggtgcgttaggtttactctgtaccaccatgctagaacaatatggtggttcaggtgtcgatcgcctatacagtatgattcttattgaagaacaagcctatgcgatggactcaagtacaggtttctcactgcattccgacattgtagccaactatattaataacttcggtaatgaagagcaaaaaaagaaatggctccctaaaatggctactggtgagacggttaccgcaattgccatgaccgagccgggaacaggttcagacttgcaagcggttcgtacaacagccgttcttgatggcgatgaatatgtcattaatggttcaaaaatatttattaccaatggctatttatgcgatatggcgattgtcgtttgtaaaacagggaatagtgataaaggatctgccaatttatcactcattattgtcgaagctgaccgtgctggttttactaagggcaaaccacttaacaaaattggtatgaaaggccaagatacctgtgaactcttctttgataacgttcgtgttcctaaagaaaatcttttaggtatggaaggtatgggctttatcatgctcatgaaagaattagcgtgggagcgtatgctggttgctattatctgccaagccggggcagaagcggcatttgcacatactgttcaatatacaaaagatcgtaaagcatttggcaaaccaattggagcattccaaaatacacgttttaaacttgctgaacttagaacagagatagatttctgccgtacctatttagatcgttgtatggaattacaactcgaggaaaaattgagtgttgaagctgcagctgctgcaaaatataaaatttcagatatgttttcaaaagttgtagatgaatgtcttcaattacatggtggttatggctatatgatggaatatccaattgcacgcgcttatatcgatcaccgagcaaaccgtatttatgcaggcaccaatgaaattatgaaagaattaatctctagaactctttaa

SEQ ID NO: 42803 - DNA, 258 bp, Acinetobacter baumannii
atgtctgaagaaatgaccttggaagaacgtaaagtaatctatcgcgcacgtcgtggtttaaaggaaattgatgtctattttgacccttatgtgaaaaattattatttaaaggcagagccggcagaaaaagcgttgtttgctgagttggtagaacaggaagaccctgatttactcgattggtttatggaagtatcagaaccaccacgtaccgaattacgtgactttatctataaattaaaacactatgttcatggttaa

SEQ ID NO: 42804 - DNA, 291 bp, Acinetobacter baumannii
atgccgttactatggtggttagttgtaatcagcttactatttatcagctttattttctttttaaagcgtccgcagcttgcaaaaattgcctatttagataaaaaactatggtcgcttgcttatcactcacagaacaccatttctcgcgtcaaaattttaaaaataattgattatcagattttcatagtgatctactttgaaggtcataaaacactaacttctatcatttggtttgatcaaatgtcattagcagagtggaaaaagcttaaaactttagaaaaactctattaa

SEQ ID NO: 42805 - DNA, 1086 bp, Acinetobacter baumannii
atgtctaaagtccaaaaaatatgccaaggtttggcggtaagttttcttgcagcttcagttttatcaggttgttcatacgtcgtgaaaagcggagcaaatgttgctttgggttttacggaaaagcacgtcgttccacctattttggcaatgcaagatgctgaaatggtttgtaatactggtagtgccttaactcctgcaatcatgtcgactaaaggtatgggtgcagatcctactcgtgttgctgtcttaatgtatgctgcttcaggtgtatgcgcggaaaaccaagcattagaacaggagttacgttatttgcgcgcttcaaaagcagggcaggtaacagaagctcaagatgcacgtattgcacagaagcgttgggctgcaattgctgctgagcgacaatacgcaggctataagctctttgctgatcgttgggaatctaaatataaatatcatttaggtgattcttgtccaacaatgcgtagtgatattgaccaaactgtatatttacttgggatgattagtggtcttcaagctgtgaccaacgatattaactctggcggttctgtcaatgttccgaaagatattgctgctattgtagagcgcggtatggtctgccttgataaccaaaaattctggggcgcaccaaatgcaacccgtgcagtgatctggactttattaccaggcgctaatgaagggaagcctgatccatatgagactttaaaacagtccgtgcaaattggtgaacaaaaaggtgttcgtttatctcatgcgttatatgccgtagctgctcaagcgagtggtgacgatgccaaaatccgtgatgcattaaaaacttatgccgcatctcaagcagatgacaaacctgtcaatccgaactttaaattaatcgatagtatggctggtttaattgtgcgcggtatttctgaccgttactggactgagcatactggtgttcgtactggtgatgacggtatgtctcatttctgggatgagaaaaacgaaggctcagctgaattggatgagttgtttgatggtggagctgcatcggaagccccagctgacacaaaaactgcacctgcacagtaa

SEQ ID NO: 42806 - DNA, 567 bp, Acinetobacter baumannii
atgaaagatcatgtactcaataaaaaagtgcttttggtcgcagggtgcatttctgtttctgcatgtttacaggtgtttccggattattttatctattggcgtgaaagcttactcggcgagttctggcgtttatggacagcacactgggtacatgtcggatggattcactttcttttaaatatgatggcatttgcgtgtttgcctttcatatttccccataccaaagtgtggcacattttaagtcttctttttcttttaccaccttttattagcttggtgttctatttttatttgcccaatatcgatgcatatgccggcctttctggtgtactccatgggttatataccgcagttgctttggtttacttgcaataccgtaaagaaaggaattttgcatttctggtcttaggtttaattgttgcaaagttgatttgggaaaatacatttgggcaaacaggaacagcccagctcattggtagtccagttttaactgaagctcatctatatggggcgattggtggagcaatctttggaggatgctattggctcatacaaagattcaaatag

SEQ ID NO: 42807 - DNA, 2196 bp, Acinetobacter baumannii
atgcaagaatatcaagaaaaaagatctggattaggtctgctgggttatatctggaatgaatggatctcaacattcattatcctcattttactattgatgacgctcataattggtaccggggaaatgatccacggtcaattattacgtatcggggaacgtctttatggtgaccctgctacaggcatgcaatattcattcttgcgtgctgagcctgaaaagccgacttgtgatcgacatccgaatattgatgctcaagtaaaagagcaaatgaaagcaaatgcatctgatgattttgcgagcttctttggtgctgcatcggaaagtgatgtccgtgcatccttactggcagcacagcagcaatgtgaagaaaaatatcaggcttacgacaaaactattaaatatatcgaagcaaacccgggagtacgtacttatcgtgcgatcgaaacaggtttctttggtatttttaaattcggtacagagaaccgtgccattttactggtctttatggtactgatttcagcgattactgcatcattgaaatatcaccatattggcttgcgtaatccagcaacaaaaatagattacaaagtgtattctctatttatgttgattggtaatgcgctactaagcttctcggtcattagccagtatcgttcagtcattaattccggggtaacacctacttatgaaacagtaacaatttactggatatggatgattctttttgttgttctgaccttaattagtctgtatcaactatttgtttcacctccaccaaaacgtgaaggcggtaatataggtttagccttactttctgtacctttatatgcctatatggcactaattacaggtattgtatttacgttctttatggattatccaatggggcaagggatttaccttggtttattggttgagttctcgggtatcttcttaaatcttgccttatttatttgggcgggtatgttactcacgcaaacccgtgttatggacttgttcttaaatgtacttcgtccatggaacttggcgccagaaaccttaacttggttaattctgattgctgctgctgtaccgactgcttataccggtgcttcggggattttcgttatcgcggctggtgcgattatttataaggaagtttggaacgcaggcgctcgccgtcaatatgcattagctgtatctgcaatgtctggctccctaggggtggttgtacgtccatgtctcttggtcgttctaattgcgatgttggatagtcgtcatgttacatctgatgaattattcggacatggtatttatgtcttctggctaacagcgtttattttcttgggtgtatctcttttattggctgaagaaaagttccgtgtgaactcgccaaaagtggcactaccaggtatggcacgagctttcgtaccggttattccatatatcttaattactgtagttgtccttgcattttataaatatgcattagatacaggaatgaatgaatttactgcaccagtgattctgccactcgtgcttattgcgatgattctgtacgataaaatggttatgcctaaagaggcaccagctttaaatattcatgaggcgattgttcgtgagcatgaaaagaaatcaccgttcttacagactcatgatccgcatagttcacaattccgtcttggttttggtggtgcattacgttttgcgacatcagaaacagtgggacatatcggtgccttaattattttgatggcattgtctgcaagtgtaggcggcttaattgaacgctctgaagtggtcgaattattaccaactcatttaggcagtatctatatatcactggcatgtattgcactgttacttgcaattattggtatgtgtacagatccatttggtgccgtaattttagtggcagcaactattgctcctgtagcttacgaaaatggtattcatccaattcacttctggatgattgtattggtcgcattcgaatttggttatgtaacgccgccagttgccttgaaccatctattaacgcggttatccgttggtgatgatgaggtgaatgctgccgatgcagaagccaaagagaagtacacaagtttctactaccgatatgaacgttggttattaccaattattgtcttgttctcatcattggtattggtaacttatgcaccactaatactgaaactatttggttggtacaagtaa

SEQ ID NO: 42808 - DNA, 432 bp, Acinetobacter baumannii
atgccactacaaagaaaacaaaactcaaaactattgtggattttaattgggggcttaagcattctcgtcgtgctttttttcgcagcacaatggtttttcaaaaaaactgaaacatcagcgccaatggttgacccacaaccagcctcggtaccagctcctgaaaaaactacaaaaccctctgaaagctcggaacccgtagttcaaacacaaaccgctaactcacagcaacttgtgaatgaagatgtgctcaagcaaccaatccctgctcaagaatctttagctaaagaagaagtatctaaactcaatgacattcatcgtcaattgcaagatcaggaagcgacactaaaagttcaacatgctgatgcagatcaacttattaagctaaaagaagagcaagtgaagcttcttgaggcccaagttaaacaacaatag

SEQ ID NO: 42809 - DNA, 210 bp, Acinetobacter baumannii
atgaagaaacgtttcattgctggggctaaatgtccaaaatgtgaagccatagatcggattgtcatgctaaccaccactgaagacgaatggattgaatgtatcgaatgcggttatagcgaaaatcgtccgactcatattgatgagcctgaaacgcccgctatacctgatgaaattggggtaatacagttcaagcctcgtcgttctgactaa

SEQ ID NO: 42810 - DNA, 2055 bp, Acinetobacter baumannii
atgtggctattagcaatgactttacagcaagcgactctacctactccccgctttgatcaaattacattagataatttaaaacaagatattcaacaggcgatccaagcaggacaagagtttttaaacacccttacggctgcaccatccgagacagaccagcaacttgccgtacttgaacaaattgatgcacttgaaaataacctcagtgaatcatggggagtgttgtcacatttaaatgctgtgatgaacaatgctgaaaccagggaagtctatcaatcactattacccgctttaagtgaatattacactcagcttggacaacacacggcgttatatcagacctatcaactcattcatgatggtcagagctattcaacgctaagtcctgcgcaacaaagtgccatctgtctcgctttacgtgattttaaactttctggtgtcgctttagaaggtgaagagaaaaaacgttacgctgaaatttctgcacgtctttcacagctttcttctgacttctcaaaccatgtacttgatgcgacacaggcttattttaaaccactgacagaagatcaattaaaaggtcttccagaaagtaatgttgagttattaaaacagtacggcaaacagcgtgagcttgaccaagcagtcgcaactttagatttcccagcttattttgccatcatgacctatgccgatgatcgtgccttgcgagaagagctttataaagcttatgtcacacgtgcatcagatcagtctgagcaaacagaatttgacaacagcaaaattatggaagaaatcctgagtcttcgccaagagatggcaaaactactcggttttaataactatgctgaatattctcttgccagcaaaatggctcctgatgtcaaaacagttcatgactttttggtcgacctagctgaacatgcacgtacccctgcacttcaggaagttgccgaactccaagctattgccaaacaagatggtattgatgagcttaaaccttgggataccacttactattctgaaaagcttaaacaacaacagttcaacttatcacaggaagctttaaaaccttacttccctgcaccaaaagtgattcagggattattccagatcgtacagcgtctatatggtattaacatcgttgaacgtgaagctcctgtttggcatccagatgcacgttattttgagttagaagaccaaggtgaagttgttggcggcttcttctttgatttatatgcgcgcacaggaaaacgtggtggagcatggatgagtggtttccgctcacgtatgcaaactgttcatggtttacaaaaaccaatttgctatatggtgtgtaacttcactccacctgtaggcaaccaaccagccttactcacccatgatgaagtcattaccttattccacgagtttggtcatggcttacaccatatgcttactgaagtagataatatctcagttgcaggtactcacggcgttgcttgggatgcagtcgagttaccaagtcagttcatggaattctggtcatgggataaagaaagtcttgatgttttaagtgagcatattgagagtaagcagactttacctcaagagttacttgatgctttattaaatgcacgtttcttccagtctggtatgcaaactttacgtcagcttgaatttgccttatttgacttaactattcacaccaaaactcctgcgttgaatagtgagcaaattcagcagaccttaaatgatattcgcaaacaatatgcggtagttccaaccgtcgactacaaccgtttccaacatagctttagtcatatttttgcaggcggctatgcagcaggttactactcttacaaatgggcagaagttttagcaagtgatgcctttgaccgttttgaaaatgaaggtattttcaatactcaaacgggtaaagaattccgtcaggcaattttagcggtgggtgggaaagatactgctcttgaagcatttgtgaatttccgcggtcgtgagccaaaaattgatgcattgttacgtcatcaaggttggacgaacgataacaaaaccgcttaa

SEQ ID NO: 42811 - DNA, 2433 bp, Acinetobacter baumannii
atgaaaccaaacgacatgacaaaaaactgggttgaccccgaagcaaaagccgaagctgaacgttatgacaatcctattccaagccgtactcttattttagatacgttggaacaattgcaaacaccgcaatctcatgcagaacttgttgaccattttcatattcaagatcagaaaagtattgaagccttaagtcatcgcttaagtgctatggttcgtgatggccaacttatgaaggatggttttaagtttcagttagtggcagaccaacctacctatgaagcaactgtctatattaatagtaaaggtttgggtacagcacatattgatggtcaagatgatttgttattacctgagcgtgagttacgtttagtctttaatggtgatcgggtccgtgttcggcagacatcggtagatagcaaaggtaaaccgtggggtttcattaccgaagttatacagcatcgtgtaaaacagttaattggtaaattgtcggtacatgacggcgaatattttattcagcccaacaatccaaatcagcatcaacctatcccactagaaaaagaattggttgaacatgctaaagcaaatgtcggcgatatgcttcgtgttgctatagacacttacccaacccgggaagaatttgcaacggcacatattattcagtctatggcagataaagccgatactgaaattattatcccgcagaccattttagagtttggtttgccttacgaatttccagatgaagttataaaagaagctgaaagtttcaaagaacctgctgaacaagatcgcgaaggtcgagttgatttaagagacttggcacttgtcacaatcgatggtgaagatgcgcgagatttcgatgatgcagtatatgcggaaaaacgtcctggtggtggttaccgagttgtcgttgcaattgccgatgtgagccattatgtacgtttagattcggcattaaatgaagaagctgaagagcgcggcacttcggtttatttcccacattttgttttaccaatgctaccagaagcattatcaaatggattgtgctcacttaacccacacgtagatcgtctatgcatggtctgtgacctaaaactttctcgtacgggtcgtgttacaggttatgaattttatccggcagtcatgcattcaaaagcacgtttgacctatacacaagtaggacaatattttgaaggtgcaactgatgcaattccaaaagatcgtgatattcataaatcgctaaatacacttttccagctttaccagattttgaaaaacttacgtgttgatcgtcatgcaatggagtttgaaaccattgaaacttatatgacctttgacgagttaggtggaattaaagaaattttacctcgtacacgtaatgatgctcataagcttattgaagagtgtatgttgcttgccaatgtagcagcagcagaatatgccttagaacatgatattccgatgttgtatcgtgtacatgaggcacctgaattctcacgtattcaaaaagtaaaagattttgtaaaactattgggtttacctttccctgaccaaccaactcaggcagactatcaaaaagttattgaggcaactaaagaccgtattgatgcgccaagcattcacgccgtgttattacgctcaatgatgcaagcttattatggtgccaaaaatgcaggtcactatggtctagcttatgaagcttatacacatttcacttcaccaattcgccgctacccggacttattgttacatcgtgcaattaaagctcatctaaaacaaaagccttacccactttccggtgccgctttagatgatgcaggtgaacatttctctcaaacagaacgccgtgccgatgaagcatcccgcagcgtaacgacttggttgaaatgccactatatgcaacaacatttaggtgatgagtttattggtattgtgagtgcggtaactgaatttggcctatttgttactcttaaagatctttatgttgatggcatgattcacattagccaacttggcgatgatttctttatttacgatcaagctagtcaaaacctcattggacaaaatcgtggtcaagtcttcggtttaggcgacgaagttaaaattcaagttgctggtgtaaatctagaagagcgtaaaatcgatttccaactcattaaacaagttactcatgctggacgtgtagttcgtagtcgtgctccacgcacaaccaaaacaagcacccaagcaacagaagaagtttttggtaaaccgtctgtatcaactgatggtgaaaaacctgtccgtaaaaagaaggaaaaaggtaaaccaagctcatatagtaaaaagtctggtaagaaaacctctacaaaagcagaggccaaaccagaaaaagtaaagaaaaaagcgaaacctaaaaagaaaaagtcaaacgccaagtctaaggctgactaa

SEQ ID NO: 42812 - DNA, 873 bp, Acinetobacter baumannii
ttggtttgtgtacaagcatctcaacaaattagccaagcttatgtagagggtgctgaattacatagccaacgtttatatttcgcacctcagcatgttcaaagtggtaaatatcaatttcaaatcggttcagcgggtagtacaacactggttttacaaacgcttctacctgttttgttattacaaaatgaagctaccgaactcaccatttcagggggtacacataacccacttgcaccaacagcagattttattgaacactgctttttacctgctctaacaaagattggaattaacgtcgattttagattaaataaagctggcttttttccaattggtgcgggtgaaattcaagttaccattcagccatggcaacatcgaaacagcttaaagttattagaccgtggtgctttgcaatgcaatgaagcttttgcagcagtattaaatatttcagaagaagcgcagatagcacaacgtgaattaatcacattaagtaaaaaactaaacttaagctctcagcaacaatttcatttaaatggaattagccaaggcaatacagtctatgtgaaagttactcatcaatatcacactcaactgtttacagctttaggtgagatgcgcaaaagtgcagagcaaatagctgatcatttagcaaaagatgtaaatttatatttatcttcgcaggctgttgtagatgagtatttggcagatcaattgcttctgcctttagctttaggtcaaggtggtgaattcaccgcacaatgtattagcgaacatactcgtactcaagcagccatgattgaaaaatttattgattgtgaaatcgaatttgtcgagttaaatccacatcattttcatgtaaaagttaaagtttaa

SEQ ID NO: 42813 - DNA, 1461 bp, Acinetobacter baumannii
atgacacaagttgatattgcagcattatctcctcaagtcgtttggcagcattttcaaacactttgtactattcctcgtccgtcaaagcatgaacagcaacttcgtgagtttttacgaaactgggccgaaagtcggaatttagaaacttatgtagatgaagtaggaaatttgattatccgcaaaaatgcgactctgggtaaagaacatgtgtctggagttattcttcagggccatttagatatggttacacaagccaatactggtacggtacatgacttctttaaagacccgattcgtccagttcttgaggatggctggctaattgccaaagacactactttaggtgctgataatggcattggggtggctttggcattagctgttttaaattcaaatgatattgctcatggcccaatagaagttcttttaacagtcgatgaagaagcagggatgagtggtgcgcggcttttagagacaggtgtgctaaaaggaaaatggctatttaatattgatacggaagagtggggtgagttgtatttagggtgtgctggtagtattgatgttgaggtagagcagccgcttaattatgagccaatccctgaaaatttgaatattgtgaatattcaggtggctggtcttaaaggtggccactctggcgtagatatccatttaggacgtggcaatgccaacgttattttggctcgctttttaaatcaatatttagccccgcttggcgggcatcttgttgagtttacaggtggtacggcccgtaatgctttaccgcgagaagcagtggcaactattgcaatttcgcctaatcagttatcaagcctagaaaagttacttgctgaatatcaaacggcatggaaagaacagctaaagggtattgatgacaacttgcaattaagtattcaatccactggtgctgaagtgaccgaagtgattactcaacaacagcaaaatgaatggttgcaagctttggcaacaagttcttatggggttgcaagtatgagtcaggttctaccagatgtagttgaaacctcaaataacattggggtggtgagactaaatcgagaaggtggaaaagctgttttaatggtccgttcaatggtgaaccaagaagctcaaaattttgccgaaaaaattcaggcacattttagccaatttaatatcggctctacacttacgccgttagtgtcgggttggacaccaaatccagattcggctgctctaaagtgcttacaacaagcttatcaaaatgcatttaatattgagccaaatctaaaagtaattcatgcaggcttagaatgtgggattattgctgaacattacccacatttacagatggtttcgtttggaccggatattcaaggtgcacatgcaccgggcgaacgagttaaagttgatactgtagagaaatgctggaagctactggtaaccgctttggcatctgtagagtaa

SEQ ID NO: 42814 - DNA, 384 bp, Acinetobacter baumannii
atgaaaaaattacaatttattgccagttgcccacaacatggggtgcttgatcatccaccaaatgaatgccatatcactcaagaatatgtagcggctttactgtttaaacaactggggaattatggttttgatgcacagcatattgtgcatgaacatgaaaaggtggaagtaagtattgataatcaccttttaccattgtctattacttgccagcaaaccgaccatgaggggcatttaatgtgtgaaatctctgccaatcctgatgaagaacaagactggtttgagaaaatcgaaacacaaagtattattcgtcagcttgcacaggctgttgaaaatagcttgaaagccgatcatagcttttcagcatttgagtggaaaagctaa

SEQ ID NO: 42815 - DNA, 2271 bp, Acinetobacter baumannii
ttgagcaaaagcaaagttgaagttatgtcacaacccctatttaaaaaagttgcatttattggtttaggactcattgggtcgagtttggcacgggttattgttgccgaaaagttggcgacaactatagtggcatctacacgttcacagaaaactttagaagatgcaaaatcacttggcttaatacaagaagggttttccgatcctgttgaagccgtgaaaggggcagatttagttgttttagccttgccagtgcgtgccactcaaaaagtgcttgagcaaattaaaccttatttgtcagaaaccacaattgtaactgacgtgggaagtacaaaaggtaatgtcgtagatgcagcaaaagctgtatttggtgaagatttaccagcggggtttgttcctgggcatcctattgcgggaagtgaacacacgggtgtccacgcaggtaaggtcgatctctttgcaaatcacaaagtgattttgacgccattaccaaccagtgcagaatgggcagttgagaaactgattcaactttggtcagctgctaaagccgaagtgatatgtatggatgttgccaaacatgatgaagttttggcgcataccagtcatttaccgcacttaatggcatttaatctggtcgagcaacttgcaaaccgtgaagataaccttgatattttccgttatgcagctggtggtttccgtgacttttcacgaattgctgccagcgatcctcaaatgtggcatgacattttctttgccaataaaacagctatattaaatgctgtagatggcttcgagaaacaacttaccgtacttagaaaattgattgaaaacgaagattctcatgcattaatgggtttactcggccatgctcaggcagcacgtcagcatttcaatcatatgttagccaaaaaacctttaatggagaaaaataaggtgacacagcaattcagtatcttaccgggaaataaggcttttaaaggtaaatttaccgtaccgggtgacaaatctgtgtcacatcgctccattatgtttggtgctattgccgaaggcacgactcatgtaactggcttccttgaaggtgaagatgctttagcaactttacaagctttccgtgatatgggtgtaagcattgaaggccctaaaaatggtgaagtgaccattcatggcgtgggtatgcatggcttaaaagcaccagcaagtgcgttgtatatgggtaactctggaacaagcatgcgtttgctttcaggtatgctttctgcacaaaagtttgattcagtgatgacgggtgatgcttcgctctctaaacgtccaatggagcgtattgctaaaccattacgtttaatgggtgcgcaaatccaaacgacaggtgagaaaggtacaccacctgtaagcattactggtggtcagcaattaaaaggtattcaatacgatttacctatggcatctgctcaggtgaagtcgggtattttacttgctggtttgtgggctgaaggtgaaacttcggtaactgaaccggaaccaacacgtgatcatacagagcgtatgcttcgtgcatttggctatgatgttaaaactgaaggcaataaaatttcccttgtgggcggcggtaagttagtgggtactaatattcaagtaccatctgatatttcatctgctgctttcttcatggtgggcgctgcaattactgaaggtgcagacgttgtacttgaagctgtaggtattaatccaacacgtactggcgtaattgaaattttaaaacagatgggtgctgacctgactgttgaaaatgagcgtatcgctggtggagagcctattgctgatattcatattaaaggttcacgtactcttaaaggtattcatatgcctgaagatcaagtgcctttagcaattgatgaattcccagccttatttattgcagcggcttgtgccgaaggccaaacagtattaacaggtgcagcagagcttcgcgtgaaagaatctgaccgtattcaagttatggcagatggcttaaaaatcatgggcattgattgcacacctactgaagatggcatcattatcgaaggtaaaggcaaatctggtgattggtcaccaatctttgctggtggtgaaattgaatcacaccatgaccaccgtattgcgatgagttttagtatggcaggtcttcgtacttctggtccgattacaattcacggtactgagactgttgctacaagtttcccaacttttactgagttggcgaatcgtgcaggcttaacgattgaagttagccaataa

SEQ ID NO: 42816 - DNA, 1110 bp, Acinetobacter baumannii
atgatcaacgatgatcaaaacaaaacgacttctcttagtttagaacaaattcgcgaagatattgatagcgtagatcaacagattcaagagttattaaatcgccgcgcaagccttgctgaagctgttgcgaaagctaaatttgcttctgaagagaatcctttgttttatcgtcctgaacgtgaagcacaagttttacgtaaagttatggagcgcaatcaagggcctttatctgacgtaactatggcccgtttgttccgtgaaattatgtctgcttgccttgctttagaagctccgcaaagtattgcatttttaggcccagaaggtacttttactcaatctgccgtacttaaacattttggtaaagatgcggttgttcgtccgctaccaactattgatgaagtattccgtgaagtagaagcgggtagtgcgcattacggtgtagttccggttgaaaactcatctgaaggtatcgtaaatcatactttagattgttttaaaacttcgaatttaaatgtgattggtgaagttgaattgcgtattcatcatcaattccttgtttctgaaaatacacgtaaagacagtattaagcagatttatgcgcatcagcaaactttggctcaatgtcgtcagtggttagacgcacattatccgggtgttgagcgtgttgccttaaactcaaatgcagaagctgcacgccgtattcgcaatgaatggcattcagcagcgattgcgtccgatattgcagcaggtatgtataaccttgaaatcttgcatagtaatattgaagataatccagaaaataccactcgcttcttagtgattggccgtgaaaaaattccacaaagtggcaatgacaaaacttcattattaatttcagcgcatgaccgtgcaggcgctttattagaaattttagcgccgtttgcaaaacataatattagcttaacgagcattgagacccgtccagcattacctgaaaaatgggcatatgtattctttattgacttagaaggtcatatcgatcaggaaaatgtggctgcggcaatcaatgagattcgtccaatggtaaaagagcttcgtattttaggttcttatcctgctgccgttctttaa

SEQ ID NO: 42817 - DNA, 945 bp, Acinetobacter baumannii
atgcttaaatcttttttctttttatcttctaatttccttctaggctctttaataagtagttccgttttggctcaagcccctgtaaaaaatcaatcaaaaatcgattttcacaacaatcaggcccagttccaaatcaaatctaaaaatactggacatgaatatcttattcaaatttataaaccacctgttgccccaccccaacatggttatccggtactttacatattagatggtaatgcaacatttccaagcgcaatgaatattgcccagtcgattggagcaggctctgcaaaattaggtttagatccgctcattattgtagctgtgggctatcctcagcaaaaaacctttgatgtgcaaaaacgcgcttatgattacaccccaaaaccttctgccgagtttcaagcacaaggtaaatataaatatggtggtgctgaccagtttattgcttttttaaataatgagcttaagcctgaaatcgctaaacagtttccaattaatagccaacagcaaagtctctatgggcattcttttggagggttgtttgtgctttatcatttttttcaaaaacctactgccttccaacgttactttgctgcaagcccttctctctggtttgatcaaggcctgttatttcgagaattagaacaatggcaaagtcaaaagcaaaccgtgttcccaatgctgatgacgacagtcggtacacatgaacaaggtgggccacatacccagtttaatcaaagaattaataaagacgatttctttaaagtcttagaaaataagcgttcggaccaatttagttattggcatttcaataatcctgctgaacagcatatcaccaatttgtatgcgagcttacctaaagcgcttatgtttgcttcatgccaaaatctagaaagctgtaaatctttattcgatgaaccatcgcagaaaacagctaaataa

SEQ ID NO: 42818 - DNA, 1146 bp, Acinetobacter baumannii
atgttggcatatgatgcagatttagaattattccgtgataattttaaacgttttatgaatgagcatattgctccacattatgaccattgggaacgtgaaggaattatgccacgttcagtttggtctcaactgggcgaaaatggctttttatgtgtggatgtcccagaagaatatggtggttatggcgttccaacgtattattcattaatgttagttgaagaatcggctcgtgctggattttgcgcattatcaacagctatttcttgtcactctgagattgcggcgccttatattttacatattgggaccgaagaacaaaaacaatactggttaccgaaaatggtaacaggtgaagtagtcggagcaattggtatgacagaaccgggtgccggttcggacttacagtcaatgcgtactagtgccattttgcaagatgaccattatttgctaaatggttctaaaacgtttatttcaaatggacaacatgctgaccttgtagtgcttgcagtaaaaaccgatcctcaagcgcgtgcgaaaggtgtatctttattattggtggatactcacctggaaggtttcaaaaaaggaactaacctcgacaaaatcggattgcattctcaagacacatctgagctattttttgacaatgttaaggttcctaaaaatcagttactcgggcaagctggacaaggttttgcttatttaatgcaagaattaccgcgtgaacgtacggctatcgcatcgacagcggttggcgctattcgtggtgcaattgatttggcaaccgcttatgtaaaagaacgtcatgcatttggtcaacctatttcacagttccaaaatactcgttttgttttagcacaagcaaaaattgatgagcttgcgacaacggctttctatgagcgaaatgttgctttatatcaagaaggtaaacttgatgttgagacggctgcagcactgaaaagttttagtacagatatgcaaatgaaggtggcggatgacctattacaactatttggtggttatggttatatgactgaatatccaatttcacgcttctttgtagatgctcgtattcaacgtatttacggcggtacaaatgaaattatgaaagaaatcgtagcacgtggattaatcggcaaagcttaa

SEQ ID NO: 42819 - DNA, 1359 bp, Acinetobacter baumannii
atggctaaaaaaccgatttataaatcactttattttcaagtgattattgcgattattgcgggtgttttggtagggcatttctcaccaagtacaacgcaaattgttaatggtgttgaacaacatattccaggtttaggtgagcaactcaagccattaggtgatgcttttattcgtttgattaaaatgatcatcgcacctgttattttctgtacagtagtaagtggtattgctggtatggaaagtatgaagtcagttggtaaaactggcggtgttgcgttgttatacttcgagatcgtttcaacaatcgcgcttctgattggccttgtggtgattaacattgcaaagccaggcgtaggaatgaatgttgatcctgcaactctggacacttcaggtatccaaaaatacgtcacttctggtgagtcacaatctaccattgatttcttgatgcatatcatcccagatacggtggttggtgcatttgcaaacggtgaaatcttacaggtccttctttttgcaatactatttggttttgcacttcataagttaggtgatgcaggacgcccagttttaaagttaattgatcaaattgcacacgtgttctttaacattgtgaatatgattatgaagcttgcgccaattggtgcatttggggcaatggcgtttactatcggtaaatatggtgtaggttcactggtacagttaggccagctcattatctgcttctatattacgtgtttactctttattttcttaattttgggtacaatcagccgcattagtggattcagtattctgaaaatgattcgcctgattcgtgaagaactattaattgtacttgggacatcttcttctgaatctgttttgcctcgcatgttacgtaaactcgaaattgcaggttgtgaaaagtcggttgttggtttagttattccaacaggttattcatttaaccttgatggtacgtcaatctatttgactatggctgcaatctttattgctcaggcaacgaatacacagcttgatattcaacatcaaatcactttgttgctggtactcctaatctcatctaaaggtgcagcgggtgtaacaggctctggctttattgttatggcagcaactttatctgcagtaggacatattccggtagctggtttggcattgattttaggtattgaccgcttcatgtcagaagcacgtgctttaaccaatcttgttggtaactctttggcaacgattgtagttgcaaaatgggtgggcgctttagacaaagataaactcaatgatgctttaaacaacccagatgaagttgacagaaaaatgttggctccaaaaaatcctcaggttgcagaaggtttagattaa

SEQ ID NO: 42820 - DNA, 1014 bp, Acinetobacter baumannii
atgaatactaaacgtaatatttataaagatgctgaacatccctttgctcaatatgtccgtattttaggtaaggggaaaactggatctcgctcactgagttatgaagaagcctatcaggcttttactatgattttaaaaggcgaagttcttgacgttcagttgggtgcttttttaatgctgctacgtgttaaagaagaatcgattgatgaacttgcaggttttgtacaagccacaaaagaccagcttcattttgcacctttagaagttgacttagattggtcatcttatgctggtaaacgtaaacattatccttggtttttattagcggctcttacccttgctcatcacggttataaaatcgtaatgcatggcgcttccggacataccattaaccgagtttataccgaacaagttttggaatatttagattataaaatttgccattctgaacaagaagttcgcacccaattggcagaacaaaatttcgcttacttaccgctagatatgatttcaccggttttaagcgaattaatatctctaagaaatgtcatgggattgcgttcacctattcatactttagcccgtttaattaatccttttaacgctaaggccaccttacaagccatattccatcctgcttacagaacttcccatcagcatagtgcacttcgcttaggctatcaaaatagcgcagttattaagggcgaaggcggcgaatttgaacgaaacccagacgcgaaaacgctgatttgcggaattaaaaatggtgaactctatgagcatgagttgccaaagcttacgcctgaacgtagcccaattgaagaagagttagacttagcaacctttaaagctgtctggcttggtcaacagcatcatgaatatggggaaatggctgtaacagaaaccatgggtattgcgttatatgccatgggcgtggtttctaatttcgaggaagcgatgcaaaaagcaaaagtattatgggaaacacgaaatttaagcaatcttaattcgtag

SEQ ID NO: 42821 - DNA, 273 bp, Acinetobacter baumannii
atgaatattgaacaaatgctatctgttttaaaccctgagattgtagagcgtttaaaaacagcagtagaaattggtaaatggccaaatggtgttgctttaacgaaagaacagcgtgaaacatgtatgcaagctgttattgcttgggagttaaagaacttaccagaagaacagcgtagtggttatattgaccgtggtactaaagaagagggtgaggtttgtgaagatgatcatcacaagcatgagcctgaatttaaaccgattcgttttgtttaa

SEQ ID NO: 42822 - DNA, 909 bp, Acinetobacter baumannii
gtgcaaatttcacataagtccttcagaaacgtcgggttaattggtcgaccagataaatcatcagttgtagaaacactatgtttaattcatgaccatttgctaagtttaggcctaaaccccatttttgatcaggaaactgccgaattagtgccctatgatcatgcgcaagtcgttagtcgtcacttattaggtgaagtcgctgatctggtgattgttgtaggcggtgacggttcattgcttcatgcagccagagctttagtgcgctacaatacgcctgtaatcgggattaaccgtggacgtttaggttttttaaccgatattaagccttcggaagctatttttaagcttgatcaggttttacaaggtcatttccagcttgatcgccgtttcttgcttgaaatggaagtacgtactaatggtgaagtcatttatgatgcaattgctttaaatgacgtcgtactacactctggtaagtcggtacatatgatcgattttgaactcaatatcgatgggcaatatgtttatcgccagcatagtgatggtttaattgtttcgacaccaaccggttcaactgcttatgctttatcaggtggtggtccaattttacatccaagtatggatgctattgcattagttcctatgcatccccatacattatcttcacgcccgatcgtagttggtgggcaaagtgaaattaaaatcgtcattcgcgaaaatcgggtattaccgatggtaagtgcagatggacaacatagtgtctctctcaatgtcggtgatagtttgcacatccgcaaacacccatttaaattaagtttattacacccacctggttatgatttctatatggcttgtcgtaccaaattgggttggaaccaagattttgaatcttttcaaagagatgaatcatga

SEQ ID NO: 42823 - DNA, 2397 bp, Acinetobacter baumannii
atgaagtttgaacgtggtatcggtttcttcgcgctaattttttccattttggtgattggtgcttttattgctcttagtatctatctgattcgtttagataatattatacgtgaaaaatttgaaggacagcgctgggacattccggccaaggtgtttgctcgacctttggaaatttataataatgcgccaattactcaagcaaatttcacccaagaattaaaattactaggttacaaaacttcaagtaattatgacaagtctggaacctatgttgctcaaggcagcaacatgtatgtccatacacgtggttttgactatggcgacagcgtagagcctgaacaggttttagaactgagttttgcaaacgaccaagttgtagaagttcgcagtactaaaccttcctcaacgggggttgcccgtttagaacctttattaattgggggcatttatcctcaacataatgaagaccgcgttttgattaagcttaatagtgttcctaaaccacttattgaagctttaatttctacagaagaccgtaacttttatcatcaccacggtatttcaattcgtggtacagcacgtgctttggtaagtaacgtaactggaggacgtcgccaaggtggttcgaccctcacccaacagttagtcaaaaacttctatctaacccctgaacgcacacttaaacgtaaagttaatgaagcattaatggctttacttattgagttgcattacagcaaagatgaaattttagaagcatatttaaatgaagtgaatttaggccaaaacggtaactattcaatcaatggttatggattggcctctcagttttatttcggtttaccactacgtgagcttaatgttgcacaacaagcttatttagtcggtttggttcaaggtccatctttatataacccttggaaaaaccctgaaggggcaaaaaatcgccgcgatacagtattaaataacatgcgtgtcatggggtatttaactcaagcagagtatgaaactgaaattgcgcgtcctttaaatgttctaagcaaaccaagcctaggtccagcaaaattccctgactttttagatattgtgcgtcgtcaattacgtaccgaatatcaggaaagtgatttaaccaatcaaggattacgtatttttacgaccttggacccaattgctcaaacacaagttcaaaacgcctttaaagcttctgtagagcgcttagctaatagcaaccctgctcgcttgaaaaacctgcaaggggctgtactgattgcccatcctgaaaatggcgaattaattgcagctgtcgggtcaacgcaagactttactggttttaaccgtgccttagatgcaaaacgccaagtcggttctttattgaaacctgtcatttatttgagcgcaattgaatctggacgttataactgggcaagccagattgaagacgctccaatcagtgttccagtagatggcggtaaaagttggacaccgaagaactatagcggcggtggtcatggaattgtgagtttaagtgaagccttagcaaattcttataacctttctgctgtgcgcttaggtcaagagtttgggttatctacatttaccaacaacttaagaaaatttggtgttgaatcgacaatcccggcctacccttctattttcctgggtgcagttaatatgtcaccaatggaagtactgggtatttatgaaaactttgctacaggcggtttcaaatatccgactcgtgcgattcgttctgttgtagatgcaaatggacgtttacttgatcgttatggtctaaacgtacaacaaaccattgatccatctgtcggttatatcatgaactatggtttacaacaggtcatgtcatcaggtacaggacgtgcagcctataacagcttatctccagctttaaaattagcgggtaaatcaggtacgactaacgatacacgtgactcatggtttgccggctattcaggtaatcatgttgcagtagtatggttaggtttagatgacaataaagttactggtttaacaggttcatctggtgcattaccagtatggattaatgtgatgaaacaattacgccagacaccagtaaacttacgtcaaccagactctgtacagtggcaatggattgaccgtgcatcgggtgacttatcggcacaagcttgtgatggtgccatgtatattccaatgctagcacatacagtcccacatcgtgctacgccatgtggagcaccgtattatcaagttgatccaacatatacgccacaaagtgataacacaattcctgagcctcaggatgataataccgacagttatattcgtgaaagtgaaaaccagatggaacaagatctgtcgaataacacacgaatcatttcaagtggtagttataacaactaa

SEQ ID NO: 42824 - DNA, 552 bp, Acinetobacter baumannii
atgttaaagaaaggtgttttttatattggtgctgtacttatggtcggctgtacaactttaccagatcattcagctccaaaagagaaaacacctcctgtttctgaaaagaagaagtccgagtcctcatctggtgtaaaaattacaccttatgatcatccggaaattcaacgtaaaagtttacaagtgattgttcctcagcagaaaaagccgcaacgctttaatgatgatggaagccagttacccgcttttaaaactttaatgcaaaaaaccgagcaggcttacaaaaaccaacaatggtccgaggctgagcgctacgctcttcaagcacagcgtttagcgccacaggcagccgagacttatttatttctggcattaactgcaaatcataaacagcaatattctaacgctgagtctcttgcaagacgtggtttaagctttgcgcagagtcaagccatgaaaaaacaactttggttggtcattttaaaagctggacaacagcgcaataacccaaaaactgttcaagaagcacaacaagcattgaaagctttctag

SEQ ID NO: 42825 - DNA, 900 bp, Acinetobacter baumannii
atgcccaaaccgattgtcgatgtcgcaatagctatcttaattcatcgtggaaaaatattagtgggatggcgtggtgaacagcagcatcaaggtggaaagcatgagtttcctggtggaaaggtagagcagggtgaaacgcctgaagaagcctgccgtcgtgaaatttatgaagaagtcggtattggtttaaaagattggcatcaatttgattatattcaccatgaatatgatgacattattgtcaaccttcatttgttccatagttatgtacctgatgagttattaaatcttattcatcagccttggacatggtacacacgtgaacagctacttcacctaaacttcccgaaagctaataaagacattattaaaagattatattggcctcattttattaaaattagccatacacttacatctgtagagaatagtgatgctttattatattggcgtatagaagatgaatttggcccgcgagaagtagaacaattaacggccttagatgaagggcaacgatcaaatttaattataaatgtagatatttggcagcaattgagctccgaattaaaaaaacagatcaagactgttcatttaaaacaatctcagctcatgagtttacataaaggtgacttagaggtaggaatacgttttattgctgcttgtcacgatgcagtttctttacaacatgctcagcaaattggctgtgatgccgtttttgttagtcctgtaaaagtgacggctactcatccggacgttagtgcattaggatgggatcgttttgctgatttaatcgagaagtgccaaattcccgtatttgctttgggaggcatgagtcctgatgatttagccacagcacaacaacatggtgcatatggcttggcgggtattcgtaatttttaa

SEQ ID NO: 42826 - DNA, 171 bp, Acinetobacter baumannii
atgaacgcaccttttagcttatttacacgcaatacagattcagctcatgccttaccaatgctgcattctaacaacctattcgccttaggtcgtgaaattcgaattatgcatgctggcgaggaatatcgtttacgccttactcgcaataaccgtctcattttaactaaataa

SEQ ID NO: 42827 - DNA, 1359 bp, Acinetobacter baumannii
atgagatcaaatcgttcatccttgcagtcacaactggttaaaaccaccatgtggagcagtattgtggtggggctactggcattaagtttactcaccatattttcgatttatcacaacatgtcagtacaagatgaaatcatggatgaaatttcagataccttactggtttctgacctttctaaacactcgatgaagcagtttgacgagctgagtgatgaatttgatattcaatatgagttattagatacaggtcaggtgcttacccattctcatacctatcagcatgaactttttgaaaaaggtaatttatcagaaggtttttcatatttttggtttgatggccaattatggcgtagtctggctgcacaacaagaagattcagagctacaagttgaagtttttcagcccattagtacacgtattgaagaagtattaaaagcacttgctggatatagtggccttatggtgctgttctggttactacagtgggttattgtaagttggcgtaccgaacaacaattggctgcgctgaatttactctctaaacgtattgctcaaaaaactgcctcaaacttagagccaattcaagaaccagatgttattacagaaattcagcctgtgattgatgctttaaatcagctacttgcaaggctacaaagggcactggttgctgaacagcgttttactgcagatgcttcacatgaactacgttcacctttatcagccatacaaatgcgtcttcaggtgttgcaacggaaatatcagcatattccagagcttgatcatgattttgagcgtattcaagaagacgtttcaagaagtacaaaaatactggaaaatttattgttactcgctcgcttggaacctaatgaaacagagcaattagaactctctaagagtgtcgttgatttaaatcatgtattagctagagtgatagatacagtaaatattgatgcacaagccaaacacatggtaattgagacaaacattctgtcaaatgaaaccaaaacatttgcaaatgaagagctcatgtttattgcttttagaaatctatttgataacgctattcgttatagtccggctttgggtgctattcatgttgagctaagccagtaccagcaaaagctgaagatttctatagaagatactgggaatggtgtggatgatgaagtcttaaggcgtttaggacagcgtttttttcgtgtattagggacaaagcaacaaggctcagggttagggttatcaattactaaaaaaattattcaactccatggtggggaattacattttatgcatgcaagccaaggtggcttaaaagttgaagtaatactgccttttaaccgtgaaatacaaaaatag

SEQ ID NO: 42828 - DNA, 663 bp, Acinetobacter baumannii
atgagaattttgcttgcagaagatgatcgctctcaagctgaaagtattcaatcatggttagaattagacggttatcaagtagactgggtagaacgtggtgattatgcccttacagcaattgagcagcatgattatgactgtattttgcttgatcggggcttgccccaactgactggtgaaaaagttttaacaaccatccgccacaaacaaaaaaacgttcccgtgatttttattaccgcacgtgacagcattcatgaccgagtagaagggctagatttaggcgcaaatgattatttggttaaaccatttagcctagaagaattgtctgcccgcatccgcgctcaattacgtaaacaaactctgagtcagcaatcgattttaacgtggggtgatttgcaacttgatacacaagcgaaagttgtattatgtgctggtaagactatcgatttaacagcaaaagaatttcaaatattacgtaaacttatggttcatcctgagcatattattacccgtgatcaattagaagaagcactctatgcatggggcgaggaaatcgagagtaacgcaatcgaagtttttatttatcagcttcgaaaaaaaatcggaagcagcagtattaaaaccatacgggggctaggctaccgtatgggagacttaaaatga

SEQ ID NO: 42829 - DNA, 360 bp, Acinetobacter baumannii
atgaaaatgtttaaagtaattttgatgactgcgggtatggcaactgcgggtgtggttgtagcaaatacacctgtgaatcaggcagctattgctccagcgacagttactacagtgaaacaagctttagcatcaaaagataatacacctgtaaaattacatggtcaggtcgtaaaatctttaggcgatgaaaaatatcaattccgcgataagagcggtagcattacaattgatgtagatgatgagctttggcaaggacgtcctgtttcagccaatacaaatgtgactttaattggtgaagtagacatagattataagcctttaaaacgtgtagaaattgatgtagatcaagtccagttctaa

SEQ ID NO: 42830 - DNA, 1758 bp, Acinetobacter baumannii
atgaatatacatgtagaaatagacacacattggtgtctagaacaactattacaagaaggccgtatcactgaacgagataagttacttgtacaaaccacaaataggcaaaaagatcagttgaaatggcatccattacagtggattgcgcattttaatttaaaagaccaacatcatgtacaagcacatttaagtttaaaccgtctgtgccaatggtttgcagatcgggcgcaattacctttatttgtgattgatcctttaaaggcagatgtgagtgctttaactcaagtcatgtcgcaagagtttgcgatccgtaatcatattttagctgtagaagtccatgcggaccggattgtgataggaacagaccagccttttcaaacagactggctaaataatttagagaagagtttagcacccaaaaaaattgaacgggtatttctcaaccccgagcaattacaacgttatttacgagaatattatcaagtcagccgagcagtaaactcagctcagaaagacgtagctcatgaccgtgataacaaaggtgtagaagcgcttttacaacttggcgatagccaaaaccctgatgccaatgatcagcatattgtgaaattagtagactggattttgcaatttgcatttgaacagagcgccagtgacattcacatggaatcgcgtaaagacaatggcaaagttcggttccgtatcgatggtgttttacataccatttataatatgccttcaaatactctgaccgccgtgatttctcggattaaaattttagggcggctaaatgtagcagaaaagcgtaaaccgcaagatggtcgtttaaaaacacgtacgccgaaaggacaagaaaccgagctacgtttatctaccttaccaacagcgtttggtgaaaaactggttatgcgtatttttgatccagatgtactagtacgttcttttcagcaattgggttttgaccagtctttattacagcaatggcagcgtattacgcaaaatagtcacggcattattttggttacggggccaacaggttctggtaaaaccacaacgctatattcttctttaaagcagctcgcaaccgagcaggtcaatgtttgtaccattgaagatccgattgaaatgctagagcctagttttaaccaaatgcaggtcaatcatgcaattgaactgggctttgcagatggtgtacgtgcgcttatgcgacaagacccagacattattatgattggggaaattcgtgaccaagatactgcaaatatggccattcaagctgcactcacaggccatttagtattatcaactttacacaccaatgatgcgccgtctagtttgacccgtttacatgatttaggtgtacaaccatttttaacagccgcgactattttaggtgtattggcacagcgcttagtgcgtaagctttgcccaaactgcaaacaacaaactcatattaatgaagatgaatggcagcacctaacatttgactacattatggaaatgccagaaaaagtttatcgggcagtaggttgtgaagagtgccggcatacgggttataaaggtcgaatcggcatttatgagtttatgccagttagtcttgagcttaagcatcttattagcagtcatgcgacattaaatgaattaagaagccaaactaaaaaagaaagtgtagagcctttaagaattgcaggagctcgcaaagttattgaaggtttgaccaccttggaagaggtattgcgggttgttccattaaattaa

SEQ ID NO: 42831 - DNA, 1269 bp, Acinetobacter baumannii
atgaatcttccaatgacaatgtcattacaaaccgtatcttttgaagagtttattaccaccattgcggctgcattaggctgcggcttattagtaggtctagagcgcgaacgaagtaagttaaaacacgaatataaaactttcgcgggttttcgttcttttgcaattagttccctacttggagcaatttgttttttatttggtaccgcaattgggattgtaggcgctctacttataggcgcgatcagtatcgtatctcttaaaaatcagccaaatgatcccggtgtcactacagaacttgcctttattatgacttacttcattggggcactttgtatctggaatatttcgttagctgcaggactcgccgtgatcatgacgattatcttattggcaaaacaatcaatgcacggcattgccagtcaatggattaccgaatcagagttgcgcgacgggatttttttacttgctctacttctaattgctttacctttagttcccaataaacctttttggggacccgttctaaaccctcatgtgattttaaagttactgacgttgattttatttgtacaagccctcgcacatattgcaaagcggcttttatcctctaaaaatgccttattactttcttctttagcctcgggttttgtttcaagtactgccaccatcgcgagtctaggcttagaagtacgctctggtcgcgcgaatgcaaaaacaaatgcaggtgcagcattaatgtcatgcgtttccacattggtacaaaccttaattattgtcgtcggtataagtttggcgtggttcaaactcattatatttccaacgctcattgcattggcttttttagcagtgtgggcttttattttattacgtaaagcagaaccaagtacgacttcacccgagctagactccagaatgttcagcttaaaagaagcggtcattattgcaggaacacttacgctcattcaggcaggtgtttatggcctaagcctatatttaggtaatgcaggcttaatcgcagggacactacttgcctctttgttcgaaatacatgccgctattgcagcagtgattgtacaaggtgaaccaaataactctcagacgtcgttattaatcgcgttcatgggtggctttgctgttcatgcaattgccaagagcattaactctgccatttctggtggactgcattatgcccttgctttcatacctgcccaaattttgcatatgacaatatttattggcttgctatggatgaacatacattggttctaa

SEQ ID NO: 42832 - DNA, 729 bp, Acinetobacter baumannii
atgaattctgtcaccctcccaatagtcgggcacatgtgctcaccttttcgagaaaaatttggtattccacgtcagcctaatttggtcaatatcgagtcttatatcgaaatggtagaaccttataatgacttattagcttttgagggaatcgaacaatttagtcatctctggctcatctggcagtttcatgacaataaaaatcaggagactgcgactaaattccggcctcaagttcgcccaccacgtctagggggcaatgaaaaaattggtgtgtttgcgacacgtagtatgtatcgtccagcgcctataggcttatctgtagtacgtttaaacaaggttgaaaaagtcggtaaatcattaagagtttatgttactggcagtgatttattaaatggcacgccaattttagatattaagccttatattcactattcagatgcaattgttgatgctcaaagtggttatgcgcaggccgaaccagaacgaaaatcggtcttgtggtctgaaaatgcattgtctacccagcagtctctttttaaaaataaagaaattaatgcacaatatcttgatgaattagaacaagtattgtcattagatcctagacctgcctatcaagaagaccctgaacgagtctataaaatgaaattttcgaattttgatattcattttaaagttaatggcaatgtcattacagttgttgatatggtgaaagacacatcgctcgtttaa

SEQ ID NO: 42833 - DNA, 780 bp, Acinetobacter baumannii
atggctgcttttaacgttgaacgcattactcatgtgcaccactggaatgacacccttttcagttttaaaactacacgcgacgctagcttacgttttaaaaatggtcagttcgtgatgatcggacttgaagtgaatggcaaaccgttaatgcgtgcatattcgattgcaagtgcgaactacgaagaagagttagaattcttctcgattaaagtacaagacggtcctttaacttcgattttgcaaaaagtacaagttggcgacgaaattttagtttctaaaaaaccaacaggtacattggttcatgatgaccttttacctggtaaaaacttgtatctattatcttctggtactggtcttgctccattcttgtcaattattcgtgacccagaaacttacgaacgctttgaaaaagtaatcgtggttcacggtacacgttatatttctgaattagcttatcaagacctaatcttgaacgaattaccaaacaatgagttctttgaagaattaggtattaaagacaaacttgtttactaccctaccgttactcgtgaacctttccatactcaaggccgtgtaacaactgcaattgaaactggtgctttatttgaaaaaattggtttaccacgtttcaaccgtgaaactgaccgcgcaatgctttgtggtagccctgcattcttgaaagatgttgctgcgttacttgaccaacacggtttagttgaatcacctcgtatgggtgaaatgggcgactatgtcattgaacgtgcgttcgtagaaaaataa

SEQ ID NO: 42834 - DNA, 870 bp, Acinetobacter baumannii
atgtctgttgttgcatttaaacaagtcgatgtttttacttcacaagcatttaaaggaaaccctgttgcggtcattatggacgccagtaccttaacatctgagcagatgcaagccattgcgaactggaccaatctttctgaaaccacatttgtattgccagccattgattcacaagctgactatcaggttcgaatctttactccacaaagcgagttgccgtttgcaggacatcctactattggtacagcctatgctttgcttgaggcaggtctaattaaagcgaaagaaggtcggctggtacagcagtgcgctgctggtttggtgacgctgaccgtgaatgactcaaatcatatttcctttgagttacctaaacccaaaattacaccactcgatgcactgcaaactgagaagttggccgagattttaaaatgtaaaatcaatactcaatggaatgccgcattggtggatgtcggagcccgctgggttgtattgcaagctgttaatgctgaggctgttttggcaagtcagcctgatctaaatgctttaaagcaatttagtttagatatgaaagtaacaggctctacaatttatggattttatgaagaaagtaatgagcataagcgcatagaagttcgttcatttgctccggcatatggagttaacgaagatcctgtttgtggtagtggtaatggtagcgtggcatctttcattcgttaccatggtattttgcctgcgcaaaatgatgtggtgctttcttctcaggggcaagctttagggcgtgaaggacagcttcaacttgaattacatcaagataaaattttagtgagtggagctgctgttacttgtatcgacggtacgattaagttgtaa

SEQ ID NO: 42835 - DNA, 1461 bp, Acinetobacter baumannii
atgtacaaatataaaaaagtgagtgatgaccttactcttcaaattcagaatggtaggcaacctgtgggttctcggttgccatcaattcgagactgtgcccaacattatcaagttagtattaacaccgtaaaagaagcttatcggaagcttgaagaccaaggtttaatttctgttcgcccccagtctggctactatgtttgccatacaccttcaaacttgccagatcttgaggagcgttatatcagtgaagaaaaagtgcccctttcaggaattagctgttttctcgcgcaaattgttaaaaagcagatggaccccgactatgtcaatttggccctagcttgcccatctggtgaaaacttctacccgattgaacgcttaaaacgtttaactgctcaggttttacgaacacagccagatatttttaaaagctatactttaccgcccggctctatacgtttacgtactcaaattgctagacgtagtttacagcttggtatgtttctatccgcagatgacattgtgctgactcatggcactatggaggctttaagtctcgcgattatggcaaccacccaagcaggtgacagcatagcgcttgagatccctacttttcataacttatatccacttcttcagaatttaggacgaaaaattgtagaagtgcctacttcgccgcatacagggatgtgtctagacgcacttgaagaactcttaaaatctcaaagcgcacaagccatattaactattccaacaggacataatcctcttggttttagcatgcctgaaagtaaccgacgtcgtttagcagagctcgctaatcaattccaaattcctgttattgaagatgcgatgtatgccgaattacaactcaccgaacctctactacccaacattaaggcatttgaccaaaatggatgggttttggtttgtggcagctacaccaaaactgtggcacccgactatcgaattggttggctagaagctggacgcttccgtaatattgtgcagcagcttaaatttacaaccactgttgccgagccagctttactcacagaaacgttgggactttttttagaaaatggcggatatgatctacatttacgtcagctcaaaaaacgctatcaacaacaaattgacaccatcaaatcttatatttgtcgttattttccagtcggtactcgagtcagtcgtccacaagcgggatttattttatggttagagctacccgaatcaattgataccctagaactgtttcatcaggccatggatgaaaaaatcttatgtatgccgggaattttgtgctcggctgataaacgttttagtcattgtttacgtattgcagcttgttttgagttaaatcctaaaatgttaaatgctttgatgcgtttaggagagttagcaaaaaatatgctacctgtacaaaaagctatagatcaaatccctactaattcagtaggttga

SEQ ID NO: 42836 - DNA, 1371 bp, Acinetobacter baumannii
atgaaaaccgaacttctctctcccgcaggttcacttaaaaacatgcgctatgcatttgcctatggtgcagatgccgtatatgcaggacaaccacgttatagcttacgtgtacgaaataatgcttttgaccatgaaaatttaaaaatcggaattgatgaagcccacgctttgggtaaaaagttttatgttgtggtgaatatccagccacataacagcaaattaaaaaactttattcgtgatcttgaaccgattgtggctatgcagccagatgctttgattatgtctgatcccggcttaattatgatggtacgtgagcattttccagaaatgcaaattcatctatcggttcaagccaacgctattaactgggccactgttaaattttggaaagactacggcctaagccgtgtgattttatctcgtgaattatctttagaagaaatagaagaaatccagcaacatgtgccagatattgaactcgaagtttttgtacatggcgctctatgcatggcctactcaggccgctgtttactttctggatatatgaacaagcgtgatgccaaccaaggtgcttgtaccaatgcttgccgttgggactataaactgcatgaagcccaagaagatttaaacggcgatgtaattccagtcactcagctaaatacaccagaaaagtcttgctgctcatcaggacaatcagaaacaacctcggttcaaactttactcgtacaacgtaatgatgaagaaatgtttgctgccgaagaagatgaacacggcacctattttatgaactccaaagatttacgtgcggtacagcatgtagatcgtttaacaaaaatgggtatcgcctcactcaagattgaaggccgtactaaatcctatttttactgtgcccgtactgctcaaatttatcgaaaagccattgatgatgcattagcaggtaaacctttcgacccaagcttaatgactcaactcgaaggattggcaaatcgcggttataccgaaggctttttaagacggcatgtgcatagcgaatatcaaaactatgctgacggatcatcacatttcgactaccaacaattttgtggagaggttgtagaacgtcacggcgattatattcgcattgaggttaaaaaccgctttgtggttggtgactcacttgagctgatgacgcctcaaggcaatatcccctttaacttaaccgaaatgcgcgatttaaaaggcaacacaattacagatgctaaaggttctgggcattttgttgaaattccgctctcacaagatgttgatatcagttatgccttactcatacgcaatttgccgcatgccaaggaaaacattactgcttctacattagcttactcagcgagttaa

SEQ ID NO: 42837 - DNA, 264 bp, Acinetobacter baumannii
atggcacttttgattacgagtgactgcatcaattgtgatatgtgcttaccagaatgccccaatacagctatttttgaagggagcaaagtttatcaaattgatccacttcgttgtacagaatgtgtaggcttttatgatgcgcctacgtgtaaggcggtttgccctatcgattgtataaaaccagaccctgcacatattgaaaataaagtgcaactattagagaaatttaaagggttaaatttactcgacgaatctatctcttaa

SEQ ID NO: 42838 - DNA, 330 bp, Acinetobacter baumannii
atgtcttatctttatttagcaattgcgattgcttgtgaagtcattgcaacttcagctttaaaagcatctcaaggttttactgttcctattccatccatcattacggtggtgggctatgcaattgctttttatttattgtccctgactttaaaaacaattccgatggggattgcatatgccatttggtcaggtgcaggtattattttaatttccgcaatcggctggatattttacaaacagcatttagacgtggcagcatgcattggtcttactttaatgatcgcgggtattatcattattaatgtgttttctaaaaatactcatctttaa

SEQ ID NO: 42839 - DNA, 777 bp, Acinetobacter baumannii
atggaacaggttgcaaaactagtgattcgcgatttacataaaacattcggcgatcatgaggtacttaaaggaatatcacttgatgcaaatgccggtgatgtaattagtattattggttcatctggttcaggtaaaagtaccttgctgcgttgtatcaactttttagaacaaccgagcaatggcacgattaagctcaatggtgaaaaattacgcacggtctttgataaaaaaggcaatttaaaagtggttgaaccaaagcaactacaaaaaatgcgtacccagctgatgatggtatttcagcactttaatttatggtctcacatgacagtattggaaaatgtcattgaagggccaatccatgtacttggagtaaagcgttctgaggcggaagaacgtgcacgcaaatatctacgtaaagtgggattacctgaaagcgttgaaagtaaatatccggcatttttatctggtggtcagcaacaacgtgtagcgattgctcgtgctttggcgatggaaccggaagtgatgttatttgatgaaccaaccagtgcgcttgacccagagttggtaggtgaagtactaaaagtaatgcagggcttggctgaagaaggacgtaccatgattgtggtcacacatgaaatgggctttgcacgtcatgtatctaatcaggtgatttttttgcatcaagggaaaattgaggaacagggccatcctgatgaagtactcaataacccgaaaagtgagcgtttaaagcagtttttaacaggcagtttaaaataa

SEQ ID NO: 42840 - DNA, 714 bp, Acinetobacter baumannii
atgattgaaatccttcaacaatattggcagtcatacctttggaccgatggcctacaaatgactggtgtggcgatgactgcttggttattggtgctttctattggtattgggtttttgcttgctgtgcctttgtcacttgcgcgagtatcagaaaatatctggttgcgtggtccagtttggttgtttacttatgtttttcgtggcacaccactgtacatccaactactgattatttattcgggtatttatagctttgattatatccacgagcatcagacactcgatgcattttttcgagagggtataaattgcaccattttagcattcgcgcttaatactggtgcatatactactgaaatcttcgctggagcaattcgatctattccacatggtgagattgaagctgcccaagcttttggtatgtcaaaatggaaactctacacacgtattatcattccgtcgatgttacgccgtgcattgccgttttacggcaatgaagtcattttaatgttgcatgccacaaccattgcatttacagcaacagttcccgacattttaaaaattgcgcgtgatgtaaatgcggcaacctatgacacttttagtgcttttggaattgctgcggtgttgtatgcggtgttggcttttattttgatttggatatttcgtaagttggaaaaacgttggttggcatttttaaagccatcgaatcattag

SEQ ID NO: 42841 - DNA, 690 bp, Acinetobacter baumannii
atgtctttttctggctatgggccactccttcttagcggaacatggatgaccatacagcttgcgctgttatcactcttgctttctgtcattattggcttaattggtgcgagttcaaaactctctaatattaaagccttacgttatattgcaaccgcctataccacgctcatccgtagtgtgcctgacttagtgattatgctgctgttattttatagcttgcagttgggtctaaaccaaattactgaagcactgcaaatggatcaaattgatatcaacccatttgtggctggtgtgattaccttagcgttcatttatggtgcatattttaccgagacctttcgtggtgcatttcaatcagttccaagggggcaaattgaagcagcaatggcctatgggatgacgccgtggcaggtttttcaccgtgtattattccctcaaatgatgcgttttgcattgcccggcattggtaacaactggcaagttttgattaaggcgaccgcactggtttccattattggtctaactgatatcgtaaaaattacgcaagatgcgggtagaagtaccatgcaactgttctttttcagcatcgtcgctgccgctatttatttggcaattaccacagtttcgaacctgatcttaatgtggcttgaacgtcattattctgctggtgtgaggaagggacaattatga

SEQ ID NO: 42842 - DNA, 786 bp, Acinetobacter baumannii
atggcaagctttatgaaaaaaatattcgtttcaacaaccttagttctggctgctgttgcgacgaatgtccaagcaaaggattggaaggtgattcgttttggtactgagtcgtcttatgcgccgtttgaatataaaacaccagatggtaagttaactggtttcgatgttgatttagggaacgctatttgtgcaaaacttaaagctaaatgtgtttgggttgaaaactcttttgacgggatgattccggcacttaaagcgaaaaaatttgatggcattctttcatcaatgaccgttactgatgaacgtgcaaaacaaattttatttagtagcaaaatctacaatacgccaacccgtatggttgcaaaaaaaggttcgccgttgttaccaacacctacttcattaaaaggtaagcgtgtcggtgtacagcagggcacaattcaagaaacttacgctaaaacctattgggctccaaaaggtgtaagtgttgtcccttatccaactcaagatttgatttaccaagacatgatgtctggtcgtttggatgcaactttacaagatgcaatcatggttgatggcgctttcttaaaacaaccgaagggtaaaaacttctcttttgccggcggcaatgtggttgatgtcaaaacattgggtgtaggtgcggctatcggtttacgtaaagaagatgcagacttgaaagcgaatattgacaaggcactcgctgcaatcattgcggatggtacatacaagaaactcgagaaaaaatacttctcttttagcatttactaa

SEQ ID NO: 42843 - DNA, 1032 bp, Acinetobacter baumannii
gtggatctatttcatgccatgagagtattcaacaaagttgttgaaacaaatagtttcagtttagcagctgatagtttgggtttaccgcgtgcttctgtgactacaaccattcaggctttagagaagcatttacaagttcgattgcttaatcggacaacacgaaaaattagtctcacaccggatggcgccgtatattatgatcggacagcccgtattttagcggatgttgccgatattgaatcttcttttcatgatgcagagcgggggccaagaggtcagcttcgtattgatgtgcctgtatcgattggacgtttaattttaattccaaggctccgcgattttcatgcacgctatcctgatattgatttagtaattggtctgaacgaccgacctgtagatttggttggagaagctgttgattgtgcaattcgggtgggtgaattaaaagattcaagcttaattgcgcgtcgtatcggaactttccagtgtgcaaccgctgcttcaccgatttatttagaaaaatatggcgaacctacctcaattgaagatttgcaaaaaaatcataaagcgattcatttcttttcaagccgtaccggacgcaacttcgattgggactttgtggttgatgatttaattaaaagtgtgtcagtacgtggacgtgtttcggtaaatgacggtgatgcttatatcgacttggctttgcaaggttttggtataattcaaggcccacgttatatgctcaccaaccatttagaatcaggtttgttaaaagaggtattgcctcagtggacgccagcaccgatgccgatttcagcagtttatcttcaaaatcgtcatttatcgcttaaagtaaaagtgtttgttgattgggtcgctgaactttttgcaggctgtccattacttggcggtacagctttacctttcgaccagaaatgtgaatttgcctgtgataaagaaactggtcatgaatatacaattcgtactttggtcgagcagcataatattgctgaagcttatacgctcaaaacttaa

SEQ ID NO: 42844 - DNA, 1218 bp, Acinetobacter baumannii
atgtcattttcccgcaaacagtttgcactgtctgccatctttgttgctattttagcaaccggtggcagttttatgttgttacatgaaaatgccgatgcaaaagctgcaccaaccgctgcccaacaagctgctactgttgatgtagccccagtagtaagcaaaaccattaccgattggcaagaatattccggtcgtttagaagcaattgatcaagttgatattcggcctcaagtttcaggaaaactcattgccgtacatttcaaagatggaagcctcgttaaaaaaggtgatttacttttcacaatcgaccctcgtccttttgaagcagaactgaaccgtgcaaaagcccagcttgcttcagctgaagcacaggtaacatataccgccagcaatctttcgcgtattcaacgtctcattcagagtaatgctgtttctcgtcaagaactggatttagccgaaaatgatgcacgttcagcgaatgctaacctacaagccgctagagctgctgtccaatctgcacgtttaaatctggaatacacccgtattactgcaccagtcagcggccggatttcacgagctgaagtgaccgtgggtaatgtcgtctctgcaggtaatggcgcacaggttttaacaagtttagtgtctgtatcacgcctatacgcatctttcgatgttgatgaacaaacttacctgaaatatatcagtaatcagcgtaattcagcacaagtacctgtctatatgggacttgccaatgaaacaggctttactcgcgaaggtacaatcaactcaatcgataacaacctgaatacaacctcaggaacaatccgtgttcgtgcaacttttgacaatccaaacggtgttttattaccgggcctatatgcacgaattcgtttaggtggaggtcaacctcgcccagcgattctgattagtccaaccgcggttggcgtcgaccaagataaacgttttgtcgtagtagttgatgcgaaaaatcaaactgcttatcgcgaagtaaaactcggtgcccaacaagatggcttgcaaatcgtaaatagcggattacaagcgggtgatcgtattgtagtgaatggtttacagcgaattcgtccgggtgaccctgttacaccgcatctcgttcctatgccaaattcacaaatcactgctaacgctactcctcaacctcagccaacagataaaacatcaactccggcaaaaggttaa

SEQ ID NO: 42845 - DNA, 3180 bp, Acinetobacter baumannii
atgaatatttctaagttttttattgatcggccgatctttgctggtgttttatcagtattgattttactcgccggtctgctttcggtattccaattaccgatttctgaatatcccgaggttgttccaccatctgtggtggtacgcgcccaatatccgggtgcaaacccaaaagtgattgctgaaacggttgcatctccgctcgaagagtcaatcaacggcgtcgaagacatgctgtatatgcaatctcaagcaaacagcgacggtaacctaaccattacggtgaactttaagctcggtatcgacccagataaagcccaacaattggttcaaaaccgtgtgtctcaggccatgccccgtttacctgaagatgtacagcgcttaggtgtaaccacactaaaaagctcacctactctaactatggtagtgcatctgacctcaccagataatcgctatgacatgacctacttacgtaactatgcggtgctcaacgtgaaagaccgtttagcgcgtttacaaggggttggtgaagtcggattatttggttctggtgactacgcgatgcgtgtatggcttgacccgcaaaaagtagcacagcgtaaccttacagccactgaaattgtgaatgcaatccgtgaacaaaacattcaggttgcagcgggtacaatcggtgcatcaccaagtaattcacctttacagctttcggtcaatgctcaaggtcgtttaaccactgagcaagaatttgccgatatcattttaaaaactgctcccgacggtgcagtcacccgattgggtgatgttgcacgtgttgaactcgcagcttcacaatatggcttacgttcattgcttgataataaacaagctgtcgcaattccaattttccaagctccgggtgcgaatgctttacaagtttccgatcaagtgcgtagcacaatgaaggagctttcaaaagattttccatcttcaattaaatacgacattgtttatgacccgactcagttcgtacgggccagtattaaagccgtcgttcataccttacttgaagcaattgcactggttgttgtggttgttattttattcttacaaacatggcgcgcctcaatcattccattgcttgccgtaccggtttcaattattggtacattcgcgctcatgctcgcttttggttactcaatcaatgcgctatcactgttcgggatggtgcttgccatcggcattgtcgtcgatgacgcgattgtggtcgtcgaaaatgtcgagaggaatattgaagcaggcttaaacccaagggaggcgacttaccgtgccatgcgagaagtcagtggaccgattattgccattgctttaacacttgttgcagtattcgtacctcttgcctttatgacaggcttaacagggcaattctataaacaatttgccatgaccattgccatttcaacggttatttcggcttttaactcactcaccctatctccagctttggcagcgctgttacttaaaggacacgatgctaaacctgatgccttaacacgtattatgaatcgtgtattcggtcgtttctttgcactgtttaaccgtgtgttttcacgtgcttcagaccgttatagtcaaggcgtcagccgtgtcatttcccataaagcttcggcaatgggtgtctatgcagcacttctaggtttaaccgttggtatttcctatattgttccgggcggtttcgttcctgcgcaggacaaacaatatttaattagctttgcgcagctaccaaacggcgcatcattagatcgtaccgaagcagtcattcgtaaaatgagtgacactgcacttaaacagcctggtgtagaaagtgctgttgccttccctggcctctcaattaatggtttcaccaatagctctagcgctggtattgtctttgtgactttaaagccatttgatgaacgtaaggcaaaagacttatctgcaaatgcaattgcaggtgcgctcaaccagaaatattcagctattcaagatgcctatatcgcggttttcccaccaccaccagtgatgggcttaggtactatgggcggctttaaactgcaacttgaagaccgaggtgccttaggctattcagccttgaacgatgctgctcaaaactttatgaaggcagcacaatcagcccctgaacttggtccaatgttctcaagttatcaaattaacgtgcctcaactcaatgtagatctggaccgtgtaaaagctaaacagcaaggcgttgctgtgacagatgttttcaacactatgcagatttatttaggttctcagtacgttaacgactttaaccgttttggacgtgtttatcaggtccgtgcacaagccgatgcgcctttccgtgctaaccctgaagatattttgcagcttaaaacccgtaatagtgccggacaaatggtgccattatcttcattggtgaatgtaactcaaacctatggtcctgaaatggtcgttcgttataacggttacacatcagcagatattaacggcggccctgccccaggttattcatctagccaagcagaagctgcggttgaacgtattgctgcacaaactctaccgcgtggtatcaagtttgaatggacagatttaacttaccaaaaaatcttggctggtaatgctggactttgggtattccctattagcgtattactcgtgttcttagtattagctgctcagtatgaaagcttaaccctaccattagcagttatcttaattgtaccaatgggaatcttagcggctctgacaggtgtctggttgacagctggagataacaacatctttacccaaatcggtctaatggtactggtggggctagcctgtaaaaatgctattttgattgtcgaatttgcgcgggaacttgaaatgcaaggtgcgactgcctttaaagcagccgttgaagcaagtcgtctacgtttacgcccaattttaatgacctctattgcatttattatgggtgtagtgccactggttacttcaactggcgcaggttctgaaatgcgacatgcgatgggtgttgccgtattcttcggtatgatcggtgtaacattctttggtttattcctcaccccggccttttacgttctgattcgtaccctcaacagcaaacataaactacattctgcggcagttcatgaagcgccgttagctagcccacacgatcattaa

SEQ ID NO: 42846 - DNA, 1449 bp, Acinetobacter baumannii
gtgattacatcaaaacaaaactggttgttgtcctcactcatgggaagcctgctccttgcaggctgctcattggccccagaatatcaacctgcaaaagttatagtgccagtcaaattcaaagaatctgaccccaaacttgaagataataactggaagattgcccaacctgccgatcaacaaactcgtggtgaatggtggcgcatttacaatgatactcaactgaatgaacttgaacagcaagctatcgcaggcaaccagaacctaaaagcggtggcagcaaatattcaggcttcacgtgcactacgttcggcagctcaagctgaacgcttaccaagtattgatgccggatttgggccaacccgccaaaagccgtctccagcttcactcggtttagatgacaatgcacatacttcggctcaaaccttatggcgagctcaagccaatgtttcatatgagctcgatttatttggtcgtgtagcaagtagtgtcaacgcagcaacagcggatctacagcaacaagaggcactatatcagtcggcacttttagctctacaagcggatgtagctcaaggttattttctgatacgtcaacttgataccgaacaggcaatttataaccgtacaatcaaattattaggtgaaacacgagatttaatgcagcttcgttttaaaaacggactggtcagtgaattagatgtttctcgtgcacaaaccgaacttgctaccgcacaaaccactgccctaaatattgctcgtaacagagccagtgcagaacatgcgcttgcagtcttattaggaaaaccaccagcagactttaacttggctgttcaacctttaactgcaaatagtatccgtctccctgccggtttgccgtcaactttacttgaaagacgacccgatattgcggctgcagagcgtgcaatggcagcagataatgcacgtattgggattgctcgtgcagcatttttcccaaaactcagtcttacaggagctttaggttatgaatcttcaagtttaagcgagttgggtaaatggtcgagtcggacttttttactaggacctgtcgctggtactattttgtcgttacctttatttgatggtggacaacgtaaagcaggcgttgctcaagcaagagcggcttatgaggaaagcgtcgccaactatagacaaactgtactaaacgcatttcgcgaagttgaaaatggtttatctgatcaaagaattctcgatcagcaaattcaggctcaaaaccaagcactctcctcttctcgtcatgccaatcaactttctcatttacgttatcgagaaggtgctattagctatcttgatgtcattgattctgaccgcactattttgcaacaagaacaattagcagctcagctgaaaggcagccaaatcattgcaagcatcaatttaatccgtgctttagggggcggttggagtagttaa

SEQ ID NO: 42847 - DNA, 1254 bp, Acinetobacter baumannii
atgtttgccaatatttccatttctgaatttgatccagaattagctcaagcaattgcttctgaagatgagcgtcaagaagcacatatcgagttaattgcatctgaaaactattgctctcctgcggtaatggaagcgcaaggatcaaaacttacgaacaaatatgcagaaggttatccaggcaaacgctattatggcggttgcgaatttgtagatgttattgagcaaatggcgattgaccgtgctaaagaactttttggtgcagattacgcaaacgttcaaccacacgctggctcacaagctaactctgctgtttatttagcacttcttaacccaggcgatacagttttaggtatgagcttggctcacggtggtcacttgactcacggtgcaaaagttagcttctctggtaaaacgtataacgctgttcagtatggtctaaatgctgaaactggtgagattgattacgaagaagttgaacgtttagcattggaacacaagccacgtatgatcgttgctggtttctctgcttatagccgtgttgtagattggcaacgtttccgtgacatcgcggacaaagttggtgcttacctttttgttgatatggctcacgttgcaggtcttgttgctgctggtgtatatccaaacccagttcaaattgctgacgtaacaacaacgacgactcacaaaacacttcgtggtccacgttctggtttaatccttgcgaaagcgaatgaagaaatcgagaaaaaacttcaatcagctgtattccctggtaaccaaggtggtccattaatgcatgcgattgctgctaaagcaatctgcttcaaagaagcaatgtctgacgactttaaagcttaccaacaacaagttgtgaaaaatgctcaagcaatggctgaagtattcattgctcgtggttatgatgttgtttctggtggtacagacaaccacttattcttgttatctttaatcaaacaagacgtaactggtaaagatgcagacgcttggttaggtgctgctcacattactgtgaacaaaaactcagttccaaatgacccacgttctccatttgtgacttctggtatccgtatcggtactccggcagtaacaactcgtggttttggtgaagctgaagttcgtgaacttgctggttggatcgctgacgtgattgatagcaaaggtgacgaaaaagttattgctgatgtaaaagcaaaagttgaagctgtttgtgcaaaattccctgtatatgcaaaataa

SEQ ID NO: 42848 - DNA, 1230 bp, Acinetobacter baumannii
atgaaaatgaaactattaatgacgagcgttcttagtacgagtttatttttagtcgcttgtggaggcggaagtagtgatgatggtccagctactactaatccatccggaactccaaccaataatattcaaaatccagttgttaaagttgaagcctatacaagtactaacttaggatcagttgccgcagaaagtagtattttaacttataaaatgttaggtcaaagtggacaagaagtgcaggcaacaagtctagtgtttaccccaaacactccacaaccagtaggtggttggcccattgtagtctgggcgcatggcactacgggggtggcagatgcttgtgcaccaagtaaagcagctttagcagacagtacaaaagatttaattagtaaattactagcagcaggttatgttgttgtcgcacctgattatgaaggtttgggtaccccaggtatacatcctttcttaaatgttaaaagtgaggctttttcaattactgatgcagtggttgcagcgcgtaactatttatcgcaacgtaatttattaacttcgaaaaaatgggtcactgtgggtcattctcaaggtgggcatgctgcattaggagctgcacagtatgcgagccgtgcacaactagactataaaggtactgtagccgtagcgcctgcttctaatttaggaagtattttagtagatggagaggcacaagttgcgaatgcacctatagacattaaaattggaacctatgcacagcttgatacatatacagctttggttacagctggtattcgcaacacacagccgagctttgattatggacaagtatttacttcacaaatttcaagtattgctgcccaagcagaaaacctttgttctggaccattgtatggagccttttatgaaggtatgagtaattatgctaaagaccataatgggacactagatggctttacacgtacacaacctaactttatggctgtaccgttagttaaaacatttttagataaagattcgcagccgttacaagtaaaagttactactccaatcataatttatcaagggatagctgatcctacagtacctaaattggcaactgatctattgatatctaatgccactgctgtaggcactaaaattaataattatgtgacgggtaactgggatcatgggacggcgatgagtagtaatgtagataatattgttggaaatgtacagactttactatcagctcaatag

SEQ ID NO: 42849 - DNA, 687 bp, Acinetobacter baumannii
atgcaagccattattttagatacagaaacacatacactaaatggtttgcctattgaaattgcatatgccccaattgaaattaatgcaggcaagctcaccttagataaaagcaaattgtttgatcaactttatcaagttgggacccctatctcttacgctgctatggcagtacaccatatattagaatcggatttagaaaatcagccccactataaaacttttaaattgccagacacaacaacttatattattggccacaatattgattatgatattgccgcgattgcgcgttgcggtgtagatgtttctcatatcaaaccaatttgtacgctagctttagcacgtaaaacctggcctgatgcagaagcgcataatatctcagcactgatctatatgatttctcaaggcagcagtaaagctcgtgaattactcaaaggtgctcaccgtgccgatgcggatattattttaactgccaatattttgatgcatattgtctatcatttaaatattcaagacattgaagagttgtaccgagtttctgaagaagcacgtattcccacaacaattaactttggcaagcataaaggtacagctattgctgaactccctaaagactatattcaatggttattgcgccaagacgagctggacgtttacctacgtaaagcattagaaagtgcattttaa

SEQ ID NO: 42850 - DNA, 633 bp, Acinetobacter baumannii
atggctggtttttatcgaaccaatttgggaagagtcgcacttcaacaacgtaatattgctttaaatgccaaacaaagacgtttacttctattaattgatcatgaagattttcaaactctcaataccgagtttaaaaaacgcattgctccaccagaactcattcaacaacttattgacttaaagcttattgcccctattagcgaaaacgattcagaatttactgaacaaatacctctctcagaatcacctaccacgagtttagaagtaaaagcgcaacaaaaaagcaccatagatgaaagtgaaagtgccgatttgactggagaaattaaagtttctctagaaccatcatgccattcttcaaatattgaaaatactcagccaccaattcctgttcaacaacttacttttgaagaaatacaactattaatgaaacaaagcttaagccaatactgtgggcttatggccaaaccacttattcaaaaaatagaacaaattaaaaatcttcaagaactaaaaatgtgccaaatgcaatggattaccagtttgcaagagtcaaggattccccctcatgagctcgcacatacgcttcactctattaattattcaattcagctcattcagcaaaagaactaa

SEQ ID NO: 42851 - DNA, 936 bp, Acinetobacter baumannii
atgactgatgctttggttttaagagatttgtccaaaacatatcgtaatggttttcaggcgttaaaaggtattaacctcactgtgcctgaaggtgaattttatgcgttgttaggtccaaatggcgccggcaaatcaacaaccattggtattatcagctccctcacgaaaaagacctcaggaacagttgagattttcggacataatctcgatactcatccatccttggcaaaacagcagcttggcgttgtccctcaggaatttaactttgggcagtttgaaaaagcatttgatattttagtaacgcaagctggttattacggtatccatagaaagattgcagaaaagcgcgcagaacattatttagaaaaactgggcctatgggaaaaacgtaatatacaagcacgtatgctgtcaggtggtatgaaacgccgtcttatgattgcccgtgccatgatgcatgagcctaaacttcttattttagatgagcctactgcgggtgtagatattgagttacgccgttctatgtgggattttctaactgaaatgaacgaaaacggtacttctattattttaacgacacattatcttgaagaagcagaaatgttgtgtcgtcaaattgccatcattgaccgtggtgtcattaaagaagataccagcatgaaaagtttcttaaaccagctaagtgaagagtcttttatttttgatttggctgaacctattgccccactccagctcaatattattggtgtgaaattcaacttaattgatagtagtactttagaagtaacaatggataaagcacatacattaaatgatttattccaacttttagagtcacaaggtattcgtgttcgcagcatgcgaaataaatcgaatcgtcttgaagagctatttgtcaaaatggtcgagaaaaatcttgaaggagcggcaaaatga

SEQ ID NO: 42852 - DNA, 774 bp, Acinetobacter baumannii
atgaactttaaccaactgcaaattgccctctggactctagttcgtaaagaagtacgccgatttctacgcatttggccacaaaccttattaccacctgcaattaccatgagtttgtactttgtcattttcggtaatttggttggctcacgtattggtgaaatgggtggcgtaagttacatgcaatttattgtacctggcctcatcatgatggctgtcattaccaacagttatgccaatgtatcatcgagtttctttagtgtgaaatttcaaaaaagcattgaagagctgattatgagccctgtgcctctgcatattattttgtggggctatgttattggtggtatttgtcgaggtgtcttggttggtgcaatcgttaccgcgatgagtatgttttttactgacctttttatccataactggttcgtaactatatatacagtattaattacatccgttttattttctttaggcggttttattaatgcagtctacgcaaaatcatttgatgatatttctattattccaacatttgtacttactccacttacctatttaggtggtgtgttttatgccattagtgcacttggtcctttttggcaaaaactttctttaattaatcctattgtttatatggtaaatgctttccgtttcggcattttaggtcatagtgacgtgaacgtttcgttctctttaatcattgtgacattatgctgtgctgtactttacggaattgcttattatttacttgctcgtggttcaggaatgcgtgaatga

SEQ ID NO: 42853 - DNA, 813 bp, Acinetobacter baumannii
atgagtgtcgaacagtctttattgggtaaagaaacccaatatccaactagctatcaacccgatgtgttatttccaattgcacgtgctcaatctcgtgaaaaatatgctcatatcgaaggtataacccaaggtaaagattggtggcacgttttcgaaatttcttggttgaatgctcacggtattccacaggttgctatcggcagaattacactgccagcttcttcaccgaatttgattgaatcaaagtcattaaaactttatttcaatagtcttaacttcactcagtttgactctacacagtcattcattgaaacagttgaaaaagatctatctgctgcggcaggtgcaaaagttgaattaaccctatttcaagtagatgatttagagatttctaaacctcaagggatctgtattgatgatcttatgccagagcgtttagaacaacatcctgatgctactctcttaaaacttgatgagtcagatgaagaaatcgaagttgaactgtattctcatcttttgagaagtaactgcccagtcacgggtcaaccggattgggggacagtttttattcgttttaagggcaaaaaaccttgttatcgtagtattttagcctatattatttcgtaccgtcagcataacggtttccacgaacaatgtgtcgaacaaatctttgccgatatttggcaaaatttgcaacctgaaaagctgatggtttatgcaacttatactcgccgcggtggacttgatatcaatccttgccgagtatcggatcttacatggatgccaaaaccgattcgattggcacgacaataa

SEQ ID NO: 42854 - DNA, 651 bp, Acinetobacter baumannii
atgccgttttttggttttaccccttctgaaggcttattgaacgatatacagactggaattgcgaataaaaattctagtgaaccgttatatccacttcgagacaaaatcgctttacaacttaatgaggaaattattgaaaatgtacttactcagttagtacaacatttcccagcgagtgaaaaaagagatactgccgaaaaactagctggttatgtcaaatcaacagttgctgtgcttttaaagcaattactcagcaaagcgccaaacgatgtggttaaacagtcagttgagttttcagagaaaagcttatttaaagatccgcaaggccaatataaagttggcgtagctttagatgctggcctagttaccaacttgaagcataattttgccgagcttcaagcgggtaatgacattaataaagcagcattagcagaactatataaacagttcggtgatgctatggtgagacattttatgtctgactttaataaaacattagatttaggcatgattaagcgtaaagcagccgatattggcgctgctgctgtaactaaagcagttcatattgcgatcgacaaactcattccaagtttaaatcgcactgaactaaaagcgatggctgaatatcatgatggactattctttaactaa

SEQ ID NO: 42855 - DNA, 1143 bp, Acinetobacter baumannii
atgtctcctagtccacaatataaatttttacgccaagctcctcgagatggccttagtactgccatgcaaccttcacgctggcagcagcttcatattgacccttggttatgcctatttttattcctaaatgcattgttaggtttaacggtactttatagtgcatctgcacaagatgtgggactcgtcagtaaacaggccatgagctttggtatcggctttctggtcatgattagcctagcgcaaattccacccaaggtttatcaagctttttcaccttatttttatttatttggcctgttttccttaattggcgttatggtttttggtgaagttcgcatgggtgctcagcgctggatcgatattccggggttcgggagtgttcaacccagcgaatttatgaaaattggcatgccaatgatggttgcatggtttttagctcgtaaacctcttcctcctagcttctcgcaggttattttgtctttaatgttaattggtgttccatttttacttattgcagaacaacctgacctaggaacatcactattagtattagcaagtgggatttttgtactgttcttaagtgggttatcttggcgcatgatcggtgcagcagcagcttgtgcagctattgtgattccaattgcatgggaattccttttacacgactatcaacgtcaacgggtattaacgttgcttgacccagaagcggatgctttaggaacaggctggaacattattcagtccaaaacagcaatcggttctggtgggttttcaggtaaaggtttcctcgaaggtactcaatcacatttacacttcttaccagaaggccatactgactttattattgctgcttactcagaagaattcggtttaattggtgtacttatattagtaattctttattcggccattatttttagaacatttcaaatcggtttacaaagctttcacaattatggccgattagtggctggcgcgtttggtttgtctttttttgtttatgtatttgtaaacgcaggaatggtcagtggtattttacctgtagtgggtgttcccttaccttttatgagttatggcggtaccgctattattactttaatggccacttttggtttagtcatgtctattcatacacatcgataa

SEQ ID NO: 42856 - DNA, 1002 bp, Acinetobacter baumannii
atgttgtctcaatttgttaataaaactttaaaagtgcttgccttgtgtactggccttattagcacaagtcattttgctcaggccaatgattttgtaacacatcctaactatttaaattttaaacaaaaagccatgagcacttatggcttaagcggtgaacagattgacgccgctatgaatggtgcaaaaaatttaccaaacattataaatattatgactcgccctggtgaaagtaagccttggtacgactatcgttctatgtttttagtcgaaggtactattcaacgtggtgtccgctttaaaaaccaatatgccgatgctctcaatcgtgctgaacaacaatttggtgtttctcaagcggttattctaggcattttaggtgttgaaacaggttatggagccaataaaggttcgtttattactcgtgatgcacttgcaacgttagcttttggctacccacgccgtgctgaatattttggcgatgagttagctgctctcattgcatggacttacaaagaaggttatccaaccaatagtattgtaggttcttatgctggtgccattggcttcccgcagtttatgccaagcaacattagtaagtacggggtcgactttgatggtaatggtcatatcgacctacgaaactctgcagaagatgcgattggctcaatcgcaaattacttagcaaaacaaggctggcaacgcgatcaacctattggttttatggctcgttacacaggttcaaatccggaaagtatcattgctaaagatttgacccagcccactccgtatggtgcactaaaaaatcaagggatttctcccttaaatccgttagtcaaaattgatgacttagatatggtaaatgttattcaattacaagactataacggtccaatttactatttaacctatccgaactttcaagtaattacgacttataacaaaagccgaatgtatgcgactgccgtatggttgttaggtacagaagtagctagccgatag

SEQ ID NO: 42857 - DNA, 618 bp, Acinetobacter baumannii
atgcagttatcgctgaaatacattcttgcactgacggctagtttaagcatggccccactgcacgctgaaatgatgcaatcatcatcattaaatagcgatgtagatggtccaaatgcaaatttagctgcacgtgtgttgagtaaagatactcaaaactttaattctcgtttctctaacattaacagtctttcaatcactgaacgttctggcgatcaaatccgtcgtcaagctatcgcagctaaaattgaaatccctgaagatgagccttcagtgattgaaaaacttaacacagtagcttcaaatactgttcgtaagtttagccaaactggcatggcatcgtggtatggtcgtcaatttcatggccgtaaaactgcaagtggtgaaacattcgatatgaatgcacttactgctgctcaccgtagcttaccgcttaactgttatatccgtgtcaccaacaaagacaatggcaaaagcgtagtggtaaaagtaaacgatcgtggtcctttccatggtaatcgtgtgcttgatttatcatacggtgcagctaaacgccttggtattaccaatgctggtactgctaaagtaagtattgagcgtgtagacggtcctacttcataa

SEQ ID NO: 42858 - DNA, 150 bp, Acinetobacter baumannii
atgagctcaaaaattttaggttatttatttgtgattttgagagagacaaatcctcaaaaaaacctcattttcatgaagaatgggaaaataatagaaaaatactcaactcatcttgtcttaaaacgcgttaaacaactctttttagactaa

SEQ ID NO: 42859 - DNA, 453 bp, Acinetobacter baumannii
atgaaatctatcagtgaatggtttgatgaatatagtgaaagtcatcaaaacccgataaataagaaaattcactgggtatgtgttccagctattttattttcgattattggaattattgctcactttagtgccctactcaccgctttactcgtagtgcttacactcattttttatgctcggcttgatcttgtacttgcagtagcaatggctgctctacttgttgtgatggcatggcttatttatgttctgccagtaggtgtaggattttatattgctctttttgtgtttgcctggattggacaattttatggacataaagttgaaggaaaaaaaccttctttctttaaagatttgcaatttctcttgattggtccagtctggtgtatggatgcttatcttgcaaagatattacctcattggaaaagccgtcagaagaaactaattgctcaataa

SEQ ID NO: 42860 - DNA, 318 bp, Acinetobacter baumannii
atgtcatggctcatgattttaggactggcagctatcgtattttttaatcgttattattttttggaaccaaatgtaaaagttaaattaccagtacttatgaataaaatgttgaattattcagctccttgtttattaagtgctatttgtattccagtaattttttttgaaaataatgaattaagaggatttttagataatccttacttatacgcaacgatattttgtactgtcgtggctttctattttaaaaaagtgttaccgagcgttctgctgagcctggcatttttttattttataaattttctaataaatcattaa

SEQ ID NO: 42861 - DNA, 717 bp, Acinetobacter baumannii
atgaatactcatttaaatcaatctattagattttctaaaagccgaccaccgcatctttttttacgaggggcgatagatatattgccactatctatttcggttataccatgggctattttagctggatcaatggcaattcatgcgggtttatcattttataaagcactagcgatgtcaggaattgtgtttgctggcgctgcgcaattagtaagtttaagcatggtgatggaaggtgcatcgttattaaccatctatgtcactattttctttcttactgctcaacattttatttatgctttaactttaagaaatgacgtttctattttacctctctcaaaaagactaactttagggtttctgcttaccgacgaattatttgcagtaagtgttcctaatgagaaaaaacatcctcaatacttattcggagcaggtctttgcttttatttattttgggtggtttttagtttagttggtattttattagcaacggcgctacctaacttattaaattatcatttggatttttccattattgctatttttgttgccatgattgttcctatgtgtaaggggaagcctgtaatggcaggcattttaatgacttgtgtcagtggttttgtacttaagtattttcatatagaaggagccattctaatttctggtttattggggatgtttattgcggtaatagtcgaaaataaaatgggagaaaaataa

SEQ ID NO: 42862 - DNA, 825 bp, Acinetobacter baumannii
atgcaccgggaacaggctgactacttgcatttgcgagagttgggcggtttagaattattaaaagcacattatcaccaaacacaattttcaaagcatactcatgaaggatattgtattggtgtcattgaagagggtgcacagtctttttttaggacgggtcagctacatgttgcccctaaaggtgacattattttagttaatgcagatgaaattcacacaggctcatctgctgttgaatcgggctggcgttaccgtgcaatctatcctacacccgaaatgcttgctgaagtaagccaagatttttttgagcaaggccatggggcaccttggtttccgcaagctgtaattcaggacttgggattatctcaacaactgtgtttattatttgatttattagaacaaaaagacaattttttgcttaaagaaaccatgtatttatcaacattagcatgcttaatggtacgtcatggtaagtcaagacacaccttttgcgagttaccagaagcttattcaaaagtattaaaagttaaagatttgttagctgatatgcctgaaaagaatttttctttgcaggaattggctgatatggtcggattaagtgcatggcattttttaagacaatttaaaaaacatgtaggtttaccgcctcatgcatggttagtacaggcgcgtttgcaaaaagcgagacaattattaaaacaaggcgttcaaattgtaatggttgcacagcaatgtggtttttctgatcaaagccattttaatcgtcattttaaaaaggcgatgggtgttacaccaacccaatatgtggcgagtcttaatctttaa

SEQ ID NO: 42863 - DNA, 486 bp, Acinetobacter baumannii
atgacaaataaaaagaatctaggtattggcggcataattgttttattgattgctgcatatttgggtctggacttatctgggcataaaaacaattcgacaccatcatcaagcatacctgcgaatcagcgtactgaaacgacgttttcaaatgatggagtagataccataaaggctgcttatgaacgtagacaaagtaacattcaagtgcagggtagtggtcgagtaaaagcaatcttaagagaagataatgatgggtcgagacaccagaaatttattctgatattaaaaaatggactttcaattttagtagcacataatattgatttagcaccaaaaattgaagatttaagaaagggtgatattgtcgaatttaagggggaatatgaatataacgcaaaaggtggagtattacattggacgcatcatgatccccagaaccgtcatgaaaatggttggctgaaacataatggtcgtatttatcaatag

SEQ ID NO: 42864 - DNA, 876 bp, Acinetobacter baumannii
atgactgcaattactgcaagcatggtaaaagaattacgtgaccgtactggtcttgcaatgatggaatgcaaaaaagcattaacagaagcgaacggtgacatcgaacttgctattgataaccttcgtaaatctggtcaagctaaagctgctaaaaaagctggcaacattgctgctgacggtgcaatcactatcgttcaagacggtaataaagcgatcttagttgaagtaaactgtcaaactgacttcgttgctaaagacgaaaacttctctaactttgcacacacagttgctgctgctgcattagctgctggcgaaactgatgctgctaaaattgctgaattaaaattagctgatggccaatcagttgaagaagctcgtatcgcgcttgttcaaaaaatcggtgaaaacatccaagttcgtcgtgcgaaaatcgttgaaggcgaacaattggctatctataaacacggtttaaaaatcggtgttgtagtttcttatactggtgatgctgacactggtaaaggtattgcaatgcacgtcgctgcatttaacccagtagcagtaaatgctgaagctgttccagctgaccttatcgctaaagagaaagaaattgctgaagcgaaagcgttagaatctggtaaaccagcgaacatcgttgagaaaatggtaactggttctgttgagaaatacttaaacgaagttgctcttgaccgtcaaatgtacgttatcgacaacgagaaaaaagttgctgacgtactaaaagcaactggtacaaatgttgctaacttcgtacgtttcgaagttggtgaaggtatcgagaaaaaagctgaacttagctttgctgaagaagttgctgctgctcaagctgctgcgaagtaa

SEQ ID NO: 42865 - DNA, 753 bp, Acinetobacter baumannii
atggcagattacaacgtaagcatgcgcgaccttcttcaagcaggtgcgcactttggtcaccaaactcgtttctggaacccaaaaatgcgtcaatacatttttggcgcgcgcaacaaaattcacatcatcaaccttgagcacactgttcctgcgttaaatgatgctttgaacttcgctaaccaattagcaagcaaaaagaacaaagttttgttcgttggtacaaaacgtgctgcttctaacatcatccgtgaacaagctcaacgcgctggtcaaccatacgtagatcaccgttggttaggtggtatgttgacgaactggaaaacacttcgccaatctatcaaccgtttaaaagatcttcaaactcaatctcaagacggtacttttgctaagcttactaaacgtgaagctttagaacgtactcgtgagatggaaaaacttgagcgctctttaggcggcgttaaaaacatgggtggtttacctgacgcattatttgtaatcgacgttgatcacgaagcgattgcaatcaaagaagcgaaaaacttaggtattcctgttatcggtatcgttgatacaaactctaacccagacaacgtagattacgttattcctggtaacgacgatgcgatccgtgcagtaactttatatgcttcagctatggctgatgcaattcttgctggtaaagaatacgctcaatctcaagcgaacgctcaagcaaaaggcgatgacgctgcgaaagacgcttctgaggcttaa

SEQ ID NO: 42866 - DNA, 828 bp, Acinetobacter baumannii
atgaacagtacttatacagctccacgtcgattaatcaaaactccagatgaaattgaaaaaatgcgcattgcaggacgactggcggctgaagttctagatatgatcaagccgcatattaaagctggtgtaagcacactcgagcttgatacgatttgtcgtaatcatattgaaaatgtacagcacgctattccggcctgtgtaggttacggtggtgcgccaggacgccctgcttttcaacactctatctgtacttcggttaaccatgttgtatgtcatggtattccttctgaaaataaaatcttaaaaaacggcgatatccttaacatcgacgtgaccgtcattaaagatggttatcatggcgataccaacatgatgtatatcgtgggtggtgaaacttctattctggcaaatcgtttatgtaaagtagctcaagaagcgatgtatcgtggaatggcaacagttagagatggttcgtatttaggcgatattggacatgccatccaaaaatatgtcgaatcagagcgttttagcgtagtgcgtgaatattgtggtcatggcattggtaccgttttccatgatgaacctcaagtgttgcactatggccaagctggtacgggcatgcgtttagaagctggtatgactttcactattgaacctatggtaaatgcgggggtttggcaaaccaaattgcttggtgacaaatggacagttgtaaccaaagaccataaactttcagctcaatatgaacatactattttagtcactaaaacagggattgaagtattaacagctcgcccagaagaagatctttcacgcttcaatcaataa

SEQ ID NO: 42867 - DNA, 1119 bp, Acinetobacter baumannii
atgatgaaaaagtcattattttgtatgacagctgccttatttgctctgccaacagtcacttccgccgcttccccatattttagtttaaaagatggtgatggtttcaaacgtttttcagtctcagctggttggctccatgctatgcctcaaggctcaggaaatcctgtcaatatcaatactagcgttgcagaaggtacaaaatctaaagttggagatgtatctacaaaagccgttttagacgcaatcgatcaaagtaaaccttcaggacaattttggcatagcactattagccttcttgataagtttacagacactcttccctcatcacttgcgggtacagcagaaattaatggtctttctcaatgggaacaacaaggttctggcttagaagctgctgatgttgataccgttggtcttatgtttaactacaactttacggataatttatctttagaaattaaaggtggtattccccctaaagtagatattaatggaaaaggtaatatttacgctcccctctctggaaaagcgactccactaaaagatggatctgtgattggaggaatcatcggagatggtattgccaaagcgggtggagatattcctttaaagcaagacattcatattactgatctttctcagggcggtaaggctgcgaccgcacgtgcatggttaccagctgttgagctacattatcaatttggtaaaacaggtgtaaataagttccgtccttatatcggagctggcgtgatgtatgcatactttaatgatttaaaaatgaattccggtattgaagctgatttaattcaagcgggtcacatgatccagaatatccatgataataaagcaggtgcagcattagatcgtaaaacatcttctgctaatcctattgtgaaactagaagcgacagatacatttgcacctatcgttaccgtaggagcaacttatgattttaatccgaacttgtttgctgtaggctcagtttcttattcgaaaatgaatagcgaagcaaaaatttatgtgactgatcaaaatacaggtaaagaattaattcaggcaaatagcaaaattgatattgacccgcttattacttatttaggtgtgggttaccgattctaa

SEQ ID NO: 42868 - DNA, 1347 bp, Acinetobacter baumannii
atgtcttcaaatattaatttagatgcaaaaaaagcgactgaaattaaattattcagtttttcaaccccagccatgcgtgctttccacatgacttggctcgcgttctttgtctgcttcttcgcatggtttgcttgcgccccattaatgcccgttattaaaggtgagttcggcttaaccaaagatcaaattgccaatattaatattgccgccgttgcaattacaattttagtgcggcttgctgtcggaccactttgtgataaatatggtccgcgtattacttacaccacccttctcttacttggcagtattcctgtatttggtgttgccgctgccaacagctatgaatcttttcttttcttccgtttactcatcggtgcaattggcgcaagctttgtcattacgcaatatcataccagtatcatgtttgcaccaaatgtcgtaggcacagcaaatgcagctgctgcgggttggggtaatgctggcggtggtgcaacacaagctctaatgcctttattactcggtgcaattgtaatgttcggtgtcgagcaaactatgggttggcgcgttgcattaatcgtaccaggcgtaatgatggtaattgttggggttctttactggaaacttacccaagactgtcctcaaggaaactttaaagaagttcgtgcacaaggtattgaggtgggtagcggtaaaaaaggtggcatggcaatcttaatgcaagcggctcgtaactaccgtgtctggattttattcctcgcttatggtgcttgctttggtattgaaattttcatccataatgttgccgcaatgtactatgttgaccaattcaaaatggatttaaaaacagcagggttaaccgcaggtatatttggccttcttgccttatttgcacgtgcattaggcggtattatttccgataaagtcgcacttaaaaaaggtttagacggacgtactaaagtacttgtactaatgattttaggtgaaggtttattcttaatactcttctctcaaatgaacgtcgtagctcttgcaattatttccatgacagtttttgcattgtttacccatatggcttgcggagcaacatatgcactagtcccttttattgaccgaaatgcattaggcggcgtcgcaggcattattggcgcaggtggaaatgtgggcgcagtagcagctggtttcttactaaaaggcgtacttgatattcaaacttgtctatttattttaggtggactggttatggttgcaggctgtagtgtaattttgattcgcttcacaaccgagcacaaagaaaaagaaaaaatactttttgaacaagctctacttgaacgcaattccgcagcctaa

SEQ ID NO: 42869 - DNA, 1215 bp, Acinetobacter baumannii
atgactaaaacaagccatcagttttcccaatcactcatttatatgctcattggaagtgccattattttggctttgtcactaggtgtacgacatggctttgggctttatttagtcccgatgagtcatgagttcagttggggacagcatgtttttagtctagcaattgccatgcaaaatctaatctggggtgcagttcagccttttactggggcaattgcagataaatatggcagtaaagttgtggtaacagtcggcggattactttatacccttggcttactcttaatggcttttagttcaagtgtactcattttgaatttaagcttaggtcttattattggtttagctttatcagcaacttcttttacagttttgcttagcgcagtaggccgagctgctccgccggaaaaaagaagtatggcaatgggtattgccagtgcagctggttcttttggccaatttattatgctgccttctacccttctcttacttaagacagtgggatggtcatcagctttaatggtaagtgcgctgttaatcgctcttattattcctctagcatggatgttaaaagggccaagcaaccaaaccccaaaagcaattgcccaacctcagctcacctttaaacaagtacttcacattgcgagaaaacataaacctttttggtggttagctttaggctttttagtatgtggcttccaagttgtcttcctgggtgttcacctaccaggttatttaatcgaccacggctttgatgccgctacaggtacggtgtttcttgctttagtcggattatttaatatcgtagggacttatggcgcaggctggttaggagatcgtttttcgaagcctaaattattaatggcactttatggtagccgcggcatcgcaatcattgctttcttattattacctctaagcacttatacagtatatgctttcggtattatcatggggcttctatggctttctacggttccgcttaccaacggtatcgtggcaaatatgtttggtgttaaatacctttcaatgttaagtggtattgtgtttttcacccatcaagtcgggtctttctttggtggttggcttggcggtgttaaccatgacttaacaggtaattacaatgcgatttggctctgttctatcgcattgagtatattaggggtaatcgtacatttctttgtaaatgaggaggctgttattcatgacgcataa

SEQ ID NO: 42870 - DNA, 135 bp, Acinetobacter baumannii
atgacgcataatgccgtacttttgaaaacaattatgactttcctcatcttagctcttctggttttttctattgttttatggaaacagacacctgatttgtttgaatattttaatcaagcattttgtgcacactag

SEQ ID NO: 42871 - DNA, 1413 bp, Acinetobacter baumannii
atgccacgtaaaaaagaggtcgttagtgggaatttcgttaagtacgatgcggtagttctcggttctggacctgcaggtgaaggcgcggcaatgaagcttgcaaaagctggtaagcgtgttgcaattgtagatgtacgtgatcaactcggtggtaactgtgcacacgtaggaaccattccaagtaaagcattacgtcaaacagtttctagcattattcgttatcagcgtgatccaatgtttcaaaaagtaggtgaatggaagcagttcactatgaaacaggtcttgcgtaatgcgcacaaagtgattcaacaacaggttgatacgcatacacgcttttatgaccgtaacaaaattggtgtcttccacggtcgtgcatatattcaagacaaaaacacagttttagtttttagccacgaaggtattaaagaaacaattatctgtaagcaaatcgtgatcgcgacaggtagccgtccttatcatccgcaaggtcttgattttgaccacccgcgcgtatttgattcggacaaaattcttgatcttgattactcaattcaaaaaatcattatttacggcgcaggtgttattggctgtgaatatgcctcaatctttattggtttagaccataaagttgacttgatcaatactcaacaaaaactcttaagttatctagatgatgaaatcgccgatgctttgtcttatcacttacgtgaacagggcgttttgattcgtcacaatgaacaaatggatcatcttgaaacatttgatgaccacgttgttctacatttacaaagtggtaaaaagattaaagctgatgcgattctttggtgtaatggccgttcaggtaacacagaaggtttaggtcttgaaaatgttgggttggtaccaaatagtcgtggtcaactttctgtaaatgatcaatatcaaactgaagttgaaaacatctatgctgctggtgacgtgattggttggccttcacttgcttcggctgcctatgaccaagggcgctgtgctggtgcaaacatgagtggtgaagatgctaagccagtacgtgatatccctacaggtatttataccattccggaaatctcatctattggtaagaatgaacaggaattaacggaagagaaaattccgtatgaagtcggtcaggcttctttccgtcatttagcgcgtgcacaaattaccggtgatacagtaggtgagttgaagattcttttccatcgtgacactttggaaattttaggtattcactgttttggtaataatgctgctgaaattatccacattggacaagcagttatgcacagcccaaacaatactttgaaatattttgttgaaacgacatttaactatccaaccatggctgaagcataccgtgtggctgcacttaatggtatgaatcgtttattttga

SEQ ID NO: 42872 - DNA, 1014 bp, Acinetobacter baumannii
atgtcagaacaccgtaaacctgaacagggtgtaaaacttcgtggcgcagaaaaagtcgcaagaattcctgtaaaagttgtacctacggttgaagtgccgcgtaaacctgactggattcgtgtcaagatgacggcaccagaagaagttcagcgtattaaaacgactttacgtgctcaaaaactccataccgtttgtgaagaagcagcttgtccgaaccttccagaatgctttggcggtggtacagcaacattcatgatcatgggtgatatttgtacacgtcgttgccctttctgtgacgtagcgcatggtcgtccaaatgcattggatcctgatgaaccacgccacatggcagagacaattgccaatcttaagctcaaatatgcagtaatcacttcggttgaccgtgatgatttgcttgacggcggtgcacaacattttgtggactgtattaaagaagctcgcgcacttagcccaaatacattacttgaaattttagtaccagacttccgtggacgtatggatattgctttacgcattatgactgaatgtccaccagacgtatttaaccacaacattgagactgtacctcgtctatataaagcgatgcgtccaggttcagattatcagcattctttaaacctattaaaaatgtttaaagaatactgcccagacatcccaacaaaatgtggtttgatggtgggtattggtgaaactgaagaagaagttattgcattgcttgatgacttacgtgctcacgatgtcgactatgtcactattggtcaatacttgcagccttctaaacagcatgcaccaattgaccgttttgtaacaccagaagaatttgaacgttatgcagagcatggccgcaaacttggctttagaaatatttggtctgcaccaatggttcgttcaagctattttgctgatcgccaatactatggtgaacctgttcctgaagttcgccgcaaggtagatcctgcgaaaaaaattgcggtacaagcaatcgaagcttaa

SEQ ID NO: 42873 - DNA, 2466 bp, Acinetobacter baumannii
atgattttcctactctttgttttaagtattgtcattcagcttgttgcaatatgggcaattttcttttttaacctaaatagagtcgctggtagtgttattacgattgctgtagccatacttactgctttcattttaacgccgtgggcattacttttagggattccccttattgcacttagcattattattttgtttaaacctttacggtttaacttaattacccaacctgcatataaaactctggccaactcaatgccgagcatcagtaccactgaacaagaagccttagaagcaggaacaagctggtgggaaaaagagttatttatgggggctccagattggtcgcaatttgaaaaatatccctatccttcactttcaccagaagagcaaagttttatcgataatgaagttgaagtgctatgtagcatgcttgatgaatgggaaattcaccatcaattaaaagaccttcctcctgaagtttggcagttcattaaagataaaggcttcttgggtcttattattccaaaatcctttggtggtaaagagttcagctcatttgctcaaagtcgcattatgagcaaaattgcctcgcgttcattaactgctgcggtgagttgtatggttcctaactcattaggacccggtgaattactcatgcattacggtacagatgcgcaaaagcagcaatatctaccgggacttgctaaaggtgaagaaattccatgctttggtttaaccagtccggaagcaggttcagatgcaggtgcaattccagattcgggtgtagtctgctatggcgaatatgaaggtgctcaagttcttgggctccgcatgaatttctctaaacgttggatcacgctcgctccaattgccacagtggtcggtctagcatttaaactttatgaccccgaaggtttacttggagataagactaaaaatgagtacgggattacctgtgctttaattccagccaatcatgcaggcgtaaaaataggtgcacgacattatccgggctctccattcatgaatgggacagtagagggtgaagatgtcttcattccaattgactggattattggcggacaagaaaatgccggtaaaggctggcgcatgctgatggaatgcttaggtgttggccgaggtatttcactgcccgcattagccacggccgcaggtgaaatgagctatctcactgtcggtgcttttgcaagaattcgtcaacagttcaatatttctgtcggcaaatttgaaggtgtacaagaagctagcagtgaaattgccagcgatgcctatatgcttgaagcattccgttatttagtgacgtgtggtctaaaccaaggtggaacccctgctgtaatgactgccatggcaaaatactatgcaaccgaaaccatgcgtaaagtggttaatcacggaatggatattgctggaggacgtgcaattcaacttgggccacgcaatttccttgcccttacctatcaagcgattccaattgctattacggtagaaggtgcaaatattttaacccgctcgttgatgatttttggtcaaggctcaatgcgttgtcatccttatctttttgaagaattgcaattacttcagtctgacgacaaagccaatgccgtacaaaaattcgatgatttgttgtttaaacatttagcctatacctttaaccgcggtgctagatcatttgcttatggttggacgggtggttcaagtgatgcacctcaatcagcagatcaattcactgcaagttactataaaaccatcaatcgttttagcgccaatttttcacttgtttccgatatggcactaggattactcgcaggagacctaaagcgtaaagaaatgctatcaggccgcttggcagatattcacgcgcacttgtttattgccactgcaattttaaaatattatgaggctggacaaaaaactgaagctgaacaacttcatgccaaactagcactgcaaaaagcatttttgaatattcaggaagcattttggggactatttgacaacttcccagccaagcttccagcagcatttgtcaaatggatatgcttcccgttaggtcgtgtgatttcaaaacctgacgatgagttaaaacaacaagttgctgaactcatgatggaagaacatacgtttagagagcaactcaaacaccatgtgtactattcaactgaacctaatgatgtcactggccgtctagagcacacgttccaaatgttaagaaccattgaaccgctttgggataagtttaagaaagctgaatccaaaggcaaatttacgggtcttacttttgaagagaatattgctcaagcgataaaagaaggctttatttctgaaagcgaagctcaacaattattgcagtacaacgcaattcgattcgatagcatgcttaccgatgtttttgatgaaaagctaaataaagacctacctttatcaaatcctcatcaaatagtgtga

SEQ ID NO: 42874 - DNA, 384 bp, Acinetobacter baumannii
atgtctaagcaagattacgaaaatggattaaaagttcgcacagaagtgatgggagaagcttttgtaaaacgtgcccaagaaaataccgtgccctttacccagcctttacaagactggattaatgaacatgcatggggatcgacttggcaacgtgaaggtgtgctgccacgtaaatatcgctcattaattactttggcaatgttaactgcactcaaatcaccaacagaactcaagggccatgttcgtggtgcactcaacaatggttgtacagttgaagaaattcaggaaactttattgcatagcctgccatattgcggtgcccctgctactcaggaagctttccgggctgcgttagaagtcattcaagaatatcaacaacaataa

SEQ ID NO: 42875 - DNA, 537 bp, Acinetobacter baumannii
atggccttaaatattcccgaatctttggcaaacctcgaagcgaactgtggcctttttgcagtttggatggtacttcaacatcatggagtgcaaattgatgttgctgagctgattaaagtttgccgctatgacgatgaaggaacttatacgattgctttagccgttgctttaaaaaagttgggctttgaggtgtcatttcactcagatcatgatcctaacattagcccaagcgaacgcatgagctataaagaagcaaaggtattaagaataccaactgggccagcgctgagctatcaagatattcaaacagagacgcaaaatggaaaaatggtgattgtgtactacgacactttagaaggggtagggaatcagtcgctcatttattctatagatcaaaatgaaatctgcttttttgatagttttgagccgatgtcggcagcagtttttgagaatcaacgtaaagcagaaggtatttgccgtcagactgtcgtgattggtgatcgtaatttaaatattcattcgactaaattgaattaa

SEQ ID NO: 42876 - DNA, 1383 bp, Acinetobacter baumannii
atgaacgcggttaatgcttcatttacagattacaaagttgctgacatctcacttgctgactacggtcgtaaagaaatcaaacttgctgaagcagaaatgccagctttgatcggcttacgtaaacgttatgcagcgtctaaaccacttgctggtgcaaaaattcttggttgtatccacatgaccattcaaacagcggttcttattgaaacgcttgttgaattaggtgctgaagttcgctggacatcttgtaatatcttctcgactcaagaccacgctgctgctgcaattgctgctcgcggtattccagtttttgcttggaaaggtgaaactgaagaagaatatgtatggtgtcttgaacaacaaatcaatgtaaatggccaaccttgggatgccaacatgatcttggatgatggcggtgacttaactgctcttgttcatgaaaaatatcctgctcttttagagcgcattcacggtattaccgaagaaaccacaacaggtgttcaacgtcttatcgaaatgtggaaagacggcactttaaaagtaccggcaatcaacgtgaatgactctgttactaaatctaaaaatgacaacaaatatggttgccgtcactcattaaatgacgcaatcaaacgcgcaacagatatgcttttatctggccgtcgtgcgcttgtgatcggttacggtgacgtaggtaaaggttctgctcaatctttacgccaagaaggcatgatcgttcgtgtaactgaagttgacccaatttgtgcaatgcaagcatgtatggatggttatgaagttgtatctccatacaaaaacggcgtacaaacaggtaaaaaagaagacattaaccacgatcttcttggcaacactgaccttgttgtaacaacaaccggtaactaccatgtgtgtgatgcagcgatgttagacagcttaaaagctggtgcagttgtatgtaacatcggtcacttcgatacagaaatcgacacggcttatttacgtggttacaagtgggttgaagttaagccacaagttcaccaagtttatcgttcagaagacgaaaacaactatcttatccttctttctgaaggccgccttgtaaacttaggtaatgcaactggtcacccatcacgtgttatggacggttcttttgctaaccaagttttaggtcaaattcacttattccaagagaaatttgccgacctacctgcaagtgaaaaagctgcaaaaattcgcgtagaagttcttcctaagaaacttgacgaagaagttgctgctgcaatggttgcaggtttcggtggtgtactcactcagttaactcaagagcaagctgattatttaggcgttgctgttgaggggccattcaaatctgacgcttacaaatactaa

SEQ ID NO: 42877 - DNA, 837 bp, Acinetobacter baumannii
atgactaaacgtacacctatttcttttgagttttttccgccaaaaactgatgccggtgctgaaaaacttcgtattgttcaccaagaattacagcaattaaatccagagtttttctcgattacttatggtgctggtggttctactcgtgaacgcacacttgctgctattgaagatttcaatggtaaaggcactcctgttgcccctcacctttcttgtattggtgatgataagacgcgtattgctgaactactcgatttatacaaagctcaaggcattgaccgtattgtcgctttacgtggtgacttaccatctggacaggttggtcttggcgaacttccttatgctcaagatttagtacgttttattcgtgagcactcaggtgatcattttcatattgaagttgcggcttatccagaaatgcatcctcaagccgaaagccttgactcagatattcaacgttttattgaaaaagtacaagctggtgccaatgcgggaattactcaattcttctttaatccagactcatacttttattttatagagcgtttggaaaaagctggaattaacattccagtcgctcctggtatcatgcctattaccaatgcaagtaatttaattcgctttgcagatggtactggtgctgaaattcctcgctggattcgtaagcaattacaagcctatggcgatgacagcgaaagtattaaagcttttggtcatgaagttgttgttaagctatgcgaacgcctcattgcaggtggtgcaccaagtttacacttctactcaatgaaccaagtcgaaccaactcgtcagcttgttgttgaccttggtttaaattaa

SEQ ID NO: 42878 - DNA, 723 bp, Acinetobacter baumannii
atgaatcgtttttttatcgaaactgaacttacagttggctcaacaattcaactaactgaatcagtcttccatcattgggtacgtgttttacgcgcacagttacaagaacaagccacactatttaatggccaaggtggtgagtatctcgcgacattgactgaaattaataaaaaaaatgcgtttgtcactattgagaattttaatcctgtaaaccgtaatgctccatttaaagcccttcttggtcaggtcatgagtaaaggtgaccgaatggattatgccattcagaaagcaactgaacttggcgtcagtaagattcagctcttgaccagtgaacgttgcgaaatgcgtttgaaatacgaccgcgatcaaaaaaaattagatcattggcaagctgttgcaattgcagcatgtgagcaatgtggactcaatttagttccagaagttttagcccctatttctcttcatgaatggttaaactcatctgaccttcctgtatctaaatttgttttagctcctgaaaaagagcaaaaagatgtattggcagggatacaacctgaactagccctcttaattggtcctgagggcggtttaagtgacaatgaaattacgcaagccaatcaagctggatttatgaactggtgtattggggaccgtgtattacgtactgaaactgcacctgttgtagcattatctattttaaattatcggtttttatccatataa

SEQ ID NO: 42879 - DNA, 2850 bp, Acinetobacter baumannii
atgtctggccttcaggaagaatatttacagcatcaaacaaaaattgagcagcttcgcctctcaattcaatatatccgctggtatcttgttagcctaattttactgtgcctaatttcagctattattttcttttgttactttacttcttacattacaaactttatttggtcaattggctttactattttgacgcttacttgtctattatttgtcccaaagctattaacacattatcgtgatattcatttcattaagaaaacagatttagtgctacaaggcatttgtttggcgtctggaattttaatgggaataaatatcattgttctgcatttttcccttcctgacactttaatatctgtttctgatgttcatatcctcatagcattatttattacctcagcccacataattggtcttacatttttaactcaacaacctcgatatttttatttactctttattccaagtacagttccactcattattggacagtttactcattctcaaatcacccaactccccttttactttgcatataatttagctttcgtcgcaactttactttgtgcttatgcaactcagcgtaactatcaaaaaatttctcaactattatttaaaaataaacaacttgttcaagtagcagaacagcatactcaatgggctgaagagttatgtgtacagctccaacaagaagtaaataaatctaaagatattgaagcacagcttcaatttaataatcatttgctcgaacaaaaggttcgggaaaggacatatgacctcactaaaatgaatgagaggcttgaaagccatcatcataatttagcatttgcacatgaaacagcaggtatccgaccatgggattgggatattgaaaaacaaaaattagaaataacgttttttgatcaacaaaaacaaactcaaaatactcctttacacctcaagtcaattttagagcgcattcatcccaatgaccgaaagttatttgatgaacgtttaaaagaacacttggaaggaaaatctgatcacttcaatattaccttccgtattctacgtcgtaatggttcgtggcgttggattcatgacgtaggacgtgtcattagccgtgatcctaaaaccaataaagctttacgtatggttggaatgaccagagatattcatcaggaaaaaaaagatcaagaacatttgagactttctgcgattgtgcttgagcaggcagctgaaggaatttttattctagatgaaaaactcaactatattgaagttaacccctattatgagaaattaactggcttttcaaaatctgaattattaagtcagcagctatttaatatcacaataaatcagaagctacagcaacaacaatttcacgactccattactcaacaacttctaaaaactggcgaatatatgggccaatttgatgaaaagtttacatctggtaaaagtgtctatttatggcttcatattaatgcagttaaagatgagtacaaccagattattaattatattggttttgcacgtgatttaaccgaccaaaagcgacaagagcagcatttatcttatttaaaaaactatgatagtttgactcaccttcctaaccgcttttactattataatcaattacatcaatatcttgttaatccatcttatagttttaaaaatttggctttaatacgtattaatatcgatagatttagagcatttaatgagtttctaaataatgatagtggggatgagttacttaaacaatttgcacagcgactacgactgaccaatatcaatgcaattttagtggcttacttaaacggcgatgattttgcaattatttatgaaatatcacctattcatcccaacattgagcaatattgccaaaatatattacaagctttaaatgcgcctttttatattgatgaacaagaatatttcattacagcttctattggggttgcttgtttccctgagcatggccggcaaattgatcacctcaacaatcatgccgaacaagcgttgtcggaagcaaaacgtttaggtggcaatactatcagctattactgtaataaaactacaaacccatataaaacagcagacttagaacaagagttgcgtaaagccattcaaaatgatgaatttgttgtgtattaccaaccaaaaattaatttaaatgacaaatcgattaaaggttttgaagccctcattcgctggcagcatcctgaaaaagggttagttatgccaaatatgttcattccttttgctgaacgtagtagccttatttccgatattggtaaagttgttttagataaagttggcaaacagctacaagaatggaaaaaagctggctatgccgatgtccgagtttctgtaaatattgttgctcaacaaattcatcgaggtcttttactcagtgatttagacgaagttttagacacatatcatcttgatggttcaaatttagaactagaaatcacggaatctgctttattagataatactgacaatgtaaaaaaactattgcactccattaaagaacgtaatatttcaattgcactagatgattttggcactggatattcatcgctagcttatttaacagaatacccaatcgatgttttaaaaattgaccgggcctttgtttcgaaaatcggtgatcaaaaacaagaagcaattgtgaatgcgatgattgcgatgggtaaaagcatgggattaaagctagttgcagaaggtgtggaaaccgaagaacaagttatttatctacaaaagcagcaatgtgattttttacaaggctttttctttagccgtccacttcatccaaatcagattcttcaatatctacaaacaaatacgcatatttga

SEQ ID NO: 42880 - DNA, 2271 bp, Acinetobacter baumannii
atggacgatcaatctttaaaacaggccgctttaaattaccacgaatatccaaatccagggaaaatcagcgtcacgccaagtaagcaacttgtcaaccaacgagatttggctctagcttattcaccaggggttgctgctccatgtttagagattgaacgtgatccttcagctgctgcaaaatatacagcgcgtggtaacttggttgctgttgtcagtaacggtactgcggttcttggtttaggtaatattggtccattagcttctaaaccggtaatggaaggtaaaggcgttctgttcaaaaagttcgctggtgtcgatgtatttgatattgaaattgctgaaaacgatccagataaaatcgttgatattgttgcttcattagaaccaactttcggcggtattaaccttgaagatatcaaagcgcctgaatgtttctacattgaaaagaaacttcgtgaacgcatgaaaattcctgtgttccatgatgaccaacacggaacaagtattattgtaggttcagcattattaaatgctctacaaatcgttaataagaaaattgaagaaatcaaaatcgttgcttcaggtgcaggtgctgctgccctttcttgtttagatttactttgtgctttaggcgtaaataaagaaaacatcattgttgccgattctcgtggtcttcttacaacttcacgtgaaggcttggatgaatcgaaaaaacgttatgtacaagacattaaagcgactcaattacatgaagtaatggctggcgcggatatgttcttaggtctttcagctgctggtattctcaccaaagatatggtgaaacaaatggctgaaaatccgattatttttgcattagcaaacccggatccagaaattctgcctgaacatgcacatgaagtacgtccagatgtaatcatggcaactggtcgttcggactatccgaaccaagtaaacaatgctttatgtttcccttatatcttccgtggtgcacttgacgtaggtgctacaacaattaacgaagatatgaaaattgcatgtgtacacgcaattgcacgtatggctcacgtagaagctgacgcagctacttatggtgaaaaatctgcttcatttggccgtgactacttaattccacgtccacttgatcaacgtttgattttagaaattgcgcctgctgttgctaaagcagcaatggattcaggtgttgcaactcgtcctatcgaagatttctctgcatatcgtcaaaaactttctgaatttgtttataactcagcattcttgatgaaaccgatttttgctcaagcaaaaacagatcctaaacgtattgcatacgctgaaggtgaagatgagcgcgtattacgtgctgttcaaattgcagttgatgaagatttagctaaaccaatcttagttggtcgtacagcagtcattgaagcaaacatcaaaaaattaggcttacgtttacaacacggcgtaaatatcgagattgtagatcaagaacaaaatccgttatacgaagagttctggaaagactactatcaaaccatgcaacgcaaaggcatcactgttgaatatgctcaacgtgaagctcgccgtcgttcaacactcattgctgcacttctagttaagtttggcaaagcagatggtatgttatgtggtacttacagtagctataacattcaccttgacttcgtacgcaatgtaattggtcttaaagaaggcatgaacaacttcttcacgcttaatgcattaatgcttgaagatcgcaacttgtttattgctgatacttatgtaaacactaacccgactgctgaacaacttgctgaaatgactattttagcggctgaagaagtacgtcgctttggtattacaccacgtgtagcgctactttctcattcaagctttggtagtgaccagacagattcaagcgctcaaaaaatgcgtgaagtttatcgtattttatctgagcaagctccagagcttgaagttgaaggtgaaatgcatggtgatgcagcattagacgaaaatattcgtcattttgcattccctggttctcgtttcaaaggttcagcgaacttgttgattatgccgaacctagatgcagcaaatatttcgttcaacttgttaaaagcaacttctggtaacaacgtaacaattggtccaattttgctaggtgctgctaaaccagttcatattttgactccgacagcgacgactcgccgtcttatcaatatgactgctttaactgttgctgaaattcaacagcaagaaaagtaa

SEQ ID NO: 42881 - DNA, 1239 bp, Acinetobacter baumannii
atgcaagtgtatttagtaggcggtgctgttcgagattatttacttgggcatccctatcaagaaaaagactatgttgtggtcggtgcaacgccggaacacatgctcgcccaaggttttcaacctgtaggcaaagatttccctgtgtttcttcatcccgaaaccaaagaagaatacgcacttgcacgaaccgaacgaaagtctggacagggatatcacgggtttcaattctttactgatacaaccgttagtttagaagatgacttaattcgtcgagacttaaccattaatgcgattgcaatggatcaagatggtaaaatatatgatccatatggtggccaaaacgacttagaaaataaaattctgcgccacgtttcagaagcttttgctgaagaccctttacgggtattgcgagtcgcgcgttttgccgcccgatatttcccatatggttttcaaattgcgccagagacattgcaacttatgcaaaccatggcagattcaggtgaacttgatgcactaacaccagagcgcgtctggaaagaaacttcacgcgctttaatggaaaatcatgccgatatttatttccaaactttgcgtgattgtggggccttaaaacatcttttccctgagattgatgctttattcggtgtgcctcaacgccccgaatatcatcctgaagtggattgtggcattcatactttaatgtcattacagcaagcttgtaagtcgaactattcgcttgatgtacgtttcgctgttttagtacatgatcttggtaaggccctcactccagccgaggaacttcctcgccatatcatgcatgaagaacgcgggattaagccagtcacccaattatgtgaacgtttaagagttccgacacagaccaaacaattagccttatctgtttgcaaagaacatttaaaatgtcaccagattatgtccttgaaacctggtactttatggcgtctattgcaacgcttagatgttttacgtcgtccagaaagagtggaagcttttgtacaagcctgcgagtgtgatgcaaaaggcagattaggactagaagaccgtccatatcctcaagctcaatacatgcgtgaagccatgcaaattgttcgctccattaaagttcaagatttaccagagaacattaagggtgctgaaattggtgaaatgcttattcaatatcgaattgaagctttagctgaatttaaaaatcagcatcaaagtcttagtcactcctaa

SEQ ID NO: 42882 - DNA, 1176 bp, Acinetobacter baumannii
gtgcgccgcacctttacatggttaccttgggtgttacttattattgtaattgccagttttattgcatggcaaaaataccatcagccgaaaccaactgttgcagttgatggggtgcaaatgccagctgagaaagttgagccactggttgatacttctcgaacgggcggggtggtgtcttatagtgctgcggtaaaagttgcagcaccagcagtagttaatatttttacgacccagaaagttaaacaaaatcatcctttattaagtgatccggtattccgtgaattttttggaaatcaggttcctgagcaacaacagcaaaatgaaaatagtttaggttcaggggttattgttcgcgccgatggttacattctcaccaataatcatgtgattgctcaagctgaccagattgtggtggcattacatgatggacgccgagcagaagctacaattgttggcaccgaccctgatacagatttggcagttattaaaatcgatttagataaattaccagtattgccttttaagctcagtggtaatgaagttggtgatgttgttttagcgattggtaacccatttggcgtagggcaaactgtaactcaagggattatttcagcaaccggtcgctctgatttaggtattaatacctatgaagactttattcaaactgatgctgcaattaacccaggtaactcaggtggcgcattaatcgatgtggctggtaacttgattggtgtaaatacggcgattttctcacaatcgggtggctctttaggtattggcttcgcgattccggcaaaggtttgtcagcaagtattaaactcgattttaaaagatggtcgtgttgttcgtggttggttgggtattagtttacttccacctacacaagacgatgtattggcacctaagcagcaagtaggtgtagtggttgctgatgtcttaaaaaatggtccggcagatgctgcaggaattaaagttggcgataaaattgttcaggtgaataatgagccgatcacttcagcttctcatttaattaattatgtcgctttacaagcaccaaatagcgaaattaatgttctggttgaaagagaaggcaaacaacaaaactatgttgtaacggtaggtgagcgaaaagcacagaatacacaatctcagtatattccgcttccaagacgttaa

SEQ ID NO: 42883 - DNA, 759 bp, Acinetobacter baumannii
atggcaaatttgcatgaaattattcagtggtgcgaccaaaccttaaaagcagcagaatttaaagattacgcaccaaatggcctgcaaattgaaggttcaactgaagtaaaacgtattctttgtgcagtgactgcttctgaagatgcgattgatgcagcaattgctcagaatgccgatctattactcgtacaccacggttatttttggaaaggcgaaccatatccaattactggtatgcgaggtaaccgtataaaaaaacttattcaaaataatatctcattagtcgcttaccatctgcctttagatgcacatccgagtttgggcaataatatcgctattgcagaaaaactaaacttgaagaatttagagccacttgatctaactgagaaacatccaattggtaatattggttatttagagcaagcgctttctgtagaggaatttaaagcaaaactacaaaacagttttgattttaaagtgatccatttaccggctgaaaaacaaagtattcaaaaagtgggcttctgtacaggcggtgctcaagattttattgctaaagctgctttacaaaattgcgatgcttatatttcaggcgaagtcagtgaacgaactttttatgaagcaaaagaattaggcgttcattattttgcctgtggtcaccatgcaaccgaacgttatggggttcaacgtttagcacaagcaatttcaaaacagtttgctattgaaagtgaatattttgaattgaataatccgatttaa

SEQ ID NO: 42884 - DNA, 627 bp, Acinetobacter baumannii
atgacaaccattactttacctgcacttccatatggctatgatgatttagcgccacatatcagtaaagaaactttagaataccatcacgataaacaccacaatacctatgttgttaacttaaacaacttaatcaaaggtactgaccttgaaggtaaaactttagaagaaatcattaaagcaactgctggtgatgcatctaaagctggtattttcaacaatgctgctcaagtttggaaccacactttctactggaacagcatgaagccaaacggtggtggtaagcctactggcgcaatcgctgctaaaattgacgaagcttttggtagctacgaaaaatttgcagaagaatttactgctgctgcaacaactcaattcggttcaggttgggcttggttagttgctgatgaagtaaacggtaaactttctattactaaaacttctaatgcagacactccacttgcacatggtcaaattgctgtattaactattgacgtatgggaacatgcttactacatcgatttccgtaacttacgtcctaaatacatcgcaactttcttagaaaaccttgtgaactgggactatgcaaatgcaaaacttgcaggccaaccagctggtgtagagaaataa

SEQ ID NO: 42885 - DNA, 735 bp, Acinetobacter baumannii
atgaaaaatttattttctcaggttgtgagagggactctctttgtctcatttttttcaactgtgcatgctggtgagcttgaaattaagccaacttttgaagcaacttttggggcttttagtagtggtaaaagctataacggtgaaaacctagatgatgaaagaatcaattggcaagaaggccatcttaaatatggtgctaaagggcaatatacctttaaaaacaatcaactctatgcaagcttgagtggtattagctcggcaacatttggtgatggtgacgctggccaaaatagtaatggtaaagaacgcaaaacggatgtgaatgaatggatcattggttttaaagacggtaccaataaagatgagttaacgacctacgatttaagtattggtcgacaaaatatcatgattggtgatgggttcttcattgcgggtgatgcgttaaatcttggtaaagcgcctgcggatggcacactagatcgtggcggagcatattatttggcagctcgtcgaagctttgattttacaagtttgcttcaatacaaaccgcaagaggatacaacccttaagttggcttatttaaaatcggataataaagcacaattttccccagaactctttgtgactgatctgatgtatcagcttaaagataaaggcgttgggttcacttacttaaatgtattagaccttgaagatgctgaacacgtttcaggacgcgaagatcttaaaaattag

SEQ ID NO: 42886 - DNA, 2307 bp, Acinetobacter baumannii
atgcgtaaacaacgattattgaatgacatacaaaaaatactggcacttaacttatcaatcgctgcaagcttttggggactcaatactcaagcgtttgctcatggtggaaaggccgacatggtctcactttatcaaaacatgagtgagcaaggcgctaaagttgttaaagatgactttaccaatacctatacaattaccaaaggctctatagtggtgagagccaagccaaactcaaatcaggttttagtgaatggcaaacctttaaaactcagtgtcccgttattaattaaagatggtaagcctgttattggaaaagatttttttaacgaagtcttccagtcggggttagatcaaacttttaaagttgaaaatacctttcacccgctcaatagcttaaattctgacgaaatcaaaaagacatttgatgtgattaaccgctcgaaatacgcttataaaaatatgcgttttgccgagttaaagcttaaagaacctgaaaaagccaaagtatgggattactttattaatcataaagattttaaagaagatcgtattgcctcatttattttattaaagggcaatcaagcgattgaaggtgaagttaatcttaatactcaacaagtcacaaaatggaatgtacttaaagatactcacggtatggttttgcttgataattttgaagccgtacagcgcgtaattgagacgagtaaagaatatcaagatgcgttacgcaaacgcggtattaccgatgtgaagaaagtgatcgctactccgctaactgttggatattttggcggtaaagatggtctggataaacaactcaatatattaaaagtcgttgcttacctcgatgttggggatggtaactactgggcgcatccaattgaaaatttagttgctgtagtcgatttagataaagaaaaaattatcaagattgaagaaggtgcgatcattcctgtgccgatggcaaatcgaccttatatgtcgaataagcccgtagcaagtaagttaaaaccactcaatattactgaacctgagggtaagaactttagcattactggccaaaccatacattgggggaactggtgtttgcatgtggcgttagattctcgtgttggcttacagctttcaacagtgacctataaagataaaggtgtgaagcgtaaagtcatgtatgaaggtaacttgggtggaatggtagttccatatggtgaccctgatattggatggtacttcaaatcttatttggattctggcgaatatggtatgggaacacttacctcatctattattccgggaacagatgcacccgacaatgcagttttacttgatgccgtgattgcagactataaaggccagccacaagtgattccaaatgccattgccgtgtttgaacgttatgcaggacctgaatataaacatcacgaaatttttggcaatcaggatgcgagtgaagcacgccgtgaacttgtcgtgcgctggattagtacagttggaaactacgattacatgtttgactgggtattttcccaaaatggtgtaattggaattaatgcgggtgcaacgggtattgaagctgttaaaggtgttaaagcacgcaccatgcatgacagtactgccaaagaagacaccaaatatggaactttaattgaccataatattgtgggtacaacgcatcagcacatctataacttccgcttagacatggacgtagatggggaaaataacagctttatgcatatggaccctgtagtgaaagccaatgacaaaggtggtgttcgtacaagttcaatgcaaattgacagtaaagttattaccaatgagcaaaatgcagctgaaaagtttgatccatctaccattcgcttactcacgaatttcaataaggaaaataaattaggtaatccggtttcttaccagctcattccttttgcaggtggaacacacccagtggcgaaaggagccaatttctctaaagatgaatggttatttaaacgtttgaactttatggataaacaaatttgggtaacgcaatataatccggatgaacgctaccctgaagggaaatattcaaatcgatcaactcatgatacaggcttaggacagttcattggtaacaacgaaaatatcgaaaataaagaccttgtggtgtggatgacaacaggcacaacccatgtggcacgtgctgaagaatggccaattatgccgacagaatgggtttataccctaatcaaaccttggaacttctttgacaacaccccgactttaaacttgggtgaagaagagcaaagcacgcagcacgaccatcattaa

SEQ ID NO: 42887 - DNA, 915 bp, Acinetobacter baumannii
atgaaccaatatgtaagtgatgcattactcacatggacgcaccatattaaaaatgtgtgcggcaattttgaaaccgattttgatggaacccgtaatttattcattggtgaggttcagtgctttttattgggtgataccgaaattgcttttattaaaaataatgccaataaaattgtccgaaaagccgatgaaatagatcgagtgaataatcgtttttgttttttgattttgcagtattcgggaaaaatgctgctcgagtataagaatgagactctaagtctgaatgaaggcgatattgtgttggtagacccggtcgaaactatttcgatgtatccgcaaggtttggtgagtcagatttcagtgcacctgtcgcgtgaaaaattacttaaagaaaatattagtaccgaatattttggaaaactgattacgcaaaatatgagtggttttttactcaagaatattttgaaaaatatgtctgctgaaaacatcaaactttggtatgcaacggaagatggtaatgcttttgaagatgcgctgattgctttaatcaaacccacaatcaattataaaaatattaatagttcaaataacctgatggaaaaagccgagcgttttattattgagaacttagcaaaaccagatttaacccctaaattaattgcagagcatattggtgtatcgctacgtcatctctaccgtttattccttcaagaaaatttatctattaacaaatacatacagctaaaacgcctagaaaaagtcaaagcggatttgcttgataaaaagaacaaacagagttcgattacccaaattgccttgaagtggggtttctgggacggtgctcatttttcaaagatctttaaaaagacctatggtatctctcctaaagaatttagagagggtatgtcagtttaa

SEQ ID NO: 42888 - DNA, 954 bp, Acinetobacter baumannii
atgaatgtattacaacaaatagatgagtttacggtcgatccactacagttccgacgagcattaggaaattttgcaacaggcgttaccattgttaccgcacaaaatgcacagggtgagaaagtcggtgtaaccgcaaatagttttaactcggtgtcactcgatccaccacttattttgtggagtattgataaaaaatcttcaagtttttcagtatttgaacaagcaacacattttgcagtcaatattttatcgggcacgcaaattgagctgtctaataagttttcgagacgcaatattgataaatttgccgacaccaattttcaacttggcgcaggacgcgcacccattttagaaaattgttctgcggtgtttgagtgcgaacgttatcaggttattgaaggtggggaccactggattattattggtaaagtggttcgtttccatgatcaaggccgaagcccactggtttaccatcaaggtgcatattcttgtgtcatgccgcatccaagccttcaagttaagcaaactgaacagagcggcgtagaccaaacacattatgggcacttatataataatgtctgctacttgatgagccgtgcttttaaagcttatcaaaccgactatattcctaagcaaatggcttcgggtttccgtaccagtgaatcacggctcttgcttgttttggcaagtggtactgcttctagtaaagaagatttaccgcgagatattgctatgccaatgcaagaagttgaaaggtcggctgaaattctaaaatttgaaggattattggtcgatcatgataatttgtacgccctgaccgaaaaaggcaaacaaacggcgcagtatttgtttgatattgccgatagccaccaaaatgaggtgtttaaaaagtattctgaggaacaaaagaatatttttattaccatgctgcgagattttgcgggagtagcataa

SEQ ID NO: 42889 - DNA, 954 bp, Acinetobacter baumannii
atgactacactttatgatgttgtcgttaaaaatcgccatgtggaaggtggaaatattgcagttatggagtttgaatctgcaacttctgctgcattaccaaaggttgaacccggtgcacatattgatgtgcacttaccgaatggtatggtgcgccaatattcgctttgccaaaatccaaatgacgaaggaaagtttcgccttggaatcttacgtgaccctgaatcacgtggtggctcgatttctgcatttgatgaaattaaagatggtatgcaaattcaggtcagtgagccgaaaaacttattcccacttttaaaagccaagcacagtgtattgattggcggtggaatcgggattacgccgttaattacgatggcatatcaacttgcacatgaaggtgcatcatttgagcttcactactgtggtgctagccctgaaaaatgtgcttttgttgatgaaattaaaaatggtgagttagcaaaatacacaactttccattttaaatctgaaggtgcaagccacagagcattttttgaatctgccattaaagatattgatcctgaaagtcatatttatacctgtggtccagtcggttttatggactgggtgattaacctcgccacaactcacgattttcctgagcagcaaatccacaaagagtatttccaagtggaaactgacacctcgggagattcatttgaggtggtggctgagcgtagcggaaaaatcattatggtcgaagctggcgaaaccattttgcaggctttggctaaagaaggcatcgagattgaaatgtcttgcgagcaaggcgtatgtggaacctgcatgtgcgatgtgattgaaggcgaaccagatcacagagatgtttattttactgatgaagaaaaagccagcaatgagcaaatattagtgtgctgttcacgctctaaaacaccgagattagttttagatatctaa

SEQ ID NO: 42890 - DNA, 738 bp, Acinetobacter baumannii
atgaaacaggttgttttagtgacaggtgctgcttctggactcggtaatgtcattgctgaatattttgcgagccaaggacatcaagtgattttgtcagccagtacgcttgaaaaagccgaaaatgctaaggcacaaagtcagtatgcccaaaatatgtttcctttaaagctggatatttcggtcgaggcagattttcatgcagcggtgcaatggattgaagagaaattttctaaacttgatgtgttaattaacaatgctaccgtcaccaaagcaacgcccgtattagaaattaccgcagccgattttgattgggtgacccaagttaaccaacgcggcacctttcaggcttgtcaaattattggccaatatatggcgaaaaaaggttatggacgcatcattaatatggcgtcgttagcaggacaaaacggcggtactgcaacgggtgcacactacgcggcaaccaaaggggccattgtgacgttaaccaaaatctttgccaaagagtttgcggcaaaaggtgttacggtcaatgcgattgcaccgggaccaatggagtcaccaatcgttcatagtgtggtgccagacgaaaaaatggaacagttcatccagaatattccggttaaggccttaggaagtatgcattttattgctgaaacttgtgggttgcttgcaagtccaaatgcgagttttgtgactggtgcaacatgggatattaacggtggtttattcatgcgttaa

SEQ ID NO: 42891 - DNA, 486 bp, Acinetobacter baumannii
atgaatatgaatctacaattattaaatgaagtcactgctttcatctgggctgaagcagatatgttagaccacagcgagtaccgtgaatggctcaatttatggaatgaaaaaggtgtttatatcattccgattgacccgaacctcacagactacgaaaacaacttaaattatgcctatgacgataatcatatgcgtaagttacgggtagagcgtcttgaaaatggtgaggcaatttctacggcaccaaaggcgaatacggtacgcagtatttcgcgagtacgagtgattcaagatcaagatgatgaaatcgttttacgctgtgctcaaaacctacgtgaatttcgtaaagaaaacctcaagcattacacggccgatattacataccatctaacccgtgatgccgatactggctttaagattaaccgtaaaatcattaacttggttaactcaaccgataccttggctggtattagctacattctttag

SEQ ID NO: 42892 - DNA, 1278 bp, Acinetobacter baumannii
atgaacagtattatcccaacgcataacattggcattgattatgatgctttagttaaaagtgaccgtgcccatacctctctttataaagatgaacgcatttttgatgaagaaatggaaaaaatcttttatagcacttgggtgtgggttgcgcatgctagcgaaattccagaagccggaagctataaaaccattaatatcggtaaacagcctgttgtagtggtgcgtgaccgtaaaaagaaagtccatgtacttttaaaccgttgccgtcaccgtgcagcaaccgtatgtgaacataaaaaaggaaaaactaacagttttgtatgcccatatcacggttggagttatgcacttgatggcagtttacgtggcgtgccatctccggaaagttacggcgattgtttagataagtcagaattaccgctggtgagtctacgggtagaagaatataacggcatgatcttcgcttcatttaaagaagacattcaaccgcttgaagagttccttgggcctgcgaaaaaatggattgatctgtttatgaaacaaggcgcaggttatccaattaaagtgttgggtgaacaccgtttccgtttcccgggtaactggaaaatccagcttgaaaataccaccgatgcatatcacttcccgttggtacacaagtcattcttaagttctgtcgatgaaaaaaccgaagaactctttaacttcgaaaaccagccgggctttgttgaagacttaggaaacggtcacagtgtcatggtgatgattcctgaactggtcgatttagaagaagacttaatggagcgtccaattcaagagcgtttcgaagacttggctcaagctttacgtgacgaagggcatgaagaattagaagtacgccgtattgttcgagcagttggtggttcgggctttaacttaaatttattcccgaatattgcatgttcaatggcgttcttccgtgtgttacagccaatttcagttgctgaaacagaaattcatcactcggtgattacgatggatggtggtccacaaattgccaatcaatatcgcttacgtttgcatgaacatttccaaggcccatttggttttggtacgccagatgattctgaggcttgggaacgcgtgcaacacggtgccaatgccggtaatgatttatggatcatgctcaaccgcggtttaccgggcgaagttaaaactgaagatggcttaaaaagtgatgtcagtgctgaaacaggtatgcgtgcagcatatcagcaatggaaaaagatgatgacagcttaa

SEQ ID NO: 42893 - DNA, 528 bp, Acinetobacter baumannii
atgactgacaaagtgaatattgcagaaatcatagaacggctagaacagttggaagcacacaatgctatccgtaattgcataaaccgttatatggaaatctgcgatgagctcaatgcaaatacagatctttatgagttgatgaatctttttgatcaagactgtatttgggaaggtattggcgataaatattccaaatcttttggtcgttatgattcttggcagtcgatttacgacatgttcaaacgctatacacaaaaagaatctcactttgtcatgaatgcacactttgtaaattcagaacaaatttatgtaaatcaaaaagatgcaaatgcttcatggctgatgttgcaaacttcaacttttcaagatggccgtagtcatctgaatgcggcaaagctcaaggtgaagtttcataagcaaacagatggaacatggaaaattaaacatttccaaacacagaatattttcagtcgtccggtatcgcattggcacagtgaagccgagttgccggtaccttcccaggaatga

SEQ ID NO: 42894 - DNA, 360 bp, Acinetobacter baumannii
atggaagctaaaaaaccattacgcgtgttgttttgcatgggtattaaccagaacttttttgatgcagaacctgctgaagcaaaagcggtttgggcagcatttggtgaaatgtggaatggcattcatgacctacctggtgtgcatgtttttgggaatcttgatgatgaccaaagcatggtgggtgcaagtacgggctggccttggaccacttatttgcttgcagatgttccggatattgagacagtacatgcagcttgtaacttatttagaacgaccgtggtaggtgaagggccatacaaactttggaaatattgcaaagttgaagctcgtgttgggcgtgaattgattattcaacgttaa

SEQ ID NO: 42895 - DNA, 1167 bp, Acinetobacter baumannii
atgaataagttgtctaaaatggagtttgcttctcaagacaaagcagttgacttagacgctttgtgtcaagaaattcgtgagcgtgcctgtacaggtgaatttgataatcaagcgtatgtgagccaagacattatcgaaaaacttaaacaaattggtgtttaccgtgccttggtgcctaaacgttttggtggtgaagagtggtctccacggcagttttgcgagttaatcgaaactttatctaaagctgatggttcagtgggttgggtggcaagtttcggtatgagccctgcctatttaggaagtttgccggaagaaacgcttaaagagttatatcaaaacgggccagatgttgtatttgctggaggtattttcccaccacaaccagctgaaattactgatgaaggtgtagtggttcgtggacgttggaaattctcaagtggctgtatgggagctgacattgttggtgtaggaatttcaccgcttaaaaataatgaaatgcaaggcttaccacgcatggcagtgatgcctgcgaaaaaagccaaaatcgaaatgacttgggacaccgttggcctaaaaggtacaggaagccatgatttagtggtcgaagatgtattggtcgaaaagaaatggacctttgtacgtggtgaaccttcaaaactaagcgagccattttttaaatatccgtcactgtctttagcgactcaagtattaactgtggtgggtattggtgttgcagctgctgcattagaagagtttgaaaaattagcaccgggtaaagcatcgattacaggtgggtcagaaattgccaaccgaccagtgactcaatatgagtttgctcaagctgatgcagagtttcaggcggcaaagtcttggttttatcaaaccatggatattgtctggaatgaaattattgctggtcgtgaagcaactgctgaacagattagtgatatgcgtctggcatgtacacatgcagctcgcgtttgcgccaaagtgacccgaaaaatgcaaatgctcgcgggtatgacagcgatttataccaacaatccatttagccgttttgtaaatgacaccaacgtggtgacccaacatgcctttatgggtgatgcaactttacaaaatgcaggtttagtcagtttcgggttaaagccagccccaggttatctataa

SEQ ID NO: 42896 - DNA, 1110 bp, Acinetobacter baumannii
atgaatattgttagccaaagcgtgcacaaaggaagtggcaagctcaaggtcatggtcaaggacacaattgatattcaaggcctaaaaaccattgctggcagtcgagctttattaaatgttgaacctgctcaagatgatgctgaagtaattaaaaatattctaaaagcagattgtgaaattattgcgaaaacaaatttgcacgaattggcttttggtattacaggcattaatcacgcttttggtacacccatcaatcctaaatatcctgaacttattccaggtggctcttcgagtggttcggctgcggcagttgctgctaaacaagctgactttactttaggcacagacactggcggctctattcgtatgcccgctgcgtgctgcggagtttttggtttaaaaccgacttttggccgtgttagcagaaaaggcgtatatccgccgtcaagttctctggattgcgttggtccttttgcaaattcagtcgagatgattgaaaaggccatgcaaattattgatccaacttttaaacctactgaatttactagtgcaccaaatcttgctgttttggatgtaagcgcagatgagattatttggaattgtatttatcaagcatttcaaaaagccaatttacagaccacttcagaaaaagttgaacattttgaagcggcttatgatgcaggcatgcagattattaattatgaaaattggcaagcttttggcgaattaactcaaacgggcttaattggttctgatgtaaatggtcgtttattaaaagcggcacacactactttagagcaagtgaaacaagcagaagttgtgagagcacagttgacccaagaacttgacgctctactagaaaaatatgatgcattggttttaccgacacttccacaaattccaccaaaagtttctgaagctgaaaacacggtcgcttttttaaatcttacgggtttagttcgaccatttaatttatcaggtcatccagccatttcagtgccacttgaaaccagtgaaggtttaccagtgggcttacagatcgtatcaaagcatcaaaaagatgagcaattatgcgctatagctaaattttgtgttgatgcaatgcaataa

SEQ ID NO: 42897 - DNA, 525 bp, Acinetobacter baumannii
atgcaaaattttgtttataataggattacccttttttcactaagttattgcttagctatgcttgatcatttagaacaatttcttcctaataaagaaccgtcgagtattcaaaatttcccttttttttgggtttcccaagtgaatggaaagtattcacaactgattgaaaaatcaataaaaaagctaggtattgataatacacgccgtaaaattattttaagcactaatgcccttggggaagccagtattaccgacattgccaatctttctactttaaagttaacgacggcaacaaaagctgtatatcgcttggtagaagatggaattgtcgaggtctactcttctacttctgatgaacggatctcgatggtgaaattaacggccaaaggtattgagctggttgaacagattaatcaaattagtgtggtcactttggcaggtatcctgaatgctttttcagaagacgagctacataatttaaataaccagttaaagaaattatttgacctgatgccatccagctaa

SEQ ID NO: 42898 - DNA, 1350 bp, Acinetobacter baumannii
atgaaccaaagtaatatcgctgttgaaaggacacagaagaaaagcaatgcatatgcatggtatgtggtcatactttgtatgttggcatatatattttcatttattgaccgccaaattctggcgctgatgattgaacccatcaaagcagatctccaactttcagatacacaatttagcttattacatggcctcgccttctcactgttttatgcggttatgggtttacccttagcctatattgccgatcgtttttcacgaccaaaattaatttcaatcgggattattgtttggagtctggcaacagcaacttgcggtttaagtaaaaactttattcaactgttcttaagccgtatggcggtaggtgtcggtgaagcggctttatctccagcggcttattcaatgttcagtgacatgtttagtaaagacaaactaggtcgtgctgtcggaatttattcaattggtgctttcttaggtggaggtatcgcctttttagttggcggttacgtgattaacctgcttaaaggcgtgacactcattgaagttccactattaggcgcactcaaggcatggcaaattgcctttttggtggtggggttaccgggcattattattggtttgctatttattttgacagttaaagaccctgcacgtaaaggacagcagctcaaccaaagcggacaagttgaccaagttaaattcacgcagtgccttcagtttatcaaaaagcattcgaaaacatttgcttgtcattatttaggttttaccttttatgcaatggcactctacagtctgactagttggacaccagcattttatattcgtaagtttcaactcgcgccgactgaaactggctatatgctcggcactatattgctagttgcaaatactttaggcgtgttttgcgcaggatggttaaacgactggtttattaaaaaaggacgccaagatgcaccgatgttcacgggggtgattggtattgttggcctgattattccaattgcatttttcacccaaacagatcaactctggctttcagtaactttgctcattcctgcaatgttctttgcctccttcccacttgtgatttcggcaacagcattgcaaatgttagcacccaaccaatttagagcacgcctttctgccctattccttttggtaagtaacttaattggactcggtattggtacaacattagtggcaattattacagataaggtttttggcaatccattaatggtgggttcttctttatctattgtgggtggtttgtcctgtgtactggctttggctctactttttaaaggctgtaaatcctttagtgaaagtatgaagcttgaaaaattaaattaa

SEQ ID NO: 42899 - DNA, 1257 bp, Acinetobacter baumannii
atggaattatttcaccgttttaaaccacacactttagccattgccactttattacttatgtgcagcaactcatgggccgcaaatccaaatcagcaaactgaagatgaatggaaattcactttaaagaatgcctatatcaaccgggattttgataatgatgccttaaaagatactggcagttggtctcaagcagcatcattattttataaatcgaaaatgcatgaaactccactagttatagcagacaagccgattacgattggtgccgatgcttctgttcaatacgccgtgcgcttaagttcagacaaacatgtcgcagatactgttctgccttttaataaagaaacgcaatctcaggcttcagactatttaaaatacggcgcgactttaaagctaggctatgacaaaacacttttaagtgtcggtgaactctggctagatttacctgtcactgctgtagatgctagtcgtcagttactcacatcgtattggggaaccaacttaaagtctcaactttcagatcaactctatgctgaaattggccgagtggaaaaagtgtcgccacgaaatgaagaagactttaaaaagttttctttcacatccaatggggttactaaagaatctgatggtttgaactacattgacttgcgatatcaattcacgccgtctttaaagggcgaatactactttggtaatttagaagatctgtataacaagcattatgttgggcttgaacatacgtggaagcagccaacttttgccctcacctctaagtttaaatactttaatgcaaaagatgatggcaatacctttgatattgatgcgcagaacattggattacttgaaacagttaaagtaaaaaaccatacctttggtctgggttaccagcaaattatcggtgagtcggcttacccgctaccagatggcttcttaccagaaacttatttcattaactggaacgctactggattctttaaagaagatgaaaagtcttaccatgtcatgtacggctacgactttaaagattacgttccaggcctaaacgcgatggtgaaatatgtttatggccatgactttaaagcagcaaatggtgaaaagaaccatgaaaccgagtcaaacgtaattctaaactatgcatttcagcaacccttcttaaaaggcgtggctctgcaatacattcggattgactacaacgtaaaacacggcaatgactttggtgaagatcgtttattcgtcaattacaccaaaaaattctaa

SEQ ID NO: 42900 - DNA, 744 bp, Acinetobacter baumannii
atggcgaagacaattttaattacaggtgcaagttctggattgggcgcaggtatggcgcatgaatttgcagccaaaggctataacttagcgatttgtgcacgccgtttagacagattagaaactttaaaaactgaacttgaaaatcagtatggtattaaagtaattgcaaaaagtctggacgtcaccaattacgatcaggtttttgaagtatttcgcgcctttaaacaggagtttggctatttagaccggattattgtaaatgcgggagtcggaaatggccgtcgtattggtaaaggtaattttgaaataaacagagccacggccgaaacaaactttatttctgctttagcacagtgtgaggcagcgattgaaatttttagagcgcaaaatgcaggtcatttggtggtcatgtcgtctatgagtgcgatgcgcggattaccaaaacatttatcgacttatgcggcaagtaaagctgcggtcgctcacttggcggaaggtattcgtgctgaattattggatacgccaattaaagtctcaacaattttcccaggttacatccgaactgaaatgaatgaaggtgctaaacatttaccttttgaagtcgacgcaaaaacaggatgtaaagctttagtcaaagctatagagaaacaacctgtaaaagcgtatgtaccacagtggccatggttaccaatgagtattgccatgaaggttttaccattaaagttggtcaataaattaggataa

SEQ ID NO: 42901 - DNA, 699 bp, Acinetobacter baumannii
atgaccacaatttatatggtaagacacggacaggcctcgtttggtaaaagtaactatgatgagctgtctgaaaatggtgaggctcaggcgactttgttaggtcgttattttaagcaaatattgaaagaacaaccttatgtggttgctggaactatgcagcgccatgagcagactgcaaagctcgcactcaatgaatgttttccagatgcggtgattcaacataataatttatggaatgaatttaaccatcaacaagtttttgcccgttatgaaccgcgttttgaacagcctgaactgttaaaagctgatgtggcacaagaacagaaccctcgcgcatatcttgccaaaatattcgaaggtgccattgggcgatggacagatggcgattttcatcatgaatatgatgagtcttggccacactttaaagaaagagtcgaaacagcattgcagcaactttgtgatgagttagcaaaaaccaagcctcgttatgcagtcatttttacctctggtggtgtgatttctgtagcaattggaaaattgcttgaactgagtcctaatcgaacttttgcgttgaattgggcaattgcgaatacaagcctcacgactttgcgtttggttggaaatgaagctcaggttttaagtttaaatgaacatcattttataaaagctgagcgtccagatttactgacatggatttaa

SEQ ID NO: 42902 - DNA, 1122 bp, Acinetobacter baumannii
atgtcggtaattgatgtaggcggtgaagtacgtgaaggtgaagagcttgatattggggcagtggaaaactggttaaaaaaccaaggtgttgagttggttggcccagcagtcgttactcaatatacgggcggggcgtcgaattggacttatcgtttaaagtatgaaaataccgatttaattttacgtcgtcctccaaaaggaacaaaagcgaagtcggcccacgatatggcccgtgaatatatggtgcagaaaaaccttgcgccttattatccggtgcttcctaaaatggtggcactttgtcaggatgagtcggtcattggcagtgatttttatgtcatggaacgcattgaaggtattattcctcgtgcaaaattaccgcctgagcttggctttaatgaagaaaatgttcatgagctttgtgtaaatgttattgataagctgattgagctacatcaagtaccttatgagaacacgcctttagctgaactaggcaaaggtgcgggatattgccgtagacaagttgaaggttgggataagcgctatgaaaaagtccgcacaattaacgttccttcatttaaatatgttcgaaaatggctaaacgataatatccctcaagactctacaacttgcattattcacaatgattggcgttttgataatgtgattttagatccagagcatccaacagaagtgattggtgtgttggattgggaaatggcgaccttgggtgatccattaatggatttgggcagtgctttggcctattgggttgagccaacggataatatgatttttagatcgacgcgccgtcagcccactcacttaaagggaatgttctctcgaaaagaagtcgttgactattatttgcaaaaaacaggattagaacctcaaaactgggctttttatgaagtgtttggtgtattccgtttagcagtgattgcccagcaaatctattaccgttattaccacaagcaaacccgaaatcctgcatttaaagatttctggatcgtcattcatgcattgcatattcgagctttaaaacttatcgcacagcaaaaattgcaagaatctgaatttgctcagcaatctctacagaaaatacagggtattttaagaagatga

SEQ ID NO: 42903 - DNA, 1245 bp, Acinetobacter baumannii
atgtttgaactctccaagaaagctcaggattttaccgagcgaacaagaaaatttattttagaagaaatagaacctgtcgaagcaaaattttgggaagaagttcacgagttaaatccagatggaaactggaaaaagtggcagtggcccgagcttttagaaactctgaaatctaaagctaaacaagctggtctttggaatatgtttttacccgatgaaaagctgggtgcagggttaactgttcaagaatatgcgcacatagctgaattaactggccgtagcttattggcacctaccgtttttaactgtaatgcaccagatacaggaaatatggaattgttatggcgctatggcagtgaacagcaaaaacaacaatggttacagcctttattggacggaaaaattcgttcggttttttgtatgactgaacccgatgttgcgtcaagcgatgcaaccaatatgcaagcgactgcgctcatcgatggtaatgaaattgttttaaatggcaaaaagtggtggtcgtctggtttaggtgacccaaatgctaaagttattatttttatggcacatactccagatgaaaccaaagaccgccaccatcagcactctatggttttagtaccaattgatacagcgggtgtagaaattcaacggatgttacctgtgtttggtgactacgatgcgccacatggacatggtgaggttcattttaataatgttcgagtacctcttgaaaattttattggtggagcggggcaaggcttcgaaattgcacaaggtcgtttagggccggggcgtattcaccattgcatgcgctgtattggagctgctgaaaaagcgctagaaatgatgattgatagaggcatgtctagaacagcgtttggtaaagaaattttaaaacttggtggcaacctcgaacgcatagccgatgcgcgagtcgccatagatcaagctagacttttaaccttgtatgctgcttataaaatggatactttaggaaatatggctgctttaacagaaatatctgcaattaaagtagtggctccgagtgttttagaaaaagtagtcgacatggcaattcagctacatggcggtgcgggcgtttcaagagatacaccattaactggtttctttgctcaagcacgcagtttacgtttagctgatggtccagatgaagtacataaaggcatgattgccaaattagagttggccaaacgtggttatttcggtcgtcataagaaagtataa

SEQ ID NO: 42904 - DNA, 921 bp, Acinetobacter baumannii
atgaataatattcataacttgtatggcctagacttaagttttttccatcgaattgatatcaatttatatccgctatttatcgcgatttatgagcaaaaaagtatttcgaatgccgcaagcagtctcaatattacgcagtcagcagcaagtcatgctttgcaacgattacgtcaacaacttgaagatgatgtatttatacgtgtaggcaataaaatgtctgcaacgccttttgcagaacagatttatccaactgttaagcaagcacttttaacgattcaaaatattagccaacagaaacatgtctttgatccaaccagtttaaaaaacttaaaaatcgccgttcatgatgagattgaaccgattattcttccacggcttgctcaacattttcaaaatcttaatttagatttgcagtttgtcagtatgaagctagatcgaaaacatattatggcagacttagcgacacagcagctcgatttcgtgattgatctagaacaatacttatctccaaaaattacctttgatcatttggtcacagatgagttcgttatttgcagccaacttaaagaagtcgatttagctagttatattagtggacggcacattggtgtttcatcacgccgtacgggcgctttacttgaagatatttatttaaaccaacaccaaaaaatttcaagaaatgtatttatgcgctgtcaaaactactcaacggcgttacaagttttgggagcccaagccgacgcaatacttaccatgccccgtatgattttgcagcatttatcttatagtcctgagattcggttacattctctaccttttgagatgaccaatattaaaatgggtatgttttggcacgaagatttaagggataatttaagacatcaatttttgcgacatgaaattattaaactttttcagtaa

SEQ ID NO: 42905 - DNA, 813 bp, Acinetobacter baumannii
atgagtaaagatgaacggataatccagaatcaggacaacaaaaaaacgattcgtcatgaagattacattgctggcatcggtaaaggcatggcgattttagatagctttagtagtaatcaacatcgtttaaatatttctatggcggctgaaaaaaccgggcttacccgagcggcagcaagacgccatttattaactttagaatatttagggtatcttgagtcagatggccactattactatttaaccccaaaagtactcaaattttcaggagcttatttaggtgcagctcagcttccgaaagtgtctcaacctttattaaatcttctaactaaccaaacctctctcatttattctgtgatggtacttgatggttatgaagccattacgattgcccgtagtgctgcccaccaacaaaccgaccgcgtaaatccatatggtttgcatttgggtaaccgcttacctgctcatgcaacctcggcgggtaaaattttactggcacatttaagccaacaagaacaattggactggctccaaaaatatccactccagcgtttaactaaatatacgcatgtcgaaaatgataaatttttagagttactaaaagaaatccgagaacaagattggtgttattcacgtgaagagcacgaattaggtgtccatgcgctcgccgtaccgatttatggacaagactttaaagtggttgctgctttaaacattgtttctccaaccatgagaacaactgaagaatatttaattcaacatattttgccgctattgcaagagactgcgcgggatttaagacaagttctctaa

SEQ ID NO: 42906 - DNA, 867 bp, Acinetobacter baumannii
atgcaacaacctctagtaaaagatttttttgatgaaaataccaatacttttagctatgttgttgcggatttagcaacccgtcaatgtgcaattattgatagtgtgcttgactatgatgctgcttcggccactacaaaaacaactaatgctgatctgatcgtcgattatgtcttggcgcaaaactttaaagtacaatggattttagaaacccatgtacatgcggaccatatgactgcggctcaatatttaaaatctaaattgggcggtacaattgcgattagtcaaaaaatctcggtagtacaagaaacattttcggctatttataattttgattttaagaaattcaatgaaaatcagccttttgattatctatttgaagattatgaacatttcaaaataggggaaatagatgcctataacattcctacaccagggcatacacctgcttgcttaagctatgtgattggtgatgctgtttttgtcggggatactttatttatgcccgattatggttcggccagatgcgattttcctaaaggaagtgctgctgcactttatgattcggtacaaaagctttatacacttcctgacgatatgcgtatgtttctatgccatgattataagcccgaaggccgtgacgaatatatctgtcaaacagatataaaaactcaaaaacaaagcaatatccatttaaatcgacgagtttccaaagaatcattcataaaaatgcgtcaagaaagagatgctactttggcaatgccaaaattaattctgccttcaattcaaattaatatgaacggtggaaattttccggaacctgaagcgaatggcatccgctatttaaaaatcccatttaattacttttag

SEQ ID NO: 42907 - DNA, 432 bp, Acinetobacter baumannii
atgtgttggggtaatcttatgaaaaatatctttgcttttatatttggtggtttgttttcattgggattaatgatttctggtatgtctaaccctgcaaaggttttagggtttctagatatttttggacaatgggatattagcttaatgtttgtgatgctaggtgctattgctgtggcagttattccgtttcaaagggctattaaaaaaccaaaaacgatttttaatgaacaaattcaattaccaacaaatacacagattgaccaaaggttaattgtaggcgcttttattttcggtataggctggggaatagcaggtatatgtccagcgcccgctttaactcttattggattagggcattttgaagcactttattttattgtcgcgatgttagtaggaatgtttatttaccgaattttaaataaaggaaattaa

SEQ ID NO: 42908 - DNA, 414 bp, Acinetobacter baumannii
atgtcaagtattgtctatgcctttgtgggtggtttattactcggtgtcgcaacagttgggtatttatatataaatggtcgtatagctggaattagtggtttgcttgcccaattcattagcccatctagagatatatttaaaagttctgcatcctggttcattgcaggactcgtgattacacctttcatatatggttatttctatcagcctgaaatcgaaattaaagccaattcatttgtacttattctggcagggttacttgttggttttggtacacgacttggatcaggctgtacaagtgggcatggcatttgtggtatgagcaggctctcaaaacgctcaataatagcgaccgcaatttttatgtttgctggcatgctgactgtttatatcattcgtcatgtgttggggtaa

SEQ ID NO: 42909 - DNA, 468 bp, Acinetobacter baumannii
atgagatttttagttcttgcaactttatccggtttggctttaatgggttgtgcttccgttcaacaagcacctaatacacaagaaaccattcgttatgcttctagtccatgtttcggcgcatgcccaatttactcagtagaagtaacacctacaggtttaattcgttttgaaggtaagcaatatacaaaagcaattggcgttaaagaaattcaaggtagcgtaaaagattatcaaaagcttgctgatgaattaaaaacttatcgtccgcaaacaggaacccaatctaaaactgcaggttgtcagcaaactgcgaccgatatgcctagctattacattacttggattcaaccaaatggtacagaaacaaaattaagccattacacaggttgtatctctccagcaaataatagattaaataaagttatggaaaaattacctgaacaattaggcattaaagatctaatttaa

SEQ ID NO: 42910 - DNA, 2430 bp, Acinetobacter baumannii
atgtctgagtcagattctaagtttcatatcttattcaaaatatggtgttttattttaggtttagctttattggctactggtattttttatatcgtgggcggtggaaagctagtatctctcggtggttcttggtatttccttatctcaggactgtttataaccatttcagcaattagtattttccgaaaaaaagcgctgggcgtctggatttttgcggctgtttttgttggtacggtaatttggtcactcattgatgctggatgggaattttggccgttattttcgcggttaatgtttcctgctggtctttttgctgcgttgttatttaccttaccttcaattcgacgctaccaatttcaaactagtttggcatcttcagcctatgcagtaggtggcttagttgttgtgggaatgttgattgcgctctaccaaatgttccaaccgcatccaacagtagcaagctcaggtgaaaaactacctttagtaccagttgaccctgcaaaaaaacaggtgaattgggaaaattatggaaatgatgcgggtggtagtcgctttgttgctctcgaccaaattaaccgagataacgttcataaactaaaagaagcttggcgctttagaacaggtgattttacaacgggtagcggtaatggtgccgaagaccaaatgacgccgctacaagttggaaataaagtctttttatgtacgccacataacaacatttttgcaatagatgccgactcgggcaaacaactctggaaagctgaagtgaactctacagccgatgcttgggaacgctgccgtggtgttgcatacttcgattcaactaaaccactagtgcaaccaactttagctggtgcaactccggtcactactgttgctagcaacacagcctgtccacgccgtgtatataccaatacgccagatggtcgtttaattgcagtcaatgcagataatggtcagcgctgtgcggactttggtgtaaatggaacggttgatctactcgaaggcttaggcggtgggactaaggctccacgttttgaagtgacttctgcaccgactattgccggaacaactattgtggtgggtagccgtattgcagacaacgtggcagcagatatgccgggtggtgtaatacgtggttatgacgtgattacgggtaaacttcgctgggcatttgacccgcgtaatccagatcctaactatgttcttaaaccgggtgaaacctataaacgtagttcggcaaactcttgggctgcaatgtcatatgatccacaaatgaatacagtgttcctaccgatgggtagttcatctgtcgacatttggggggggaaccgtaatccgttagatcacaaatacaatacttctgttttggcacttgatgcgacaacgggtaaagaaaagtgggtatatcaaactgttcataatgacttatgggactttgacttaccaatgcaaccaagtctagtcgactttccattaaaagatggtacgactaagccagctgttgtgattggaaccaaatcaggccaattcttcgttcttgaccgcgtaacaggtaaaccactgactaaaataattgaacagccagtgaaagcggcaaatattccgggtgagcaatacagtttaactcaaccacgttctgttgaaatgcctcaaattggtaatcagactttaactgagtcagatatgtggggtgcgacgccgtttgatcagctcatgtgccgtattaactttaagtcaatgcgttacgaaggtttatttactgcaccgggtactgatgtttcattaagcttccctggttctttaggtggcatgaactggggtagtattgcttttgacccgacacatcgttacatgttcgtaaacgatatgcgtcttggtttatgggttcaactcattaaacaaacacctgaagacattaagattcaggcgagtggtggcgaaaaagtaaatacaggtatgggtgctgtaccaatgaaaggtacaccatataaagtgaataaaaaccgctttatgtctgctttaagtattccttgtcaaaaaccaccgtttggtaccatgacggcaattgacatgaaaactcgtcaggttgcatggcaagtaccacttggtacagttgaggacactggaccacttggtattaagatgggcttgaaagcaccgattggtatgccaactattggtgggccaatggcaactcaaggtggtttagttttctttgctgcaactcaagattattacttgcgtgcttttgattcatctacaggtaaagagctgtggaagtcacgtatgccagtaggtagtcaaggtacaccaatcagctatgtttcacctaaaacaggtaaacaatatgtagtaattaccgcgggtggtgcacgacagtccccagaccatggtgattatgtgatcgcatatagtttagagaaataa

SEQ ID NO: 42911 - DNA, 1320 bp, Acinetobacter baumannii
atgccaaatgtaatgaaactgagtgtgctaacaattgctgtattgggcagccaatttgcacttgcaaatgagccgtggtcacaagaccgtcaatggttgcttggtgattggaatggaaaacgccagcaattagagcaacagggctataaatttacggcttctattatgagccaaagtgccacaaatttagatggtggttacaacgacagcaatacttttgaaaatgctgcacaactttctttaggtgccaacttcgatttagaaaaaattgctggttggaaagatacaacagcgagcctagtcatgactaaacgtgacggtaatgcattaactcttgagcgtattaaagacccacgttctagccaattgggcaatgctcaagaaatttatggtcgcgggaaaatttggcgtttatcccaagcatgggtgaagaagggctttgttgataatactgtacaggtcaaatttggtcgtatgggaatgtcagaggactttaatagttctcaatgtgagtttcagaacttattgctttgcggtgggcagttaggaaaatcaattggttcaatttggtataactcaccagtcggtgtttgggcaacaaacgttaaatatcagtttgcacctgagtggactttaggtgttggtgtgtatgaggtcaatccagacaatattaaaaccgaatcaaatagtgatggttttaatctggatatgaataacgtcaagggtgctaccataccagttgaacttgcatggaaaccaaaacttgctgcttttaatggtttaccgggtgaatataaagtaggtgcgctgtactcaaccgcagaagcaaatgatattaaaactgcgggtaaagtgcatgacggaaaacaaagcttctggattaatgcacagcaacaacttagccatgccggccaagatccgaaacgcggtttatatgtcagttttaacagcgttgtaaatgataaagcaacgacttttgttcaaagtacgcaacagcttgctctttggtataagggaccgtttgatagccgtccaaatgattcgattggttttggtattgccaattatgtagtcaatgatcgtgctaaagataaacagatcgcgacaaacgaaagccgcggatactatagctatgatccgattgcatctgactatattccaattcaagacgacgagttaaatgtcgagttgaactatacctatcaatggtctccggccgtcatgttacgtccaaacattcaatatatccatcaacctgctggtgtgaaagaagtcgatgatgcttgggtggcaggcctgagtgtaaaagttaatttttaa

SEQ ID NO: 42912 - DNA, 1452 bp, Acinetobacter baumannii
atgactacattacgtttaactactcttgcattaggtttggtggtttcaggagtagcggcagcacaaacttatgttgttgaccgttatcaagacgatagcaataaaggctctttacgctgggcaattgaacaagccaatgcaaacccaagcgaagctagcgatatcttgattcaagcagtaggcaaagcgccttatgcgattaaattaaacagcgcacttcctgaaattaaagcacccgtcaaaatcattggtactcagtgggataaaactggcgaatacatcgcaattgatggttcaaactatattaaaggcgaaggtgcaaaagcttgtccaggtgcaaaccctgagcagtacggcaccaatgtacgtactatgactttaccggggttggtattacgtgacgtcaataatgtcactttaaaaggtttagacattcatcgcttctgtattggggtattgattaaccgatcaagcaataacctgattcaacacaaccgtattagtaataactacggtggtgctggtgtcatgcttactggcgatgatgggcaaggtaacccaactgcaaccaccaccaataacaacaaagttttagacaacattttccaagacaatggtgatggtctagagctgacacgtggtgctgcgtttaacttaattgcgaataaccattttgtttcaaccaaagcaaatccagaaccatcacaaggtattgaaattttgtggggtaatgacaatgccgtagttggtaataaattcgaaaactattcagatggcttacagattaactggggcaaacgtaactatatcgcctataacgaaatgaccaataactcgattggcttcaacatgacgggtgatggcaacattcttgatagcaataaagtacatggtaaccgtattggtgtagccattcgttctgaaaaagatgcaaatgcaagaattacattgactaaaaacctgatttgggacaatggtaaagatattaaacgttgtgaagcaggtggttcatgtgtaccagatcagcgtttaggggcaattgtatttggagtacctgcacttgagcatgcaggatttgtaggttctcgtggtggtggtgtggttgtcgacccatctaaacaacaaaaaacatgtactcagccaaatcaacaggactgtaatgctcagccgaatcagggtattaaagctcctaagttaacagcgaataaaggttcagttacagtagaagttaatggcttaccaaatcaacgctatcaagttgagttttttggcaaccaaaatgcagcatcaaaagaagctgagcaatatttaggaacaataacagtagctacagatgccgaaggtaaagcaaaagccaattggaaaccaacagtcaaagttgcctcaattacagcaaatgtgactgatcgcttcggtgctacatctgagctcgggtttgtgcaagttaaataa

SEQ ID NO: 42913 - DNA, 834 bp, Acinetobacter baumannii
atgaacatgaaaacattattaagcctaagtttgcttgcactcccattttttactgcacaggtaaatgctgaacctgttgctttagctgctcaggcacaacctgccgctacagccgttaaaacgattgttccgattaccgcaaaaactaaagaacaagcattggcacaagctcaagtcattgcaaatacggcagatgctgatttagcagagttccgtatcgatttattaagctttgccagcgatacaaaacaagtgattgccttgggccatgagttgaaaaagattttaggcaataagccaatgattgccactattcgtaccaaaaacgaaggggggcagcttgaaattagtgatgctgattatggtaagacttatcaggcttatttaaaaaatccgttcatggactggttagatgttgaaatgttccgtgatcaaaaagtagtttcagaaattgttcaacaagcacatcaaaagaaagtgcttgttgtcatgtctaatcacgacttccaaaaaacaccaagccaagatgaaattgaaaaacgcttgttaaaacaagatcaaatgggcgcagatgttctcaaaattgctgtaatgcctaaatctaaacaagatgtcttcactttaatgaacgcaactttaaaagtaagccagcaaaccactaagccattattgacaatgtcgatggggcaattaggtacgatttctcgtgttgcgactgccaatatgggcggaagttatagctttggcatgattggtcaggcttctgcaccgggtcaaattgatgtgaccaagctcaaacagattttacaaaccgttcaaccaacaaacccataa

SEQ ID NO: 42914 - DNA, 630 bp, Acinetobacter baumannii
atgaacaactggaattttcaggaattaaaagaaactccatctcaaacaggtggtccttacgttcacattggtttattgccacaacaggccggtattgaagtttttgaaaataactttaataaccagttggttcaagaccaaaccaaaggtgagcgtattcgtcttgaaggtcaagtgtttgacggattaggtttaccgctacgtgatgtactcattgagatttggcaggccgacgcaaatggtatttatccaagtcaggcagatacgcgtgagcaaaaagctgatccggcatttcaaggttggggccgtacaggtgcagactttgaaacgggtgtttggagctttaatacaattaagccgggcgcgacagcaggccgtaaaggttcaactcaagcacctcatattgcattagtcattttcgctcgcggtattaacttgggtcttcatacacgagtttattttgaagatgaagcagaggcaaatgctaacgatccaattctaaatagcattgaatgggcaccacgtcgccaaacacttattgcgaaacgttttgaagaaaatggtgaagttgtttaccgctttgatattcgtattcaaggcgatgacgaaactgtattttttgatatttaa

SEQ ID NO: 42915 - DNA, 726 bp, Acinetobacter baumannii
atgtcacaacatagctggggtgcttacgcccaacgtaatacagatgatcatccaccagcgtatacgccaggttataaaacaagtgtattacgttcgccaaaaaatgcattgatctcaattaatgagactttaacagaagtcactgcgccgcatttttcttcaaatctgtttggcccaaaagataacgatttgattttgaactatgccaaagatggtttgccaattggtgagcgtgtcattgttcatggctatgttcgtgaccaatttggtcgtcctgtaaaaaatgcacttctagaagtatggcaagccaatgcttctggtcgttaccgccatccaaacgataagtttattggtgcaatggaccctaactttggtggttgtggtcgtaccttaactgatgaaaacggtttttatattttccgtaccattaaacctggtccgtacccatggcgtaaccgtattaatgaatggcgtcctgcacatattcatttctctttaattgctgatggttgggctcagcgcctgatttcgcagttttattttgaaggcgatacgctcattgatacttgtccgatcttaaaaacgattccttctgaagatcaacgtcgtgccttgattgcactagaagataaaaacaactttatcgaagcagatagccgttgttaccgttttgacatcactttacgtggacgtcgagcgacttacttcgaaaatgatttgacttaa

SEQ ID NO: 42916 - DNA, 414 bp, Acinetobacter baumannii
atgaatgatgaacaacgctataaacaaggcattgaggtgcggactgaagttttgggtgaaaaacatgttggtcggtctttgcagaacctaaatgactttaaccaggatttccaaaattttattagccgttatgcatggggtgaagtgtggtctcgcccagggttaccacgtcatacccgtagtttagtgactatcgcaattttattggcactgggccgcgaagatgaactacgcatgcatttacgtgcttgtttcaacaacggtgtaactaaagaagatttaaaagagctgatcttacacagttcactctatgcgggtttacctgctgcaaacgctgcaatgcatatggctgaagaagtctttaaagagttggggatagaagtaaacccaattgcagcgaaagaacaggattaa

SEQ ID NO: 42917 - DNA, 1356 bp, Acinetobacter baumannii
atggcgtctcaggattacgctacaccaagcaaaagcatcgatgctcaagcactgattaatgatgctccacttagtaaatatcaatggatgatcgcaatcatctgtttcttaattatttttactgatggtattgatacagctgcaatgggttttatcgctccagcattggctcaggactggggcgtagatcgctctcagttaggaccagtgatgagtgctgcacttggtggaatgattattggagctttagtttctggcccgacagctgaccgctttggccgcaaaattgttttagccttttcgatgcttgtatttggtgggttcaccttggcatctgcttatgcaaccaacttggatagccttgtcgttttacggtttttgacaggtattgggcttggcgcagcgatgccgaatgcgaccactttattttctgagtactgtccaacccgcattcgctcattactcgtgacatgtatgttctgtggctacaacttgggtatggctacaggtggttttattagcagttggcttatcccgacctacggttggcatagtttatttttgctcggcggctggtcacctttaattttaatgattttagtgattttggtgttacctgagtcttaccgctttttaattgtgaaaggtaagaatccagaaaaagtacgcaaaatcttaaaccatattgcaccagcacagattcaaaatgcgacagcatttcatgtgcctgaagaaaaaacagaagttgttcaaaagaaaaatgtctttggaattatgttttctaagccatatgccaaaggtacggttttgctttgggtgacttacttcatgggactcgtggttgtttacttgctaacaagttggttaccaacacttatgcgtgaaacaggtgcttcgatggagcgcgctgcatttattggcggtttgttccagttcggtggtgtggtgagtgcattgtttattggttgggcaatggacaaattcaacccgaaccgagttatcgccattttctactttgccgcaggtctatttgcaattgctgtcggtcaaagcttaggcaactcaaccttacttgcagtattggtactttgtgcgggtatcgccattaatggtgcgcaatcttcgatgccggcgttaagtgcacgcttctatccaactcagtgccgcgcaactggtgtgtcttggatgacgggtattgggcgttttggtgcggtatttggtgcgtggattggagctgtgttactcggtaatgattggtcgtttaccgccattcttagtttattactcattccagcgaccgctgctgctgttgcggtatttattaaatcaattgttgcgcataccgatgcaacttaa

SEQ ID NO: 42918 - DNA, 786 bp, Acinetobacter baumannii
gtgaaacagactattagcaatcgtcaaggaaaacagttagcagtttatacagattgtctaaaagatgctcctgtgcttgtgttttctaattcattaggaacagaccatggtatgtggcaacctcagctgaatgaattaaaaagtcattttaatgtcattacatacgacacacgtggtcatggtgaaagtgatgtaattagtgacaccacattgcaaaacttagctgaagacgttgttgatattttagatgccttgaatattgaaaaagctcatttttgcggcatttcaatgggcggaattacagggctgtggttgggtattcatcatccaaatcgttttaatagcattacagttgcaaactcagcagccaaaattggtcaaaccgaggcttggttgagtcgtgctgagtctgtggaacagaatggtttagccgagctagttaaaactacgcatacccgctggttcagtgaaaaatttgattatcagcataatgtggttgcacagacaacgattcaaagtctcgcaaacacaccagcacaaggttatgccaatgcatgttgcgctttagcgtatgccgatttaagagatgaaattgcacaaatccaaattccaacgctactgattgcaggaacagaagatccggtaatgacagtggcagatgccgaatttatgcagaaagcaattaataatagccagcttgcaaaacttgaagcatctcatctttctaatattgagcaaccacaaagatttactcaggaattgactagatttattcagcaaatctaa

SEQ ID NO: 42919 - DNA, 1356 bp, Acinetobacter baumannii
atgagccagttatatgccagcttgttttacccaaaagacgtcactgacatctttagtgactcatctttagtcacttacatgattcaggttgaagttgcgttagcgcaagcacaggcacaagttggtgtgattcctcaaaatgcggctaataccattgcccaagtagctgagcatgcactagacaagtttgatttttccgctttggcggtagcaactggcttagctggaaatattgcaattccatttgtaaaacagcttacggcaattgttaaagatattgatgaagatgcttcacgttatgtgcattggggcgcaaccagtcaggatattttagacacagcttgtattttgcaatgtcgtgatgcgttgaacattattgaagctcaacttcaacaatgctatgcgactgcattgcagcaagctaagcaatatcgccatcaagtcatgattgggcgtacatggttacagcaagctttaccaattaccttgggacataaacttgctcgttgggcttctgcatttaaacgtgatttagagcgtatacaagctatgaaatcacgtgtgctcactgctcagttaggtggggctgtaggttctttagcttctttgcaagatcaaggttcacttgtggtaaatgcatttgcccaaaaactgaatctgactgtaccgacaagtacatggcatggtgagcgtgaccgtattgtggaaattgcaagcgtgcttggcatgattgtcgggaatacgggcaagatggcacgggattggtcactcatgatgcaaactgaaattgcagagttgtttgagccaaccgcaaagggtcgtggtggttcatcgaccatgccgcataagcgtaatccagttgcggcagcatccgtattggccgcggcgaatcgtgtaccagcactgatgtctagcatttatcaaagcatggtacaggaacatgaacgtagcttaggtgcatggcatgcagagtggttagcagttccagaaatctttcagctttgtgctggagcattaactcgtactggtgaagttttacaaggtttcgaagtgaatgctgaacatatgcaacagaaccttgagtgtaccaacgggttgattatggcagaagcggtgatgatggcacttgctcccaaaattggtcgtttaaatgctcatcatttagttgaagctgcatgtaaaacagcagtagcacaaaaccagcatttgtttgatgttgttagtcaactagatgaagtaaaagggcagtttagccaagaagagataagaaatattttcaaaccagaaaactatttaggcaatattcagcaacagattgatgcggttttgaaagaagcacaaggagagtcaaagtga

SEQ ID NO: 42920 - DNA, 1212 bp, Acinetobacter baumannii
atgacattcaaaaacgcttatatcatcgatgccatccgtactccatttggccgttacgccggtggccttgcacccgtccgtgccgatgaccttggcgctgtgccgcttaaagccctcatgcagcgtaacccaaatgtagactgggaacaggtcgatgatgtgatttatggctgtgcgaatcaagccggtgaagataaccgtaatgtcggccgtatgtcagcattacttgctggtttaccttatcaagtgccagcaaccaccattaaccgtttatgcggttcatcactcgatgccattgccattgctgcccgtgccattaaagcaggtgaagcgaatctagtgattgcaggtggtgtggaaagtatgagccgtgcgccctatgtgatgggtaagtctgacagtgcctttggccgtagccagaagattgaagacaccaccatgggctggcgtttcattaaccctaaacttaaagaattgtatggtgtagacaccatgccccagactgccgaaaacgttgctgaacagtttaacatcaatcgtgcagatcaggaccagtttgccttggtgagccaacaacgcaccgcaaacgcgcaagccaaaggctttttttctaaagaaatcgtggcagttgaaatccctcagcgtaagggtgatgctgtggtgattgataccgatgagcatcctcgtgcatcgaccacgcttgaaggcttaagcaaacttaaacctgttgtgaaagcagatggcacagttactgcgggtaatgcttcaggtattaatgatggtgcggcagctctactgattgcttctgatgatgcagttcaggcatacaacttaaaaccgcgtgccaagatcattgcctcaacagccgtgggcgtagaaccacgcattatgggttttgctccggcaccagcgattaaaaaattacttaaacaagccaacctgactttagagcaaatggatgtaattgagctaaatgaagcctttgctgcacaggctttggccgtcacccgtgatttaggtttgccagacaactctgacaaggtaaatccaaacggtggtgccattgctttgggccatccacttggggcatcaggtgcacgtcttgtgactacagccttaaaccagcttgaacaaacaggcggtcgttatgccttgtgttcaatgtgtattggtgtaggtcaaggcatcgcattgattattgagagagtctag

SEQ ID NO: 42921 - DNA, 654 bp, Acinetobacter baumannii
atgagctaccagaaactcagccgtgaccagattgcacaacgtgtggcacaagatattcccgatggcgcctatgtcaacttgggtattggtttaccaaccaagattgccagctacttacctgccgataaagatgtcttcctacattctgaaaatggcctgttggcttttggcccaccgccagctgcgggtgaagaagaccctgaactgattaatgcgggtaaagagtatgtgaccatgcttgaaggcggcagctttttccaccatggcgattcatttgccatgatgcgtggtggtcaccttgatattgctgtactcggtgcatttcaggtggcagccaatggtgacttggcgaactggcacacgggtgcacctgatgcaattcctgcggtaggtggtgcgatggatttagcggttggtgccaagaaagtatttatcactacagaccatgtgaccaaacaagacgagccaaagattgtcgctgagctgacttatccggtaacgggtaagcactgtgtggatcgtatttacactgacctgtgtgtgattgatgtgaccagagatggtttaaaggtgattgagaaagttgaaggtcttagctttgatgagttacaggctttaacaggtgcaactttgattgatgcgactcaagggtaa

SEQ ID NO: 42922 - DNA, 672 bp, Acinetobacter baumannii
atgattgacaaaagtaagtcctcactaagcgaggttttatcgcagattaaagatggtgcaaccattctgattggtggttttggtaccgcaggacaacccgctgaactcattgacggtctgattgatcttggcgttaaggacctgaccattgtgagcaacaatgccggtaatggggattatggtctcgctaagctgctcaaagccggttcaattaaaaaggtgatttgctctttcccacgtcagtctgactcttatgtgtttgatgaactgtaccgtgccggaaaggttgcacttgaactggtaccgcaaggtaatctggcgtgccgtattcaggcagcaggtatgggccttggggcggtgtttaccccaacgggctttggaacacttttggccgaaggtaaagaaacccgtcatattaatggtaaagactatgtgcttgagtatccgatcaaggctgactttgccctgattaaagcctataagggcgaccgctggggcaatctggtttaccgtaaatctgcacgtaactttggtccgatcatggccatggctgctgatgtcaccattgctcaagtttctgaagtggttgagttaggtggattagatccggaacatatcattaccccaggtatctttgtacagcacgttgtacaagtacagcccgcccagtaa

SEQ ID NO: 42923 - DNA, 717 bp, Acinetobacter baumannii
atgagacacctccatcaccagacatcccagattaaattatgggcagttatccctgcggctggttcaggaagtcggttttccaaaactgaattaaagcaataccaatatattcaagatgctactgttatagaacatacggttaagcgtttaagtcagcttccgctgacgggttatgttttggcaattggaaaacaagatacttttgcctcaactttatcttttcaagataagcataaagcgcatttttgtaatggtggcgttgaacgtgtgcactcggtattaaatgctctgaattatctatcacagattgcggaagaagatgattgggtattagtacatgatgcagcaaggccttgtgtgacttttgaatgtttgaatactcttgttaaaaatgcaattgagactaatcagagtgctattttggcaattccggtacgcgatacgctaaaacaagtaaatcaggaacagcaaattgacaaaactgtaagtcgagagctgttgtggcaagctcaaactcctcaaattgctaaaattggaattcttaaaaaagcgatagaaacagcgctaaaaaataatttgactattacagatgaggcgagtgcacttgaatctataggagagagtgtacaggtggtcatgggacgttctgataatataaaaattacttaccccgatgatttagaacttgctcgcttgattttacaatcacaaaattaa

SEQ ID NO: 42924 - DNA, 390 bp, Acinetobacter baumannii
atgttagaagtatttcgttccacttcaagcaaacttatattgctactggttgttgttttagtggctatattgcaatatcagttttggttaggtgagggtggttattttcctcatcaagcgcttatgcagcagattcaacaacaagctgaagtaaatgacgagcttaaagagcgaaaccgtattttggcagctgaagttttcgacctaaagaatggtacggaggcgatagaagagcatgctcgcctagatctaggtttggttaagccacatgagacatttgttcaaatgagtacaattagtacccattacaaacctatttatattgacccgaacgctaaagtagatttggaaactaatgagacacctccatcaccagacatcccagattaa

SEQ ID NO: 42925 - DNA, 678 bp, Acinetobacter baumannii
atggatctttctaatattcttataggtgacacaacgtggtcctttgttttagaaattttggtccgttgtaccatcatgtttatcattatcattagttttctaaggctatctggtaaacgtggtattcggcaactctccttatttgaacttgccattattttatgtttaggttctgctgctggcgatcctatgtttactaaggatttaccgattgcccatgcattgatagcttttatcgctattctttctctatatcgtcttgtcacttggggcatggtaaaacataaaaaaattgaagacttattagaaggaaaagcgctctgtgtcgttaaagaaggccttttagtctacaaagatttccaaaaacagacctattctcatgatgagtttttttcggaaatgcgccaacaaaacgttgaacatttaggccaagtcagaacagccctgcttgaatcagatggtattctgagcttgctttattatgaagatgaagatgtcaaatggggacttcctttattccctgatgcttatcgtaaagcagaagttcttaaaattaatactttttattcctgtatgaaatgtggcgaaactaaaattttaaataagctagatcaagaatgctctcgttgtcatcaccacagttgggctgaatctttaaaaacccggcgcttagggtaa

SEQ ID NO: 42926 - DNA, 1290 bp, Acinetobacter baumannii
atgagccaaatcgttgacattcgtgcacgtgaaattttggactctcgtggtaacccaaccatcgaagcagacgtcatcttagaatctggggtggttggtcgtgcatgtgcaccatctggtgcttcaactggttctcgtgaagctttagaacttcgtgacggcgacaaatctcgttacttaggtaaaggcgttcgtactgctgttcagaatgtaaatagctcaattcatgaattgcttgttggtcaaagtgtttttgaacaaaaagcacttgatgaaaaaatgattgcttttgatggcactgaaaacaaatctaaattaggtgctaatgcaactttggcagtatctttagcagcagctcacgcagcagcagctgaacaaaaacttccattgttccaatacattgctaacttacgtggtcaaactactttgactatgcctgtaccaatgatgaacattttgaacggtggtgctcacgcagataacactgttgatattcaagaattcatgattgagccagttggtttcacttcattcgctgaagcattacgtgctggtgcagaagtattccattctttgaaatcagttcttaagaaacaaggtttgaacacagctgtaggtgatgaaggtggttttgcgcctaaccttcgttcaaatgaagaagcgattacagtaattcttcaagcaattgagcaaactggttataaagctggttcagatattatgcttgcacttgactgtgcatcttcagaattctacaagaatggtcaatatattcttgaaggtgaaggcaacaagtcttttacaagcaatcaatttgctgattacttagctggtcttgttaagcagtatccaattatctctattgaagatggtttggatgagtctgactgggaaggctggagttacttaacttcaattcttggtgataaaatccaattggttggtgacgatttattcgtaactaatcctaagattttacaacgtggtattgatgaaaaagttggtaactcaattttgatcaaatataaccagattggtacattgactgaaactttagatgcaatctaccttgctaaagcaaatggttatactactgttatttctcaccgttctggtgaaacagaagattcaactattgctgatttagcagtaggtacagcagcaggtcaaattaagactggttcactttgccgttctgaccgtgtttctaaatataaccaattgcttcgtattgaagagttaactaaagcggtttaccgcggtaaagctgaattcaaaggtttaaattaa

SEQ ID NO: 42927 - DNA, 858 bp, Acinetobacter baumannii
atgtcacaattaaaaccacaagaagttgtacgtttaggcgatatacaaatggcaaatcatttgccatttgtattatttggcggaatgaacgtactcgagtcaaaagatttagcttttgaaattgctgaaacttatattgatatttgtaaacgcctagatattccttatgtatttaaggcgagttttgataaagcaaaccgttctagtttgcattcattccgtggtcctggacttgaaaaaggtattgaatggttaggcgacattaaaaaacattttaatgtaccaattattaccgacgttcacgaaccatatcaggcagcgccagttgccgaagtcgctgatattatccagcttcctgctttcttaagccgtcaaactgatcttgttgaagcaatggcgaaaacccaagctattatcaacattaaaaaagcacagttcttggctcctcatgaaatgcgccatattttgcataaatgtttagaagcgggaaatgacaaacttattctttgtgagcgtggctcagcatttggctataacaatttagttgtagacatgcttggctttgacatcatgaaagaaatgaatgtacctgtattctttgacgtgactcatgctttacaaactccaggtggtcgttcagattcagctggtggtcgccgtgctcaaattacaactttagcgcgcgcaggtatggcaacaggtttagcgggattattcctagagtctcatccagatccagataaagcgaaatgtgatggaccatctgcattgcgcttgtcacagcttgagccattcttggcacaactaaaagaattggatactttagttaaaggattcaaaaagttagatactcattga

SEQ ID NO: 42928 - DNA, 1638 bp, Acinetobacter baumannii
atgacccattttatttttgtcactggtggtgtggtttcatcgctaggtaaaggtatttctgctgcttctgttgctgcacttttggaagctcgtggcttaaaagtcacaatggttaaaatggatccttatattaatgtcgatccagggacaatgagcccattccagcatggtgaagtttttgttaccgaagatggtgcagaaacagatctggatctgggttattacgaacgtttcttacgtcgcgcgaaaatgaccaaactaaacaacttcactagtggtcgtgtatatcaagacgttttaaataaagagcgtcgtggtgattacttaggtggtacagttcaggttattcctcatattaccgacaatattaaagaacgtgtactccgcgcgggcgaaggctatgatgttgctatcgtagagatcggtggtaccgtaggtgatatcgaatctttaccgtttatggagtcggttcgtcagttaatggttgagcttggtcataaacgtaccatgcttatgcatttaactttgttgccatatattaagtcagcagcggagttaaaaaccaaaccaactcagcactctgtaaaagagttactttcaatcggtattcagccagatattcttatctgtcgtactgagtatgatgttgatgcagacactaaacgtaagatcgcgttattcactaacgtagaggctcgtgcggttgtcgtgtgtaaagatgcgaaaacgatctatcaaattccacgtggcttctatgagcaaaacgtagatgacctgatttgtgaacgttttggttttactgatttaccagaagctgacttaactgattgggataatgttgtagaagcattacttaacccagaatacacagtacgtgtagcaatggtcggtaagtatgttgaattaccggatgcttataagtccgtaaacgaagcattgttacatgctggtattaaaaatcgcgtaaaagtacaaattgattatgtcaatgctgaagagcttgaaagtcaagatgtttctattttgaaaacagctgatgcgattttagttcctggtggttttggtgagcgtggtactgaaggcaaaatgaaagctattcaatacgcacgtgaaaatggtattcctttcttgggaatctgtttgggtatgcagttggctgttattgaatatgctcgccatgttgcaggtatgccagaagcttcttctacagaatttaaccgctctacaaaatatccattgattggtttaattaccgaatggttagatgagcgcggtgaattacaacagcgtagccttgagtctgacttaggcggaacaatgcgtttaggtgcacaaaaatcagaattggttgaaggcacaaaaactcgtgaagtctacggaaaagctgagattaccgaacgtcatcgtcaccgttatgaaatgaataatcgtttcattgaagcgattgaacaagcgggcatgaagatttctggttattcttcagcgcaacatttagttgaaactgtagaaattcctgaacatccttggtttattgctgtacaattccacccggaatttacaagttcaccacgtgatggacatccattatttgctagttttattgacgctgcaaaaacacagcaccaaaaaagtaagtaa

SEQ ID NO: 42929 - DNA, 489 bp, Acinetobacter baumannii
atggcaaataaaaaacttttaatctgtgctgcaattgcggctggactattgttaaccgcatgcgttaaaaaagagacaccgaaagaagaagagcaagacaaggttgaaactgctgtttcagaacctcaaccacagaagcctgcaaaatttgaatctttagagagtgtagatactcaagaagctcaagttcaagagcaaccacaagttgaagttcatcgtgaagaaactgctaacacgacaactgaaattcgccgtgaaactcgtcctgcgcgttctgatgaatcttcacagacacaagttgctgaacaacctaaatctgagacaccaaaagtagaacctaaaccagaaaaaaaacctgagcctaaagctgaacctaaaccggaaaaagctcagtcaaaaccagctgctaaggcaactgaacctgcgaacacagaagatgatgccgttgctgctgctattgctgctgcaacaccagcacttaagaactaa

SEQ ID NO: 42930 - DNA, 846 bp, Acinetobacter baumannii
atgaaaacagctttaaaccgtacaccagcctcttttcctgtccgccgcatggactacaattttgaagatactccgcgctattggtgcaatcatgagccttctctcacccactatttcacgggtctttcgactttatttcctgaaggtgaatcatactttgttagatctgtccgtgctttacgagctaaagctaaagagaatgaaattctagatagagaaataggtgcatttattggtcaagaagcaatgcattctaaagaacatcatgctttccatgtcagtgcacaacaatatggtttaaatccagaatcactagagaaagctacaggtattgttcttaaagctattgagaaagtttttagtaaaaaatggaatttattggtaactgttggattagaacactatacagctgttctggtagtcagcatgatgcaatccgtaaatgagcttatgaccgacaacactattcgcaacctatggttatggcacagtgtagaagaaaccgagcataaagctgttgcattcgatttatatcaacatctatatggcaacggattagatgcatatattccacgtgttggcatttttacattcagtttagttttgattacagccttttcaactatttaccatattgttctaatgaaacgagataagcaactgaccaatttcaaaacttggcgcaacttttttaagtttgcgagcaaacaatataaagtgttgattcctaaatttcttgaatactaccgttttgattttcaccccaaccagacagatgaaaaagctttagttgccgctacaaaagtaaaacttggaataaatgatagatcactccttttatcttaa

SEQ ID NO: 42931 - DNA, 1095 bp, Acinetobacter baumannii
atgggcatatctgtttttaataaaattaaagatttcggttcggagctgttcgatttagtgttgggcgctgagcatccaaaagtttattatcatcctcaaggaaaaataaaagatattttggataagttgccacaacttaaacagaaatatcgtcctacgccttggctcacaaatagtcatgttcacttactttattttgatcttattagaaaacaaacaataaagttggcatatgatcgaattgatcaactcactatgagtgatggtggtattaccgcaattgcttggtatggctataacttaccgccagatacaccaacagttgtaattatgcataccattacaggtacacctgagagtatgcgtgaattggtacgcgatttaaatcgatacacaggctggcgaattgcattatgtctgcgccgtggtcacgcaggtttgccaatgcctgtgccgcaaatttctctttttggctctacgagtgatttaaaagaacaacttaaccatattcaaagtttatttccggcatcggatctatatgcggtaggttcttcggcaggtacggggctactagttcgttatttgggtgaacaaggcgaagacacaccttttaaagctgcgtttgcgatgtgtccgggctataacacagaaattggttttaaaaatgtccatcctttttacagtaaaatgatgactaaaaagctcttcaagtattttatttatccgtatcaaaatacatggagtcagattgcatctttagagagggttttatcagcaaccaatttggaagaatttgaaaaagaatacttcgaaatggcgggttttgaagattatgaaacttactgtaaatctattaacccaatttatgtgttcgaaaatattaaaattcctttgatgattttgaatgctgaagatgaccctgtatgttctattaaaaatttagagccatataaagagccaattcagcagatgagcaatgttgctgtggtgacaacgaaaaaaggaagtcattgtgcattttatgagggatggcgcagtacatcgtgggcagcacgtctcatggctgattattttttaattgaacataataaatag

SEQ ID NO: 42932 - DNA, 717 bp, Acinetobacter baumannii
atgtggttaaaactttcaacattgtttttattacccgtattgttcatacaaggtcataaagttcgaaagaacacaccacgtttagcagaagccaaaggtgaacgagaaggtagagctggtcaaggtaaatctttatctctgcttattttgggggattctgccgcagcaggtgttggtgtagaaaatcagaaagatgccttgtctggtgctattattcaagaactgcaaaatgaattttccctacagtggaaacttcatgccaaaactggcgatacaactcgacaagtttttaatgctttgcagcatttagaagagcagaagtatgatgtgattgtgacatctattggtgtaaatgatgtcacaaagttgatctctgctaaatcatggattaaacaacagaagcaattatttgagcatatacagaaacgttttcagccaaagttgattatcgtttccggtgtgcctccaatgcaacatttcccggctttaccgaatccactagcttggttgtttgggcaatatgcagtgcaaatgaatcaaaaattacaacaatggttagcaccacaaagccattttaagtttcttgaatatgatattgaaacttttcaagccatgaacttgcctatggcaagtgacggttttcatccaagtaaagaagtttacgcagtttggggacggcaggttgcagccatagtgcggcaatcatttaactcatag

SEQ ID NO: 42933 - DNA, 408 bp, Acinetobacter baumannii
atgacactcgaaataactaaacagtcattagaaaaatggcatcacatgattcaatcaaatgacttatcgaacttaaatgatttgctggcagatgaagtcgttttccattcaccggttgcttataaaccttatgagggaagacaagttgttttctttattctcaccaatgtaattcaggtatttcagaattttacctatcatcgagaattttacacggaagatggtgaaaatgtagtgctagagtttagtgcggatgtaggagataaatcattaaaaggtattgatatgattcgttttaatgagcagggtaaaattgttgattttgaagtaatgattcgtccaatgagcggtttagctgcattagctgagcaaatgggcatacgaatagctcaatttaaacctcaataa

SEQ ID NO: 42934 - DNA, 2025 bp, Acinetobacter baumannii
atgtcgttatatccacatttattaaaaccattagatttaggttttacgacattaaaaaatcgcgtattgatggggtctatgcatgttggtctagaagaagcgcctggtggttatgagcgtatggcagctttttatgcagaacgtgctaaaggagatgtgggtcttattgttactggcggtattgcacccaatcaggcaggtttaacctttgctcatgcttctaagttagatagcacagaagaagccgaaaaacataaagtcattaccgaagctgtacacgctgctggcgggaagattgcattacaaatattacatacgggccgatattcttatcagccagagattgttgcgccttcggcaattcaggcacctattaatcctattaagcctaaggcaatgacttctgctgaggttcaacaaacgattgatgattttgcaaactgtgcgaagcttgctcaatacgctggatatgacggcgttgagattatgggttcagaaggttatttaattaacgagtttattgcagccagaacaaaccatcgtgatgatgaatggggtggtagctatgaaaaccgtattcgttttcctgttgagatcgtaaaacgcacacgtgaaatagtgggtgaaaactttattattatttaccgtttatcgatgcttgatctggttgaaggtggttctactttagaagaagttattcaacttgctaaagcgattgaaaaagctggggctacgatcattaatacgggtattggctggcatgaagctcgtattccaacaattgccaccaaagttccaagagctgcatttacttgggtcactgaaaaattaaaaggtgaagtttcagttccattaattacatcgaaccgtattaatacaccagaaatggctgaacatgtattagcgtcggatcatgcggatatggtttcaatggcacgtccaatgcttgcagatcctgattttgttttaaaagcaagtgaaggccgtagcgatgaaattaatacgtgtattggctgtaaccaagcttgtctcgaccacattttctctatgaaaattgcaacatgtttggttaatcctcgagcatgttatgaaacagaactaatctttaaagaagcacaaaatcagaaaaatattgctgtcataggtgcaggaccagcaggtttaagttttgctgtatatgcggcagatcgtggacaccaagttaaaatctttgaagcaagtcatcaaattggtggtcagtttaatatcgctaaaactgtgccaggcaaagaagagttctacgaaacattgcgttatttcaatcgtcaaattgaattacgcccgaacattgaacttgtattaaaccatccagccacttatgaagagttaagccaatcagactttgatgaaatcgtagttgcaactggtgtaacgcctcgtcaattgcaatttgaaggtattgatcatccaaaagtgttgagctacttacaggtgcttaaagagcgtgtagcagtaggtcagcgtgttgccattattggtgcgggtggtattggttttgatacggctgagtacctaacccatgaaggtgaaagtggcagtttaaatccagaaaaattttatgaagagtggggtattgatactcactatgaacatgtcggaggtttaaagcagccaaaagttgaagcttctgaacgagaaatctatttgttgcagcgtaaagcttcctcagtaggcgcagggctgggtaaaacgactggttggattcaccgtaccgggcttaagaacagaaacgtgaaaatgttagcaggtgtgcaatacgacaaagtagatgatcaagggcttcatattactgttgatggcaaaccaacggtacttgaggttgataatgttgtgatttgcgcgggccaagaatcatttactgcgatgtatgaccaattaaaagcagatggtaagaatgttcatttgattggtggtgctaaagaagcaggtgagttggatgctaaacgtgctattcgtcaaggtgctgaactagcagcggttatttaa

SEQ ID NO: 42935 - DNA, 561 bp, Acinetobacter baumannii
atgtcacttcctcatgttttattgaccagtttactagaacggccaagcacgggctttgaactcgcccgccgttttgaccgatctatgggctttttctggaatgccacacatcagcaaatttatcgtgaactcaataacatgcttaaaaaaggctgggtttccactttagaaaatgagatggatagtggacgaaaaaaaacttatcaagtcgaacaacttggccgtattgaactcgcttcatggatgacgcagcaaagtgaaccagcacagcttagagatgacttaatggtaagattgcgcgctgaggcgcaattgggcaataatcaaatattacccgaactgttacgacatcttggtctacaccaagaaaagcttaagctttaccaaaccatttacgataaagattttaaagatagcgatgatttgaataatcgagtgttatatattcataaaatgatcttagaactcggcattactatggaaactgagtggatcaaatggttagaacaagtcatcccgcaattaaaactctttgctcaagataatgtatctggagaataa

SEQ ID NO: 42936 - DNA, 918 bp, Acinetobacter baumannii
atgccttattacaccatgcccgatcaggaaagtttatttgtacgccgtgttggtcgtggtgaaccggtattagttttatccggtttaggtatgcaaagttggcaatggctaccttttatctatgcaaatcgtaaaaaatacgagtttattattcccgactggcggggctttggcggttcaaaaaactgtgcaattcccgagcaagatgccatatcaagccactggcaagatgttgctcacttaattgagcaattaaagttagataaatttattttaatgggctactcaatgggagccaccactgcaatgcatggcatgaagcatgctcatctcgctcagcagttaaaggcctatttacatatcgatcaaacccctaaaatttcagtagatgctacatggcaatatgggttatttgggccattacatgcccaatttaaacaattactcaatgatatttatcagttattatcaatccataaaaatgctaaatatctttatgaattatcacttccggaccgtcaaaagttggtgcggttgtgggtagattttattgaattgcaaagcagcaatccatttagcccttttgtttttaaaacggcattaaaacagccctttttacaaaaatatcttcttccgattcaacgtttagactacttattttggtatgtcgaaaattatcttttccacaacgaagattatcgtgaagcacttcagcaattacagtgcccaacaactttctttattggacgcaattcgacactctatccagaaacgggccaaaccctgattgcacatagtgtcgaacatgcaaaaacaatttattttgaacgctcaggccacacgccattattaaccgagccaaaaaaattcgggcatgaaatcactacttttttatccgaacttaaacatgcttcttaa

SEQ ID NO: 42937 - DNA, 1056 bp, Acinetobacter baumannii
atgaatgccttaaatactttactaactcaaagcaatacaaaagaaacaccagttagtttacctgttcagttaaaagctaaatacccgcttgtgcagaccttcgcacgacaaattgcagaacatcgtcaaattattcaaaatattcttgctggcaaagatcagcgcttaatggttattacaggaccatgttcaattcatgacccagttgctgtacttgaatacgcagatagattgcaaaaattacaagaaaaagtaaaagatcaaatcttcattgtgatacgtgcttatattgaaaagccgcgtacaacagtaggttggaaagggtttatgtatgacccaaaccttgatggttcatctaatctacaattaggtttagaaaaatcgcgtgagctatatttacaaattattgaaaaaggcttgccgattgcgagcgaaattttaagcccaatggcaacaggctattttgatgatttattggcttggggtgcaattggagctcgtactagtgagtcccagattcaccgtgaaatctcaagtcatatgccatacagtatcggtttcaagaatggtacggatggttcaattcaaattgctttggatgctattcagtctgcacaaaatgagcatcaatttttaggtatgaatcagcaaggtttgccttcagtgattcagagtgctgggaatccattgccacacttgattttacgtggagccaatcatggccctaattatgatttggcttcaattcaggcaattagagaaaagcataaacaaaacctacctgccttagttattgactgtagtcatggcaacagtggtaaagatcctttacgtcagccagaagttttacagcaaatcgttgctgaacgtctaaaaactcaggtaaagggtgtcatgattgaaagccatttagttgatggtaatcagaagatttcatgtgaaatgacttatggtcagtcggtaacggatggttgtttagggtgggataaaactgaacagcttttgttaaatgttgctaaacagttaaaagcaagtgaattagctcattcggcttaa

SEQ ID NO: 42938 - DNA, 363 bp, Acinetobacter baumannii
atgttaattgatagtctttctataacccgaatatttagtgtgttcgggttatttattattactgcaatcgctgagattttgggttgttactttccttatcttattttaaaagaggggaagtctgcgtggctatggttacctacagctctgagtttggccgtttttgtctggttactgacattgcatcctgcagcttctggacggatttatgcagcctatggcggtatttatatttttactgcgcttatgtggcttcgttttgtagatcaggtcgctttaactagatgggatatcttgggtggcgtaatcgtgctttgcggagcaggtttaattattttacaaccacaaggattaatccgttaa

SEQ ID NO: 42939 - DNA, 2277 bp, Acinetobacter baumannii
atgctcagtcgtcaattagaagtatcattacgtttggctgttagcatggctcgtcaaaagagacatgagtttcttacagttgaacatttactattagccttactcgataacgattcggctgtgaatgcattaaaagcatgcggagctgatattgtttctttacgtaaagaattagaagaatatgtagaacaacatactcctaagcttggcgaaaatagcgagcaagctccacatccaacagaaagtttcgaccgcattttacaacgtgcaattttccacgttcaatcaagtggtggtgaccgtactgttgaaggtgcggatgttttagtcgcaatgtattcagagcgtgattcttttgctgtttatctgcttaaacgtcatcaaattaatcgattgactttaactcaatacttgtctcatgggacacgtaaagacgaagttcaggttgaagaagaagttgaagacattgagggtgaaagcaattcaggcaatgccggaccattagaactttatacgctcaatttaaatgttgaagcgcaaaaaggtaaaactgatccactcattggtcgtgagaaagaaattgagcgtacagcacaaattctttgccgtcgtcgtaaaaacaatccattgttagtaggcgacccgggtgtaggtaaaacttcaattgcagaaggccttgcttggctcattgtaaatggtaaagcaccaaaaccgctaagccatgcagaaatttacagccttgatattggtgcattggttgcgggtacaaaatatcgtggtgactttgaaaaacgtttaaaacaattgttaaacgctttgaagaaaaatccgaatgcgattttattcattgatgaaattcatatgatcattggtgcaggctcaagtatgggtagtacgatggatgcttcgaatctcatcaaaccagctttagcaaatggtactttacgctgcattggatcaaccacgttccaagaatatcgtcaggtatttgaaaaggatcatgcgttatctcgtcgtttccaaaaaattgacgtaaatgaaccgagcatttctgaaactattgatattttacgtggcttgaaaacgaagtttgaagatttccaccatgtacagtatgacgacaaagctttggtttctgcggttgagctttctgcgaaatttattaatgatcgtttcttgccagataaagcgattgatgtcattgatgaagcaggtgcacagcgccgtctaaaagcagaaagtgaagacagcttaattactgtagagaacatcgaagatatcgtttctaagattgcgcgtattccgcctaaaactgtatctaaagatgataaatctgtacttgaaaatcttgagcgtgacctaaaacgtgttgtatttggtcaagatgaagcaattactgcactagcttctgcaatcaagttgtcacgtgctggtttgaaatcaccggataaacctgttggtagctttgtgtttgctggtcctaccggtgtaggtaaaactgaggttacgaagcaattagcaaaacttttaggggtagagcttgttcgtttcgatatgtctgagtatatggagcgtcatgctgtttctcgcttaattggtgctcctccaggatatgtaggttatgaccaaggtggcttactcacagatgcgattcataaaaatccgcactgtgtattgttactagatgaaattgagaaagcacatcctgatgtgtttaacctgttattacaaatcatggatcatggtgcattaacagacaataatggccgtaagtcagactttagaaatgtcattattgtgttgacgacgaacattggtgcagaaagtatttctcgtgcaagcattggatttacagagcaagaccatagttcggacaaccaagaagccatgaaacgtgcattctcacctgaattccgtaaccgtctagatggtgttattcaattcaaagctttaccaaccacagtaattgaatctgtagttgataagttcttgacagaattgcaagcgcagctagatgaaaaacgcgtagttttagatgtcgatcaaagtgcacgcgactggttagcgacaaatggttatgatcgcttaatgggtgctcgcccaatgcaacgtctcattcaagaacacttgaagaaaccattagctgaaatgattttgtttggtgaacttgcagatcatggcggtaatgtggcggtatcagtgaagaaagaagatggtaaagcagtgggtctaaaacttgaagtgtttgaagatcaccatacggcagaaccagcttaa

SEQ ID NO: 42940 - DNA, 414 bp, Acinetobacter baumannii
atgcgaacaaataagcgtcaaacaaatttaaaagatattaaggcttcttttcagcagtctggctatgtcgattggcacttcaatccacgcttaagtgattcgcaaaacgaagatcatgacggagaggttgttgtacaaacagcacctcccgaactcaagcgtcctcccttatatgcagtggtattattgaatgacgattacacgccaatggactttgtaattgaaattttacaacaatactttgcaatgaatcttgaccaagcaactcaagtaatgctaacagtacactatgaaggtaaaggtactgccggggtatatccaagagacatcgcggaaaccaaggcaaaccttgttaataattacgctcgatcgcaaggtcatccattactttgccagattgagcctaaagcataa

SEQ ID NO: 42941 - DNA, 753 bp, Acinetobacter baumannii
atgcaaaactcggaacagacgacttctgtagaaagttcgttgcaaaagaaaaaatttttaaacaccaataaaccattatttattggtgccgctattttaatgagtggttgttttgcgctcggctatacaattgggcaccgtcaaggtttaactgttgttggttacgatgcagatgcagagcaattggttgaggtagtgcaaaagcaaaaaacagcattagatgcagttaacaaaagtttgaatgctgctgtacaagagcgtgatgttgctgttacaaatgccaatgatttgtttgaagcacttaatcaagccaatgctgataaaacgcagcaagaaggtatgagtaacatctaccgtgaaattttaagacaacgtggtggtttaagcttaacaattcagaatttggcgataaaaccgttaccggaaaatgcttatgaatatcagcttgatctggtacaagttagcccgagtaaacgccgtgctgcaggttcagttgaaataagactgattaaagatacagaagttttagtggtaccacttgaagataagaactttaacttcactgattttgagcgtttgactggccgttggacgatgcctaagggcttcacacctcaatttattgaagtgcgtctaacaggcggttctgatacaccggttattaagcgttttagttggcagcgtggtaaacctgtcgaaacaccttctgcttttgttgcagaaattcctcaagctgaagcaaattcacaatag

SEQ ID NO: 42942 - DNA, 1050 bp, Acinetobacter baumannii
gtgatttctgtcggaattgttggtggaactggttatacaggcgttgaactattacgtattttattacgacatccaaaagcgcaggttcgagttctgacttcacgtacagaagcgggcaaaccagttgctgatatgttcccaaacttacgtgggcatacagatcttcaattttcagatttaaacattgatgcattaaaagagtgtgatgttgtattttttgcaactcctcatggtgttgcgatgcaacatgcgaaagatttgattgcagcaggcaccaaagttattgatttagctgctgactttcgtttacagaatcttgagcaatttgaaaagtggtatggtatggagcatgcttgcccagatgtattaaaagattctgtttatggtttaaccgagttaaatcgtgaaaaaattaagcaagctcaagtcattggtaatccgggttgttacccaacgactgttcaactgggcttggctccacttttaaaatcagcacaagcattgattgaaacaaagaatattattattgatgccaaatccggtgtttctggtgctggtcgtaaggcaagtttaggcatgatttacagtgaaaatgcggataactttaaagcttatggtgttgcaggccatcgccaccatccagagattgtagaggctttggaaaatattgcaggtaagaaagatgtttttgagggtcttttatttgttccgcacctagtaccgatgattcgcggtatgttaagtacaatttatgtagacttgacagaagcaggtaaacaaacagacttacaagctttgtatgaaaacttctatgcaaatgaaaaatttgtagatgtcatgcctgcaaatagttcacctgaaactcgtagcgtacgcggagcaaatgaattacgtattgctttgtataaaccacaaccaaataaactcattattttggcggctcaagataaccttgtaaaaggtgcatctgggcaagctgtacaaaatatgaaccttatgtttggctttaatgaagatgaaggcttacaagggattggtttattaccataa

SEQ ID NO: 42943 - DNA, 1521 bp, Acinetobacter baumannii
atgcttgatcaatcaaaagaaataaaagtgtgcacttatctcggcctcaccactttaattttaagtgtaacccttgttggttgtggtggtggtagcagtagcggaggttcatctaacccgcctaaaccgtctgaacccactcctgaagtcatgacggatattacgcttaaaacccctgtcgaaatgcgcaatgttcaactcaaggtatatgataataccgacaatagtattttgattgatacccaagttgccagtttaacgagttacgatattaaacttccaagcacaaaactaaatcgtctttatcgtgttgaaattacaactcaaaattcatcgctggtatttaacccaattacttcaaaatatcaaaatttatctggcatttatcatacatttattacacccaatacagtaagtagtagaacccaattcatcagcccaagttcagaagcaatttatcaacgtgctatggttcgttcaggtcagttgcctaatgagacaattatcccaacccgtattgaacaattacatgtcgatttagcctctcaagatgtctacagatctcttcttaatgcgtttaaagacgtagacattccaagtttaagtccagccaacctccttgttgatttaactaggttacaatactcaacgacaaagcctagtacatatgtggatagctatctaagctttggttatcttcaatattggtcaagcatccataatacgaattcaccttatcaagatctcacccaaagtctcgctacagatttaaaagatggatatttagacggcaaaaaacttattggggacaaaacatcttttacccctatcttcacctcagcccctgataatattgatccagcaaaaaacacacttttagatatcgcagctaatcaaaaggtaacacgtgattattttgccactaatctaagagcagccacctttaaactagcagatttgcaagatcaatcccatctagacccaataggttatgatctactgaacaagaaacaatattcggggattatacctgctggtaatacgtctgaatttttccgtatagatggtgcaggagattaccgacgtgctgttggctttagtggtattacagcgacctgcaatggatcagcttacccgtgtaaacaaggtttaactagcatcaatatttctgacccaaaactaccagctacagactatttagtcggccattatgaagacaatgcaacaggctgccaacttaacttccgtgctaatggtcaaattgaattaattaaaggctctcaaagctatcgctctgccttaagcgcagatagtacagataacttactgcaaaccgacgctgcaagttatagttatttacttaactcaagttcatccgaacctaacaattcaacacagcaatataattttatacagctacatattaaagcgaacaagattgttagtgctcaagcaggccttgatagccgcaaagcaccagatgtcttacaaacaacacaattagagtgtagctttagctaa

SEQ ID NO: 42944 - DNA, 681 bp, Acinetobacter baumannii
atgtctgtgggaatgccagaaattaaaattgttcgtcacgtaagggcaagaaaattgcgcttacgtgttgagcctgcgtctatacgacttactgtgccgttattttgtagtaagaaacaaattcagcagtttttagctcagtctgaacaatggttaatcgagacgtggaataaacagcaccacgttcaatctacctcgtttgaaattccttcagaaatttctttttttaatagagaacagccttttcaaattgttgtgcagaagcaacatcgcatttttcaatttgattgggaaaatagttatttatttattaaagatcaacaaccctatcaagctttacaaaacgctgttattgcttatgcaaaacaagagttgccagtacttttgtcagagcttagccaaaaaactcggctgagttatgcagagtgtgcaatccggcgtcctaaaactcgttggggaagttgcagtagtcaacataatattatgctgcatgcaggtctggttcttatgcctgctcaaattacccgttatgtttgtattcatgaattagcacacaccaaacacttcgaccatagtcctgcattttgggccgaagttgcgaagttcgaccctaactatatgcagcatcgcagacaattaaaaggtaatccattgcctgcatggtggtatgttacaacttag

SEQ ID NO: 42945 - DNA, 672 bp, Acinetobacter baumannii
atgagcctatatgcaacccaagatgaaaagaaacaagctgctgcgaaagctgctttaaaacacttacccaaaggtggcattttgggggtaggaactggaagtactgtaaacttcctgattgatttattgcctgaactacaattagaagcagcagtggcaagttctcaagcaacagcagaccgtcttaaaaaattaggcatagaagtggttgatatgaaccatgtgggtagccttgatgcttatgttgatggtgcagatgagattgatcgtcatatgcatatgattaaaggcggcggcgcagcattaactcgtgaaaaaattgtagcctcaattgctaaaaagtttgtatgtatcgttgatgattcgaaatgggttgatcaacttggtcgtgatttcccattacctgtagaagtgattccaatggcgcgttctgctgtagcgcgtaaattggtaagcttagggggtgatccggtttatcgtgaaggtgtggtaacagataacggaaatgttattttagatgtatttaatttgaacatcttaaatgcaattgatttggaaaagacaattaacaacattccgggtgttgtgactaacggtatttttgcgttaaatccagcaacgattgcaattgttgcaacaaatgatggtattgaagagcgtactgcacagtaa

SEQ ID NO: 42946 - DNA, 1542 bp, Acinetobacter baumannii
atgctgtctcgtgtggtacgacaaattttacaagcaacggtttatgatgttgcaattgaaacacctctcgaagcagctccacgaattagtcaaaaattaaacaacacaattcgttttaagcgtgaagatttacaaccagttttttcttttaaattacgcggtgcctataaccgtattagccaattaccgaaagaacaacttgaacgtggcgtcatttgcgcatctgccggcaaccatgcgcaaggtgtagcattgtctggtcaacgtttaggtattcctgcaattattgttatgccaagtactacccctgacattaaagttcaggcagtgaagcgtttgggtggccaagttgtattgcatggcgatagttttgatattgcaaacaaatacgctcagcaacgtgccgaagctgaaggattagtttttattccaccttatgacgacgagttggttattgcgggccaaggcacaattgcgaatgaaattttacgccaatggcgtgatgtagaatatgtttttgttgctgttggtggtggtggcctaattgctggtgtagcagcttacttgggtgatgttgcaccgcatgtcaaagtcatcggtgttgaatatgaagagtcagcttgtttaaaagcagcgctagaagccaatgaacgtgtagtcctaccccacgtaggcttatttgctgatggtacagcagttgctcaaattggtgccttaccttttgatatcgttcgtctacgcaaatcagataattctggaccaattgttgaaccagatattgttactgtaaatacagatgagatctgtgctgcaattaaagatacttttgatgaaaaccgcagcatcgttgaaccgtcaggtgcgatggccctagctggtatcaaaaaatatgttgccgagcataaaattagcggcaaaaacatggtatcgattgtttgcggcgccaacatgaattttgaccgcttacgttacattgcagagcgcaccgaattgggtgaacaacgtgaagcaatttatgcagttactctttctgaagaaaaaggcgcattcttaggcttctgccgtgctctacagggccgtaacattaccgagtttaactaccgtgcaaataacacagaagaagcacaagtttttgtgggtattagcttaaaaggtggtgacactgaacgtcatgaaattttagaacaacttaaacagcaaaattatgttgtagatgatttatctgatgatgaagttgctaaattacacattcgttatttgattggtggtcatgccaatctggatgacgaaagattgttccgtgttgagtttccggaacgtccaggtgccttactcaccttcttaactcgtttaggtccaacccacaatattacgctgttccattatcgtaaccacggcgctgctgaaggtcgtgtactagttggcttacaagcaacagacgctaaacaaaacccagatggtttaattgaaactcttgagcaaattagctatccatatgcagaaattactgacaatgtgggctataaacgtttcttgaagtaa

SEQ ID NO: 42947 - DNA, 651 bp, Acinetobacter baumannii
atggcacagttcgcggtcatcggcttgggaagttttggggcaactgttgctcaggaacttacgagattaaaccatgatgttattggtattgatacagtcaaaaagaatgttgagaatcttgccgatgttttaactcatgctgtcattgctgatgctacagatgaacatgtattggatgaattaaacattcaaaattgtgatgcagtggttgtagcaattggtgaagatattgaagccagtattttatgtgtgctgaatttaaaaaatctgggcattgataaaatttgggtaaaagcaaaaaccaaagcacatcatacgatcttatctcatctaaatatcaataaaatcattcatcctgaagaagacatgggggtacgtgttgctcaagcactaaactacccaatggtgagccgttacatgtctttagatgatgagcactatattgtaaaaattgatattccagagaaattaaacggcattaatttgtacggaattatgcagcaagctcctcaagtaaaaacgcttcttgtaaaaagacaacagcagattttatttgaaactgaagagacttttaatttacaaacgcatgatattcttattttagaaggtcatttacagcagctaaaaaaactctcaaattgtttcatataa

SEQ ID NO: 42948 - DNA, 1338 bp, Acinetobacter baumannii
atgtctcttaagcctaaaccgcataaaacactaaatttaagcccaccttctctgttagcactgggctttctgggctttattgtctttggcacattattgcttaaacttcctattgccaataacggacatgttagttggatggatgctctatttacggcgacctcagcagtcactattacaggtctatccgttttgaatattcatgaatcttttacacttttcggacaggtcattattttattattgattcagtcaggtggtttaggcttcatgacttttgccattttggcagcattaagcttatctcctaaagttggccttaaacagcaaatgatggctcaagatagccttgggcagactagtctttcaaaggttacttttgtggcaaaaggtgttgttacttacacacttctttttgaactgattggaacagtgatcttaactaccgcatttacaccgatttatggctttgctcgaggactgtattatgcaattttctatagtatctcatcatttaacaatgcgggcttttctctatttagcaacagtttagttaacttccaaagcaactaccttatatgtattacgattagtttgctctatacattaggtggactgggttttttagtcctcatggatatcaaacaaaataaaaaatggaaaaaactcagcccaaatagcaaactcatcctaacaactattgcgattattaatttggttgcgtttgtattaatttgggttttggaagcacaaaatcctcataccttaggtctgctcaatgtaggtgatcaagctttaaatgcatggtttcaagcgactgttccacgttcttcagggttcaatactattgataccggagcaatgaccaacagtagttctttactgatgatgctactcatgttcatcggtggaggttcactcagtactgctggaggtataaaagtcggcacctttgtcatattagttttaagtgtactttcctttttaagacgtaccgatgaaatcagggtgttcaatcactctgtctctcacgaaactacttataaagccttagctgtcaccgcaattaccagtattctcatatttatcggcttctttatacttttacttttagaacctaaagcagactttatgaacttattatttgaagtcgtttcagcagcctgtacagtagggctttcgcgcggtatcacgccagatttacataatggtagtttatttattttaagcctactcatgtttgcaggccgtttaggccctttaacactcgcctatttaattgctactcctaaaaaaagccgtctcaaacatcctcaagccaacattcaaattggttaa

SEQ ID NO: 42949 - DNA, 1152 bp, Acinetobacter baumannii
atggcgttcagacaatttgaacgcacatctttacagctaagtatgggaaccctgcttagctgtttatgtgcgtcggtggcatatgccgacaccttagcccctgtaaaacctgcgagtgtagatgcatgtgttgcccttgcttcgaatgctgatcgcctagcttgttatgatgctgtgtttaaaccatcggccttaccagtagttcaagccgcagtagtaccagagcctgttaaaaaaattgataaacctgttgttcaacctgaaacatttaaagaaaaggttgtagataaggtaagtaatatcaaagtaattggtaaggcacctacacttgaacctactacgtctttactagatcaacgttgggagttgtctgaaaaaagcaaactgggtgtttggaatattcgtgcttatcaacctgtttacttgctaccagttttctggacgagcgataaaaatgagtttccaagcagtcccaacccaaataatacggtgacagaggcccaaaaccttaaatcaactgaaagtaaatttcagatttctttgaaaacgaaagcttgggaaaatatttttggcaacaatggtgacttgtgggtaggttatacccaatcttcacgttggcagacctttaatgctgaagagtctcgtccattccgtgaaacgaactatgagccagaagcaagtttaatgtttagaacaaactatgagttgcttggcttagatggtcggttgcttggggtaactttaaatcaccagtcaaatggacgttcagatcctttatctcgtagttggaaccgtgtcatctttaatgtgggtttagaacgcggtaactttgctttaatgcttcgtccatggatacgccttgaagaagacagcaaagatgataacaatccagatatggaagattacatcggtcgtggtgatttaactgctttttataaatggaagcaaaatgacttctcattaatgctacgtcactctttaaaaggtggtgatgattctcatggtgctgttcagtttgactgggctttcccgattagtggcaagctgcgcggacacttccaattatttaatggttatggtgaaagcttaattgactataaccatcgtgcaacttatgccggcttgggtgtttcactcatgaactggtactaa

SEQ ID NO: 42950 - DNA, 2940 bp, Acinetobacter baumannii
atgactgtagatgtcactgaaaccatttctcaaactgttcaccctgcgtttcagttgctacgtcagcaccatgttgaagcattagatattttagtgtctgaatataagcataaagtcacaggtgcggtgcattatcacttggcaactgattatgatgaaaatgtatttcttgttgcgttcagaacacaacctatggactctaaaggaaccgcacatattttagagcatactgctttatgtggctctgaaaagtttcctgttcgtgacccattcttcttaatgatacgccgttcattaaatacttttatgaacgcgtttacagcagcagattggactgcatatccatttgcaactcaaaataagaaagatttccaaaacttattatctgtttatcttgatgctgctttctcggcaaatttgaatcctctggattttgctcaggaaggtatccgtattgaacttgaaaatggtcagcctgtatacaaaggcgtagtcttcaatgaaatgaaaggtgcaatgagtgcgccttctgatcagctttaccaccagttggcccatcatttattccctgaaaccacttatcactacaactcaggtggcgatccaaaagatattcctgacttaacgtatgaacaattggttgaattttataaaacccattatcatccgagtaatgcggtatttatgacttttggtaaccaaaccgcctatgaattacaagagcaatttgaaaaattggctctacataagttcactgctggtacaactttatattcgaaaccagaaaaacgcttaacagcacctgttgaagttactgaaacttatgctgttgatggtgatgagttaaaggacaaaacttaccatgtattgtcgtggttattacctcaggcaagtgacattaaacttcgtctgggtatgcgattagtagaaggcgttttactcgaaaactcagcttcaccacttcgtcattatttagaaacttgtggctatgctcagtcgactggtcctttaatgggtgtagacgatagtaactttgaaatgacgttctactgtggtgttcaaggttcaaatccagagcatgcagagagctttagagatggtgttttaaacgttttacgtgaagtagctgcaaaaccaattgactcatcgttagttgatgcaattttgcatcaaatcgagttacaccaacgtgaaattaatggtgatggtacaccatatggcttaagcctaattttaaatgggttaagtggtgcgattcaccataacgatccgattcaaatttgggatgttgatagtgccattgctcaggttaaagaagaactccaagacccaatgtggttatctaacctgattcaaacgcatttattagataatccgcaccgcgtgcaaatgactttagtaccggatgcaaccaagtcagcgaaagaacaagaagctgaaaaagcacgtttagctgcgattggtgaaaagctaactgaagaagataaagcagagatcatcgctaaaaccaaggcattgcaagaacgtcaagatacaccagataatcttgaactgttgccaaaagtaggtctagaagacgtaccggctgacttgcatattgtacaaggtcaattgcgtgaaattatctgtaatcgaatggatacgccgttgaatttgtatcatgccggaaccaatggtatttactatcaacaagtacttattcaaattccagatgatgtggttaaatcaccatacttcaatttgctctctattttaatgggtgaagttggtgcaggtgagtacgattatcttgaactccagaacttacaaacagctgtaagtggtggtttgggcatgggtgcttcgttacgcagtaaggttgatgataaagacaaaattagtgcttggttaactttaacaactaaatctttaactcagaagttcgatgcgattcatttattaaaattagcatttgaacaacttcgttttgatgaaaaagagcgaatcattgagttattgcagcaacgtaagacacgctggcagtctcgtttatctggtgctggtcatagttatgcaatgcagattgcttctcgtaacatgagtgcattagctcaacgcgactatcaaaacacaggtttaggtgcgttgaactggttaggcgagcttgttactaaaattacccaagatgatgctgcttatgatgcgcttattactgaattgaagcatattcacacaaaattattgcaagcacctaaacagttcctgctcgtatgtgaagagcatcagtcagaacgtttagttgaagaaatacaaaatgtttgggataaattaaacgttgatacagcagcggctgagttaacccaagttgagcaagaaaatgataatgaacatgaagcttggttaattcaaaccaatgttcagttctgtgcctctgcatatcaagctgtggaagtatctcatccagatgcggcacctctaatggtattggcagcttacttgcgtaatggtttcttgcacagtgctatccgtgaaaaagggggtgcttatggtggtggtgctagttatgatggaaatgcatgttcattccgtttctttagttaccgtgacccacgcttagctgagacttttaaagattttgaagcgagcgtgcaatggttgttaaacacagagcaacaacctcatcagcttgaagaagcaattcttggtctggtggcaagtatggacaaacctggttcaccagcaggtgaagcaataacagcgtgttatgcattgttgcatgcaagaactccgactttccgtcgtacattacgtgaaagattattgcatgtaactttagaagatttacaacgtgttgcgcgtcaatatttaattgaacaagcacctgtaaaagctgtcgttgcaccttttgcaaaacgtgatgaattgcaacaactgggttttacgatcaaacaagttaattaa

SEQ ID NO: 42951 - DNA, 2100 bp, Acinetobacter baumannii
atgaagcgttcagttttatttatttcatcagttggggttatgacaagccatgtatatgctctagaagcagatcaacaggtagtaaccaaccttccaacaatttcagtcaaagctgataaggaaagcagtttaaaacaagaagtggggcaagcatcaagtgcaactaaaggacttatgcaattaaaagatgtccctcaaattgtaaacgttgtacccaaacaagttttaagagaacagacagttacctctatgcaaggtgccttgcaaaacgttgcaggtttaagctttagtgtaggagatggacaacgtgatcaggtcatgattcgtggtttctctgcaatcaccgataactatgtagatggtattcgcgatgacgcattgtattttcgcgatatgtcgaatgtagagcggatcgaagttttaaaaggacctgcttcggtattatatgggcgtggttcggcaggtggtttagttaacaagattaataaaaaaccaatggatcaatctttgcgtgaagtgagcctgattggtagtacaacagggcaacgccgcgcagaagtcgatgtaaatgaaaaagtcgcagagaatgttaaggttcgtttaactggtgcagttgaagactcagatggttaccgtgatcaggcttttttaaaacgtcaagcggttgctccatctgtacagtgggatattactgataagaccaaacttttacttcaggctgactatttgcatgataaccgtttggcagatcaaggtttcccaacagacccgattacaggtaaacctgttaaaacaaatcctaaaactttttatggcgctttaaatggtaaagaggttggggatgttgacactgaaatctcaagccaaactatcagcttagaccatgagtttaatgataattttaaatatcatggcgcagttcgccactataactactcacttgatcgtcaatatagtgtagattcacatcaaaaattgccagctgatcaaatccaattgactcaaaataaacgtttgcgtaatgaagatggagtgtatgttcagcaagagttgagtgctgtatttaatacaggtttcttaaagcacagtaccttaattggtgctgaatatagcaagcagcataaagacgaacttgtgtggagtaaagctcgtcaaattacgaacatatttaatccacagctcgaaaattgggctcctttagatacaaatgtagacgcagacacaaataatactaatacttttgaaaactatggggtatatctgcaagatttaatgacagtgacagaccagcttaaagttttagtgggtttacgttatgacaatctatcgcaagatcgcgatgataaaacgagtaagaatgtggatttaaatcgtacagataatacttattctccacgaattggagtggtctaccagccagtaaacaatctttcactctatacttcttataaccgttctttccagcctttggctgattcatttgttttttataaaaatagtgatgatttaagacctacaaaaactgaaaactatgagattggtgcaaagtgggatgtaaatgatcagttgaatgtaaccttggctttgtttgagatgagccaaactaatattcaaaataaagatccgaatgatcctaagggtttaactgcaattttagcaggtgagcaaaaaaccaaaggtgttgaaatttcattagcaggtcagttgaccgatcaattatcagtattggccggttattcgtatatggatggtaagattgaaaaatcggctattggttttacaggcaatcattctgcgctcacgccaaacaacactgctaacttgtggttaaaatatcaaattaatgatcattggtatgcagctgtgggtggtcgtggtgaatcatcacgttttagtgcgccagacaacaaaaacgttttaccgggatatgcagttgtaaatgcggcgttaggttatcaaagtgaacgttatgatgtgaacttaaacttaaataacttgtttgatcgcgattactttgtgtcaggtcatagtggagcaaatgattcgaacatgatgggcgatcctttaaatgctcaagttgcacttcgctatcgtttttaa

SEQ ID NO: 42952 - DNA, 1032 bp, Acinetobacter baumannii
atgattttttattctgtgacaacacatatggcaactgtagatctttttgcaattggtaatgcattaatcgaccaagaatttaaagtgtctgatgattttcttagtcaacaaggcttacaaaaaggcaccatgcagttgtctgacggtgaaacacaatctgccctttatgaaaaattaaaacaaactcaagattacaaaggtcaagcaagtggcggttctgctgcaaatacaactgtggcatttagtgcattaggtggtagcgcattttatggttgccgcgttggtcatgatgaattaggtggaatttacctgcaagggctaaatgatgcaggcatccagactacaccaaagtccatcagtgaaggtgtgaccggtacttgtatggttctcattagtccagattctgagcgtactatgcatacctatttaggtattaccgctgaactctctcaagaccaaatcgattttgaaccattaaaaacagcaaaatggctttatattgaaggctatctttctacaagtgaaacagcacgtaaagcggtaaaacaagctagagaaattgcaaaagctcatggcgttaaaattgccctatctttatcagatcctgcaatggttcaatacgctcgtgaaggcctagaagagcttatggatgatggtgtggatttattgttctgtaatgaacaagaagccttaatgtataccaataccactactgttgaagatgcacttactcaattacgttttaaaaaccatactgttgtgattacacaaagtgcaaaaggtgctctagttgcaaatccaactcaccattttcacgttgcaggccgtcatgttgaagctgtagatacaaatggtgcgggtgatgcttttgcaggtgccttcctctacgcattaaaccatcatgaagatttaactgctgctgcacagttagccatcttaatttcaagtgaagtcgtgtctcaatttggtcctcgtttagccattaatgactatgctaaacttctcgaaaattttcagaaggaatgtgcttga

SEQ ID NO: 42953 - DNA, 309 bp, Acinetobacter baumannii
atgacggaagaagttcctgagcgtgaagctagagcttttgacactttacaaggaactactattttcattacacagcgtgatggctctttctacgcctatcagaatttatgcccacatttgcaaaccgaacttgaatatctagaaaaccaatttctagatcaagaccaagaatatatccaatgctcaacccacggtgctttatttaacgtggagactggtgaatgtatttcaggtccttgtttaggtgagtttctaaataaagttgagattaaggtacattcagatggcggtatttatatcgtagactga

SEQ ID NO: 42954 - DNA, 1134 bp, Acinetobacter baumannii
atgaatgctagtaccaaagccctaattccagttgttcagctctctgaccatgagcaggaagttcaaagagcgctacagatttgtaatgcttgtcgctactgcgagtcattttgtgctgtatttgcggctatgaccaaacgtcttgagtttaaccaagccgatattcattacatggcaaacctctgccataactgtggtgcatgtttacatgcttgccaatatgctccaccacacgagtttggtgtaaatattccaaaagcgatggcacaagtacgtttagaaacttatcaagaatttgctacacctcagcctttaggtcgactttataagtctgtaggtattccttttgtttcgacgttaacactcattttctttttttgcatgttagctgtagtgtggtggaaaggcactaacttatttgcaggctatcaaggtaatttttatgcgattttcccgcataactttttagcactattgtttggagcgacctttacagttgcaattgttttgctcggcattggagttagcaaattctggcgacaaacctctaaagtcattcatggcaaagttgagaaaccagatctggttcaagccactcaaaatgtattaacacttaaatatttagatggcggtcatggtaaaggctgtaatgaacaagatgaccgttatacacaaatccgccgtgtgttccatcacctgacgttttatggctttatgctttgctttgcagctacgggtgtagcgactttatatcactattttcttgacctacatgcgccttaccctatctttagcttgcctgtgattttgggtactttgggtgggattggcttagtgattggaccatcgggcttgctctatttaaatcttaaacgtcacccattacatggtgaccgtgagcaaagacctgtagatcgaggctttattttccttctacttattgttagcgcttcagggctagtacttatggcatttcgtaataccccttacatggcacttttactgattttccatttagctacagtcatgacattctttattaccatgccatttggaaagttcgcacatggtttttaccgcagtgcttctttactcaaatttgctatcgaagagcgtatttcgaagaaatcataa

SEQ ID NO: 42955 - DNA, 1407 bp, Acinetobacter baumannii
atgcatgatgtaattgtgattggtggtgggaatgccgcactgtgtgccgcgctcacggcaagagaaagtggtgcttctgtgctggtaatagaagcagcgcccaaagagtggcgtggtggtaactcccaacacactcgtaaccttcgctgcatgcatgatgctcctcaagacgtattggtcgatgcttatcccgaagaagaatattggcaagacctacttaaagtcactgcgggcaaaaccaatgaacatttagctcgtctagtgattcgtagcacggcgacttgccgcgactggatgcgtaaacatggcgtgaattttcagccaccactatcgggtgctttgcatgttgcacgtaccaatgccttttttatgggtggaggtaaagcccttattaatgcctactaccgtagtgctgaaaaacttggcattgagattttatacaatacaaaaattaaagacctaaagttaaaccaaggacattttgaagctgcaattgcggaagatggacgtgtatttaaagcaaaaagctgtgtattggccgcaggtggttttgaatcaaatttagaatggttaagagaagcatggggacaaaatgaaaacggcgaatggcctgccgataattttattattcgaggtacccgctttaatcaaggcaacttactcaaatttatgatagatcaaggcgccgatattattggtgacccatcacaatcacattgcgtcgctgtagatgcacgcgcaccattatatgacggcggcatctgcacccgtattgactgcgtttctttgggaattgtggtcaataacaaagccgaacgtttttatgatgaaggtgaagacttctggccaaaacgttatgcgatttggggccgtcttgttgccaaacagccacagcaaattgcctattcgattatcgattcaaaagccattggtcgctttatgccccctgtgtttgcgggtgtaaaagcaaatagcattcaagagttagccgaaaaaatcggactggatgcaaaaaccttatgccataccgtagaagaatttaatcaagcctgtgtgcaaggcacctttaaccataccgttttagatgactgcaccaccgaaaatattattcccaacaaaacccattgggccgttcctctcgaccagccacctttctatgcctatgcccttaaacccggcattacctttacctatttaggtttaaaagtcgaagacgatgctgcggtacgctttaacaataaagccagccgcaatctgttcgtcgcaggtgaaatgatggcaggtaatgtactcggtcagggttataccgcaggtgtcggcatgtcgatcggcacaacctttgggagaattgccggaaaaaatgccgcccactatgcactttcacaaggagttgaacatgaatgctag

SEQ ID NO: 42956 - DNA, 930 bp, Acinetobacter baumannii
gtggaacttaaacaattaaagtattttattgcagtgatcgagtcaggaagcttgggtaaagctgcaaaaaatctcgatattggaacgtctgcattaagtcagcaaatctcaaaattagaaagtgagctttctattcgccttttacaacgtaccgctttgggtacagttcccacccctgcgggtttagctttttttcaacaggttcaactggcacttagacacctagaccatgccgtagactctgcgcactcctcacgtttaagtggtcacgtcaccgtcggtttttcaccgagtgttgcggctgttataggcacgcattttttaaaactcatgagaaaccgttatccggacattaaagtccgtttaatcgaaggcttatcgggtgacttaaaagctttagttaatgcaagacagctcgatgtggctatcatctttagtgatgatgtcgacccacaatgggccatacagcctttagtcaaagagcaaatgtttttaatctcgcctaaagaagtgctgaatcagtaccatcttgaaagctgtatcgacaatcagaccattactcattcgcagcttaaagaacttcccctgattttaccgagccaacgacatggactgcgcttattgcttgaacagaaaattcatcaacttaaagtggcctatgaaattgatgggttgcatttgttaatggaaagcattagccaactcgaaatggcaaccattcaacctgcgggtgcatcgttaaactcgcggcaagacttatgtttgctacgcgttgtagaacctgccattgaacgcattaattatttaattagtctctctgaagaagagctctcacctgccaccttagccacgaaagtagtgattcgtgcctgtgtagcaaacttgattaatgaaaagcgctggcccggtgcggaactcataaacacttaa

SEQ ID NO: 42957 - DNA, 795 bp, Acinetobacter baumannii
atgaaaaagtcccctatctttataaccatttgcctagctggtgcaggcttaggatctacatttgccaatgcagatacgctcgaagtaattagctcaggcggtttctattcatctatggaaaaactcattccaatatttgaaaagcaaactggtcacacggttcacctctcatctggttcgtctatgggtgaatcaccgactgcaattccaaatcgactcaatcgtggtgaacgttttgacattgttgtgttggctgctcctgaactaagcaaactcgcagaaaaaggttatgttgacccaaattcacaaagcgctttagtgaattcaagcattggcatggctgtgcctaaaggtgcaccaaagccagacattagctctgcggcgaaatttgaaaaagttttattaaatgccaagcacataggctattcagcaagtgcgagtggtacgcatcttgaaaaagatgttttcccaagctttccacctgtcgaatacaaagtaatttcgagtaaagcagaaaaagtggtaggcgaccgcgttgcaaaacgtattgccgaaggccagtttgatattggtttccagcaaattagtgaaatcaaaccttttaccggcaaatatggtcaagttgagttagttggtccaatccctgcgccttaccaaaaagttaccgtatttgctgctggtattggtaaaaactcggaacatgcaaaagtcgcaaaagagttaattaaatttgtgaaatcgcctcaagcgacacaaattattgaagaacagggtcttgagcaggttaaacaataa

SEQ ID NO: 42958 - DNA, 1311 bp, Acinetobacter baumannii
atggatgtcgttaataaccgtagggctacttttaaaaaaatattaaatgtaacgagtggcaactttttagaacagtacgatttttttctttttggtttctatgccacctatatcgcagcaaagtttttccattctgacaatgaatatgtctctttaatgatgacatttaccgtgtttgctgcgggttttcttatgcgtcctctcggcgctattttcttgggtgcctatgtcgacaaagtcggtcgtcgtaaaggtttgattgtcactttaagtcttatggcaattggcaccatcttaattacctttgtgccaggttatgaaaccattggtattatcgcgccaattttggtggtcattgggcgtctattacaaggcttctcggcaggcgttgaatctggtggtgtttcaatttacctcgctgaaattgcaaccgataaaaaccgtggctttattactagctggcagtctggtagccaacaaattgcggttgtgtttgcggccttacttggttattggctcaacaccattttaactcatgctcaagtgggtgaatggggctggcgtattccgttcttaattggctgtttaatcattcctttaatcttcttgttccgtcgtactttagaggaaactgaagactttaaagcacaaaaaactcatccatcttcaaaagaaattttcagcacacttgtaagcaactggcgcattgtacttgccggcatgatgatgagtgcaatgaccaccaccacattctactttattacggtttacaccacggtgtatgcgaaacgtactttagaaatgtcggtcacagacagccttttagcaaccgtgtttgtaggtttgtcgaatttcttctggttaccaatgggtggcttgctttcagacaaaattggccgtcgtccagtattagtgggtattactacacttgcgatctttaccagctatccggttttaagctggttggtgagcgacattagcttctcaaacctacttattacccttgcttacttctcgttcttctttggtatgtacaacggcactatggtcgcaacgcttgccgaagtgatgccaaaacgtgtacgtaccgttggcttctctttagcattcagtcttgcagccgcgatttttggtggtatgaccccaatggcttgtaccttccttgtcgaaaatacaggtaatgcaagcacaccagcgttctggctcatgctcgctgcggtatgtagtctcatctcaagcttgtatttatgtcgtggttctaaacagaaagaccctgacgcaattgctgaacctgcaaaggttagcgcttaa

SEQ ID NO: 42959 - DNA, 930 bp, Acinetobacter baumannii
atggaaatcaagcaaataaagtattttttgacggtcgttgaatcaggcagtattggaaaagctgcccaaaaactcgatgtgggtgcttcggcaattagtcagcaaattagtaagctcgagcaagagttaagcattcgcttattacagcgtaatgcttttggtgtgaccccaacccctgctggccttgcctttttaaagcactctcaacttattttgcgtcaagtgaacttcgccatagatgctgcacattcagcacggctttcaggtcatgtcagccttggttttccaccgaccattaccgctttaattggcatccctttaatgaaactaatgtctgaacgttatccagatattcgtttagagattgtggaaaccctgtcggggaacctgattcagtcgattaattcgcgtcagcttgatatcgccattatttttaccaatgaaattgataaacagtggtcaattcaacccttggtgcgcgagcaaatgtatttaatggcacgcaaagaagtgctcgaaaaatacggacttagcgaatgtattaaaagtggaattattcagtcgcagcaaattggcgatattcctttagtgttgccacgtcaacgccatagcttaaggaaactgcttgagcacaagattgggcagctcaatgtcgtctatgaaattgatggcttgcatttgcttatggacagtctgattcatcttgaccttgcaagtgtgaggcccggtagtgcttgcttacaagagtataaacacaagctgcaattgcttaaggtcgtcgacccggaagttgaacgaattaactatttggtgagccttgccgaagaagaattatcacctgccgcacttgctgccaagtcagccattaaagcatgtgtgaaagaattgattcaaaatcagatttggccatgttctgaaattattttataa

SEQ ID NO: 42960 - DNA, 1386 bp, Acinetobacter baumannii
atgaattttgttgtgaataaaaaaatatttatcttaggaatagcatcgatttgcacaagcacattacatgctgctgcatttgataaaacagggcagtctgtagcggcatttttacaaccgggcaactattttgaagcaagtttaggaataacagatgccgatttaagtggtgtagagtcgggtaccaacccttcacatcattcaattttagatatcgccaataccgattatcggcctacggcagcgttaaaactacagttggcaccgcagtattcatttggtctgttatatgatcagccttttggtgctgacacggaatattcaggtgtaaatggcttcgttgcaacgccaaaagataccgttatgttacctggaattacgaccacagggcttgccagcgctacattgggccatgctcctacaggaaatgcaaaatcagaatttgatatacaaaatttaagcttcattttgggttaccaacccacaaaaaactggaatctttatgcggggccagtctatcaaacttttaaaagtcaggttgaattaaggggtaatgtatttagtctctataatggatatgactttcatactaaaactgtcagtgatttagggtggttagcaggacttgcttaccaaattccagaaaaagctgtgaaagtctcattaacctaccgttcagccattacccataaagtaaacgcgactgaaaacgctcctttaattgatatgttaagcactcaacaaggtcgtgatttagttaatcagcatctagatttcatgatttctattggtcagatgactccacaaaagaaagcttacttaaatcagattattgctaatttgccagaacaagaagatacaggtacaacaaaatttaaatctcctgattcagtgaatttggagttccagactggactgcgtcagggaacgttactatttggtagtttacgctgggtaaattggagtgatcttgctttgcaaccttatcgcttcggtgagatctcaaaagttgttggcgtactatcaacgccaagccgtcccgaaggttttaatttggttcgttattatgacgaccaatggtctttaaatttgggtttaggacaacgcttttcgccaaaatggttaggttctgtgtcagttggatgggactctggagcaggagataaagtgtcaacgggtggcccaactaaagggtattacaacttgggcgtgggtgctcaatatagcccgacatcgcgatactttatttctggtggtgtgaagtattactggttaggcgatgcaaaagctcagcttggcgcacaggcgggtagtgactattatgtaggtgagtttaaggataaccactcagtcagctatggcttaaaaattggatataaattttaa

SEQ ID NO: 42961 - DNA, 1368 bp, Acinetobacter baumannii
atgaataaaatcattaaaaacggtatgtttttagggttgtcgactttgatttcaggttatggaactcttctccatgcggaagcaagtccaacaaatttacccgcagtttcacaaaaagcgttaaccattattgatgggcaaaccgagtggttaaataaggtctataaagacattcatgaacaccctgaacttgggtttatggaaaagcgtacttctgccattgttgccaaagagcttaagtcactaggttttgacgttaaaacgggaatagccaaaacaggcgtggtcggcattttaaaaaatggtgaagggctaacggttatgtaccgtgccgatatggatgccaacactgttgaagaggcaactggtctaccatacgcgagtaaagtgcgcgtaaaacttgatgatggaaccgaaacgcctgtagcccatatgtgtggtcatgatgcacatgtgacatggatgcttagcatggcaaaaacattagtcgctttaaaaaaggaatggagcggaactattattttagttgcacagcctgctgaagagccgatcacaggtgcaaaagctatggtgaccgatggcttatggacaaaatataacttgccaaaacctgattatttctttgcagtgcatacaacacctgcacctgtgggcgtggtcatcaatgcaccggggccacgtatggcaggaaccgatcagcttgatgttttatttaaaggtgtgggtgggcatggctcattaccgatgctcaccaagaacccgattagcatggcggccaatgcactaaatcaatatcaaaccattatgggtaatgcagttgatccgcaacaagcggcagtgttatcaattggctcaatccaagctggaaattcgaataacgtgattccttctacggccttggtcaaaatgaatttgcgctggtttgatccaaaagtacgcgagaccatgttaaataacattaagtctatgagtgaaggcgcggctcaaatgcaggggatgggtaaagaccaaatgccgacctttacttttaaaggttcaagcacacctgtaattaacaataaagaattttctgcacgtttaaatgggcctttaaaagcactattgggagataaacatgttctaactgaatatcctgcggttatggggtcagaagatgttcatcatttattgggcgaacaaaaagacattccttttaactttatgtttattggtgtggcagacccagttgtgtttgcaaatgcagtcaagcaaggcaaacctgtgccttatattccacatagtccaaactacattgttgacttaaaagctttaccagtgggagccaaagtcactacagtttcgatgctagaactacttactaaaaaataa

SEQ ID NO: 42962 - DNA, 1008 bp, Acinetobacter baumannii
atgccacagacagcaacggcactggctagctgggtgaaagcgattcaaaaagcgctcgaaaaagccggtgttgatagtcaacctttattagaacaagcaggtttagatattcaggctctgagtaatcctgatgcacgatattcattaaaacaaacagcaaatttatggaaattagcagttcagaaaactcaagattcatgttttggccttaaagttgccagccaagtcaatcaaaatacttttcatgtgttagggcattcactgattaccagcaccaccctaaaagagatgtttctaagaattattcgttattttcgtgtggttacggatattccagagctagagttttatgggcaaggaaataatcattatttcgtgattcatgttcccgacgaagttcagcccgagtcaatagatgcatttatttccgtttttattcgctcaagtcgtgccttacaaggctctgttttttcacccttacgcattgaacttagacgctcagagccagaagatctagaaacttttcagagtattttaaaagccccgattgtgtttaatgcacccaaagacatgattgtgtttgacacggcaaccatagaacaaccactagaaggtgcaaatccgactctcacccaagaatatgatgaaattattaatcgttatctggcgcggttcgataaagaaaatatattggcacgagtgaaagtaaaattaatcgaaaaattatctacaggtgattttcaacaacaagatgttgcgaaaagtctgggcttaagcatacggagtctgcaacgcaaactttctgccgaaaacacctcttatagtgagttactggatcagactcggcacgaactcgccttatcgtatattaaaaattcaagccacaatattactgagattgcttatattcttggctttactgatgtcagtagttttacccgcgcatttcgccgctggaccgatttatcacctatccattatcgagaaaaatatctggcttgctcttaa

SEQ ID NO: 42963 - DNA, 1056 bp, Acinetobacter baumannii
atgacctatatttataaaaatcctgccggaatgaccgatagcgaaaaaaccgaacatattaaaaagatagtgactgctgagggcgttgcgctgcgtaagcgttatccgattttaaatcaccaaaatgctatcggggctgtcattctatttttttctttagcaggaatgatcacgactgcggtcctttatatcaatcatcaactttcagcttggtttgcaattccaattattgctttttttgcatctcttacccatgagttagagcatgacctgattcactggatgtattttagaaagaaaccatgggcacatcatttaatgatgggcttagtctggttagctcgaccaagtaccattaacccgtggaagcgtcgtgagctgcattttaaccatcataaaaactcaggcaccgaagttgatttagaagaaagagctttaactaatggagagcagtggagcatacgtcgactcatcgcgattggtgataacggcttggcggtcttgttccgtattatttctgcaagcaattggacggttagaaaagtaatttttaaacgtgcatttatggcttattttccgttaggaattattcattggtcgctgtggtatatctttttaggttttcatgcagtagatgctgttttaagttgggcgaatgcaccgattgcttggtcagctaccactttaaatattatgcatgtggttaatattttgactgttgtttgggttgcaccgaatgtactgcgtaccttctgcttgcactttgtgactagcaatatgcattactacggcgatgtcgaattgggtaatgtcattcagcaaactcaggtgttaaaaccttggtggatgatgccgttccaactgttttgctttaactttggttcaacgcatgccatccaccattttgtggtgaaagaaccattctacattcgccaaatgacggcaccggttgcccataaagtcatgcgtgatatgggagtacggtttaacgatgttggaacctttaaaagagcaaatcgttggaacataaatgatttatcagagtcaaaaagttaa

SEQ ID NO: 42964 - DNA, 609 bp, Acinetobacter baumannii
atggcagagtttattgcggttattctcattacgattttggcagtgattagtcccggcgctgacttcgcgattgtgaccaaaaatagttacttgtacggtcgaaaaataggtgtgttcacttcacttggaatatcgcttggcgtattggtgcatgtaacctatacattagtcgccgttgcctttgtgatgacttatacgccgcaaattttgaatattgttaagtatatcggcgcgctttacctgatctatattggctataaaacttttacgcaaaaacctgttttaggctctgctgctttaaccgctataggcacttttcaagcgataaagtacggcttttttaccaatgcccttaatcctaaaaccaccctatttgtgattagtatctatacgcaaattgtgagcttaactacgcctaaaaccattcttttggcttatggcttttttatgtcatttgcccattttgtatggttttcacttgtggctatactgttctcatccatgctgctaagacagaaaatgttagccaagcaagtacagattaatagggtgattggttcaatcttatgtgtgttaggtgtgattttgctttttactaagtttcagtag

SEQ ID NO: 42965 - DNA, 873 bp, Acinetobacter baumannii
atgatcgaaagaatatcgctgaattcactaaaatttttctattttgtggcgaagtatggcagcgtgactttagctgcaaagaaattatttgtgacgcaaagtgcggtcagtaaacagatttataatttagaagaagctttaaatacgactttattcgaccgaaaaaataaaacgcttgtgatgactaagcagggcgaaattttactgagttgttgccatcaggtgtttggtcaactcgatgaatgtttaatacaactcagccaacccaaaaccgaaaacaaacaattggtcttgtcctgtgaaccgactctttctatgaaatggctcattccacggctatcaaaatttaaaaagctcgggcatgattttgaggttgtgctactcacagcaggcggcgtggtcgattttgaaaaagataatattgatattgcgatacgtcgaaatgactttgattggggggagcatatttatagtgaaaagattgccgatgaatatatcgctctagttcaagcaaccaacccatcggaaaccaacgacgtactcatttcgacttctagacccaattttttcaaaaacatgagtcgcattgctgagttaaagcaaagcttaaaaggctacaccaaagttgaactcgaacatttttacctatgtttagaaggctgtttggctggacttggcgcaaccgtgatctcaatttatatgattgaaaaagagcttgagtggaacttactgaaaaaaaattcacctgttgtgcgagataattcagcctattttttactttctcatagtgcttttgaggaagatccacgcaaaaccctatttttagaatggctaaaagcagagatgaatgagagtcaacataaattgctctag

SEQ ID NO: 42966 - DNA, 987 bp, Acinetobacter baumannii
atgagtaaagaatttacatttacgattaagagtatttgtttcgatgagaactatcgtccagcagacaatacgcgtattacaaccaactttgctaacttggcgagagggatgagccgcgaagaaaatttgcgcaacacattacggatgatcgacaatcgtttcaatgccttagctcattgggacaaccctaagggcgaccgctatggcgttgaacttgaaatcatttcagttgaaatgaacattgatgccgaaaaccgtactagcgggcttcctctcatcgaaatattgaaaaccaatattgttgataaaaagaccaatgaacgcatcgaaggtattgtaggtaataacttctcgtcttatgtacgtgactatgactttagtgtgctgttgttagatcacaacaaaaacaagtctacgtttagcacgccagaaaagtttggtgaattgcacggcaacttgtttaagagctttattaactctgagacttataaagccaactttaaaaaggcgcctgtaatttgcttaagcgtttcaacaagtaaggtgtatcaccgtactgaaaacgaacatcctgttttgggtgtcgaatacaagcaagaagactattcattaaccgatgaatatttccaaaaaatgggcttaaaggttcgctatttcatgccgccgcatagcgttgcgccgttagcgttctactttactggcgatttgttgagtgattacaccaaccttgagttgattagtactattagtactatggaaaccttccaaaagatttaccgtcctgaaatttacaatgcaaattcagtggctggaaagtcttatcaaccaagcttgaagcaccaagattattcacttactcgaattgtgtatgaccgtgaagaacgtagccgtttggctatagagcaggggaagtttgttgaagagcaatttatcaaaccataccaagcgattcttgagcagtggtctgcgaattacgctcctaattaa

SEQ ID NO: 42967 - DNA, 1044 bp, Acinetobacter baumannii
atgaaaaagttattaccgacttcaactgctggcagcttaccaaaaccgtcttggcttgcagaacctgaaaagctttggtcgccgtggaaactcgaaaacgaaggcttagttgaaggtaaaaaagacgcgttacgtttagcacttcacgagcaaaaacttgcgggcattgatattgtcagcgatggcgaacaaacccgccaacactttgtgacgacatttattgagcacttgaatggcgtagattttgagaagcgcgaaacagttcgtattcgtgaccgttacgacgcaagcgtaccgtctgtggtaggtgcggtgtctcgtcaaaagcctgtatttgttgaagatgcaaaatttttacgtcagcaaactgatcagccaattaaatgggcgttacccggcccaatgaccatgattgatacgctttatgatggtcactacaagagccgtgaaaagcttgcttgggaatttgccaaaatcttgaaccaagaagcgaaagagttagaagctgctggtgtagatattatccagtttgacgaacctgcatttaacgtattctttgacgaagtaaatgactggggtattgcgactttagaacgtgcaattgaaggcctaaaatgtgaaactgcggtgcacatttgctacggttacggtattaaagccaatactgactggaaaaagacactcggttcagaatggcgccagtacgaagaagctttcccgaaacttcaaacttctaacattgatatcatctcgttagaatgtcacaactctcgtgtgccaatcgacttacttgaacttattcgtggtaaaaaagtcatggtcggtgcgattgatgttgcaacaaaccagattgagacaccggaagaagtggctaacacactacgtaaagcgcttcagtttgtagactcagacaagctttacccgtgcacaaactgcggtatggcgccactttctcgtgaagtggcacgcggcaagctaaatgccttaagtgcaggtgcagaaatcgttcgccgagaactgactggttttgatcttactgcttaa

SEQ ID NO: 42968 - DNA, 492 bp, Acinetobacter baumannii
atggttcaagcaacagactttagaaatgcaatgtctttactcacaagtgcggttagtgttgtgaccacggcaggcatgtctggccgttttggatttactgcctctgctgtttgtagtgtgactgacacaccgccgacattattagtctgtatgaaccaagctgcgagttcacatgcacatttcctagataacaaaatcttaaccgtaaatgtgttaggcgcgcaccacgaacatatttcaaaagcattttcatctaagctcacaccagaagaacgctttaaacatggcgaatggattgagttagaaacaggcgcacctgtgttggaagatgctttggtgagcttcgattgtgagattgagcaaattcaacaagtcggcacacacacgatttttatatgtccgattgtggcgattaaacaaagccaacatgaccaaagtttggtttactttaaccgtgcttatcaccaagtggggcagacagagactgtctaa

SEQ ID NO: 42969 - DNA, 552 bp, Acinetobacter baumannii
atgccaactttagaaatatcttccaaaaaattacaggtggtgcaaactgccatccaactctttactacgcatggatttcataatgcaggcgtagacctgattatcaaagaagccaaaataccgaaagccacattttacaactacttccattccaaagaacgcctaattgaaatgtgcatcgcctttcaaaaaagcctactcaaagaagaagtgctctcgattatttactcaagccgttactacacccaaaaagataaactcaaagaaattattgttttacataccaacttaaacagtctgtaccatttgctgcttaaagcagtttttgaaataaaacggttgtatccgcaggcctaccgtatggcagttgaataccgaaaatggctacatcgggaactttttgacctgatttttagctgtgaaactcgtgctttcaaatttgatgcagacatggttttaaacctgatcgatggtttgctactacaggttttaagctcaaatagtgtggatgaacgggatgtggtgttggagaggttttgggggagggcttag

SEQ ID NO: 42970 - DNA, 1296 bp, Acinetobacter baumannii
atggatactaaaaagaaaggcgatatttttgaaaattttgtttttgactacttttcagctctaatccaaaaagggtatatggggcttaatccaagtcacactaaaatttacaagcaaaagaaatattattcaaaggatcgagaggactacattatctttgatgtagctattgaagttttcttatttgatcaaaaggaaccatatttagtaatcctaattgaatgtaaaaattatgaaaaaaacgttcctgtggacgatattgaagagttttcaaccaaagttagtcaagtcggaaaacattatacaaaggctatctgcattactaaaaatggctttcagaaaggagcattaaatgttgcaaaaaatagaaagatagggctgtggagaattacagctaatgataatcatgaagttatatttaatagaactattaatagaataaagaataacgatgaaatcataagtaatgcgctcacttcagaaaatttacaagatatttctgctacgaatatctttattcagacaccactacgctttacaagcattccaaaagatttaatttatgatttcctttctttgcagaaagatgtgtctccaaaagaatttttcacacaacaccgtgtaaattcatactctaaaactatcccttataaatctaaaaaagagttaagtatccttgcagaaaacttatttgataaattttataaaaacgatgagatagatttaaatgaaataataaatactctaggttataaacttattgagattgatactcccgaacatccaaatattattggtaagctagaaactaaattaaaaactattaccatttttggagtagggttctattctcaacatcaaattaattttgcaaaagcacatgaaatagcacatatttttcttaaccatagcaaatatataatttcagagaacttttcaccagctatggaatctcactctatagatatagaaattacccaaaatattgatcgactagaatttcaagcaaattattttgcgggttgcttactactgcctgaaaatcgattaaaagcaactttaaactattatttacgcctttatggaatcagaaatagaggtttctcgccattatatattgattcacaaccctgcaattttgaaaattatagtagaatcattttacctatgactggaatttttaatgtttctcaagaaacaatgaaaattagactcacagaattaggtttagctcaattcgcttttcaacctacttctactcataaggtaacgaggtcatatatagatcggttctaa

SEQ ID NO: 42971 - DNA, 279 bp, Acinetobacter baumannii
ttggctttagctcgtgaaaagcgggctgagtttagtgcacaaaagcttgaacctatttttgagaagtacccgagtgtaaaagttcgatggtatgacgttgaagcgtttagcactaaagccagtgatattgctgtgtttgagacgacatctttgcaagattattattttgtgattgatgcgattcgagactctgagttttgtacagtaccctactttgagtttgtagagattattcctgcaattgaagatgggtatgtggagtatgaaagttctttgtaa

SEQ ID NO: 42972 - DNA, 312 bp, Acinetobacter baumannii
atgaaaaaagaaattatgagtaagtcagatgtgcgaggatttgtcggactttttttaggtttaactagttactctatttttatgttttatcttcttgctaaaagaagtaaaggaataaattattttgatgatttatattcagttaataaacttgtagtttattttttagtttttttgcaatttattttattacgtcaagcaaaaaaatatgtaaaacaaaataaaacatcttttgtaaattttctttggggaattggtgcttttattggtgggactctattagcatctttcttttttactattactttataa

SEQ ID NO: 42973 - DNA, 837 bp, Acinetobacter baumannii
atgacaggtggtgattacgagaaagatatttatatcttccagtcaggtcatggacaggacacaattaatgacaaaagctatgactggaccaatttacaatactttaatgatgtgaaatttgaaggtgccaactttaccgatgcccagttcctgagagtaggtaatgatctggtgatcaaggcatttggtacagatgactcggttagctttaagaactacttgaatgacaatgattcgtacagtcgggacttcaactttatctttgccgacaagaccttaactacagcagatgtaatgaatattgtcataccgcttaacggtacggatggtaacgatgtgcagaatggctggaaaggtaaggacaatctgttgggcagtcttggagatgacaccttaaatggcttagctggagacgactggctggaaggtggagctggcaatgatatcctgaacggtggtgaaggtaacgatcttcttgaaggcggagcgggcaatgacacgctaactggcggaattggtgctgatactgcaattttcaaaattttagcaggttttggaaatgacgctacgggcggtaatggcgttgatacatggtcagactttaatatttcccaaggagataaaatcaatatctctgagttaattattgggccagctagtaaagaaaatctcaatcagtttgtatcatttgaaaaaagcggttcaacagttacgctaagtttagatagagatggaaatgatataaattattcagccactaagctattaattttaaataatcaaacaaatgtaaatagtttgaatgatttaattaaagctgatgtatttatagtttag

SEQ ID NO: 42974 - DNA, 129 bp, Acinetobacter baumannii
atgtttattaaaagtattttatcttcgattactagtattatcccacttcctgaaaatagtaacacaagcagtaatttaggtaacggctcactttatggggtcagatcactattagcggttttttattga

SEQ ID NO: 42975 - DNA, 1284 bp, Acinetobacter baumannii
atgtctatccttagttgggacgattttgaagatgattcgcaaaaaccggctgcacctgaacacaagtctgcgcccgtcaacccggaaaaaacgcctgattcgcagaatgtatctgctgcgcagccatcatcgcagagcgtggcagctccacaatccgctggaacccattccgtgcgatcaacaaatccaaccgattcaatggctcgagcatctgaagccttagaacatttggatgttgctcctggccttgaagagttagaaatgggcgcgcaacgcgttcaggttgacgacaaagccatgattaactgtcgcgctgacttgaaccagcttgttccatttaaatatgagtgggcttggcaaaaatatctagatggttgtgcaaaccactggatgcctcaagaagtgaacatgaaccacgatatcgcactttggaagtctgaaaatggcttaactgaagatgagcgtacgatcgttatgcgttctttaggtttcttctcgactgcggactctttggttgcaaacaacctcgtattggcaatttaccgccacatcacgaaccctgaatgccgtcagtacattttacgtcaagcgtttgaagaagcaattcacactcatgcttaccaatactgtatcgaatctttaggtatggacgaaggcgaagtcttcaacatgtaccgcgagattccatcggttgcgcgtaaagcagcttggggcttgaagtacactcaatcgttaagtgaccctactttccacacaggtacgcctgaaaacgaccaacgtttacttcgtaacttgatcgcgttctactgtgttcttgaagggatcttcttctactgtggctttactcaaattttgagtatgggtcgccgtaacaagatgaatggtgttgctgagcagttccaatacattttgcgtgatgagtctatgcacttgaactttggtatcgacatgattaaccaaatcaagattgagaaccctcacctttggactgccgagttccaacaagaagtaattcaaatgattcttgaaggtacgatgcttgaaatcgaatacgcacgtgacacaatgccacgcggtgtattgggtatgaacgcaagcatgatggaagaatatttgaaattcatctgtaaccgtcgtttatctcagttaggtttaccagagcaatttgctggtgtaactaacccatttgcgtggatgtcggagatgatggacttacgtaaagagaagaacttctttgaaactcgcgtaactgactaccaaactggtggtgcgttaagctggtaa

SEQ ID NO: 42976 - DNA, 135 bp, Acinetobacter baumannii
atgttttttcatctcagccataactatatgcttggtgttggaatcttaatctttgcctttattttcttttatacgcctatggtttacgccttttttaaaatccgtaaacaacagcgtaagcaaaataagttgtag

SEQ ID NO: 42977 - DNA, 2835 bp, Acinetobacter baumannii
atgagcgtaattacttcgactcccggtcaaattcaggtgattaaacgcaccggagatgttgctgcatttgatgcagagaaaatttctgttgcgattggtaaagcttttcttgctgtggaaggtcaacaaagtgcggattcgagccgtattcacgaccgtattacccaactgacggaaatggtactgaacactttcactcgccgtttaccttctggcggtaccattcatattgaagagattcaagatcaagttgaacttgcactgatgcgtactggggagcacaaagtcgctcgtgcttacgttatctatcgcgatcaacgcgcaagtgcccgtaaaaacacaaattctaatcatcaccctaccttgcaagttaccgatgcaaacggtcaacttcaaccacttgatttaagtgcactgcaagcaactgtaaatcgagctgctgaaggcttagaaggtattgatgttcaagcaattatcgatgaaaccgttaaaaacttatataacggcgtaaaagaaagcgatattgctaccaccatgatgatggcaacacgtacacgtattgaacaagaacctaactatacatacgtaactgcacgtttgcttcgtgatgagttggtcagcactggcttagcattcttaggtttaccagccgatacagctgaaaacaatgcacttgaagcattcttgaaaaaaggtgtagagcttgatttgctttcaccggacttgcttaagttcgatctagaaaaactagcagcggcaattcaaccggaacgttctaaccagtttacctatttaggtttacagactctatttgaccgttacttcatccattcaaatggcgttcgctttgaattaccacaattattcttcatgcgtgtgtcaatgggtcttgcacttaatgagcaagacaaagaagagcgtgcaatcgagttctataacttgttgtctagctttgactacatggcatctacgcctaccctgtttaactcaggtacattacgtccacagctttcaagttgttacttaacaacgattggtgatgacctttatgacatttatggtgcaatgcgtgacaacgcgatgctctctaaatgggcaggtggtttaggtaacgactggacacctgtacgtgccttgaactcttatattaaaggtacaaacggtaagtctcagggtgttgttccgttccttaaagttgcgaacgatacagccgttgcggtaaaccaaggtggtaagcgtaaaggtgcggtatgtgcgtacttagaaacttggcacttagacatcgaagaatttttagaacttcgtaaaaacacgggtgatgaccgtcgtcgtactcacgacatgaacactgcaaactgggttcctgacctatttatgcaacgtgtgtttgaagatggcgaatggacactattcactccgtctgaaactccagacctacacgatttaactggtgctgagtttgctgaacgctatgcatactatgagtctgttgcaaaagaacagaacatgttgcacaagaaagtacgtgcgaaagacttatggcgcaaaatgctttctatgttgttcgaaactggtcacccttggatcacgtttaaagatgtttgtaacttacgttcaccacaacaacacgttggcgtagttcactcatctaacctatgtactgaaattacgttaaacaccaaccaagatgaaattgcggtatgtaacttaggttcgatcaaccttgttcaacacgttaaaggtggcgtattagaccgtgagaagttagcgcgtactgtgaaaacagcagttcgtatgctcgataacgttatcgacattaactactacgctgtaccacaagcgaagaactctaacttgaaacaccgccctgttggtatgggtatcatgggcttccaagatgcgctttacgaaatgggtatggcttacggttctgatgaagctgtgaactttgctgatgagtcaatggaggtgattagctactatgcaatccaaacttcaagtgacttggctgttgaacgtggtgcttactcaacatttaaaggttcattgtgggatcaaggtatccttccaatcgactctttagaaattgttgcgaaatctcgtccagaacgtatgtttgaagttgaccgtactcaacgtttagattgggacagtttacgtgccaaagttcaaaaagacggtatgcgtaactcaaacgtaatggcgattgctccaactgcaaccatttcgaacatttgtggtgtttctcagtctattgagccaacattccaaaacttatatgtgaaatctaacttgtctggtgagttcactgtaattaacccttaccttgttcgcgcattaaaagaacgtggtctttgggacacagtgatggttaatgacctcaaacactttgaaggttcagtacaaaaaattgctcgtattcctgaagaattaaaagcaatctttgcaactgcgtttgaagttgagccacgctggattgttgatgctgcatcacgccgtcaaaaatggattgatcaagcacaatctcttaacctttacatctctggtgcaaacggtaagaaacttgacatcacttataagatggcatggttacgtggtcttaagacgacttattacctccgtgcgttaggcgcaacatctgctgaaaaatctacaattaacacaggtgcgttaaacgcggttaaacctgcaactgtagaagcagcagcacctgcggcagctccagtcgtagaagcgaagaagcctgaagcagttgaagaagacggcttcactcaagcagctccggttcctatggcttgttcaatcgacaacccagattgcgaagcttgccaataa

SEQ ID NO: 42978 - DNA, 717 bp, Acinetobacter baumannii
atgagccaagaagaaaagttaccaaagattctgatcgttgaagacgacgagcgtttagcgcgattaactcaagaatatttaatccgtaatggtttggaagttggtgtagaaaccgatggtaaccgtgcaattcgtcgtattattagtgagcaaccggatcttgtggtcttggatgtcatgttgccgggtgcagatggtttaaccgtttgtcgtgaagttcgcccacactatcatcaaccaatcttaatgttgactgcacgtactgaagatatggatcaggtacttggtctggaaatgggtgcagacgattatgtcgcgaaaccagttcaaccacgtgtattattagcgcgtattcgtgctttgttacgccgtacggataaaactgttgaagatgaagttgctcaacgtattgagtttgacgacctcgtcatcgacaatggtggccgttcggtaacgttgaacggtgagcttgttgactttacaagtgctgaatatgacttgttatggttgcttgcatcaaacgctggccgtattttatcgcgtgaagatatcttcgaacgtttacgtggtatcgaatatgatggtcaagaccgttcaattgacgtacgtatttcacgtattcgtccaaaaattggcgatgatcctgaaaatccaaaacgtattaaaactgtacgtagtaaaggttacttgtttgttaaagaaaccaatggattgtaa

SEQ ID NO: 42979 - DNA, 1650 bp, Acinetobacter baumannii
gtgtttaaacacagtatattcctgcgaatatatgcggggctggtaattcttgttgttttggtagctgtttttgggtatttactggtacaaattatcaactaccaacgcgcacaagaataccgagaatctttaactgatggtatttcttatgtcattagtgaaggagtcgctcgacaacctgggaagcagcaaaaaatagattggatttctgacgcatctgatttgctcgaacttccaatttattataccgatgcaagtaaggttgagctgtctcggaccgagaaaaagcggatagaagcacaaaaatctgtagttcgttacgatgcaagcaatagcattgcatatgtcattattggcttacgtgacgacccacaacattacttatctataaaagtcgacaaaattactgaacgccaaatgaaggctcttcctatttttgtgctcgactatttaatgttttatccggggcaggaacaagaatatcttgccaagattcaaaagcatttctcatatccgatcaatattcaaaatattcaagatgtaaatctggattctgaacagattggacgtttgcgccaagaccaaagtgtcatgttgtacaaagatagcgcaacagtgcgcggtacaaccatttcgattgtgtctccaataccgaatcatcctgcgcaagtgttagtgctgggtccggttccaatgtttaactggatgcctttacagctttcggcgggtattaccttatttagcttattcttattaagtctaggtgtttacggtttgattttgccgttagagcgcaaaatccgacaggtgcgttatgcattaaaccgtatgaaatcgggtgatttgtcactgcgtgttcctattgagggaagcgatgaaatggcaaacttggcttcaagttataacaatatgtctgaccatattcagcgtttgattgaggctcaacgtgagttaatgagagcagtatctcatgaactcagaacacctgtggcacgtattcgctttggtacagaaatgttagccgaagaagatgattacaatcatcgtatgcatcaggtcgacatgattgataaagatattgaagcgctcaataccttaattgatgaaatcatgacttatgcaaaactagagcagggtacaccttcattagactttgcagaaattgtactttttgaagtgttggatcaggttgcagttgaaactgaggctttaaaaacacagaaagaaattgaacttattccaccgcctttatatgtgaaagtagatgcagagcgtcgttaccttcaccgtgtcgtgcaaaatctagtaggtaatgcagttcgttattgtgataacaaagttcggattacgggcggtattcataatgatggcatggcttttgtctgtgtcgaagacgacggaccgggtattcctgagcaagaccgcaagcgtgtatttgaagcctttgcccgtttagatgatagccgtacacgtgcatctggcggttatggtttgggtctctctatcgtaagtcgtattgcttactggtttggtggggaaattaaggtagatgaaagtccaagtttgggaggcgcacgctttattatgacttggccagcacatcgctttaaacaaccgccattaaagaccaataaaaaagcacctgcataa

SEQ ID NO: 42980 - DNA, 354 bp, Acinetobacter baumannii
atgaatctagaatatacgcataaaccagactattacttgtttgcacaattactggtgcgacatatagaaagctatattcataaacacccagatgcagataatgccatttttgacttgcgagatgtctatgaaatttttaggcaagatttcgcatcaaccacaacaaacctagaaggcattttacatattgcagactcatatagagttgagactttgaatggggatcagcctcttattcagaaatatcaaattgatgctaaaaataattcgctcttgattgactttaatacagatgcactcaatagcctgagaagcggcaaacctattttggaacctgatgcaactcagttataa

SEQ ID NO: 42981 - DNA, 1422 bp, Acinetobacter baumannii
atgccatactcacttcgtgaattttcattttctacctccctgaaattttttctcttatttaccatcattattacgctatgttgctttattggaattgcatctcgtcctcttagttttcttgcttttttctggcctgctaattcggtatttctaggcctattgcttcgatttccacaaacacgccaaataggtagttttgctggtgcttttactggttacatgattgccgatttagttaatggcacacctctttttctcacccttattttaacgatatccaactacctgtatgtagtaacgactttagcactcgcaatattgtttaatcgccatataaaagcagcttatcaaggctattcttatttactcttatttgcactatgcgggattggcagcataactggtgctttttttgcagcaacttttgtgcctatgtttaacaccaaatttatgattggtagtttttgggccgaatttggttattgggttacttcagagcttcaaaatgccttattgttgctgcccattattttaaacatccccccttaccttaaaataaaaaaccaccttaagggtaatcgtatatatatcaaagcgattgattttttgcctttattcgctgttttaatttcgataggagtgagttattacgactcgggtccaggttccctactctaccccatcgccgcattaatctggtgcgctatccgctataaacccattattgttgctctcattacatcctttaccagtgcatatattatttatcatgtctcagggcattatttattactgtatccgcaagactatttaggcaataccatttctatacgtatagggctgatcatgatgacggttgcgccacttaccgtttccagtattagcgcactccattctgaattaattcagaagttacaacatgcaattgcccatgatgaactcacctcaagtttaactcgacgccaatttttacagtcagtccgcctactccaagaaaaagtacaaaaggaaaataagacctctgcatttttcatgttggacgtcgatcattttaaaaaagtgaatgatagttatggccacttaattggggatagagccttacagacctgtgtaacgaccatacaaaatattttacatcctcatgacttactaggacgttttggtggagaagaattcgcaatttttattccggataccaccagagaggctgcctttgaactcgcggaaagaatacgcattcaaattagtcaacaaccgatttatgtatatggcaaattacccatctttgtgcaggtaagtattggtattagcttatattctccaagctatcaccgttctattgaaagtttgtttaaagaagcagacgatgcgctctatcaagcaaagcgccaagggcgtaatagagtttttatttctttgtaa

SEQ ID NO: 42982 - DNA, 552 bp, Acinetobacter baumannii
atgagtgccattactccatacgactgggcgattatcgccttcgtgatcggcgttacatttctttgcgtctttatgctcacagttcccttactcctcggggggaaatcgtggggacgtgctaagcaagagcagtttgaatcaggtgtcgtgagtgctggtggcgctcgcattcgcctgtctgcaaagttctatctagttgcaattttcttcgttgttttcgacttagaggcactttacctctatgcatggtctacttcggtgcgtgaagtaggatggttgggttataccactgtcgtaatctttgtcgttgacctattaattgcgcttgtttatgccttctctgtaggtgctttaagttgggcaccggcagatcgccgtaaattagcaggtgagaagattaaagtcggttcaccaacaatgaacattgctgaaattacacgctttaactctattgaagagctcgtaactgaccctacaggccagattccagcccaatcatcaggtcgtgttaagtcaaaaactacacctgcattgtcatctgaaaaggagtaa

SEQ ID NO: 42983 - DNA, 678 bp, Acinetobacter baumannii
atgaaatatactctgacccgcgcgaatccggatgctgatcaatatccattgcaagatcgtcaaattgtgactgatccacttgaagaggaagtgaataaaaacgtattcatgactcgtttagaggatgtcttgcatacagcagtaaactggggacgtaaaaactctttgtggccatttaactttggtacctcatgttgttacgttgaatatgcaacgaccttaacaggcgtgcatgacttgtcccgtttcggtgcagaggttattcgtgcttcacctcgtcaggctgacttgatgattgttgcaggtacctgctttgtaaaaatggctccggttatccaacgtttgtatgaacaaatgttagaacctaaatgggttatttcaatgggtgcttgtgcaaactctggaggtatgtacgacatctattcagtagtacaaggtgtagacaaaattattcctgttgacgtgtacgtcccaggttgtccgcctcgtcctgaagcattaatccaagcattaatgcttttacaagaccagattcaattagagcgacgcccgctttctgccgtgattggtgatgatcttcagccagtgtataagccaaagatgatgccagaacgtgatcgtaagaatgcgcagcgtattgccgttaaaaacttacgctctatggatgagattaaataa

SEQ ID NO: 42984 - DNA, 1788 bp, Acinetobacter baumannii
atggctgaaactgacattgctatgccagaatcaacaccagttgattcacgcccagcatttgcaatcgtagaagagctcaaaaccaaatttggtgagaatttctatgtgcaggcgacttttgaagagtttccaacagtctgggttgagcgcgcacgcgtgcaagaagtcctcatgttcctgcgtaaagtggaacgtccttatgtaatgctgtttgacttatcagcgatggatgagcgtttacgtcaacatcgtgatggtttgccagcatctgacttcactgtgttctatcatttattatcgcttgagcgtaatagtgacattcgtatcaaggttgccttgaacgaaaacgatcttaacctcccgacagcgacaaatatctggccaaatgccaactggtatgaacgtgaagcttacgatatgttcggtatcaatttcgaagggcatccaatgcttcgtcgtatcttgttaccaacttattgggaaggtcacccgcttcgtaaagaatattcagcacgtgcgacagaatatacgccgtacatgcaagacaaagcgaagcaagatttcgaacaggaacacttacgctttgtaccagaagactggggtcttaagcgtggtaacgctgacgaagacttcatgttcttgaacttgggtcctaaccatccatctgcgcacggtgcattccgtattgtattgcagttagacggtgaagaagtgaaggactgtgttcctgatatcggttatcaccaccgcggtgtggaaaagatggctgagcgtcaaacatggcactcttttattccttatactgaccgtgttgactacttgggtggttgtgcgcaaaacatgccatatgtcatggctgttgagcagcttgctggaatcaaagttcctgagcgtgcacaagtgatccgtgtcatgttgaacgaattgttccgtattaataaccacttactttactgtggtacggcaattcaggatgccggtggtatgacaccagtattctatatgttcgcagaccgtcaaaaagtatacgacatcgttgaagcaattacgggttaccgtatgcacccggcatggttccgtattgggggtacagcacatgaccttccaaacaactggcaaaaacttgttaaagagttgctagattggatgccaaaacgtttgaacgaatactacacagctgcattcaaaaactctgtgtttattggccgtacacgtaatgttgctcaatacgatgccaaatctgcgcttgcatggggtgtaaccggtactggtttacgtgcaacaggtattgatttcgacgttcgtaaatatcgtccatacagtggctatgaaaacttcgacttcgaagttccggttgaatatgaaggtgatgcgtacgctcgtgtacttgttcacttccgtgaaattgaacaatcactcaaaattatcaaacagtgtttggataacatgccttctggtccatataaagcggatcacccattggctgttccaccaccaaaagataagacgttacaagatattgaaactttgattacgcacttcttgagcgtgtcatggggtcctgtcatgcctgctggtgaagcgtcattcatgactgaagttgtgaaaggtgcaagtacttattacttgacttcggataaggcaacgatgagttatcgtacacgtatccgtacaccgacgtttactcacttacagcaaattccttcagtgattaacggcagtttagtatctgacttaatcatttatctggcgaccattgacgtggttatggctgacgtggatcgctaa

SEQ ID NO: 42985 - DNA, 510 bp, Acinetobacter baumannii
atgatgattctgactgataaaaaaccacgtgtgaatgttgaagggattttgactgctgaagaaatccacgaaattgaacatcacattggtcactatccatacccacgtgcagcttctttagatgcattaaagtgcgtacagcgccgtaatggctgggtagatgatgctcaaatgaacgccatcgcacaattattaacgatcagtgttgcagatttggaaggtgtagcaacgttctacaatcgtatctatcgccaacctgtaggtcgtcacgtaattttgctttgtgactcaattgcttgcttcttgatgggtgctgaaacacttgctgaagcattccagcgcgaattaggtattcagtttggtcaaacgacacaagatggtcgttttacgctgcttccaatttgctgtctaggcaactgtgacaaaggcccaacgttaatgattgatgaagatactcacggtttagtagaagtgacatcaatcaaacagttattggagaagtatgtatga

SEQ ID NO: 42986 - DNA, 1332 bp, Acinetobacter baumannii
atgaatactgaaccaaaaccaatttatggcgacggtaatccggaaactcatccactgacttggcgtttaagcaaacaagaatcggtacgtagtgctgacgattacgaagcacttgaaggttatgccggctttaaaaaagcattaggtatgaaacctgctgaagtgcttgaagtcattaaagctgcaactgtaaaaggtcgtggtggtgcaggcttccctgctgggatcaaatggtctcttatggcgccaaatgatggcggtccacgttacttgatctgtaacgccgatgagatggaaccaggtacctttaaagatcgtttgttgatggaaaaacttcctcaccaattgatcgaaggtatgttgattgcaggttataccctagaagcaactcagggttatatctttattcgtggtgaatatatcgaggctgcacaatacctaaatgaagcgcttgagcaaatccgcgctaaaggttacttaggtgacaatattttaggttctggctggaacttcgagttacacgtgcacaccggtgcaggtcgttatatttgtggtgaagaaactgcattgattaactcacttgaaggtcgccgtgctaacccacgtactaaaccaccattcccgcaagttgctggtgcatggggtcgcccaacgattgtgaacaacgttgagacttataacaacttgccagcaatcatgcttcgtggtccagaatggtatatcggtttatcagcaggtaaatcaaaagatccgggcacaaagatttatggtgcgtcaggtaaagtaaaattccctggtctttgggaactaccatttggtacgactgcacgtgaagtaatcgaagaacatgctggtggtatgcgtgatggcttgaagcttaaagcatggttaccaggcggtgcgtctactgactttttaccggcagataccattgatttaccaatggatgctgaaaccattatgaaagcaggttctcgtttaggaacatgtttattaatggtggtagacgagacccaatgtatggtgtcgttgacccgtaatctggaagaattctttgcgcgtgaatcatgtggctggtgtacaccttgccgtgatggtttgccatgggctgttaaagcgcttaaagcacttgagacaggtgaaggtaagaaagaggatatcgaccacttacaagaacttactcgtaaattgtggattggtaagactttctgtgcccacgcaccaggtgcgatggagccgcttatgggcgcactcaaacatttccgtagcgagtttgaagcgaaagtgactgatcgtcctgtcgtgcaaactagcaacgtagaacaagcttaa

SEQ ID NO: 42987 - DNA, 2685 bp, Acinetobacter baumannii
atggctacaattcatgtcgatggaaaatcgtacgaagtcaatggatcagaaaacttgctacaagcatgtttatcccttggcattgatattccgtatttttgttggcacccatccttaggttctgttggttcatgtcgtcaatgtgccgtaactcagtatgcaaatcctgaagatacgcgcggacgtcttgtgatgtcatgtatgacaccagcatctgacaatacctatatttcgattgaagacaaagaagcggtagatttccgtgaatctattgttgagttcttaatgaccaaccacccacacgactgtccagtgtgtgaagagggtggtcactgtcatttacaagatatgactgtaatgacaggtcacgaccgtcgtcgctatcgttttactaagcgtacacattacaaccaagaactaggctcattcattgcacatgaaatgaaccgttgtattgcttgttatcgttgtgttcgttactacaaagattatgcaggcggtacagactttggtgtatatgccaatgcatcacgtgtttactttggtcgtccagaatcaggtactttagagtctgaattctctggtaacttgactgaagtatgtccaactggtgtatttaccgataagactcattcagagcgctataaccgtaaatgggatatgcaatatgcaccaagcgtgtgtcatggctgttcttcaggttgtaacatctctccgggtgagcgttatggcgaaatccgtcgtgtagaaaaccgtttcaatggttcggttaaccaatacttcctttgtgacaaaggccgttttggcacaggttatgtaaaccgtgcagatcgtccacgtcaacctcagttccgtaatggcgaaacagtagcaactgtttctgttgaccaagcgttggaccaaacaattgcgaaacttgaaggtaaaaaagttctaggtatcggttcgccacgtgcaagcttagaatcaaattacgcattgcgtgaactagtgggccaagcaaactactcaacaggtgttgcacaaaaagagcaaagcctcgttgaacttgctgcttcaatcatgcaaacagagggtatttacaacccgaacatgcgtgaaattgaaagctacgatgcagtactaattttgggtgaagatttaactcaaactgctccacgtatggcattgtcagttcgtcaagctgcaaaaaataaagctcgcgaaatggctgcaaaaacacgtacaccggactggttggctgaacctgtacaacgtattggtcaggaagcgaaatctccgatctatatcttggctgcaactcaaactcgtcttgcggatgttgcgactggtgaagttgttgcatcaccaaatgatattgcgcgtttaggttttgcagttgctgcggcagttaaaggcgaaacagttaatggtttagatgaggatgcaaaagcatttgctcaaactattgccgacactttaaaagcagcaaacaaaccgttaattattgcgggtacgagcttgcaagatgcttcaattatggaagcggcagcagagttaacgcaaaaccttggctcaaaagctggtttaagccttgttgttcctgaagtgaactctatgggcttggcattatttggtggcttaagccttgaacaagcatttgctcaagactacgacacacttgttattgttgaaaatgacttattccgtcgtttaccggccgctcaagttaaagcagcacttgataaagctgaaacagtaatcgtgcttgaccacagtgaaactgaaactgtgaaacaggctgatattgtactttcagcagcaagctttgctgaaggtgatggtactgtcgtaagccaagaaggtcgtgcacaacgcttctaccaagtttacgatccaagctactacaaacctgaatacgcgattaaagaatcttggcgttggttgcatgccattgaaactggccttaaaggcaagccaattgattggacagtacttgacgacgtaatcgaaacaatcgtgaagaacgttccggtacttgaagcaattcaagatgttgcgccagacgctggctaccgtgtacatggtttgaaaattgctcgtgaaccacgtcgttattctggtcgtacagcaatgcgtgcgcctttatcggttcatgaacctaaacaaccgacagatccagactcagcattaacattctctatggaaggttatgtaggtccgcaaaaagcttcttcgcttgtaccatttgcgtgggcaccaggttggaactctccacaatcttggaacaaataccaagatgaagtgggtggtcacttaaaaggtggtgattcaggcgttcgtttattcgaccgtttagcaaaacgtccagcacgtagctatgttgctccaacagctgtagttgcaaatcctgaaagcttccgtcttgtaccaatgcaccatatctttggttctggtgaattcacaattaaaacacctgcaatggaaactcgtattcctgaagctgtgtttgctgtgggcgaacaagacgcaacacgtttgaatctacaagaaggccaacgtattacagtaaaagcaggcgaaacaactgtgagcttacctgtacaagtaatcgaatatttacctacaggttatattggttacccagttggtttagctccgacagtatctttagctgaacctgtttcagtggcattaggagtgtaa

SEQ ID NO: 42988 - DNA, 1017 bp, Acinetobacter baumannii
atgaatcaagaaattatacgtcaaacgccactttgggctgagaactggccaattgcttacgctgttgttcaagcagttgtgattttgcttgttgttgttcttgttgcagcgttgatgtctttcattgagcgtcgtttgcttgcttggtggcaagaccgttatggtccaaaccgtgttggtcctggtggtatgttccagatcgttgccgacatgcttaagatcatgttcaaagaagactggacaccaaaatttgctgataaattaactttccgtttagctccggcagttgcgatggcaactgcggtgctttcgttcatggttattcctgtaagccctgcattgggtgttgcggacatgagcatcggtttgttgttctttatggcaatggctggtattgcggtttatgcagtgttattcggtggttggtcatcaaataacaaatattcattactcggtggtttgcgttcagctgctcaaacaatttcttatgaagtgtttttgggtatctcgctaatgggtgtggttgcaatcgctggttcatttaaccttcgtgaaattgttgaagctcaacgtgatgtttggttcatcattccacagttcttaggtttcttgattttcgttgttgcaggtgttgcggtaactcaccgtcacccatttgaccaacctgaagcagaacaagaattggccgaaggttaccatgtcgaatatggcggtatgaaatggggtatgttcttcgttgctgaatatgtaaacgttgtacttatctctgcattgatcgtgaccttattctttggtggctggttagctccattcaatttagaaattccatttgttccaccagtgttctggtttgtgattaaaacagcattcttcgtaatgatgtttgtattggcacgtggttctttaatgcgtccacgttacgaccaagtcatgaacttcggttggaaaatttgtttgccgctggcgttggttaacctattggtaactggtgctgtgattctgatgaatcaggcctaa

SEQ ID NO: 42989 - DNA, 543 bp, Acinetobacter baumannii
atgtataaaattctagctggagttgggtcaatcgttcggacgttattcatggtatttacccatggtttccgtaaacgtgacacaattctttatccagaagtaccagcagaggaaattgtaccacctcgctatcgtggtcgtattatcttgacacgtgacccggatggggaagagcgttgtgtggcatgtaacctttgtgcggttgcatgtccggttggctgtatttcactgcaaaaagctgaaaaagaagacggacgttggtatccggaatttttccgtatcaacttctctcgttgtatcttctgcggtatgtgtgaagaagcatgtccaactacagcgattcagctaactccagatttcgagttgggcgaatacgtacgtcaagacctcgtatatgagaaagaaaacttgctcatttcaggtccaggtaaatacccagactataacttctaccgtgtaactggtatggcaattaacggtaaagagaaaggtcaagcacaaaaagaaagtgcaccaatcgatgtacggagtctattaccatga

SEQ ID NO: 42990 - DNA, 522 bp, Acinetobacter baumannii
atgatgtggccgttttatttgatggcgctcgtggccatcgtttctacggttcgtgtagtgactaacacgaaccctgtacatgcattgcttagtctgattgtttcattgcttgctgttgctggtattttcatgatcgtaggtgcgccgtttgccggcgccctcgaaatcattgtttatgctggtgcgattatggtcttgttcgtattcgttgtgatgatgcttaacttagggcaacacacagttgaacaagagcgtaaatggctttcttcagatgcttgggcatatccagcactcatgagctttttacttggcttacttttagtttggatgctcggtggtgaatatacaaccatctctgcaccacttggagcacaagtaattggaccaaaagttgttggtcaagcgctctttacacactatttattgttggttgaagttgccgcgatgttattgctagcagcccttgttgcagcataccacttaggtaaacgtgaaccaggtgcagaagaggaaaaagaataa

SEQ ID NO: 42991 - DNA, 309 bp, Acinetobacter baumannii
atgggccagatccctttagaacatggtttgattgttgcaaccattctttttgcactcggtttttacggtgtaatggtgcgacgcaaccttttatttatgttaatgagccttgagatcatgatgaatgctgcagcgttagcattcgttcttgcgggtagcgtatgggcacaaccagatggacaagtcatgttcattctgattttaacccttgctgcggcagaggcgtgtatcggtcttgcgattgtccttcagttctatcatcgcttccatcatttggatgtggatgctgctagtgagatgcgcggatga

SEQ ID NO: 42992 - DNA, 1890 bp, Acinetobacter baumannii
atgagttatttatatctaacagtattatttccgctaatcggttttattttattggcggctgggcgtgataagctctctgaaaatgttgcagcaattattggtgtaggttctgtaggtttatctgcattatttgcattgattgctggtatggcatttaccagtagcggccagcaagtttttgttcaaaatctttggacatggttcaatgttggtggtttcgcgcctggcattagcttacatttagatggcttatctttacttatgatgggcatgatcacgggtgttggtttcctaatccacatctttgcatcatggtacatgcgtggtgaagaagggtatgcgcgcttcttctcttacttcaacctgttcgttgcaagcatgcttttgcttgtgttgggtgacaacttagcgttgttattcttaggttgggaaggcgtaggtctatgctcttacttgctgattggtttctattatgcaaaccctgcaaatggttgggcagcgatcaaagcatttacagttacccgtgtaggtgacgtattcttacttatcgctttattcttgctttaccaacaatttggtacgcttaatactcagtatatcgttgaacacgcagcagaagtaatgacgaagagttcgtcacttaccatctggactgcattaatgttgttcttgggtgctgctggtaaatctgcacaaattccattgcaaacatggttagcagatgcgatggcaggtcctacacctgtttctgcattaatccacgcagcaacaatggtaacagctggtgtgtacttgtgctgtcgtctattcagcgtatttgaacttgcgcctgaagtgatgcaattcatttcggtaactggtgctgtaactttattagttgcaggctttgctgctctcgtacaaacagacatcaaacgtattttagcttactcaactatgagtcagcttggttatatgtttatggctgtaggtgctgaagcgtatcaagctggcttgttccacatgttggctcacgcattcttcaaagcattattattcttgtcttctggtgcagttattcttgcttaccatcacgaacaaaatattttcaaaatgggtggtttgttctacaaaaacaaattcctatttgcatgttttgcgattggtggcggtgcattagcagctatcccattcttaactatcggcttcttctctaaagacgcgattcttggtgaggtttgggtacaaggtcaatcgattgctttatataacagcttatattgggctggtgtagcaggtgcattcctgacttcaatctataccttccgtttaatctgggttgtattcttcggtaaagaaaatacacattatcatgagattaaaggtgctacttactgggctccattaggtattttagctgtattgtctacttttgtgggtgctgcattaaaagctccggtagcaaatattttgaatacggcaaaaattcctgaattccatgttgctgaacaatttgttgaaggcatgcatggggcagagcatttagcagtaggtatcgcgcttgttggtttagctgttggtattggtctatttgcatttgcttacggtgcagtaaaatcatttgcaaaaacaagtcttggtgctggcttagctcatatttgtcgtactgcatttggtttcgatgcgttgtatgacatcgtttttgttaaaccttatttattcttcgccaaactatttggtcgtgatccgattgacagcttatggcttgttcttcctgcgcttgttaaaggcggaaacagtttcacaagctcacgtcaaacaggttcattgcgtgaatacgcatcaagcatgtcactcggtgtagtggtgttattgatgatcttgatcgttattcaggtagtggggaaataa

SEQ ID NO: 42993 - DNA, 1599 bp, Acinetobacter baumannii
atggaaaacaatttaattttacccgcgctgatccttgttccgttcattgcaggttttacttgttggttagtcgataaactcgacaaaactttgccacgctggatcgccttaattggtatgctcatcacgttgggcttaggtcttgcactttggcaaagtggtacttatagctacgagttaggctcaaaagtcccaacttggacagctgagttttacttaccgtggattcaatctctcggtattggcattcacctagcagtggatggcttgtctttactcatggtgttattaacagctttacttggtgtacttgctgttggttgttcatggggtgagatccaaaagaatgttggtttcttccacttaaacttgttatggagtttagggggcgttatcggcgtgttcttggcaattgatttgttcctattcttcttcttctgggagatgatgcttgtaccaatctacttcttgattgcgttatggggtcataagggttcaaacggtcgctcacgtgtttacgctgcaaccaagttcttcttatatacgcaaatcgctggtttagtaatgttaatcggtatccttggccttgtggtttatggttacatgatgacgggtatgatcggttttgattacaactatttattagctgtagcgaatcgtttacctgctggcttcgcgtatggtttcatgatctgcttctttattggttttgcagtgaagttaccagttttcccattacatggctggttaccggatgcccatgctcaagcacctacagcgggttctgtagacttggctggtatcttgattaaaacagcagcgtacggtttgcttcgttttgtaattccattcttcccggcagcttctgcacagtttgcagatattgcaattattttcggtttgattggtattttctacggcgcgtggtgtgcttaccagcaaactgatatgaaacgtttacttgcgtatacgtcgatttcacatatgggcttcgttttacttgctatttatgcaggtaatattttgaccttccaaggtctaatgatcatgatgttggcacatggtttgtcatcagctgcattgttcattatgtctggtcaaatctacgagcgcttacatacacgtgatttacgtttgatgggtggtcttcgtggtcagctccagtatttaccgttcttcttaatgttcttcgtcgcagctcttgttggtgtgccaggtttaggtaactttattggtgaattcctgattttgatgggttcatttaataaatatcctgtattcacgatcattgcttctatcagccttgtatttgcaggtttgtatggtttgatcttgattcaccgtgctttgtttggtgaaccaaactctgaacaaaagcaacactacactagtccattaaaagacttatctgctcgtgaagttagtattttgatgatttgtgcgattggtctcgtttggcttggtatctatccacaaacattcttggatgtatctcattcaagcatgcagtggttggtcaatagttatgtaccagtacaagaagtcgttgaaactgttcagcaaacagctactcaacttgaccatgtggagatccaataa

SEQ ID NO: 42994 - DNA, 1497 bp, Acinetobacter baumannii
atgaacttcacagtatcattttctacgcttatgcctttagcaccggtgatgattgttgctttgacagcagtcgtcgtcatgctgttaatttcaattaagcgtaaccataatttaatcgcaacaacctctgttgtcggtttaaaccttgctgcactttatatcttgttagaattatttggcggtaaatttgtgccggcaaatgtgatgggcatgtttatggttgatccatttaccatgttctatcaattcatgattttagttgcatcattggcttgctgtactttgtctcatgcatatattgagacttataaagacaaccgcgaagaactctatcttctgttacttgcttctgtagcaggtgcaatgttgatggttgcaagttcacactatgcatcattcttcattagccttgagttaatgtcgattcctgtatacggcttacttgcttatacatatcaacgtagtcagtcgcttgaagcagggattaagtatcttgtgctttctgcaacagcttctgcaatgttgttgatgggtatggcgtatatctacgcttacactggttcactttcattctatgattctgtacaagctttatttggcgcaatcaaacagccaatggtgttattaggtttagcactcattatttttgctgttgcattcaaattgtcgcttgcaccgttccataaatggacaccagatgtatatgcaggtgcaccagctccaatggcaacgttcttggcgactgctgctaaagttgcaacgattggtttgttcgtacgttatttgcttgcttctggcgcaatcatggtgaactcgctagtgactgttttgacaatcattgccgtattgtcaattttagttggtaacttgcttgctgttcgtcaggtcaacttaaagcgtattttgggttattcatctattgctcactttggttatttgttaattgctttaatcagcatgacatatgcaagcttgggcagcgtaactgtgtatgtggtgacttatgtattaacgactattggtgcttttggtgcagtagcgttaatgtctagcccatataacaacgtagatgaagcgcaaagccttgcagactaccgtggtttgttctggcgccgtccagtacttacagcaacattaacagtcatgatgttatctttggctggtattccattaacagcaggcttcattggtaagttcttggttgttatggctgctgtaacaactcaacactggttcttagctgcaatgattattgtgggtagtggtattggtttgtattactacttacgtgtgatggttgttatgtatatgactccacctgaaactcctcgtattgatgctgatgcacattggggacaaaaagtgggtggtttaatggtattggctgctgctgcattagttattattttgggtgtttatccagatccaatgattaatttggcattaaaagcagaaattttatctccattacatttcatgctttctcagcaacaataa

SEQ ID NO: 42995 - DNA, 636 bp, Acinetobacter baumannii
gtggccattcaagaaattcgtcacccacttattcgtcataaattaggtttattacgtcgtgctgacatcagtaccaagaatttccgtgagcttgctcaggaagtgactatgttattgacatatgaagcgacgaaagacttaccagttgtggattgtgagattgaaggttgggctggcaatgttactactcaacgtatcgcgggtaaaaaaataacgattgtaccgattttgcgtgcaggtatcggtatgcttgatggtgtgcttaacctaattccaagtgcaaaagtaagtgtgttagggcttgagcgtgatgaagcaactctagaagtacgtacttactataaaaagttagttcctgatgtcgctaaccgtattgccatgatcattgatccaatgttggcaacaggtaattctttagttgctgctattgatgtattaaaggcaagtggatgcaaagatatccgtgttatggtgctagttgcagcacctgaaggaattgcgaaagtagagacagcacatcctgatattcagctttatactgcatctattgacaatggcttaaatgaacatggttatattgttccaggtttaggcgatgctggtgacaagatttttggtagtgttcaaaaagactaa

SEQ ID NO: 42996 - DNA, 294 bp, Acinetobacter baumannii
atgaagcaagagttttatactggaagggtaaaacaatataacgccgataaaggatttggttttatttcgacgactgaaggagatattttctttcatatttctgatttccctgcatccgaaggtgaaccgaaaagaaatgaaaaagtgagatttcttgctgcagataatcgaggaaaatttaaagctgttaagattgagcgtattgatcctaatcctgcgaagactaagaaaactaaaattgctgatcacaataaagcgatcacaagtgagttattgtcaaatttccgacgttaa

SEQ ID NO: 42997 - DNA, 456 bp, Acinetobacter baumannii
atgattcaacgggaaaaaattaaacgcagcagattcaagctgagttcaagtgaatacatcagtatatttatcgttagcatcttggttatagttgcatgtgtgagttttatggtattgcactatcgtcagcaggctcagcaacgtgcatcacacgaaaaagtgcaattattaatacaacagcagaagacgattattgaagcacagcgtgcagctttgggtaaattaccggatgttcagctttctgaaaaaacgaaaaaggctttagcacttacatcagaaaaagttccagaacgggtaaatgatgaaacatcagcttttcagtgtgatggtcgtgagtactgtacgcaaatgcattctttagaagaggcacgttggtttgtacgaaattgcccgaacactaaaatggatggtgatcgtgacggtgagccatgtgaaaatgactcacgatggcattag

SEQ ID NO: 42998 - DNA, 888 bp, Acinetobacter baumannii
atgcggatgacattacgccagttggctgtttttgtagcagtcgcccaagaaggaaccgttactaaagccagtgatgcggtcagactgacgcaaagtgcagcaagtatggctttagccgatttagaagacggcttaggtgctcctttatttgatcgtttaggtaagcgcttgcagctaaatgatcttggacgttttctgcttcctcaagcattagaaattttaggccgctgtgaggcctttgaacaagcagccaagggtgagttacagagtattgaccttcgtatcggtgctactttaaccatcagtgattatctaatgccagatttaatggctaacttcttacaacgtcatccacaagcacatttacaacttcaagttggtaacacacgccaaatgattgaagctgtaaatcagtttcagcttgatttagctttaattgaagggtcttgtcacttacctcaactccaatgtattcactggcgtgacgatgagctagcagtgtgctgctcacctgaccatccgttaacacgtttaaatcgcccacttacccctcaagattttcatgacgtagaatggatattacgtgaagaaggttcaggtactcgtgaagtctttgataatgcaattttgcaagatttaccagatgcaaacatacgtttgacgcttggacataatgaagcgatcttaaagatagtggctggcggtttaggaatgtcgtgtatttcaaagttagcgattgaacctttaagtgaaaaaggtcaacttgttattttagatactccattttggcaacttacccgccctctttatatgctagtgcaccgccaaaaatatcaaggtccgggccttaaagcatttttaaaattttgcgatgaagatcaggcttaa

SEQ ID NO: 42999 - DNA, 762 bp, Acinetobacter baumannii
atgtcaattgaaaaatttagcgtagaaaaagttttatctgttcatcgttggaccccaacacttttcagttttaccatgacgcgtccttcgcattttaaatttacggcagggcaatttgcgcgtattggtttaaaggtaggagatgagctggttgtccgtgcgtattcggtggtgtcttctccgtttgatgaaacgctagagtttttctcaattgtagtaccagacggtgccttcacttcgaatctacagcatttgaaagtcggtgatgagctttatttggaaaaaattccatatggttacctgacgttggcacgctatcaacagcctttaccgcatgatctgtggttactggcaacaggtacaggcttggctccatttttgtcgatgctacaagactttgaaacttggtctaattaccagaaaattaacttggtctacagtgttcgtactgcggctgagctggcttatgttgaccgtattcaagagattgctgaaacttttggggaaggacatagcggttttaaatttattcctattattacccgagatccatctgcaccgttacatgaacgcttacccgtgttaatcgaaaatggtgagctagaaaaagtagcaggcttagaactcagcccagcatcaagtcatgtcatgctttgtggaaacccacaaatggttgatgatacgaaagaggctctaaaatgccgtggtcttacaatgaatcgtcgtggtgaaggaaatattgcggtagaaaattactggtaa

SEQ ID NO: 43000 - DNA, 423 bp, Acinetobacter baumannii
atgatgtatcgtcagcaaagcgtaactcttgatctcgacactgacgtcacacatcaatgttatttgcatcagacaagagatgaccatctcattggtattattgaatttaataaaccaagttatgaactcaaatggggtgatcttgaatatttccgtcgccgcaccgaagagttctcggtcatgccatttcctgaatgcattaatgcgatgattgttgatattcgtaatatcaatgtatttctggacaatgaagttccaattttaccgtggcgtttactcgaagaagattgtcctgttcgcctagttgttcctcaagaccgccttgaacactatgcgggattatttgaaccaacatggctttcaacagatgtcgacagtgcgattgcagagatccgtgagtttatggatatgtttgtccattaa

SEQ ID NO: 43001 - DNA, 228 bp, Acinetobacter baumannii
atgcatgatttttcaaaaccgcctcatgtgacgagtccggaagagactgcaaaaaaaagaagattgccagtttatattttaattattgttgggctttttcttctcgcacttgtggtttatatggttgctgatcacagcaaaacgccaaaagaggaagccgcttttcaacatgagaccataccacaagtcattagtggtacttctgatttgaagacctatgaagggtaa

SEQ ID NO: 43002 - DNA, 1677 bp, Acinetobacter baumannii
atgaatgaattttttaatgggcctcgcggcgctcagtttgatgcgatgtattactgggatcagtttcatcctattttagctgcaattgtcatcttactggtaggctggatcatcgctttattggtggcggcaggtgtaaaaaaacttctgcaaaaagtaaataccaatgcgaaattatcttcagcgactggacgtacacccaatatagaaggtctgatctccaaagtcgtattctggtttattctgattctcgccgttgttgctgctttaaatgtgctcaacattagtggagtgagcggtccatttagcaacatggttaatcaggtactcgtctatataccaaatatcattgctgctgtagtggtgggctttattggctggatcgttgctcgactggtgcgggcgggggtgaccaatgttttatcccgaactcaacttgatgataagttaagcagcgaagtgggtgtagggggaattagccagaatattggtgaaattctttactggcttgtattgttacttttccttccgattgttctttcaatcttaggattaacaggtttactgattccagttcaaaatatggtaaatgatgctgtagcattcttaccaaatatctttattgctggcgttatcgtttttgttggttatatcttggcaaaaattgtacgcggtattgttgaaggattaattaatagcttaggtgtgcaatctcaagcggaaaaaattggtcttttcaaaaattcaaatgtaggcaaattcttaggttcatttgtttttgccatcattattattacgacattgattgtagcatttgaagctttaggtattgagactatttctcagccagcaacagcaatgctcaatgaaattttacaagctattccaaacattattgctgctggtttaattttactagttgcttatattgtttcacgttttgttggtcgcttggttgctgagttaattgcaggaactggtgttgatgaaattcctgcaaaattagatgtacaacgctttttaggtcaaactaaagtttctaatgccgttggttggctaatcgtgttctttaccatgttgtttgcagtttctgaagctgctgaccgtcttggtttcgatcagattagtggtctaatcgcaatgtttatccatttcggtgcaaacattctattgggcgctgtaatcttggtgattggtttctggcttgcaaatgttgtggcgaacgttgttcaacgcggtgaatataatagttcgcgttggttaggtagtttggttcgtgtcttgattattggtttagtccttgcacttggtttaagggcgatgggtattgccgattcgatcgtaaaccttgcgttcggcttaacgctaggcgcagttgcagttgctttcgctcttgcatttggtttgggtggtcgtcaaccagcagaaagacttttatctgatttgctggataaagctaagaaagaggcaaatcaaccaaatcctttatatcaaccgcctactaataataagacaacaggtagttcgtctacggtttcaactccgtcaacgactacaactgcaccatcaacagcagtttcatctgatgcaaaaccagctgattctgcacaagtaaatccatcacaaccaccagtaaataaaccgtttggttctactggcgaaaatgatgaaatttag

SEQ ID NO: 43003 - DNA, 171 bp, Acinetobacter baumannii
atgaaaaaacctggtcgttttttagcacctgttgtaattgctgggattaccgttggttttttagcaagtgcttataaatttgtatttagcaaatctgaatcatcaaaacagacaacaagccataagcatgattctgaaaaatcatccaatgattcaaaagcatcaaattag

SEQ ID NO: 43004 - DNA, 1200 bp, Acinetobacter baumannii
atgtctaacagtcatgtcgatgtcattgtcttaggtgcaggtgcttctggactcatgttggctgcacatgctgctaaacggggacgttcggtcttaattttagaaaaagccaataaaattggtaaaaagattttaatgtcaggcggtgggaaatgtaactttaccaacctctatgtagaacctgaaaactatatttctcataatccgcactttgtcatttctgccctatcacgctatagcaactgggactttattgggctggtctgtgattatggaattgcctatgaagaacgtaaacacgggcaattatttacgctaaacggcgccaaagaaattttagagatgttggtaagtgagtgtaataaaacaaacaaggtcgaaatccagacccattgcgaggtgggacaagtcgatccattagaacaaggtggtttttcagtacacacaaatcagggccgttttagctgtgaatcattagtggttgctacaggtggattatccatcccaactttaggtggctctggttttggctatgaattggcacaaaaatttggacatacagttttcccaacccgtgctggtttagtaccatttactttttcggatcatattaaagaagtcactacacgcctaagtggtaatgctttagatgtgactctaactaactcgaagaatagctttactgaagcattattatttacgcatcgtggtttgagtggtccaagttctttacagctttcaaactattggaatacaggtgaaagttttaaaatcgactttttcccgagccaagatttagcaacttatttaaaagataaaaagaaagcccaacctaaagttttactgcgtactcttctgaacgaatttacggcaaaaagtatcgtacaagagttacaacaacttatatggccagagcagagcgagacaccaattggtaatatcagtgatgcacagctagatcatattgccgagcagctacatggttttactgttaaaccatcaggcacagaaggatatcgtactgctgaagttaccttaggtggaattgatacaactgaagtttcatctaaaacactcgaaagcaaaaagcagaaaggactattctttattggagaagtacttgatgtgactggccacttaggaggctataacttccaatgggcttggtcttcggcttatgcagcagcacaatatgtttaa

SEQ ID NO: 43005 - DNA, 882 bp, Acinetobacter baumannii
atgtttgatcacattgcccaacctatctcctatcagcatattgaactatcctttcctgttcatctcgacattaaacgtttagatttagttcatcctcaaatttcgggtaataagtttttcaaattaaaatacaatttccttgctgcaaaagaacaaggtttatcaagcattttgacttttggtggggcttactcaaatcatattgctgcaacagcttatgcagctcatctttttggtttaaaaagtataggaattattcgtggtgaagagttagctggtaaaccacttaatcccaccttggcaaaagctcaaagtttaggaatgcagctacattttgtctctcgccatgaatatcgcttacgagatgatgcaaattaccttcaacaattacagcaacaatttccgcagacctatatcattcccgaaggtggaaccaatgaactggcagttcaaggttgtcaggaaatcctgagccaatatgacttagatcaatatgatgtgatttgctgtgcagtcggaactggcggaacgatttcaggtctgattgaaagaagtgcagcacatcagaaagtcttaggattttcggctttaaaaggtgatttcttacaacaagcgattaggcaatggactaaaaaacaaaattggtctttgacagatgtatactgctggggcggttatgcgaaaacctcacctgaactattcgcatttattgaaaattttgaagagcaatatacggtcccccttgaaccgatctataccggaaaaatgatgtttggtctgtttgatcttataaaaaacaattattttccagcgaatacacgcattttggcaattcattccggtggtttacaagccgatattagaaataaacctcacacataa

SEQ ID NO: 43006 - DNA, 1128 bp, Acinetobacter baumannii
atgtcagatgatcaaaataaaccggaacaaacccctgctcaaacatctaataatgagcctgcacctgcacctgcacctgcacctgcaagtaaactgattccgacaaaacgctcaaccctattatggatgttgggtgtgcttattatcggtattttagtaattttgtgggcatggagaattgggccttttgccacaagtgtgcagcaaactgacaatagttatgttaaaggtaaaactaccattttatcgtcgcaaattaatggctatgttaaagatgtattggtaaaagactttgaccatgttaaaaagggtcaagtattaatgcatattgatgccaccacttatgaccaaaaagtagcacaagcggcttcgggagtagaacaggccaaaaatactttagccaatcaaactcagtcaattgctcaaaaacaagcagatattgtggctgcgcaggctaaagtagaacaagttagggctcaatatgagctttctttagcacagcttagacgctatcaacagttaggaaatagcggagcagcttctaaatctgagcaagataaagccgctgctgatgccgagaataatcttgcagcccttaaacaggcagaggccaatgttctagttgccaaagaagcacttaaaacagctcaagtcgcagaagcaggcttagaagcacaagtttccagtgctaaagcacagttagaccaagcacaaaccaccaaagactatagtgttattgttgctccaatggatggacaacttggtgaagtaaatcctcgtgttgggcaatatgtggccgcaggatcacagttactctatctgattccacagcaaacttgggtgattgccaactttaaagaaacccaaattgccaatatgcgaattggacaaaaagcgtggtttacagtcgatgcaatgaaacataaaaaatttacaggtcatgttgaacaaatctctccggccgcgggttccgagttcagtgtactaaaaccggataatgcaacaggaaactttaccaaagtcgttcaacggattgccgtgcgtattaccattgacccaaatcaggaaggaatggaacacttacgccctggtatgtcagtgattacttctgtcgacacaagctcttaa

SEQ ID NO: 43007 - DNA, 1644 bp, Acinetobacter baumannii
atgagtaaaacgcctcgttatttagaaacgccacctgactggacgccagaagaacaaccgactttacctggttcaccagcagcgattgcgcattctgtacctaagcgatttctttatttttttattggtctgtttgtcgctatttcagcaagcttaagtaatggtttcattacggcaaatttacccttaattcaaggtgagtatggcctgacaccttctgaagccgcttggcttcctgctgcttatgtaatggcgaatgtcagttcgaatctgattttgtttaaagctaggcaacaatatggtctgagagtcttttcagaaataggacttgttatttttattgccgtgctggttttgcacatttttgtgcatacctatgaaatggcattgttcgctcgggttgtagcaggtttagctggtgcaccactcagctctttaggtatgtattacaccatgcaagcttttaaaaaagccgacatggcaaaaggtatatatattgcctttggttttcagcagttaggtgtaccgctcgcctggattatttccccttttcttgtgagcacagatagttggtctgttctttacacctttgaactcggcttagcgctttgttgtttagcaatggtggtttctttgaaattaccacgtagcttacgaatctatgttttcgaaaaacaggatttcttcacctttgctttactggcgccaggttttgcatgtctatgtattgtgctgacacaaggcccaatcttgtggtggtttaacagtgaatggcttgcttatgtattaattgcaggttttagcttagttgttttaggtttgctctatgaacattatcgtgccaatccattaattatgacacgttggttaggcgcctcctcaaccctacgctttatctttggtgcttttgccattcgtcttttaatgtcagaacaaagctatgcagccgttaacttcctaaaaactatgggaatgggtccagaccaatttgttccactctatgtggtcatattagtggggattttaagcggaactctatttagtgcgcttactttctcgcgtgaacgaattatttttcacttactttttgcagagtttttgattctcattgcctgtggactagattatcaccttacgagcgatgtacggccttcaaacttctttgcaagccagtttttagtaggctttgccggcggcctgtttatcggtccattacttctaattggatttgcacaaactttggctaaaggtccttcgtatgtagtgacttttattgtcttattctctgcaacccaaacatttggtggccttgttggctcatctttcttctcgacctatcaacaacatcgtacacaaaactatcaagtcgagattattaaagatttggaacaagccgacccattagttgctcaaaggctttctacctatcaacgtagtgcagccatcacaacaaatgaccccgcattacaaacagctcagtctatgcgctcacttaatcaagtggttactcgtgaagctcaggtccgtgcctacaatgatgtgattgcattaaacggtatttttgccgtcgccttactcttatggggcggatttaatattgcacgtagtaaatacctacaacgcagaggaattagccgcccttaa

SEQ ID NO: 43008 - DNA, 570 bp, Acinetobacter baumannii
atgagtaaacgtcaaaaaattgcagcccataatcgggatgaattactcaatgcagccgaggaatgctttcgtattcatggtattaatgtccctctacaagtcgtgattgatcatgcaggtgtaggtagagcgacgttctaccgcaacttttgtgaccgcaaggctttaattagcgcccttttagagcgtgcgattacacagctagagcaaaaagctgctcattttcaacaattcgaagatggtttatttcgtttaattgaaggacatattgcacaacttcccaagctcgcaattttgcaagatttttggagagtgattgatcgacaagatccaattatgctaaaaatttatgaacggcggaataatgcacttaagccactgattgaaaatgcaatagaacaaaaactgtgccgagctgatctaactgctgatgactatgcaatggtcacagcaatgttgggttcttcatttcaaggacatgaacctgaagaacaaacccgcttagcgaaacgagcaattgaattactatttcatggtattcaagtacaaaaaattcgagggatagaatga

SEQ ID NO: 43009 - DNA, 624 bp, Acinetobacter baumannii
atgtttgagtcccttattcctcttttttcaattgcgatggcattgatgcttggagcaataagtcctggtccaagctttatttatgtagcgcaaaattcaatatctaaatcacgtaaacatggcttatttacggctttaggaacgggcacaggtgcagctctttttggctttttagcggttatggggttacaggcagttttattggcagtgccttcagcttatctaattttaaaaattggtggtgggctgtatttgctttggcttgcttttaaaattattaaacatgccaaagaaccaattgctatggaaaatgatgccaaatcgaagatgacttataaacaagcctaccgatatggtttgattactcagttaagtaatccaaaaattgctgttgtactagcgagtgtttttactgctttactgccaaaagaaattccaaattattactacgtcgcattaccgctcatttgttttatgattgatgcaggttggtactcatgtgtagcaatgcttttatcttcagagaagcctcgaaaaatgtatttaaaagcaaaaacgggtgttgaccgagtggctggaagcattgttagtgtattgggcttaaagttaatcttcttcaaatga

SEQ ID NO: 43010 - DNA, 189 bp, Acinetobacter baumannii
atgaaaaaactaatggtgagcatttcggttgtttttttcatcttaactacaggatgtgagatgagaacaacaagtaaacagcaaccttcaaatgaacgggcgatgagtattgctggttctccagtttatgaaaaagactacaaaattcccgatttacaagccaataatcatgagcaatctaattattaa

SEQ ID NO: 43011 - DNA, 2064 bp, Acinetobacter baumannii
gtgcgtaaaattttagtcaccaatgccctcccttatgccaatggtccaattcatatgggtcatttactcggttatatccaggcagacatctgggttcgtgccatgcgggcaatgggtcatgacgtgacttatgtatgtgcggatgatgctcacggtacagcaattatgctacgtgccgaagcaaatggtattagcccagaagagcaaatcgcgaatgttcaaaaagaacacatccgtgattttgacggttttggcgtacatttcgatcattatgattcaactcatagtgatgcaaacaaagctcgttcaacagatatctatattaaaaaccgtgaagccggaaatattgcagttcgacctgtaactcaattatttgatccggaaaaaggtatgttcttgtctgaccgtttcattaagggtacctgtccaaaatgtaagtcagaggatcaatacggcgactcatgtgaagtgtgtggtacaacttataatgcgactgagttactcaacccgcgttcgactttaagtggtgcaacaccagttgaaaaatcatcagatcactatttcttcaagcttccaaactttgctgaatatttgcaaaaatggacccgcgatgaaggtcgcttacctctttcaattgctaacaaattggatgaatggtttgaagcaggtttagcagactgggatatttctcgtgatgctccttattttggttttgaaattccggatgcgccaaataaatatttctatgtgtgggtagatgccccaatcggttatatgtctagttttgaaaactacatcaaaactaagcgcccagacttgaactttgatgatttctggaagaaagatagtcaaaatgaggtttaccactttattggtaaagacattgtttacttccatgctttattctggcctgcgatgcttgaaggggcgaactaccgcactccaacaggcttattcgtaaatggtttcttgactgtaaatggacaaaaaatgtctaagtctcgcggtactttcattaaagccgagacgtacttacaacatctaaacccagagtatttacgctattactttgcttctaaactttcagataaagttgaagactctgacttgaaccttgatgactttgtgcagaaagtaaattcagatttagtcggtaaagtagttaatattgctagtcgctgtgctaagttcattaacagcagctttaacaatacgctatcaagtacatgtgctgaatctgacttagtacaaagctttattgatgctggtgattcaattgctgctgcatatgaagcgcgtgaattctctacggcgatccgtgaaattatggcgcttgctgaccgcgcaaaccaatatattgatgagaaaaaaccttgggctcttgctaaacaagaaggtcaagaacaacaagttcttgatgtatgctctgtcggtatcaacttattccgtcaattagcagtgtacttagctccagttctgccaactttagctcagcaagttcaagatttcttaaaacttgaaagcttcgatttcgagtcacgtaaacaaattcttgtaagccatgagattgcacagttccaacctcttatgcagcgtgttgatccaaaagctgttgcagccatggttgatgcttctaaagagtctttaggtactcctgcgcctcaagcgactaaagcagcgaaaaaagagaaatctgccgagaaaaaagcagcccctactccagcagttggtgaagctgaaattattggtattgaagacttcttaaaagttgacttacgtgttgctcaggtcgttgaggcaggtacagttgagggttcagataaattacttcaactgacgttagacgtaggtgaagctgaaccacgtaatgtatttagtggtattcgtagtcaatatgcgccagaagacctaaaaggaaaattggtcgttatggtggctaaccttgcaccacgtaaaatgcgttttggtatttcaaacggtatggtacttgctgccggaaatggtgaaggtattttcattatttcaccagatagcggtgcaaaacctggcgataaagtttcttaa

SEQ ID NO: 43012 - DNA, 501 bp, Acinetobacter baumannii
atgactactgaaaataaattagatgaattaaaggcaaaagcggctgatgcaaaagtacaaggtgaaaaagctttggacgatttaaaagaaaatgtaaaagagaaacaaactgcgggtaaagaagcagttgcagataaagtagatgagctaaagaccaaagcggccgatgcaaaagtacaaggtgaaaaagccttggaagatttaaaggaaaatgtaaaagaaaaacaagctgctgcaaaagaggcagttgaagataaagctagtgatttgaaaggcaaacttgatgatgctcagcatagcctgcaagacaagtttgatcatttacgtactgaagcagcgcataaacttgatgatgctaaagccaaagctgcagaattaaaggaagaggcggctacaaaatttgatgagttaaaaactcaagcaactgcgaaatttgatgagttgaagaaaacagctaccgaaaaacttaataaattgaaaaatcatgattctgctgaataa

SEQ ID NO: 43013 - DNA, 1230 bp, Acinetobacter baumannii
atgtcttggctttcttcattaaaatccgttttttcacccgcacaagaagtgaaagaagaggaaatccaaaccgtactccaaaattatttattgccagattcaaaagatgctttaaaagagcgcattagtcagcttcaagtgcaaggtcgtgttttacaactcaccattaatactttcccagacgaaaaagaatacttgcagcaaattcatgatgatttagctggcgctttgcaaaagtgcggtattgaagaacttaatttacatgtagttcaacaaaagcgccctacacaagagagttcgggtcaaggttgttcatctaaagcaccgaaagagaattcgaatttacctcctgtgcttgatgcttcacctaagtctgaaccagatccaaataacccaccaattcagaaagcagcgccgcaacaaagagatgtgccacttcatcctcgaatcaagaatgttattttagtttcatcaggtaaaggtggtgttggtaaatcgacaacaacggtcaatttagcgcttgccttacaaaaaatgggacttaaggttggggtattagatgctgatatctatgggccaagtatcccgaccatgctaggtaatgctggtaaaactcctcttattgaaagtgaaaattttgtaccgttagatgcttacggtatggctgtactttctattggacatctaactggcgataacaacacacctgttgcatggcgtgggccgaaagctacaggcgctctaatgcaattatttaatcaaacgctttggccagacttagatgtactcatgattgatatgccgccgggtacaggcgatattcagctgacacttgcacagcgtattccagtgactggctcaatcattgtgacgaccccacaaaatgttgctttgcttgatgcgactaaaggaatcgagttgtttaataaagttggtattcctgtattaggtgtcgttgagaacatgtcgactcacatttgttcaaactgtgggcatgaagagcaaatttttggtatcggtggtggtgataagctttccgagcaataccatattccattgctaggtcgtttgcctttaaatgctcaaatacgtgagcatgctgatcaaggtaaaccgagtgtgattgcaatggatgatgcagctgatagttatatcgatattgcgaaagcagtctggcaacagattgagaaaatccctcagcgtgcacgagatgataaacgaatcttttga

SEQ ID NO: 43014 - DNA, 873 bp, Acinetobacter baumannii
atgcaatttaagtatagtttgggcgttatcagtttatgtagcgctttatttttagttggatgtaatgatgacaactcatcagtttcacaaacaccaaccgttcaggagcaaaaacagaagttacagccgattattattcagggtgctttacccgtagagtcggaaagaatggcttcaaagttagaaaataaaactgttgaaaaaataggtggctggaccttttggaaaggaacctacaatggttatccaatgattatttctaaaacacgtatggggatgagtaactctgctgccgcaaccgctttggcaattgaacggtataaaccgattgcgattattaaccaaggaacagcaggggggcacgatcctgatcttcatgtttacgatattgttttaggaaaatatgcaaccaatattggggcgtttagaacgcctaaacaaccattaggtggtggttcaaactcacttacatgggttgaggcttttgatgttttaccgacagaagaatctgagcctgagcctattgcaattcgcaaatttgaaggtgaccaagagctattaatggcggcacataaagtacgttatgacaaaggtgaggtggttgaaggaacaattggctcggcagatgtgtggaataatgaacttgaccgaattcaatttttccatgagcgttatggtacctcagttgaagaaatggaagcggcttctgttgcgcaaattgctagtcaattaaatgttccgtttttaggaattcgaattttatctaataatattaccaataacggggcttatgaccctggtacaggagaagcttgccaagactacgtgcttaacgtagctgaagaatatatgaaatctaaactaccaaaataa

SEQ ID NO: 43015 - DNA, 567 bp, Acinetobacter baumannii
atgattatggcaaagcaattttttcaatcttggcttccttctccagagaaagtttcaaatatgaaatttttaaggattttcgggcaaaaaacccttaatcctgtgctttggtatgtcaaccgtaaatctattactcgcgccatttttgtagggacttttttcggtttactgcctataccctttcatagtgtatttattgttatggcagttttactgtttgaagttaatttacctattagcttaatgcttgcttggctcagcaatcctcttacattagcgcctattttgtatattggtttctggtttggtgcccatatttatcatgtgcatatgataaataagaaaatgcttttaggggtgcttcaccagatttcacgttggattacgcattttggtcatggtcatatcgatttgagcctcgctaaaattttaatatcaggtctcattgtcgaagcgtttgtatttgcaaccatattatatatagtgactgaggtattctggcgttggatggtcattcgaaactggaaaaatagaacaggtcataaaaaacaagaagacgctctataa

SEQ ID NO: 43016 - DNA, 672 bp, Acinetobacter baumannii
atgtctgatataaaaagacaaatttctttttccgcacgtattagcaatattcttaaacaaaaaactaaagatccctgttttaagtatacagattggtcgggaaatgacttagaggaagtacgtaaaactattagaaacttctatagaaaagaacaaaatggaaaatgttcttactgtaggaaagatttatctctacagtctgctagtaattgccatgttgaacatatattaccaaagtcaaaatatcttaaatttatatttgagcctaaaaatttatgcgttatttgtgctgattgtaatgaaattaaaagagagaaagaaactgtagactattccaatgaaatactaaagaaaacagatattaaattatatcctagagcaagtaattcgttcttaattgtgcaccctcattttgataactacgatgatcatatcaaaatcttgtgtggagggcattatattgatatgagtcccaaaggccatagaacaatcggagtatgtagactaaatagatttctacatgaatttggctggcctgatgaaccaagtactttagatgagatattaacaacagccaagaaattatttgaaaatgatgatccgcttactcaaattagagtaatcaaacaattaggagtacaaattaatagtaattcagatatctttacttga

SEQ ID NO: 43017 - DNA, 1524 bp, Acinetobacter baumannii
atgcgtattaaaagtatttcttttgatgataaaaaatatgaactttctgatagcagtttctcatcagaagaaaatacattcactgttttggtgggaaggaatggttctgggaaaagccgaattcttcaaagaatatgtaatatttatataaactctttaggtattgatggccgacatattctcaatactcctattaatttaaacgcatataatgatattaacaacacctcttctctcaattatggtgaaatcacgtatgaacagaataagaatatttatgaaatttcctcacgccaattgaacggattatataattttcatattaaccaatttattattgagaaaaaaatcaaaaactctgaatgcaatattttctgtgatattaacaaaattattgctgtttcaactagcccatttgataagtttccagttattgaaagacatatgcattggaatagtaacatttgtgaaaaaaaatatatttatagaggtggaaaaataaaagtaaacagccaaaaagattatttaaaaaataaatttgatcaacttggtgcctctttaataaatttttttctacggtccgatcgaacaaaagataaaatttctattttacttgaatcgatgaacttggatgagaaaataaatatgtatttttcttttccttggcctttttcaccatctgaaattataaacactccaaacccaaaatctatttcagattcactaagttctattcgtttttttaaagataaaggtgagagagtaactctttcacaagatgaagaaaaagtacttactgaaaatcttaaacttgttctaaagcattatcaatttaaagaacatcatagaagagaaaactttgagctagaattgaacctattaaaccgaagtaaagatgaaaatattgagcttctgaatagtttatcttcattagcaaactatgatctaattgaactaagagatataaaatttagtaaaaataataagagtttttatttaacagattcaagttctggagaactatctttaatatttaatttactatcaattgctggtgaaatagaaaataattcattaatactaattgatgaaccagaaattagtttacatcctgaatggcaaagtaactttctccccctgctcagtaaaatgtttagtaattaccaaggttgtcactttattattgccacgcattctcctcaaatactttcatcaactaatgataaaaatgtttacattattaacttagaatatagtaataagttaataagaagtgaagaaatctctaaaatgtctgctgactatcagctcgcatatgttttcaaagaacctggctataaaaatgaatatttaacacgtattgccttaactactttcaccaatgttaataagaaaaaaatcttcagtgaagatgatataaattctttaggcttacttctggaaaatatgagtcatttagataaaagtgatcctcttcatcaattaattttatctttaaaggaaatgagggatttatatgtctga

SEQ ID NO: 43018 - DNA, 177 bp, Acinetobacter baumannii
atgagtgataaaatttttgaaaaaaagcaaaataccaccgcatcagtggataaagctgaagaaaacaaacaaaaaactcaacaaacaaaaaagactcaaattttccccctcaatcctacattatcttttttcctgcaactaacagcgctgctagtgagtaacacaggagtagactag

SEQ ID NO: 43019 - DNA, 3156 bp, Acinetobacter baumannii
atgtctaaattaagtactttgaccctaaaaaaagggcaatatttaagtgatttatctttatctattccaaaagataaatttaccctcatccaagcaggaactggggttggcaaaactactgccattatggaggactgccctaaagtacactcaattattattatgcttgtgccatcagtcctgaaagtgaaagagctagagacaagctatgcagatgtttctggttccattcaatatcacttttattacgacaaaaaaagtccgaccgaagatgaactcagtcaacagaatgggcttgttgtcgttgcaacttacgacaaaatggaagcaattgtgagtaagttatcaagtactcaacgtaagaatgcgctattggttgttgatgaatgccataagctctatgcagcaggtagttatcgggatgaagcgattaattctattatttttcggattaatcataagaaaggattcagaactgtcttattcctgacagcgactttcactgatcattgttggaaaactctcaaactccctctggatcacatttataaagttgatcttgaagaggtcgaacttaagcggtctctagaaatgcttttgattgataagggcaatcaatttagtttcattccctttgtagtagaacgccttaagaaaatgcaggagcaaggtgtacgtaagaaaattatcatccgtctcaacaaccgcatcaaatgtgaacgtgttgcagccttattagagaaatttcacagcgcccgtactttaacgattcatagcaaaaataaagatacaactgaggtccaaaacttttttacgacccaaaaaattccgagtgatgtagatgttgtgtttactacttccattatggatgaagcgatcaacatcaataatttaagggatgagcttgattctgtttttgtgattgggacagatgcccacccagaggagttagtccagtttcttggtcgtttgcgtaagacagcagtaccttgttttatggtgaaccatacaggtattgaactcaaccatatcgtagatattcgtgcattaaagcaaaagaaactagaaaagaatgaaagatttattgaacgtttaaccacaattgccaatcttttgtcagaacttatggatgaatatcagttggatattgatgaagtgggagaagaggttaaaagtatctataaacgtgtcccttacctgaatgaaacgtttaaagaattgtcaggagccaagctatttgctgtacattgtggtaaagctgtccataacattgccagcattgctgctaattattatcgtatggataaatccaactgttattctaacttttatctttttaaagagcgtataacggaccttttgcctacatgcacagtgaggcaccgtgttatcagcgactgtactctacctagctatattaaagagtttttagatgaagagaagaaagccagtgaggaagcctataaagcgagtattattcctgcgtttgaaatttttctagagtctaaaaaaaattcgtgtgtagaatttgatttggaggatgagtttgatgatatcagcccgcttgtggaacaaaaggctcaagtagtagaccaacgtactgataataccgatcagaacaaagaaactaccgagaatgagagcaaaaagtctaaaaagaaaactcaggcagtagaaaatactaagccaacccaagaggatgtcaaagcacctaagagcggtatagcacttctaaaacagcagggagttatttcaaatcataaattgactaatgatcagacaactgatgaaaagattgagaagaagctccctccttcacttcaaaagctaagagaaaaatggggagcgaagaaacaatcattaactatcgcatgttctatcaaaaaaggaactaacaatcattcagacaatgaacgaactatggtcattaaagataccactgttgaaatgcagaatgaaaatgctgaaactgaggatgtttttgatgaggaagatgaagttcttgaatgtactcagataactgaaaatgttatcgaagagtgtaatgaaaatgatgacgtcgctaatacacgtactatcgaaaaatcgtgtaataaagattacccaacagaagatgtttccaaagaatctactcacaaagaagtagctgatgatgttactgtgaaaccttgtaccaagaacaaagtaaccgatggtactaccgaagaatctaatcacgaggataaagtagaagcacgtgatgacactgagaaatctagccacgagaataaagtagtagaaaaaccgactgaagaatcttctaatggagatgaagaatcagacgatacgactaaagaaaccaaaaagagttcagctaaacctactcatgttaatttattaagactgaaagacattggtacaagtattcttcgtcaacatgaagaagacgagcaattcattgagcagcttgtagcccaatataatgttccttctcatgcaaccacggtagaaattttactgcaaattgcacaactgtctacggtgattggcaacctaaatgatatctacacgatcattgagaaaaaacagtttggtactgttatgggaatcgcaagagcttataaatcgaatgtcgttgtacattatttcattaagcggttttatcgatataacccagagcgttacctagacaacggatttcaattaactcctaacgatgcagctgattggctattaaagggatttaaacaggttcagaaggagactgccattcctttcaagaaggtactaaaggataaacttgtatcaggagttaaagtagaccctaagaccaaagaggtcggtatcgatccaagtaaagctgcaaacttctttgctaaatatttttctgtgaatgatcgtaatgctaaaaaacctgcatcacgctatttagaatttacgggaattgcttacggaaattatcaattccttgcaatcgctaagtatcagcaacctcatttaaaactactagaagagttccaattaggggagcgcatctttaaccctattacaggtgttttgatctcaggtcctaaatctccttttgagatgatcactccttctgatcaactagattatttcgatgaagaagaaatcgaaaataagagtgaaggtgaaggattagatcaggtagcttga

SEQ ID NO: 43020 - DNA, 735 bp, Acinetobacter baumannii
atgctcaataagctattgaccgaacttcgttcaaaaggcttaacgaatgcttcgatcaatcgagttcgagcactactctctgtcatgttcaacatggcaattcatcatgatttgatacaggttaatcctgtaagcaaggtatccaagtttaaggaaaacaatcaaattgaacgttatctcaatgctcaagagatcaagcgtttaatggatgtgctgaatactccgcatcagcatggcatagacaatttgattatcgtcgctatcgtcaagtttttactgcttacaggggtacgtaagcgtgaagcaatggacatgaagtgggctgatgttgacctcactacaggtgtttggcttttaggtgaaaacaagtctggaaaggctcgacgtattactttgaatcaggatgcactagcgatactacattcattaccacggcaacatgtattcatttttgcgaacccaatgacaggtcaaccgtttaacgacatgcgaaagacctttcagcgcatcatgaaagctgcctcgattcggaatatccgaattcatgatttacggcataactttgccagtattgccgtgaatagtggtcaaagcctatatgtcgtccaacatttattgggtcatgcatcaccacagactacccaacgctatgcacatttgcagtccagcacattgagacaagcctcagaggatgttgctgctgccatacgtgctcaaagtagtcatgcagcctaa

SEQ ID NO: 43021 - DNA, 477 bp, Acinetobacter baumannii
atggctaaatcatctattaaagcttctagtcaagcccttgctctcagcgaatttgaatctggcaaagaattcgatattcgcaagtatcgtccacacctcaaagtgactggattacgctttgtgattacggcacagcatgtccgtactctagctcgcttaacctttcaaggtaagaaaacttcaaaaagcttaggtacattttctcatgctgattttgaccaaaacttagagaaactaatctctcagatgcaggggtttcatcaacgaatcgctcaaggtctagcgcctttcgaagatgaagtcaaacctgcaaatacattacgtgagtttgctttaacgatctatatgccaagtgctgagatgcgtaaaaagtcgtataaagacgacgaggcgaaattacggatgcatattttaccagtcattggagattatccagttcaggatatgacaatgctggaatgctcaataagctattga

SEQ ID NO: 43022 - DNA, 156 bp, Acinetobacter baumannii
atgtccattatttttaataatagttattttaactatttattctctcagacatttattacacgcgattattcatctctatacctagatatctctgggtcttatagctatgcgtgtttaaatcagcttttacgcacatattctttttttgattgttaa

SEQ ID NO: 43023 - DNA, 681 bp, Acinetobacter baumannii
atgaacaaaaatgacactcacttttcaataggtcatttttcagatttgattaaattcaatcaaaagacatgtacagcgaagtatcgtaaagatacaccttcaactatcacagtacattccagtgcgtttccaatagaaacctattacgcggatttctataatcgctctgaaagtgcaatcaacaaaattagcccagactttttgaaaaaaaagttgagaaatgatcttaatgtttatacattttatgaactatttaaaaaagtcatccatactcataaaacctttgtgagcggtgtatatcttcaagctctgccaacattagaccctaaagataaaattctcaaaaactgcccaatttacaacttcaaagggaacgatctattctgttatacgggctttcaacaatttgtaactggtagcaatggaatcattattgtctcctctttaaagaaaggaaaaaatttagacaatgctcttattggtttatatcggcttaatcacaacgatgaaattgatggactattgatagttcgtgttcttgatttggaatactacaatgacaatcctgagcagatattagatagtaatgaaattttaggcttagaaaacctccctgagttcaatctcgaattttatcaacacctcaactacgggagtgaagtattagattttcctatttag

SEQ ID NO: 43024 - DNA, 348 bp, Acinetobacter baumannii
atgatgaaatgcattaagactaaagatgatttatcacatctagaaaatgaagcgattagggaaagtatttccaatcacatcctgactttagagcagcaatatgatgaaccttaccaagccaccctacatgggtggtttattatatgtgaagatgaatctgatttatctgaactacttccccatctaacctttagccttagtgataagcttcacttaggtgaagtggagtatgtcgaaaagaaagagaactggtatgaggtttatgtattgctaaatgataatgaaggcatattaatctatgttccgaatgacatattcgacaatcattctttaacggctattacctga

SEQ ID NO: 43025 - DNA, 531 bp, Acinetobacter baumannii
atgcaacaacgtgtattcgataaggttaatcaaaccctcatcaagacctttatttgcaacaagctttctgaacgctctaaaggtcaattgcagtatcaactgtggcaagacaatgatgatttatcccttggtattgctttgagccataatgaatcatcgggtggatttagttccgaactgatcaaggtagatgacatcctcaaaacggtcaaagaattattacactctgggaaaccattccatgcaactgcattgaagagcctatttattgggaaatcagtcaataactatagtttcttaggtgctgctttagttgatcaacaagttattcgtctacatcctcaaacatcccgtttactggaggtgatggaagaatatgaattgtggcctcttcgccttgaagaaatagtgagtaaaactgatgttcaagaaaatatagtgactaagactcctgccaaacgcggaccaaaacctaagagccaaactattgaatcggaagttggggaagaaacgcatgatgaaatgcattaa

SEQ ID NO: 43026 - DNA, 450 bp, Acinetobacter baumannii
atgaaaaagatattgcttgtttcactaatttctttcgctagcttggcccatgcagcaccaaatgtatggcaatcaagttatgctcaaggctttattgaatattcgattcaagacactaagggtaatacactttgggtagtctgtaatgaaggcgcaggtgatgattatgatcattctgcaaatctacagacgaagaaaaatcggtatcaaaatactgactccaaataccctttatccttcttattggacggaaagatttctgttgctcctgcgggttcaaccaaatggcgcaatggagctaatgcttggtatgatttttctcatggtattgccaaagccaagaaaattgatgtcttcgttaacaataagaagataacaacttttactcctaattctcacagcatcaaaactgtagcgaaagatatagcatcatgtgaggctatgttttaa

SEQ ID NO: 43027 - DNA, 327 bp, Acinetobacter baumannii
atgaagaatctcaaaatggttcggctgctcacttgtggcctactcagtttattgatgtgctctgtagcaaatgcgaaaactgaaaaaatcaccctgaaacaacccatcgatttcggtggagaagcggtcattttcaataccactaaaggtgaagtcatcctcaacatctatgctcttcctgagaatgtggctaaacagcttaaacccttcaaaaaaggtcaatgtctggaagtccaatccaaatatggtttctttcgagacactggagatggtcaatacattcaaagtattcgaccatgcaaatctactccatctaaagcacgttaa

SEQ ID NO: 43028 - DNA, 540 bp, Acinetobacter baumannii
atggggttttcaaatttacttagctctgcacttactgcagtggctacattctctggtaatccagatgttcaacaagttgctaattctgcaaatgaattggtggtttcttatcaggctcagcaacagcaggaaatggctcaacgaatcatgagttcgcccgaaggcattattcctgtaactgaaaaaggtaaaactgtttggcgagctttgaaatataacgccaatggtgaaattactggctttgctgactttaatactaaggaagaatacttattgttgaagcaacaagaactccgtgctcaacaagcattggaacagcaaagaaaagctgaacaagccacccaacgccaatattcagctcaagccagacgtccaggtgatgtttcaattgctgatattgatgcatatggacaaatgcttgacaccatgcagaaagcttccacagggattctaacaacttgtgcccaatatgttgaaagctctcctccatggaatgcatgcgtacagcgtgaggtacaaaaggttgaacgccgcagataa

SEQ ID NO: 43029 - DNA, 255 bp, Acinetobacter baumannii
atgacagcaagtatcaataccccagaaatgcaggctttaactaagtggttgaagcaaatgcgggaagaacaacatctcactatgcgagcattagctgaacgcatggataaaccacactcgtatgttcaaaaggttgagcaaggtgagcgtcggttagatgttgtcgagtatgtgtggtattgccgtatacttggaattaccccagaggaggggttagagcagattaggcaagcgattccagcatcaagaaattga

SEQ ID NO: 43030 - DNA, 228 bp, Acinetobacter baumannii
atgaaagctttcaaagaatggctcaaacagcaacgcgaactcaataatctgactcaacagcaattagcgcataagcttggaaaacctgtgcaatacattgaagacgtagaacatggtgattatcgcttggaggtcattgaatttatttattattgccaagccttgaatattgaccctcatcagggtattcgcttaattgatcttggtcctcaaaagcaaaacaagtaa

SEQ ID NO: 43031 - DNA, 159 bp, Acinetobacter baumannii
atgaagaaatacttacctgaacttgatacagtttccgacatccttgcatcaattcctcatcctcaaattcaatccattgcacatgccattcgtatctgcaatgaccaagatacgcatgttcttaccaaactacatgctgtagttggggttatgatctaa

SEQ ID NO: 43032 - DNA, 336 bp, Acinetobacter baumannii
atgaaagactattctgaatacttccgtgaagctgttgcctcttttctcacacaaaatcccaccctacaaaaagagcttgcaagcattactgttagtgaagcagaaaatataggcactacggttgaaatacttcgctcacaagtcataaaccaaagattcgttgaacatgcaaccttgttaggtgtagataccactaacttagtactgcaattcattgatgtacctgaagatgaaaaaaatcaaattctaaaaaattatcatcaaaatcttgctagttctcttggtgttgattggcaggactacataacaataaaccctcatttatcgcatctataa

SEQ ID NO: 43033 - DNA, 1245 bp, Acinetobacter baumannii
atgaactcttcatctacacccagtaccttaaacactgaggcaacgtctgttctttcccgtgagtggattcacaaagggactaaagcttataaacatgcaggatttgctttattcctcgtaggttttgctagcttctctctgatttattgtgtacagccactcttacctgcatttagccaaagctttcagattagtcctgcgagtagctctttggcactgtcattaacgactgcctttttagcaatttcaattgtgctatcgagtgccttttcacaagcgattggccgtcgcggcgtgatctttacatctatgctatgtgccgcaattttaaatattgtctcgatgtttacaccgaactggcacagtttactcatagcacgcgcgttagaaggtttattactcggtggcgtacccgcagtgactatggcttggattgccgaagaaattgcacctgaacacctcggtaaaaccatggggttatatattgcaggtacagcctttggtggcatgatgggccgtgtcggtatgggtattttggttgaatatttttcatggcgcaccgccttaggcctacttggagcaatctgttttatttgctcaattgcatttttaaaattacttcccgcatcgcgtaattttgtgcagaaaaaagggctgaatttagactttcacatgcaaatgtggcgtgctcatttaagcaatactaaattattacgcctgtttgccattggtttcttgcttacgagtgtttttgtcaccctgtttaactatgcgaccttccgcttaagcggtgcaccttattcactcagtcagacacaaattagccttattttcttgtcgtatagctttggtatggtgtcttcatcgttagcaggtagcttagccgatcgcttcggcaagaaaaccatgatgatgagtggctttgcacttatgatcgtgggtagtctcatgaccctcctcacttctcttttcggcattatcattggcatcgcatttattaccacaggcttctttattacccactcacttacgagtagttctgtgggtgccgaaagcaaacaagctaaagctcatgccagttcgctttacttgctgttttactatatgggttcaagtattgtcggctcggcgggcggttggttctggttacacggtggctggagtgcgattgtcggtttaaccgtgttcttgtctttaattggaatatttttagcggtttatacatcacatgccaaagcgcattaa

SEQ ID NO: 43034 - DNA, 921 bp, Acinetobacter baumannii
atggaactcaggcatatacgctactttttggcagtagcagaagaaaaaaactttaccaaagctgcgcagcgcttaaacatgagccagccgcccttaagtatgcaaatacgagacttagaagaagaactcggtgcagatttatttattcgttcgcctcatggggtggagctgaccgaagcagggcttgcctttttaaatgccattcagccggtacagcagcgtgtagaagatgcagcaaaccttgttaaacaagtggcaaatggcgaagtgggtcaattacggttaggctttactggtacttcaatgttgaaccctttaattcctaaatgcgttcgctatttccagcagcaatacccgaaagtaaatttaaagcttgaagaagccaatactttactactcatcgacctattacttgaagaccgtttagatgtcgcaattattcgttcgccacgcaatatgccggatagcctcattctacaagaattattggctgagccgctcattgctgctttaccttcagagtcttttcaactcgacgatgcatcacaagaaattgatttaactgcgctgcgagagcttgattttattgtctcgccaccttcagtgagtgcagggctttttgatgcgattaaacaggcctgccatgagcgtggctttgaaccgaaaattggacaaaacgccccgcaaattgtgtcaattttatcgttggtatctgcaaacttaggggtgtctttggttcccgagtcgaccaaacaattgcaaatacaaggtgtggcttatcggtctttaaaagcacctgtacctacggtgggcttagggcttgcttataagaaacacgccccttcacaaatggcgattaactttgccagtgtggtgcaagtggcttgtcaccacgccaacgaaataaatgaaatcagctag

SEQ ID NO: 43035 - DNA, 888 bp, Acinetobacter baumannii
gtgaataatttaattattggaaccctatttgcactgtgtgcagcagctttaaatgcatctattggtgcaattagtaaattactcatgcatagtggtttaaacccgcaagacattgcctttttaaaaaccattatcgcctttttctttttaagtgtgtttttatttaaagtgcctgttagccaaaagattgcttttattagcagcaagccaagtaaactcagcgtttttgctcaaattgctatctgtgcttttttaggtattttctcgctattcttttttgagaccattgcttataaccacggtgctgcagctaatgttgtggtggtactcatggcttcggctgccatctctgccctattttttgggaggttcattttaaaagaaagcatctacattcattcgcttattggaacattattggcggttgctgggattagcattatttcgtggaaaggggaaaatagccttttaatgctgatcaacgcttctattgccggtacgggttatggcttattttcggttttagtgaaaaagttcaaattaaacggcggcctgtttctgactaaatacttactactgtttggtagtgtttatcttgcagttccgtttttaataaacttgcatagcattacttttaatagtgacttcattttaggtttgattggtttagctgttctaccaaccatactcggctttttctgtaccactaaagcgttgtcttatatgagtgccgcaaaggtacaagtgaccgagctttcagaacctatttttgcagcgcttatggcttgggttttcattcatgaacagccgactttatcgtttttatatggtgcgatttttattatttcaggcatctttttaatgaacagagcgccgaaatcaaactag

SEQ ID NO: 43036 - DNA, 744 bp, Acinetobacter baumannii
atgattaaatcgattatttcaggttgcgcggttcttacactttcagctttaacggtaactcatgcagagttttcttatgaacaagaattacaacaaagctgcaataaagtgaagcaatacgcgagtttaggcaagaaattctacgatcaaaaacaatataaaaaagcgctcgaaaatttccaaaaccaagcctcttggactgctttttgtaaggccaatgcagacgaaaccacaattaaatttaccgaccgtgatattgaagttgctaacaataacgtgggcttagcctatgtcaaattgggtcagccactttgggcaagagcatggtttatgctcgatgaaaaatcaaagtctagtcaatttaaccttaagcagctgcctcaacctaaagcatcaaatgatttgtcgggtgaatacgtccgttactcaggttttggtgagtgggatcacatcacggtaagtcgtaaacagggccaatataccattggctattcgggcgtttatatgggcttacgaagcttaatttacggcccaaatatgggtgagtttgacaccaaaatgccgaccaatgccaagcaaactatttataaagatcaagactgccgtattcagctcgattttagaaccaatgcgaagttaggcaattatattcaggttaaacaaagcgaaggagagtcgggttgtggctttggtcataacgtttatgccgatggaacgtatttaaaagttgagtctggaaaataa

SEQ ID NO: 43037 - DNA, 393 bp, Acinetobacter baumannii
atgaaaaatatatttgcacctttactgcttgtttctacggttattttttctgctcacatttatgcagagccgactagtacctgtaaggaagtgaaattccaaaaagccgatcaggcgtggagtgggcactattatttacatggtgtaatggaagtcggttcagaacttttacttcagccagatggcaagtttcaatggatgcttgctgtgggtgctttagaccaatatgccgaaggcacatggtggaaaaatggagactgtattggcttaaaaccagaggctaaatttaaaaaggatttaagtattttccctgaaagcctaacgatttcggataaatccttagatgcgatctggcagggtggacgccagcaaggcacatatagcaaagactaa

SEQ ID NO: 43038 - DNA, 1002 bp, Acinetobacter baumannii
atgaaatatagaactttaggacaaacaggcgaaaaagtatcagcacttggtttaggttgcatgggaatgagctttgcttatggtgcctcagatgacacacaaagcattgcaactctagaaaaggccatagacctcggcattaacttttgggacactgccgacatgtacggcaacggcgcaaacgaagttttgctctcaaaagttttagaaaaacatcgcgacaaagtatttttggcgaccaaatttggctttcgttataaagaagataaccttaacccgaaaaactctttagagtcttatatcgacggctcacctgagtggattaaagtcgcggtcgaaaacagtttaagacgcttaaatacagacgtgatcgatttgtattatgcgcaccgcatagacccaaatgttccggttgaagataccattggcgcaatggcagacttggtcaaacaaggtaaagttcgttatttagggctgagtgaagcgtcggctgaaactattcgtaaagcacatgcgattcacccgattgcagcggttcaacatgaatattcgctacttacccgtgagtttgagcaaacccatttgcaaaccattcgtgagttaggtattagccttgtgccatattcaccactttcgcgcggtttaatcaccaatacgcttgatgtgaataacctagacgaaaatgatttccgtcgccagttaccacgttatcagggcgataactggaaaaataaccaaagcttggcgcaagcatttagtaaatttgctcaaagcaaaaatgcgacagcggctcaactggctttggcttggattttggcgcaaggtgacgacattattccaattccgggtacgcgtaaaatcgagcgacttgtggaaaatgctggcgctgtagaccttcatttaacagcggcagatttggcagaaattgaagcgattattgcgagatacccaaacatgggcgcacgctataacgctcagcaacttgctgcggtcaaccactaa

SEQ ID NO: 43039 - DNA, 903 bp, Acinetobacter baumannii
atggaaaccatacatgatttttatcgtcgattttctttaaccagagatagcgattactcggttccatcgacttcgtttggacattttaacgtgttccagcgcgatgcctgctcgttcctcacgccttatagccgccgcgattattataaaatttcactggttttaggcacaggtgaacttcactatgctaaccgctggatacgagttgaccgccctgctttactgttttccaacccaatggtgccctacgcatgggaaattaattcgcccgaacaggcaggctggttttgtctatttaccgaagagtttgtaaaccaagaatcgcgacaaagctttttaaaagactcgcccctatttaaagttgacggagacccgctatattttttaaacgaccaacaggttgaagaaatttcatttattttcaaaaagatgatgaatgaaataaattcagactatattcataaatacaatgttttaagaaattatttgcatctgattgtgcatgaagccatgaaaatgcaaccgacccaacagtttgaaaaacatagtaatgcttcggtgcgcatttgccatttattctttgagttattagagcgccagttccccatcgactcgccacattttcagcttaaactcaaaactgcaaatgactttgcctatggcttgtctgtgcatgtgaaccatttaaaccgagctgtaaaagaagccacaggtaaaaccacgtctgagcatattagctcgcgcattacgcaagaagtcaaagccctgctacaacacaccagttggaatatttccgaaattgcctatagcttaggctttgaatattcagcatatttcactaacttctttaagaaaaataccggattttcgcctaaaaaattccgtgaagactgtgtagcctaa

SEQ ID NO: 43040 - DNA, 552 bp, Acinetobacter baumannii
atgaaaaatttagaagcttcatttagagcattgcgagtgctccacacggcaaaagatttatttaaccaatatgggtttcataaggtaggggtagaccgaattattgccgactcccaaattcccaaagccaccttttacaactacttccactcaaaagaaagactcattcagatgagcttaacttttcaaacagacgctttaaaagaagaggtattttccacgatctattcataccgtgaactgatggtgttcgataaactcaagagaattttctttttacatgctgactcagacgggctttatcggttgccttttaaagcaatttttgaaatagaaaagcattatccgtcggcttataaggtagttattgattatcgaaactggcttattcaggaaattcataaactgcttttaactgtaaaacctgccgctacagttgaagatgcacatatgtttttgtttgtggtcgatggcgcaatggtgcagcttttaagctcaaatcaaactgatgaaagggaatatctgattgattattttctaagtcgggtttga

SEQ ID NO: 43041 - DNA, 648 bp, Acinetobacter baumannii
atgctcgaaaacaatcctactgaccaaagtgaaagtaacaatttaaataatcaaccttcattcaatagaagtctaacaaatagaattggaaatatacttcaaaaaacttttatagatcctctttcaacaaagcttggtgagttttggattgtaacctacatagttgttctagctgtttcagctttattctatttattttcttttatattttctcaactgctaggacctgaacagataaaaacgattatatctttaaatcctaactcgcttgaatttttaaatagatgttttaattttattatttatatggttccagcattcgtaatttctgcaataggatcttatacaagaattctcctatcagattatagtatgagtgttattaaatgctttaaattagtcgttgggtctggtttttttggaatagctactctattagggatacaaagtggaatatttttcgatctattattaggtcatttacctaatgcctctcaactagtagctaataacgatcaaacaagtgatagagctttttataaaataatctttctttgctttttaacaggtatgttttctacagttatttttatgactatagaggaaaaagttaaaatactttccaaaaaactaaatgaagaaaggtaa

SEQ ID NO: 43042 - DNA, 996 bp, Acinetobacter baumannii
atgtttgaagtaaaaaatagaatgcgcgataagttttataactctttaatagaatataatagaaatttagctgcagctgatatatttaaaataataggttctgaaaaagaatctcaagaattaattaataggataaaagggttttctgatcaacagttaaattttttagctcgagtatcaaatattcctaatgaacaaattgatatatataaagattttataaagggtaatgataatgagtttacaaaagaaattactaaatttgatgctaataaaattttacgtcctggtgatataattttaatgacaggaacttctttacaatcaaaaatattagttaaagctcaaaagcccttttatttaaaagctaaatctagtcatattgctatagtgcaatcagaaattgtatgcgtagatgctctacctaaagttggtgtaagtatgagaccaataatggatgtattaagtaatgtggaacctaattggagagtgattagatttaatgaaataaatgaaacctatcatgataatattttgaaagcatgtgctttttatgttatgcaaccgtatcaaataaaacctaaaaaaaaaccaggaaaagatttttcttattgttctgaactagctagaaaaatttttctagatttaaggttagaaaatacaggaattccaaataatacaattgttaagccgtgtaactttgatcgattagcagataacgtaaataactggacagatgtaactcatgaagttagagattttgtagaattctgtagaaaatatgacgcaatatttaggtctatgtgtaagcttcaaattgatggtataaaattaaatcaattccgttataaacaaagaagagaaattttaagaaaatataagactagagtatctaaagggttattatcacaagaagattatttagaaataaaggaagaaattcaaaaaatagaaagtaatatgatctttcagttttggaattttaagaaaaaataa

SEQ ID NO: 43043 - DNA, 348 bp, Acinetobacter baumannii
atgtttataaatgctttatctagttttcttgaaaaattagccccaaaagaagaattggatgaatggtatttaactactttcattgatgaaaatgtttgttcgctattaccagcagaagcttttgaattctcttcacatgttataaagcttcttaaaaatgacgctcaaccagactatacatatgaattactaactattttattagctctacaacgacagtctgatacagtacaaatacctgaaattctaaaaaatagtcctaatttttttgaggaaattattaaaaagaatcctgaaaaatatattctaaatttagctcatgagttggctcaaaattatcgaatctga

SEQ ID NO: 43044 - DNA, 219 bp, Acinetobacter baumannii
atgagacatgaattaagagaaatttttattaagggatgcgacgataaaattgaaaagaagggagacaatgtcggtctgtctttttatgctttttttaaaaataagaatgacaaccctgagctattgatggaagcagcgcattggtggattatggagcataagctagatcacttcgaaaaaactgtgaagattaaacaattggttttgagtgaaagctaa

SEQ ID NO: 43045 - DNA, 336 bp, Acinetobacter baumannii
atgactgactgccttccatcaaatacgccattagaagaaacaggttttggctacactctttctttaattaatggcaaatataagatgatcatcatgtattggctgtatggaaaaactgttatgcgttttaatgagttgcagcgctgtattggcaatatttcatttagaacgctgagcaatacacttaaagagttagaaagagacgaactgattattcgtaaggaatatcctcaaattccaccaaaggttgagtatcgtctttctgaaagaggacagtctttaattcctttgctagatatgatgtgccaatggggcgagcggaatatgaactcttag

SEQ ID NO: 43046 - DNA, 558 bp, Acinetobacter baumannii
atgaaaaagacattagtgatcgttgcgcatcctcacatagaccagtctgtaattaataaaagatgggtggaggaattagaaaaacacccagaccaatttacggttcaccaaatttatcaagcctacccagatggcgtaattgacgttgccaaagagcaagcgcttgtagaagaacacgaaaatttagtctttcaatttccagtgtattggtttaactgtccgccacttttgaaacaatggcttgatgaagttttggcgtatggttgggcttatggttcaacaggtgacaagcttaaaaataaaaagtttatgctggcggtgtctgcgggtgctcaagaaaaagtttattcagagcaaggcgaatataagctttcgttagagcagatttttagttcttttgaactcaccgctttatatgttggggcagtctatcaaccgctttatgcattttatggtttagacacaaacccttcaccagatgatgctattccaactcaccaagaaatagataacagtgccgttcagtatgttcagaagttattagcattgtctgagtaa

SEQ ID NO: 43047 - DNA, 780 bp, Acinetobacter baumannii
atgaccgtttttcgcattaaagaaaaagaaaattcccttataactgaagatgctcatgaattaatatgctacgcaacaatcagtgaaataaactcatggaacgatgttgttaacttatattcagaaattaagcagaaacatttccctaaaaaagtattattacttttagaagatataggacagtgcgaatacacgtctatgcatgcttcaatgggagaggggctttattttgataccacagaattcgttgaagatgacagtgcagcaagttgggaaaatactcgacctttagagtttcgataccatattgaacaattattaaagccagaaaattatttaaactttaataacttgccaaaaaaacttaactatagcgatgaagatcaggcaactctgctacagatcaatgctgaaccagaaaaaattttagatgaagttattcaagtaaagttagtcaatattcaaactgaaactaaaaaatttgcagcatgcctcaatggttactttacttgtgatttgaacccttttgagtcttttagcttgattgagcatttagatcaaaactatggcttagagtatgtgggtttaggggcaagcttattattctttattaaaacatcaaaatttgatgcaaataaaactcctcaattgcttaatgagttgagcaacttttatcaattcaaccaaacaacgcataatcagctagaacaacatttatctaatcatgaatatcttattttgccttatgtagagtcattagaagtttttgatctggattaa

SEQ ID NO: 43048 - DNA, 342 bp, Acinetobacter baumannii
atgaatatcgcaccttttccatttcaaattacaaattgggaagaaatagaagtcactgaatatagcggtgaaactggaaaagcttattggaaaactcaattttttggtgaagaaacaaataagattagagtgagacttgtcgagtactcagcaaattacttggcagaccattggtgcgaaaaagggcatatattattttgcctagaaggcgagctagaaagtagattaaaagatggaagaacatttactttaacttcaggcatgagttatcaagtcggagacaattcagagccacatcagtcttttagcttaaatggtgcgaagttacttatcgttgattaa

SEQ ID NO: 43049 - DNA, 1878 bp, Acinetobacter baumannii
atgcaaaatacggccaaaaaagcgaccttgcctgccacggctttggcagctcttggagtggtctttggagacatcggaacaagtccgctctatgccttgaaagagtccttccatgcagcgcatgggttgggaattcagcctgaaaacgtattaggaattttatctattattttttggtgcttaatgctgattattagcatcaagtatgtcgcaatcgtaatgcgtgcagacaacaatggcgaaggcggtattatggccttactcgcgttgaatttgcgtaaagcgaaaattgccgacaacaaaaaaatctacatgattgcgataggctttataggggcatcactgttctttggtgacggcattattaccccagccatttcggtattgtctgcggtcgaggggttgtctattgcaaccgatgtgtttgacccgttcattatgcctattgcaattgctattatcgtcacgctgtttttggtgcaaaagcacggtacggcgtttgtaggtaagttttttggtccaattacgcttgtgtggttcttatctttaggaatcttgggtattcacagtgtcatccaaacccctgtggtactaggcatgtttagtccgcattgggcgatccagtttatctatcaccatccgatcatgacattttttgtgatgggtgctgtggtgttaacagtgactggtggtgaagcgctatatgccgatatgggacatttcggaccagttccgattcgtctggcgtggttctttgtggtattgccatgcttggttttaaactacgcaggacagggcgcattattactcagagacccagcggcaattgaaaatccgttctatttactggtgccgcagtgggccttgtacccaatgattattatggcaaccatggcaactgtcattgcttctcaagccgtaatttcaggggtgttttctcttgcgcgccaagcgattcaattgggttatttaccgcgtttaagtattaaacatacgtctgagtctgaagaaggtcagatttatgtacctttcttaaactggttacttttaatcgcaattattatcttaattttaatcttcaaaaccagctcgaacttggcaagtgcctacggtttggccgtaactttgaccatgctctgtgacacgattttggttgccgtgtttatctactcggcgtggaagtggagcctgccaaaagtgcttctcctgattattccgttctttattttagagtcggtattggtcggtgcaacttcacttaaaatcttgtcgggcggttgggtaccattactgattggtgcgattgcagtgaccattttaatgacatggaaacgtggccgtgagcttacttttgctaagcttgaacatgatactttgtcactcgatttgtttgtaaaaagtattggtaatagtgtgcattgggtgccgggcgatgctgtatttatgacgggtacgccaaatgttgtgccacatgccatgctgcataatattaagcacaataaagtactgcatcagcgtaatatcttggtcactgtagtgattgaagatgtaccgtttgttgcacctgaagagcgtattacaacagaaaccttagccgaacatttcttccgtattaaaattttctacggctttaaagatgaaatgaatgtgccgaaagcattgatgcaagcctatgaacaattaggccttgaatatgacttgatgcatatcagcttctttatttcgcgtgatcgtattgttcattctgtgggagacggcatgtcgccatggagagaaaagctgtttatttcaatgcagcgtaataccagtccagtcagtgatttctatcaaattccaactaaccgtgttgttgaattaggtagccaaatcgaaatataa

SEQ ID NO: 43050 - DNA, 444 bp, Acinetobacter baumannii
atgatccattcaaagattattggtattggcgtaatcacaggattgtgtagtatggctgctttggctgaaccagcagtccagccaggtgatactttagaaagcttatctaaagtaaaagtgactacaaccgtcaacggccaaccaggttctattagcgatttggtcaatagcggacaagtacagcaagtttctgctgcaccaacaagcgcagcgcctaccggtgctcctattccggcagatgttccaccagcacctccagcgggcggtgaaatggctcctccagctgcaccaactgatgcagtgccacctgcaccgaatcaagcggctccagcgccacaagatccgaacactccaccgccagctgctaacccgaaccaatcagcagacccaatggcaaaagatggggcgttaccagcagatgcacctatgccacaagctcaataa

SEQ ID NO: 43051 - DNA, 1104 bp, Acinetobacter baumannii
gtggacagtggtattgatagaaacatggcaagtaaaaaacgtagtaaaggtacaaattcattttctctaagtgagcattttggcaagattattcttgcttgtattgcagccggaagctttgcaattgctttcggcagtgaaaagatttcgcagtggttttctcctttaagtactaactcgacttgtcttaaccagttttatcgtgaagttccgcctgcgttaaataaagaaagcttaaaaaaagacagctatccgctgtgctttaacggttttaatgtcctctattctggcatttctaaaacaccattatggtcggccgagcatttagatgcagaacgtttaagtgtcaaaattaaacgtgaagataacttccatgaagaaacgcgtgttcctcaaaagcaccgggcgttgttaagtgactaccgtggttcaggatatgaccgtgggcacatggcaccaaatggcgatatgccaaataaagaatcacagtctgatagtttctcgctcagcaacatggtgccgcaagcgcctaaaaataaccaagaagtctggcgtaaacttgaagaagcaacccgtgccattgtcaccaagcaaaaacaagatgtatatgtcgtgacaggacctgtttttgagggtaaacgtctcaaaacgattgggcagggtgtgattgtaccaaccgcagtttataaagcggtgtatatgccaaaaactggcgctattggggcttactacgcacctaacaataactcgcagcaagtgaaggtagtgagtgtttgttatatagaagaaaagcttggtattaacttatttccacagcttacagaacagcaaaaacgtaacgtttatcgcttaccgttaactgctagccaagttaaacctaaccaaaagctcgactatttgcattgggatggtgaaagccagtgcgaacaagacctaagcgcagaacaaattcaagcgttacaagatcagtttaaaaagcaaaaaactggttcttctgaaccgatggaagcaaaagttccaagtattgatgaagaaactagaaatgccattgtgaaacaattggttgaagccttggtgaactatttcttgcagataatgaaataa

SEQ ID NO: 43052 - DNA, 600 bp, Acinetobacter baumannii
atgtttgcctcgatgtttcttttttattttgcaatgtcgattacacccggtcccgtcaatacagtcattttatcgaccagcttaaatcatggtttaaaaagatcacttccctatatttcaggtgccaccattggctttaccttacttttgatttttatggcttttggccttcaaagtgtattaactcagtttccagttgtcttaaaaatacttgcagtttgtggaacgctctttgtttgctatatcggcataaaaattattctttctgctgccaatatttcaatttcaagtgcacctgtagagcacatgcttattcccaattttaaagatggtttcttattacagtggcttaacccaaaagcatggttggcttgtgtgtcgggtattaccatgtttactagcattgaaaacccgcagtcgttgccgatctttatcgttatttattttttcacttgctacgcatgtttgttcttttgggggttctgtggtgataaattttcagtggtactgaatcagggcaaccgtttgaaatattttaatatcctgatgggcgctttcttaattttgtcggctcttttaattttgattgattttttttaa

SEQ ID NO: 43053 - DNA, 243 bp, Acinetobacter baumannii
atgtttaagccatttgaaaagggtactgagtcttcttcaattgaagatttaacattagaaaatgatgtcgattgcgtgagtatttatggcaatttgcaaatcactaaagacaaagtcgggttagagcaggcaaaggcattgcagagttttttaaatgatgtagttgcagctttggaaaaagaagaattgcctgagaaaattgaacgtccagctgaacaagaaattaataatccgtttttgtaa

SEQ ID NO: 43054 - DNA, 690 bp, Acinetobacter baumannii
atgaataaatattttgctgaattcctaggtacgttttggctagtctttggtggttgtggtagcgcagttttagccgcagctttccctgaacttggtattggctttgcaggtgtagcccttgcctttggtttaaccgtactcacaggtgcttatgctctagggcatatctcaggtggacatttcaatcccgcggtaagtgttggcctttgggtcggtggccgcttcgatgttaaagatttaattccgtatattgttgcgcaagtggttggtgcgactgctgctgcatttgttctttatattattgctcaaggccaagcaggctttagtggtgttggcgggtttgcaaccaatggttttggtgacttatcaccaaataaatttggtttaggttctgctttcattattgaagtggttcttactgctttcttcttaatcattattttaggagcaactgaccgccgtgcgcctgctggcttcgctcctatcgcgattggtttaggcttaacactcattcacttaatcagtattccggttacgaacacatcggtaaacccagcacgtagtacaggtgttgcgttctttgctgaaacggctgctttaagtcagttgtggttgttctgggtagcaccgattttaggggctgtgattggggcaattatttataaagtggttgctggggataaggattaa

SEQ ID NO: 43055 - DNA, 1005 bp, Acinetobacter baumannii
atgccacaactaaaaaattatacaggctcggtatatggaggactggggcatcttttaaaggcttattgcgaagccaatgggttagctattcctgaacaattagaacaaattcaaaatctggaacgctttgactatgtggtttggcgtgacctattagaagtgatttataaactagacccgaagccgggattagggctagaaattgccaaatatgtacaacccaaacatttaggcattattgcctaccttgctctctcttgcgataacttaggtgaagccttaattcgttaccatgactttcaccgtctaatttatgacgggagcccattagtggttgagctacaagggagatatggttctattcgctgggaagcgactgagctacaccctacccagcttaccgatgaaatcgcaattgccttggtgattcaattcttacgtctttttatgtctcatgaagatgtgcagttacatgaagtacgtttcttaaatgctgcccctaaaaatatcagagtttacgagcagtactttcaatgtcccgttcgttttagccagccccgtacagagttacttatacccattaccgaaattcacaagccgcttagtagtgcagaccacaccttacagcagctattagttcagcaggctcaagcacttttagaacagttacccaattcaacccaactcgatcagcgtttacagcattcaattttgactggtctgcaaaagaatcagtatcaaattgaatatattgcagctcaattaggcctatcggttcgacagctccaaagacatttacaacaacaaaacaccacctttcaagagcgcgttcaacaagtgcgttttatgctagcaaccgagtatttaaaagatccgcatttaagcctacaagagattgcacttttgctgtgttattcagaacaaagtgcctttcaaagagcatttaagcattggaccaagcaaaccccacaacagtggagagatcaatttttaaacaaagaataa

SEQ ID NO: 43056 - DNA, 639 bp, Acinetobacter baumannii
atgttaaaagggtttattgccggaattgcagttgcgaatgcatttgaatgggtagcacacaaatatattttgcatggtgtacaccgtgccggacaaccgcgctatagcccagtgccgaaaagtatggagtcgcattgggcgcatcatcgcgaagtccgtaaacaacagtttcatgatgattgttatgttgagggcgttggaaactggcgaaccaaaaatgagttaatttcacttgccgtggtggcaaccgtttcaagtgcaattttctaccccttttcaaaaggtatggcacttgcagcttggtacagtgcaggaaactattattatattcatcgccgtgcacatttagagcctgactgggcaaagcgtaaaattccgtggcattacgaccaccatatgaactctaatcaagatgctaattggtgtgtgaccaaaccttggtttgactatgtgatgggaacacgtgtggtgtcttcggcagatttaaaagaacaaaaccctttggggatacagttacctactgcgcttgctaggccactcgctcatgctgtagaaaaaatctttccagcaaaatgggtcgagaaaaaagcacagcctaaactcgttaatgatgtaaaagcgatagagggtgctgcataa

SEQ ID NO: 43057 - DNA, 759 bp, Acinetobacter baumannii
atgcttgctaaacgtattattccttgcctagacgttgataacggacgcgtagttaaaggcgttcaattcctcgatattcgtgatgcgggcgaccctgttgaagtggcacgtcgctataacgaacaaggtgcagacgaaattactttcttagacattaccgctacacatcatggacgcgataccacttaccgtactgttgaacgtatggccgagactgtatttgtgcctttaactgtcggtggtggtgtacgtaaggttgaagatattcgcgcgttattaaatgcaggtgcagacaaagtgagtattaactcggctgctgtgtttaaccctgaatttgttcaagaagcttctcagcactttggcgcacaatgtattgtggttgcgatcgatgccaaaaaaactggcgacaataaatgggaaatctttactcacggtggccgtaaaccaacgggtattgatgccattgaatgggctgtaaaaatggctgactacggtgcgggtgagttactcattaccagtatggatgccgatggtactaaagcaggttacgatattgcgttaatgcgtgctattaatgaccgcgtgactattccaacgatcgcatcaggcggtgtaggtaacttacaacatcttgcagacggtattttacaaggtggtgccgatgcagtattggcagcaagtattttccactttggccaatatacaattccagaagctaaacaatatttggctgaacaaggtatcgaaatgcgcttgtaa

SEQ ID NO: 43058 - DNA, 951 bp, Acinetobacter baumannii
atgtcggtttataccccgttgagtttagatgaagttcgcacctttgctgcaccttatggattagaggtgttggagctgaacccaattcagggaggtattcaaaacaccaattattttctggttgatgtaaaccgcaaacaatatgtactcaccgtgtttgaagagttagatgcacaaggtgcaggcgaacttattcctgtacttgagcagttaggtactcatgatgtacccgttgccgtgccattaaagcacagcggccaagcggttcactttattgcgggtaagcctgcacaaattgcaccacgtttaatgggacaccatcccatgcaaactacagtagcccaagttgctgcaattgcagatgcacaggcgaagctacatgtagctttacaagattttccgcttgaacgcgaatatcgccgtgatcatcaatattggacaggtgttgcagagcagcttaaaccaaatatgactcaagatgaccaaacgttacttgagcaggtttatcaagcctttaatgcgaaaacagcgcagtattcaaatcgaccgacaggttttattcactcagatttgttccgtgacaatactttgtttgaaggcgagcaactacaaggtattttagatttttacgagttaaatcaagatgagttgctttttgatattgcgattaccattaatgatttttgtaccgaatatccagcagcacatttaaactcagacaaagtaggcgcttatttagaggcataccaaaaagttcgtgcgctgacttcagatgaacttgaatgtttagatgtattcttggcaatggcggcttgccgtttctggtcaatgcgtttgcaagttgctcaaaaaaataaagaagaaggacgtaccggcgatgacatcttgcaaaaagacccgcaagaaatgcgagcaatgatgcaagaccgtttaagccatgtaaaagcataa

SEQ ID NO: 43059 - DNA, 630 bp, Acinetobacter baumannii
atgcgagatcaggggcgtttagtcgaatggttcgacgaaaagggttatggctttattcagccggatgatgctgaaaaagagcgagtctttttgcatatcaaagattttgcacgccccggacctcggccaattattggttgtgcactggaatatctggtaatccttgatgaacgaggccgttttcgtgctcagcaggtcacttatttaaaggcatctcaaacccgtaaggctttaaaacctgcaaaaacacaatcttcttttcaggccagcccatggtcagcaatgcaaatggggattgtgttttatttcgtcttaatgggaattatgagttttattcatattttgccggcttataccttattgtttgtcttaatgatgaatgtgttgagttactggctatattcacaagataaagaagcagcgcaattgggcaatcgccgtgttcctgagcagactttgcacattgtcagtttcttagggggttggccagctgcgtggtgggcacaacaaaaactgagacataaaacacaaaaacaaccatttcgtaagatttatttttgtaccatattctttcatttacttttgattttgtggctaatttctcctttaaacgttttgcggggatcataa

SEQ ID NO: 43060 - DNA, 393 bp, Acinetobacter baumannii
atgaatagttctatcgaccaagatccaaatcgtactttaacacttattttatatgtactttatattgttgccatttttacgggcggcttacttgcgattattgctttaattattaattacgtaaaacgttctgatgtacaagggtcgattttcgcgagccactttacatggcaaatcagaacattctggtggtatctcgcttggaatattattgcctttctgccgtttattttcctgttctttacgggtgaaaataccgatctatttgcgggcgttgcgatctcatcgactgtgttctgtgtgggtgttatcgcggcagcatggatctggattgtatatcgtgccattcgcggtttgattgcgttaaatgataaccgaccgatgtatcaataa

SEQ ID NO: 43061 - DNA, 312 bp, Acinetobacter baumannii
atgattattgaacatgtgcatttgagtataaagtctgggcaaagtgaagcattccttaaggcattcgagcaggctaaacatattgtttatccaatggaaggctttaatgctgtccaactgattaagcatgcaaccgatccccatcattatattttaatgattttctgggatgaaattgaaaatcatacagaagggtttagaaagtcggaggcttatcaagaatggaaaaaattgcttcatccattttatgatccaatgccgacagttgagtactacgaaccctctattttattaaagaaaaatgatatataa

SEQ ID NO: 43062 - DNA, 903 bp, Acinetobacter baumannii
atgtcaccaacttatctgagttcaagcaaagttcctcaattagctctcattttgattacggtcatttggggtggaacatttcttactgtgcagtacgcactgaatttttcatcacctatgttttttgtcggctgccgttttgccgtagctgccttaacgctattacttatttcattaaagagcatgaaaggcgttacattaaaagacttgggcgctggcagtgtaattggccttgtcattgcagctggctatggcacgcagacaatcggcctgcaaactattccgagtagtgaatcagcttttttaacggcgctttatgttccgcttgttcctattttaatgtggctcatatttagaaaaactccacatatcatgacctgggtgggagcagctcttgcttttactggccttgttttattgacgggtaatggttttaagcaaatttccttgagttttggacagcttttaacagtgctcggcgccattgcgattgccttagaaattatttttattagctactttgctggaaaggtaaatttgcgtcgcgtcaccattattcaacttggtgtcgcctctctactttcttttaccattatgcctatagtaggtgaacagacaattccagcattttcatggcccctagtactcattgctgtcgcattaggcttagcaagtgcactcattcaatttgtaatgaactgggctcaacgtgtggttgacccttcgcgtgctgcaattatctatgcaggagaacctgtttgggcaggcattattggtcgaattgcaggtgagcgtttaccagttattgccctttttgggggtgctttagtggtgttaggtgttttagtcagtgagttaaaaattaagctgcctattaagaaaaacaaaagagtccgagaataa

SEQ ID NO: 43063 - DNA, 552 bp, Acinetobacter baumannii
atgagccagtcgagtagcgttttacaacatgtaggcacaaatatccgttcattaagagatgagcgtagtttaagccaacaggacttggctgatcgggcaggtgtaagtagacgtaccattgctgctctggaaacaggccaagtcaatattagcttagctaaactcgatgcgattgcggcagtgttgggagtagattttagaacaattgtgagtgcgcctgagctaaaagaacatgccctagtaaatgcactcgcttggcaaggtgaaaaggaagaaagtaaggcaacttttcttgcttcagttccttcccgttctcaagttgaactttggacatggtctttggctgttggggagtcttatgttgctgaagccgatgccgaaggatggcaagaactgatttatgtgttagaaggcgaattgaccatacaatttacagacagctcagaaaccattgcggctggttcatcttttatttttgccagttcagtgacttatacctatatcaatagcggtagccaagtacttaaatttattcgtaatgtggtgtattga

SEQ ID NO: 43064 - DNA, 732 bp, Acinetobacter baumannii
atgctaatcattccagcaattgacctgaaagatggtaaatgtgtgcgtttaaaacaagggcgtatggaagacgataccgttttctctgacgatccggttgcaactgcccagcattgggtaaatgaaggcgcacgacgtttgcatttggtcgatttgaatggtgctttcgcaggtacgcctattcataaacctgttgttgaagcgattgcaaaagctcagccagaattaccaattcaaattggtggcggtatccgctcattagaaacgattgaacactacctagaagctggcgtgacttttgtcattatcggtactaaagccgttcaagagcctgaatttgtagaagaagcttgtaaacgttttgcaggccacatcattgtcggtattgatgccatgaatggtatggttgcaactgacggttgggcaaacgttaccgacgtgaaagcaactgatttagcaaaacgctttgcagatgcaggtgtgtctagcattgtttatacagacattgcacgtgacggcatgatgcaaggtgtaaacgttgagcaaactgtaaacttagctcaatactcaggtttaccagtcatcgcttctggtggtgtaaccaaccttgatgacgttcgtaacttaaaaggccaaccaggcattttaggtgcaatcacaggccgtgcaatttatgaaggtactttaaaccttcgtgaagctcagcttttgttagatgaaaaccgtctttaa

SEQ ID NO: 43065 - DNA, 642 bp, Acinetobacter baumannii
atgtctgaagcctctgcccttcttgataaaacttctattcagcagctccctccttttgaaaatcttaaccatcaaaatattgtggtgattgaaaatagcgagcaatgcaaaactattgaagaagaattaagggtagcgacctttttaggatttgattctgaatctaaacctacttttcaggtaggtgaagtatcaactggcccacatttgattcagctggctacagaacacaaagcctatttatttcatgtcaattcatcgactttaaaatttttacagcccattttgtctaatccaaaacaaattaaagtcggctttggccttaaaaatgataagcatatttttcacaaaaaaggcataaagcttgaaagctgcattgaccttgctaaaggttttagccattttggctttaaacaacaaatgggtgtacaaaaagccgtagcactattacttggtcagtatcttgccaagtcgaagaaagttggaacttcaaattgggcgcgaaaaccgcttacttcacaacaaatcagttatgcagctgctgacgcctatgctgccctattggtatttctcgagcttaaaaaacgaaaggtattaccaatacatatttctgaaaagattcaaaccgcacttcaagggtaa

SEQ ID NO: 43066 - DNA, 549 bp, Acinetobacter baumannii
atgaattcacctttcgaaaatcagccacttcagcacgattccccctttaaagctagtggtcgttttgggcgactctcttatgctgcttggacattcttatttacgctagtccttgttaccgccattctacttattatgtttacttttggttttacaaaccctgaaggtaccccagacttttctacacttggcttaatctgtatagcaattctttatatagtcggtatttatattaacttcgtatttaccatccgccgtttgcatgaccgcaataatacagggtggctctctttactgatgctagtaccggtcgtgaatattggccttgccatttatttattctgtgcaaaaggaactgaaggtcctaatgattatggacctaagcgtccaacgccaagctgggagcgtgttttaggctggatttatattgtgcttattccacttgcattaatttttggtgttattgccgtaattatggctccaacctatgaaggttatgtcgagaaaagcgaaagtattgtaattggtagcccatctcagtctgaataa

SEQ ID NO: 43067 - DNA, 618 bp, Acinetobacter baumannii
atgacacgtatcgcattgcttgattatggcatgggtaatctgcactcagccgctaaagcacttgagtatgtaggtgcaaccgtcgatgtgacaaatgatccaaaattaattgcacaagccgataaaattgttttccctggtgttggggcaatgcgtgactgtatgcaaggcatgcgtgaagcagggattgatgaagttgtacgcaaagcagcttttaataaacctgttcttgcaatttgcgtaggcatgcaggcactactacaaagctcagaagaaaacggcggtgtagatgccttgggtatttttgacgggatagtaaaacacttccctcaaatggaaggtttaaaagtcccacacatgggctggaaccaagttcaccaaatggacccaagccacccgatgtggaacaacattgaacaagatgcccgcttttactttgtacacagctactatgttgaacctaaagatgaaaatcttgtggctgcaacatgtgagtatggcgtgaacttctgcacagcaattcacaaagataatttattcgcgactcaattccacccagagaaaagtcacactgctggtttgcagttactgaaaaactttgtggaatggaatatttaa

SEQ ID NO: 43068 - DNA, 594 bp, Acinetobacter baumannii
atgacgcaacgtatcagtgaagtggttagaaataccaatgaaaccaaaattcgagttcgtttaaatctcgatggtactggtcaaggcacactaaacaccggagttccatttttagaccatatgattgatcaaatcaagcgacatggcttatttgatatcgatattcattgtgatggagacttagagattgacgatcaccataccgtagaagactgcggtatcacgcttggacaagcttttgcacaagctttaggtgataaaaaaggtttacgtcgttatgggcatttttacgcgccattagacgaagctttatctcgtgtggttgtagatttgtctggtcgtccgggtttatttatggatattccatttactcgcgcgcgcatcggtacctttgacgtagatttattttccgagtttttccaaggtttcgtaaaccatgcgcttatgaccttacacatcgataacttgaaaggtaaaaatagccaccatcaaatcgagagtgtatttaaagcactagctcgtgctttacgtatggcatgtgaaattgatccacgtgctgaaaacacgattgcatcgacaaaaggtagcctctaa

SEQ ID NO: 43069 - DNA, 384 bp, Acinetobacter baumannii
atgcctattaccgtacatgcttatagttctctagataattcagagatccgcgatcagcttgagcgactgtatgacacaagtccggagtttggtgacgggcacgatgcgattgaacaacttgaacaagatttacaacagtataccacgctatacactgccgaatttaacaccaaaattataggtgcaatctggtgttcaggacaaggtgaaagcaaggtgcttgaatatatagttgtacaccctgcaaatcgtggacgcggagtagcagagcgtctagttgaagaagcttgtcgtatagaagaagcaaaaggcgttaaaatttttgagccaggttgtggtgcaattcatcgctgcttagctcatattggaaaattgcacagttaa

SEQ ID NO: 43070 - DNA, 432 bp, Acinetobacter baumannii
atgttcattattcgccaatttacaaatgcagatctggatgatgtggtcagtttatgggaaagctgtggcctaactcgcccttggaataaccctgaaacggatattttcaggaaagtttcgcagcaggacgatttattcctcgttgctattaaggatgagcaactgattggcacgcttatgggcggctacgacggccatagaggctggattaattatctggctgttcacccccaccaacaacgcttaggaatagccacagcgcttgttcaacagcttgagaagcggcttatggcgcgtggctgtcccaaattacaattattagtgcgcaaagataatctgaatgtgttgaatttttacgagcagctcggctatgacgaagtagaagcagtatgtttaggaaaacgtcttattagtgacaaccctcatgactaa

SEQ ID NO: 43071 - DNA, 1515 bp, Acinetobacter baumannii
atgtctttaagtcgtattcgcctagcttctcttcatgacaaggtcatcagtgctgaacaagctgcgcaattcatcgaaaatggaatgaccgttggtatgagtggttttactcgtgccggtgaagctaaagctgttccacaagcacttgtagagcttgcaaaaaagaatccgttaaaaatcacgttaattacgggtgctagcttaggtaatgacttagacaaacaactcacggaagcaggtgttttatctcgtcgcatgccattccaggtggataacactttacgccgcgcaattaacaacggcgaagtcatgtttattgaccaacacttgtcagaaactgttgagcaaatgcgtaaccagcaacttaaacgtccagatgttgcggtcattgaagcaattgcgattactgaagatggtggcattattccaacaacttctgttggtaactctgcaagttttgcgatttttgccgaaaaagtaattgttgaaatcaacacttctttaagcgaaagctttgaaggtttgcacgatatctatattccaacttaccgcccaacacgtacgccaattccattaacaaaagtggatgaacgtattggtacaacagctatccaaatcgatccttcgaaaattgttggtattgtatttaacgatacacatgactctccatcgacagtcactccaccagatgatgagactcaaggcattgccaatcaccttatagcattctttgaaaaagaagtggctgaaggtcgtttaccgaaaaaccttggtccactccaagcagggatcggttcaattgcaaacgctgtactaacaggtttaaaagattctaattttgaagacctcatcatgtactcagaagtactacaagactgtacttttgaattaattgatgcaggcaaaatgaaatttgcttctggtagttcaattacgctttcagcaaaatgtggtgaaaaagtttttggcaatatcgaagcttacaaagacaaattagtgcttcgtccacaagaaatttctaatcaccctgagcttgtacgtcgtctaggtattatcggtattaatactgcacttgagtttgatatttacggtaacgtgaactcaactcacgtgtgtggtactaaaatgatgaacggtattggtggttcaggtgacttcgctcgtaatgcgcacttggcaatctttgtaaccaaatctattgctaaaggcggagatatttcttctatcgtgccaatggtgagtcacgttgatcatagtgaacacgacgttgatattttagtgacagagcaaggtttagcagacttacgtggtttagcacctcgtgaacgcgctcgcgctattatcgacaactgcgtacacccgctttaccgtgatgcattaaatgactactttgatcgtgcatgtgctaaaggcggacatacacctcacttacttcgtgaagcattgtcttggcatgcaaacttcgaagaaacaggccaaatgcttcaaccaacaccagttgcaaaatcagcttaa

SEQ ID NO: 43072 - DNA, 1458 bp, Acinetobacter baumannii
gtgagtttagagccaataccaccgcaaacctttaccgactacgttgcgtactcagagcgtaaacggacccgatgggaacgttttctcgataagattaagccacgttctgcggccatgcgtaccacaattttggtactgctcgtggtactctttagcttatttatgtcattgtggtttttttggcgaaccctctatttacctgaaattcagcaacatgcacgctatctagcagttgaactagaactggtaaataaccctaatattcgtatttttcatcgtgatagcgaagttgacgtcgacacatggttacgcaatcgggttggcattgaatatgtcacgacccccaaagaatatccaagtgtccgcgataaaattattgccgagttttttaccaaccaagttgagcaaaaactggcaaatgaaattggcgcaaaagacgttactgtctatttccaatttaaacctagcccacgtatctggattcaaacaccagaaatgcatggtaactgggttcgtgaacctttaaaaacctatgccaactatagccccgagctactggtaggctgggttgtgggtgtcccattagtttcggccatcattattttaattttggttcgacaaatgaaccgaccattacgtcgtttgcaaaatgctgccaacgaatacagtaagtctggaactgcaccttatttagatactaaccatggccctttagaaattcgccaagtaaaccaagcgtttaaccgtatggtatatacgcttgaacaaacggagcgtgaaagacgaatcatgctagcgggaatttcacatgatttaaggactcctctcacacgtattcgtttaactgcagagatgctacctgatgagtttctacgtgaaggtctggtttatgacgtagatgatatggatgcgattctaaatcagttcatctcatatatgcgcgatggttcagatgaggaattaaaagacactaatatcaatattcttttacaagaattggtggttcagtttaaaccccttgatattcgctttaacatgcaggatgttcctatcattcctgcacgcagtctctctttaaaacgacttattgccaacctcattaataacgccaagcgttatggtgctgaaccgatcgaactcagtgcaaaggttgaaaatgaacatattttaattacggttgctgaccatggtgaaggcattccagaagatcaaattgaagaattaatgcaaccttttgtaagaggcaactcggctagaacgattcagggaagcggtttgggtcttgccattgttaaacgtattgtcgatattcaccaaggtgaaatacagattcacaatcgtgaacaaggcggtttagaggttattatttctttaccaattccaaaacccgcccctgaagaaaatacaacgcacaatcctttagaaaaaatcaaacaaactttaagtgagcgcttttaa

SEQ ID NO: 43073 - DNA, 765 bp, Acinetobacter baumannii
atgagtttagttgtacctgctgaacatcctgaaaccgtacataacgaaacggatcgtgtcgagcgcattttagtggtcgatgacgatgtgcgtttacgtaccctcttgcaacgttttttggaagataaaggctttgttgtaaaaactgcccatgatgcctcacaaatggatcgtttattacaacgtgagttattttcacttatcgtgctcgactttatgttgcccgttgaagatggtttaagtatttgtcgtcgtttacgtcagtcaaatattgatactccaattatcatgttaactgcacgtggtagtgactctgaccgtattgctggtcttgaagccggcgcagatgactatttaccaaaaccatttaacccaaatgaacttttagcacgtattcgcgcagtattgcgtcgtcaggtacgtgaagttccgggtgcgccaagccaacaagttgaagtggttagcttcggtccatggtctctagatttatctacacgtacactgactcgtgagggtcaaatcgttacattgactacaggtgaatttgccgtattaaaagctttggtacagcatccacgtgaacctttaacacgcgacaagctcatgaacttggctcgtggccgtgaatggggtgcaatggaacgttctattgatgttcaagtgtctcgtctacgccgcttaattgaagataacccggcacgcgcacgttacattcaaactgtatggggcgtaggctatgtgtttgttccggatggtgctgaataa

SEQ ID NO: 43074 - DNA, 2349 bp, Acinetobacter baumannii
atgactgacttagttcagcagttggcaagtgagcttgccgtacgtccaaaccaagtagaagctgccatccgcttaattgatgaaggtgccagtgttccattcattgcccgttaccgtaaagaagtaacacaaggtttagatgatacgcagttacgccaattagatactcgtttagcgtatttacgtgatttatatgagcgccgtgaaaaggtcattcagtcattgcaagaacagaataaattgaatgatgacttgttggcgcgggtgaatgcagccgaaacaaaaaatgctttagaagaaatttatgcgccgtaccgtcctaaacgtacgagcaaatctttcaaggcgaaagaagcaggccttggaccaattgccgaaaaaattatttcagaacaaattgatccgacagaagcattggctggttttagtcatgaagactatccggacgttgaaagtcaattagacgcaatccagcatattctgattgatgactgggcacaaaacattcctcttactacagaattaaaagcgacttttgcaaaaacagcagtattaaaaagtactgttgcatctgaagagaagaaagaagtgggcaaaaagttccgcgattactttgaattctcggaaggcctaaacaaattaccatcacatcgtttattggcgatgttacgtggccgccaagaaaacgtactcggtttaaaagttgatggcgaagatgatgcaccattggctcgtattgaaactgaatacaaccttgaacaggttcagccacaaacacgtcaagatttcttaaaacaaactgcaaaattattctggttaggtaaagttcgtcctcaaatcgagcattcattacttacagaaaaacgtcttgctgctgaagcagaagcaatgcaggtgtttgctgaaaatcttcgtcacttattgttatcagcgccagctggtagccgtacgactttgggtgttgaccctggtattcgtactggtgtgaaactagccgtagtaagcgaagctggtgatgtacttgcacatagcacgatttatccatttgcgcctaaagaagataaagaaggttcaattgctgagcttgcacgtctatgtcgtgaatacaatgtcgagcttattgctattggcaatggtactgcgagccgtgaaacagaagctgtagtagctgaaatgatggctgcaaatacagatcttaaattaactcgcgtaaccgtaagcgaagcaggtgcctctgtttactctgcaagtgaacttgcagcggcggaacttccagagcttgatgtttcaatccgtggggcagtttctattgcgcgccgtttacaagacccgcttgctgagcttgttaaaattgatccgaagtcgattggcgtaggtcaatatcaacatgatgtgaaccaaactggtttagcaaaaacacttgatgcagttgtagaagactgtgtgaatgctgtcggggtagatgtaaatactgcttcaccagcaatcttggcttatattgcaggtttgaataaagcaattgcacagcaaattgttgaataccgtaaagagcatggccgttttgacacacgtcaggcacttaaaaatgtaccgcgtcttggcgaacgtacttttgaacaggctgctggtttcttacgtatccaaaatggttcagagccattagatgcatctgctgttcaccctgaaagttatggtcttgttgagaaaattgttgcagcaaaagcgacaacggtaaaagacattattggtaataccgaaattattcgtcaggttaaagcagaagagtttgttgatgacaaattcggtttgccaactattcaagacgttttagcagaacttgaaaaaccgggccgtgaccctcgtccagaattccgcacagctaaattccgtgaagacattactgaagttgctcagttgactgaaggtatgcagcttgaaggtgttgtgacgaacgtgacgaattttggtgcttttgttgatattggtgtgcatcaagatggtttggttcatatctctgaattagccaatgagttcgtttctgacccgcataaagtggtaaaaccaggtcagatcgtacaagtgcgtgttatgcaggttgatgttgaacgtaaccgtgtgaacttgagtatgcgtgcagaaggtgcggcacctgtgaaagcacagcgtccaccgcgtcgtgagcaaaataacgaacagcggtctgagcgtaaaccacaaggtaaacgtccacaaccgcgtaaagatcaagttgaacgtccgcagcgtagtaagcaagaaaaaccacaagagcaaaaaattggtggttttggtgcattattattgcaagcaggaattaagggttctaaataa

SEQ ID NO: 43075 - DNA, 2190 bp, Acinetobacter baumannii
atgccggctttagaactgaaaaatagatttcacgtaaacgacctcctttcgggagtggtcgtatttctcgtggccttacccttatgtttgggtattgccttagcctcaggtgctccaattatttctggcattattgctggaatagtgggtggaattattgttggcctgctgagtggctctcacatcagcgtttctggcccagcagcagggttgactgcggtcatccttgtacaactcgatcaattaggcggcaattatgccgcctttttattgtgtattgtatttgcaggaattttacaaattctgtttggtgtatttaagttgggtttctttgccaactttattccaaacaatgtcattttaggattgttggcagccattggtgccattctgattgtgacacagttaccttatttatttgggttgactgatttttcatggaaagaagtttggactgctacaccagatacgtttatccaaaaatttgatgctggggcagcgttgattggactgctgagcttatttttaattttagcttgggacagtagcccacttaaaaagttagcgttgccttctgccttaattgccgtggtactcgcagcagtttttaactttgttttaataagtatcggttcttcatgggctgtgcaaagtaataatttgattcaactaccaaatatattacaagcaccagaagaggtattggtttttcctgactttagctatttggctgaaccattaatttataccggagccattacacttgcgatcgtggcatctttagaaacattactaaatttagaagcggccgataagcttgatcctcaaaagcgttcatctccacctaatcgtgagttatgggcgcaaggagcaggtaatattgtgtcgggtttaattggcggaatgccagtgacctcagtgattgtccgtagttctgtaaatgccaatacaggtgcacgtagtaaatgctcaaccattattcacggtgtgttgttactgcttgccattctattttttgtcccactcatgaacatgattcctttgtctgcacttgcagcaattttgatcgtgactggttttaaactgactcatccaaagttattcaagcagctttaccaaaaaggttggagacagtttttaccattcattattaccttggttgcaatcttgctgacagatttattaaccggaatcttggtggggctatttaccagtagtgcatttattttatatggcaacttcaataaaggtgttcgtgtttataaagaaaagcatttacatggaatcgtgacgcgtattgagcttccttcacaagtgacttttctgaatcgttccgcactcatttctgccttggaacatgttcataaagatcaacagttgattattgatgccactcaatgtgattcgattgatccggatatttatcaagtcattcaagactatcaaaatgagacggcagttaaacgccaagtcgaccttaagcttattggatttaagcagcactatgaagaggtagatgatgcagtactggatatctacattagtacgagagatctacaacgtaaattaagtccacagcaagtcattactttacttaaagaaggaaatgaacgtttcgttaaaaatgagcgcttgcaacgtgatatttatcgccaaattcgtgttactgcagatgaaggccagcacccaattgctgctgttttgggatgtatggactcacgtgctccaactgaaatgatttttgacgtgggtattggtgatctatttagtttaaggattgcaggtaatattgcaggtcaaaaggtattaggctcgcttgagtttgcttgtcaggccaaaggctcaaaagtcattttagttttaggccatactgactgtggtgcagtgacgagtgcatgtcagttacgcttacagcaaaagcaaatctccgatgtcaaagagatgccgcatattcaatatgtgcttggtccgctcatgcattcggtagaaagcgtatatgacattatgcaaccccgtgaattaaacaagaccttcgtaaatcaggtaactgctatgaatgttcactacaatatccaatatattattaataacagtacggtacttaaagacttactggatcgtggtgaaatagcgattgttggcgcgatttacgatgtcaaaacagggcatgtcgaatttttagatgcgtaa

SEQ ID NO: 43076 - DNA, 891 bp, Acinetobacter baumannii
gtgaataaaaaattagaagctctgttccaggaaaaggtacaaggtaaagtcatcttagtgacaggcgcctcaagtggaatcggtttaacgatttccaataaacttgctgatgctggtgcgcatgttttactggttgcccgtactcaagaaacattagaagaagtcaaagcagatattgaaagccgtggcggtcaggcatcaattttcccatgtgatctgaatgacatggaaatgattgatcaggtttctaaagagattttagcttctgttgaccatattgatattttaattaataacgcaggtcgctctattcgtcgtgccgttcatgagtcttatgatcgtttccacgactttgaacgtactatgcaattaaactactttggcgctgtacgtttagtgctcaatattttgcctcacatgattcaacgcaaagatgggcaaattatcaatattagttcgattggtgtattagcaaatgcaacccgcttctcggcttatgttgcttctaaagctgcgcttgatgcatttagccgttgtctatcagcagaagttcatgcacataaaattgcaatcacttcaatttatatgcctttagtgcgtacaccaatgattgcgccgaccaagatttataaatatgtaccgactctctcacctgagcaagcagccgatttaattgcttatgcgattgtgaaacgtccaaaacgtattgcaactaacttaggccgtttggcttctatgacctattcagtggcccctggcattaacaatatgtttatgtcgattggtttccgtctgtttccaagttcagacgccgcaaaaggcaaaaaagctgaaaaacttaactgggtgcaaaaagcatatgcacgcattttccctggtgagcattggtaa

SEQ ID NO: 43077 - DNA, 1278 bp, Acinetobacter baumannii
atgacttataaagatgaaaccttagccattcacgcaggctacactccagaagcaaccactaaagctgttgcagtccctatctatcaaacaacttcgtatgcatttgataacacacaacacggtgccgaccttttcgatttaaaagttcaaggcaatatctatacccgtattatgaatccaaccacagccgtacttgagcagcgccttgctgcgttagaaggcggtattggtgcattagctttggcttctggaatggcagcaattacttacgcaattcagaccattactgaagctggggataatattgcctcagtctcaactttatatggtggaacgtacaacttatttgctcataccttgccaaaacaaggcattgaagttcgcttttttgattatcaaaagcctgaaagtttacgtaatttaattgatgataaaactaaacttgtttttgttgagtcaatcggcaatccgcttggaaatatcatcgatctagaagaaatttcgaaaatcgcccatgaatatggcgtacctgtcgttgttgataatacagtcgctacccctgctttattaaaaccattccaatatggcgccgatatcgtcatacattctttgactaaatatattggtggtcatggcaatagtattggtggtgcgattatcgatagcggtaagtttccttggggtaaatatccggagcgttttaaagtattgaacacgccagacccaagctatcatggtgtgaactatgtagaggcattaggtgaagctgcctatatagcaagggctcgcgttgtaccattacgtaatacgggcgcagctattagtccgctcagtgttttcttaattttacagggacttgaaacgcttaatttacggatggaacgtcatactgaaaatgcacaaagaattgcggaatatttgcaaaatcatccgaaagtaaaatgggtcaattacgcaggcttaaaagatcatccgcaacatcaacttgcgcaaaaatatgtaaaaggtaaaccttctgcaattttatcttttggggttcaagatggccgtgaaggcggtactcgcttcattgatgccctccagctatttacccgccttgtgaacattggtgatgcgaaaagtctggcgtgtcaccctgcaaccacaactcaccgccaactcaacgaacaagaactaaaagctgctggtgtaagtgaagatatggtacgtctttcaattggtatcgagcatgttgatgacctcattgccgatttagaacaagcactttcatccgtataa

SEQ ID NO: 43078 - DNA, 1662 bp, Acinetobacter baumannii
gtggcccaatatatttatacgatgaaccgagtgtctaagatggttccgccaaagcgcgaaatcttaaaagacatctctttatcatttttcccgggtgccaaaattggtgttctcggtttgaacggtgcgggtaagtctaccttgcttcgtattatggctggcgtagataaagatttctctggtgaagctcgtgcacaacctggaattaaaatcggctatttagagcaagaaccgccacttgatccgactaaagacgttcgtggtaacgttgaagatggtgtgcgtgaagctttagatgctttagagcgtcttgatcaggtatttgcagaatatgcagacccagatgctgattttgatgcgcttgcgaaagagcaggaaaaattagaatcaattattcatgcttgggatgcacataacctaaacaaccagcttgaaatcgcggcagatgccttgaaccttccagcttgggatgcagatgtaactaagctttctggtggtgaacgccgtcgtgtagcactttgccgtttattgctctctaaaccagatatgttgcttcttgacgaaccaacgaaccatttggatgcagagtctgtatcttggttagagcgattcttaaaagatttccctggcacaatcgtggcgattacgcacgaccgttatttcttagataacgttgccgagtggatcttggagcttgaccgtggacacggtattccttaccaaggtaactatacttcttggttggagcaaaaaaatgctcgtttagaacaagagcagaaacaagaagaatcttttgctaaagcattgaaaaaagaacttgaatgggttcgtcaaaatgcgaaaggtcagcaaaagaaaaacaaagcgcgtatggagcgttttgaagagcttaactcacgcgaattccaacagcgtaatgagacctctgaaatctatattccacctggtccacgtttaggtaacaaggttgttgaagtagaaaatatcagcaagtcatttggtgatcgtttactttacgaaaacttgtcatttaccgtaccaccagcagcgattgtaggtattgttggtcctaacggtgccggtaaaacgactttattccgtatgatgacaggtgagcaaaaacctgacaccggtactgtaacacttggtgattcggttaaagttgcttatgttggtcagattcgtgacactttagatgataacaaaacggtttgggaagaagtttctggcggtttagacatcttgaaagtgggcgattatgaaattgcatcacgtgcttatattggtcgttttaactttaaaggccaagatcagcaaaaacgcgtaggtgaattgtcaggtggtgagcgtaaccgtttacaacttgcgaaaattttacagcaaggtgcaaacgttatcttactggatgaaccatcaaacgacttggacgtagaaactttacgtgcacttgaagatgcaattttggtattcccaggtacagtcatggttgtatcgcatgaccgttggttccttgaccgtattgcgactcatatcttgtcatttgaagatgaacaaccagagttctatacaggtaactataccgagtttgaagcttatcgccgtgctaagctaggtgatgacgctcagcctcatcgcaagaaatacaaaaaaattagcggttaa

SEQ ID NO: 43079 - DNA, 381 bp, Acinetobacter baumannii
atgaatatgaaaacaatcaagcatgggcttaatcacttgtttgcctttgaaaacttaccagccgatatgcattcacaagctgaggatgaaattgaacaaggcttacgctttgaagagttagccatacaagatcatgaacgtatgcagaattggttagatattaccccaaatgaccgcaatgcgatgtggtgctacctccgtgcagctttaagaggtaatgctgacgcttcctttaaacttggtattggctatttaaatggtcaatttggtttagataaaaactacactgaagctgaaaagtggttaaacaaagcagcaagtcagggacatcctgatgctgaacgttgcttacaagaagcttttagtaaacttgccttctaa

SEQ ID NO: 43080 - DNA, 693 bp, Acinetobacter baumannii
atgtataaaacattgagcactagcctactagtaacttgtcttggcttaagtggatgtgcaacttctattttatcgactgcccttccgaatgagacgactgaggtccaaacaactattttaaagacagatcaaattattgcactggggcaagccattaaaaaccagcaagaacaaggcgtcgtatttataggacaagactttaattatttaatgacggaaggaagttcggaatttttaaatatcattaaaaatattcctgtaaatcaaagaactttaattattccatctcctctgctacttgaaatggatgaccctacgcattttcatggtgaactcaagtttcaatacaatattcccgcttcaaaactttctgatcaacagaaagaaaatttaaaaaatttagggtttaaaaatcattttatggttatggagaaccaaacacagcttttatatccctacgctattattcgttttaaaggccaaatttatcaaaccagtcctactttaaaagttcaacaaacgattccaactccatatccaatcgccttacaacaaaaagatgaaataaccaagaaacatccgtttaaacgtgtaacgcgtatggcgctttatcctttagcgatggcatttgatatagtgacggtagctccttctctcatcttgtcagatttacgaggtgactttactaaataa

SEQ ID NO: 43081 - DNA, 378 bp, Acinetobacter baumannii
atgtccgtcttattctgtttgcttatattccagagtttatggaatatagcagcggttttttgcgcgcatgaaaatcaagaaaaagcactacatcattttggtcatcatgcagctttaaatgtatatcaaacgtcttctcatacccatgttgaacatactgagactttagatgctgctcataaagcacctttaaacttacaagaccatcatgatcatttaccgacatgttttcatgtcgtcatgacagaagttgcaaaacaagctcaaacccctgttttgcatgtgaatgaactttcacaaatttatcattggtccaattcttaccagtctccacatcttagtgccttaaaaccgcctcctgttttaaccccgctatag

SEQ ID NO: 43082 - DNA, 1311 bp, Acinetobacter baumannii
atgttattggcgggacaaatggcaaatgctgcttctgatattcaacagggctcttatacccaaaaagcagcttttagttttgaacaggcattagcgcgagcacaaagctatcaaactcaacaaggtatctggcaggcacagcagcaaatggctgaggcgcaattaaaacaaagtcgcttatgggcaaatccaagtctttctattgagcaaacaggtttgcagagtgaccaagaaaaagaactcgcgatcggcatctctcagcctttagatatttttgggcagcgtaaggccgcacagcatttagctaaagtagaaatgtcaaaggttgacttggccgaacaacgttataaggctgagcttgagttaatagttaaatatttctggtcacaagtggccttgcttgaacttgaaaagtctctcattggagaacagttagcagttagccaagagaacttgtctgcatcggaaaagcgttatcaggcagggagtattgctcaggttgatgtagatcgagtacgtatgtctcacttggaaaaccagcgtttatatcagcaggtcgatttgaaactacaagttgctaaacagcaactggccaacttatggggtggtgattcaaatcagttccaactatctcaaagttctaatcagctgtgggtattggcagcggatgtagagtctggtcaagatcgacaaaacaatttgctagagcgctcttttcaactagatgctcttgcgcagcaagccactattcaacagctgaaggcaaaagcaagaccacaacctacggtaactttgggggtgaataacactcgttccccagagcagcgtacggaaaatcaaatccgcttaggggtggaaattcctttaaatctttttaatcgtcaacaatacggaatcaagattgctcaggccaaacaagagctgtctcaacgacaacagagcttttatcgacagcagaatcaagtggatattgaaactctgatgtcagagttaaaaggcttacatattcagttcaagcaattaaatgatcagcaagttcctcttgccgttcaggttcaacaaaaaacattgcaaggtttccgtttgggtaagtttgccgttaccgatgtgcagcaagccacaatgcagttgcaagatgtgcgcttacgtaaagtcgagctattaaaacaggcttggcaaaattcaattgaaattcaaagtttacgtcttgggctagagccagaacagatcatggcgaaagatgccttaatgcaacttaatcaacgtgcttggcaacaagctcaaacattcccaactcaggcaggagaataa

SEQ ID NO: 43083 - DNA, 1218 bp, Acinetobacter baumannii
atgtcggcaaatttaaagaaaaattctcaatggctttgggttggagtaattgctgccattactgcaatattaattggtttactcgttttaaattcaaaaaataaatctaattcttcggaaccatcggaaggccacgggcatgctgaagaagagggtgaagaacaccatgatgagggagaaaaaccactactactcactgctcagcaaatgcaggaacaaaatttaaaaattgaacaagctgaactaggtgaagttcctcaacttcagacttatccagccaaactagtagtcaatactgaccgccaagcccatgtttcgccaagttttagtggtcgtgtcgaagcggtatatgttgaactaggacaacaagttaaaaaaggccaggcacttgcaagcttattagtgccagatttagtcgatcagcaagccaatttgcaaatagcccagtctaatcttgagttagcacgtcaggactatgagcgtgaacgtagcttatggtctcaaggaatttccgcgaaacaagattatcaacgagcttataacgcttatcagcaagcacaaattcaggttaaagcagctcgctcgcgcttaagtgcattcggggcaggttctggttcagcggggcgttataccttaacagcgccaattgcgggtatcgtgagtaataaagatattgtagtgggtgaaaacgtacagttagcagatcagctttttattattaatcagcttgatcagttatggctggaattcattttaccaagcaatgcaaatatcaatgtacagccaaatcaacagattgaatttaaatctttacaaactgggaatacattttctgctcaggttcaaagtttaacaacagaggcagatgctcagactggacgcttacaagtgcgtgccaaggttttggcaaatagcagtgagctgcgtccaaacttgatggttaacgttgagctaaatgcaggatcaacacaaaaagtgactcgtgtaaaagcgcaagcagttcaacaagttgaaggtaaagacgttatctttacaccaaaaatagtcaaaacaggttttgagtttgaacctgtgactgtacagctaggccaacgttctaaagatggtcaatgggttgaagttgtaaaaggaattaatccaagccaacgctatattgcagaaggcagcttcttactgaagtccgaattggaaaaaggagaggctgagcatggacattaa

SEQ ID NO: 43084 - DNA, 3159 bp, Acinetobacter baumannii
atggacattaataagcctgagctgcccaagccagaaggactgtttgacagagttattcagtttgctattcaaaatgctatttgggtcatgctatttgttctggcgtggattggtgttggcatttggagttatcaaaaactccctattgatgccgttccagatattaccaatacccaagtccagattaatactcaagccaatgggtataccgctttagaagttgaacagcggattacctatcctattgaaaatgcgatggcaggaattccaaatctggaacaaactcgctccatttctcgttatgggctttcccaagtcaccatcatttttaaagatgggacagatatttattgggcaagacaactgattaaccagcgtttacaagaagcggatggccaactacccgaatcagttgatccagtcatgtctcctgtttctacaggtttaggtgaaatttaccaatgggtgataaaagcaaaatcaggtgctaagaaagcagatggcacggcctatacagccatggatttacgtgaaattcaggactggattgtgcgtcctcaattgcagcgtgtgaaaggtgtggccgaaattaacagtattggtggctataataaaacctatattgtgtcacctgatttaaaacgtttgcagcagcttcagatttcaatcaatgaatttcaaactgctctgcaagaaaataatgaaaatcgcggtgcaggttttatcgaagaaaacggagagcaactcaccgttcgtgtgccgggcatgttaagtagtgttgaagatattcaaaacattactgtaagtaccaaaaatggtttgccgatccgcgtggctgatgttgcgaatgtctctattggacacgatttaagaacaggggctgcaacttacaacggtgaggaaacggttcttggcattgccatgatgatgatgggagaaaacagccgtacagttgctcaggcggttgatgccaaaattaaggaaatacaatctaccttgcctaaaggagtggaaattgagacggtttatgaccggacgagcttagtaaataaagcaattgcgacggtgcagaagaaccttgtagaaggcgcgattctggttattgtgattttgtttatttttctaggaaatttccgcgcagctttaattacggcttgtgttattccattatcgatgttgtttactctgacgggaatggctgagcaaaacattagtgccaacctcatgagcttaggagcgcttgatttcgggattattgtggatggcgcggtagttattgtagagaactgtattcgacgtctggcagaagcacagcatgctttacaccggcctcttacacgagctgagcgatttaaagaagttttccttgcagcaaagcaggcccgtcgaccacttatttttgggcaaatgattattttggtggtctatttacctatttttgccctatctggtgttgaagccaaaatgttccatccaatggcgatgacagtggtgatggcattattgggtgccatgattctttctgtgacatttgtacctgcggcagttgctctttttgttacaggtgaagtgaaagaaaaagaaacacgttggatgcagcttttaaagcagaaatacggagatgtcctcgatcaggcttatcagcttaagatagcagttgttggttttgcattaagtattttagtgctcacaggtgtgttagcgacccaaatgggtagtgaatttgctccgcagctcagtgaaggtgattttgcattgcagcaaatgcgttcaccgagtactggtctcgagcaatcactgcgaatgcaggaaaatactgaaaagctcattttgaaaaactttccagaggtgaaagctgtttttgctcgaacagggacagctgaggttgcaactgatgtgatgccgcctaatatctctgatgcggtcattttgcttaaaccgcatgatcaatggccaaacccgaaagagacgctagctgagctacgttcacgtatggaagctttcttggcaaccttaccgggtaataacagtgagttctctcaaccgattgagctacgctttaatgagctaatttcagggattcgtagtgatattggcgtcaagatttttggcgacgatatgcaagtactcaatgagcaggcacaggcactcgctcagaaagtgcaaaaaatttcaggcgctaccgcggttaaggtagaacaaactagcggtttaccggtgctgagtgtcgaaattaatcgtcctctggccgcgcaatacggattatctgccaaagctattcaagatattgttgctgcaagtgttggtggacaaaatgttggacagattttaaaaggcgatagacgatttgattttgaaattcgcctagaagaccagcagcgtaccatccaaaacttagctcaacttccgattcagttgccaaatggtggacttatccaacttcaagatgtagctaaagttgaacgtacctcaggcctaaatcaggtgggacgtgaaaatgggaagcgccgtgtcattattactgcgaacgtagaaggccgtgacttagggtcatttgttcaagagttaagaacaacactcgcaaaagaacaactgccagcgggttattggttggaatatggcggtcagtttgaaaatttagcttcagctgctgcacgaatgaaaatagttgttccattggcgcttgctatgattttcattctactcatggctgtattccataatgtgaaagaaagcttactggtgtttagcggtgtgccgtttgctttgtcgggtggtctaattgccctttggctaagagatatcccgctgtccatgtcggctgatgttgggtttattgccttatctggtgtcgctgttttgaatggtttggtgatgctgagctttattaaagagcttagagaaaaatttgatattcaaacagccacgtggaatggggcgatcttacgtttaaggccggtactcatgacggcttgtgttgcttcacttggttttattccaatggctttggcaacaggaactggtgcagaagttcagcggcctttggcaacagtggttattggtggcattatttcatctacgatattaactttggttttattaccggtcatttatcgatggatgaatgaagacaagatgaaaagtgttgagcattcataa

SEQ ID NO: 43085 - DNA, 957 bp, Acinetobacter baumannii
atgggtggacatcatggtcatgatcatagtcatgctgtagtgactgaaggtaatgctaaaaaattaacgatagccttggcgcttaccacgacattcttaattgttgaggtgattgcaggtttaatcacacaaagtttggcattgctctctgacgctgcacatatgtttacagatgcagctgctttagcaattgctttggttgccatacagatttctaaacgtcctgccgataataaacgtactttcggttatcagcgctttgaaattctggccgctttatttaatgcgcttatgctttttgtggtggcaatttatattttatatgaagcctatatccgcttttcgcagccacctgaaattcaaagtgtaggtatgctcattgtggcgaccattggtttggtaataaacctcatctcaatgaaaattcttatgtcgagtgccaataacagcttaaatgtgaaaggtgcttatctagaagtattgagtgatgcactaggctcagttggcgttattattggtgcaattattatttacttcactaactggtactggattgacacgcttattgcggtattgattggattttgggtattgccaagaacatgggttttacttaaacaaagtattaatattttgctcgaaggtgtacccgaagaagtcgatattgaaaagctacgtgcagatttactttcattaaatggtgtggagagtattcaccaactcaaagtatgggcaattacctctaaaaatatccatttaaccgtgcacttatttgcgcctgaagctgaccgtaataagctctatcaagatgcagttgaaatgctttctcatgagcatggtattggtgaagtgacattgcaaattgaagatgatgctgagatcaactgtcagcatattgctcaacatgcttcacacgagcataacgataatgacaagacacattcacatcagcattaa

SEQ ID NO: 43086 - DNA, 339 bp, Acinetobacter baumannii
atgcaatatcgttgccctcaatgtcaaagtgttaaaattatgccggtgagccaaggtgttaatagtgctaaacctgttgtgcctaaaagcttagtgattttagttcctgccatttttgtacttttactcttggttgtgattagtatttttatgtggatttttggcaatggtgcaggcagctctcttcaaattgcaacagtagttgcatttgtgattactgtaggcgcagcttttatgttctggcgcgatttgcctgattttaaattgtctatgcaagcatttatgcagtcacaaaaacattggaaatgtcgtgactgcaatcatgagtgggaaatttaa

SEQ ID NO: 43087 - DNA, 948 bp, Acinetobacter baumannii
ttgggtcaagaagatgacaataagtcgaagcctacaacgacatcaacagtttcagggaatcctgaccctataaaactgtcattctcacgccgtttgctgcataaaacattacagcatgcgcaagacgccgtcgggtttgctagtgatactacacgtaatcttgctgaagttgctgatgcagccttagatgctttggatcaggtgacatctcatacaaagcgtggagtggtgggcatgaccaacctggcagcagggactgtcagagatatggtgtctgaaacaagtgaaactgcaagacaggttgccttaatcatggcgcgtacttttctaggtaaaagtaccttgaatttgtatttgccagaaatgctattaaacagtcaaattcgtaaacgcatagatcgttcggaaattgatgatattaaagttcaatgtggcaatgatcggtttcaggttgaaatcgatgggcactatcaccgtttcctatatcgcctaagtttagattttcgagtattggaatgccgcattggacaagaaaagttcttgcgcttacgccaaatggatgaaagtctggatgtgcaaatacgtcatggtggaacattatcgaattgggctgttcgccgtattggtcgagtaggttttgaagtgattaatatgttgcctattccatcgctgattaatcatttgattcgtgatattccgggtattcagcgtgatggtcatcgaatgtggttcattgaccttgagcaagcaggttttattgatttcattaataaccgttcatggatggtagaaaaacttttaaatttaaccgactttagtattctaccgggactcaatattttaagagaaagtcgtgagcttgtgcagcaactagtagatcagttcgaaataaaaggactacgtgttcaaccaggccgtctagaggttcaagttggaatcgcaaattaa

SEQ ID NO: 43088 - DNA, 1584 bp, Acinetobacter baumannii
atgactcagcaggcatgtgtaatatcacaactcactttggagtttccttcaaaagtgatgtttaaagaattgaatttctcacttgagcatcatcaagtatcagccttaattggccgcaatggtcaaggtaagtctttacttatgcaattgcttcacaagatttcacccactacagaaatgcatatcagtggccaaataaactggcaaaccaagcatgcatatttatctcagctcactcgtctccaatcagacacaattgcagaagctttagaggtcaaccatctttacaacgcttttcaaagagtggaacaaggcgaagctggatacgatgattatgatttgttagaaggacattgggatcttcctaatatttgggaagctttactacgatctgctcagctaccaaccgatttagactttcctgttaagcagctaagcgaaggccaaaaaaccaagttagccttatccgcattatttttaaaaactgatcattacctattacttgatgagccaagcaaccatctcgatcaagaagctagacagtggttaattgctcagttaaagaaacatccagtaggcgctctgattattagtcatgatctgactttgctaaatgaagtcgaccatatttatcacttaaatgagcatggcctacagcatactacaggaaattatgaaaaattttatgagcaatatcagtcccaaatcgaggctttagaacagtcagtacatcagcatcaacgtgaagttaagcacatgaagcaaaagcagcatgaagttttaatgaaagcccaaaaacgtgagcgtgctggcaacaaacttcgtgactcaaactcgcaagctaaaattttgctcgattttaaaaaagaacaggctgggcaaagcctaggagtaattcattctcaacatcagcgtcaaatcgatcaaagccagcaagacttgaagagtaaaaaagtacttctagaaactgttaagccccaacaatttatattcccctcttttaacaaaagaacaggagaaattcttagaattgagaacttaaaactcaactatgggacacaacaaccaattcatctcgccttaagagcttgtcaaaagattcatttggttggccgaaatggtattgggaaatcaactttgctgaaacagattgatcaatcagctgtaactgctacagatgaaattaaactgtttgtaaattgcttttatctcgatcagaactttagctttttattagaccatctctctgctgttgaaaacttaagaaatattaacccaaatattactgagttagagtggagaaatttattaggtcagcttcggattcgtggtgataaaagcacatatcccttagctcaactcagtggtggtgagaagttaaaagttgctttactaggtttgagccatgctcagcctatgcctgaacttttactacttgatgaaccagaaaaccacttagatatcgagtcaagagagttatttgcaaatgctatttctagttatgaaggtgctgtgctattagtttcacatgatttaagttttgttgaaaaatgcgggattgttgattcaatttatttaaattaa

SEQ ID NO: 43089 - DNA, 444 bp, Acinetobacter baumannii
atgaattaccgacatattattgtacctgtagatggttctgagatttctttggcagcagcacgacaagcggcccatatcgctaaagcttttggtagtaaacttacagcaattagtctggttgcagtggacccgtttagtggtgtcgatttctattacatctctcctgttgtaaaagattattttgttgaagcgcgtgctaatgcagaaaaaacacttgcgaaagtaaaagccctatgcgctgaagaaggtgttgatattgaaacacaaattattcaaggtgaaatctcatctgatggcattcttaaagctgtagaagagttgggttcagacctgattgttattggttcacatggtcgtaaaggtttccaaaaacttattttgggtagttttgcgcaagatgttctaaacagcactaaaatccaagttttggtggtaaaagaataa

SEQ ID NO: 43090 - DNA, 228 bp, Acinetobacter baumannii
atggccgatttaacagcaaagaaagtcagtaaacttatcgaggaatttcgccaaactggtaaagagccagaaaagctagtgattggatataaaacttatgcaagactcatggcagatgataagtttgcagaaaaagttgttccttcgttagaaaactcaaaagatcgattatataaaaatctaaaaataaaacttattactgaaaaacattattttgaagttaaataa

SEQ ID NO: 43091 - DNA, 174 bp, Acinetobacter baumannii
atgccaagtattagtgtaattttattttatattttagctattttaggcttttgctctgctgtgggaggattattaagtttaagcatgtttttaatcatcatcggtattgggcttatttgtgcagcttttttgctaaaaaaagaatttaaaattgatgttttattctggaaataa

SEQ ID NO: 43092 - DNA, 444 bp, Acinetobacter baumannii
atgacctataaatatgaatatgcagggttttggttaagatttggtgcaatgatcattgatactcttattctttttttagcaattattccagccgcatggatcttttatcatggagattacgatctcatatttgctacaggtatgagtagtaaaccgcaaaactattggtttgatatgatcgtaaattatgcatttccatttttatatactgttttgtgttggatctactttgcagggactccaggaaaacgtctaatgcgtttaaaagttctcgatgaaaagacaggtaataagttaactttcgtacaatctctcattcgctatatcggatatattccatctattttagtgttttgtatcggtcttatttgggtcgcatttgatgctaaaaaacaaggatggcatgacaagatggctaaaacagtggtggttagagaactgtga

SEQ ID NO: 43093 - DNA, 162 bp, Acinetobacter baumannii
atgtttttatacgcttccatacacgacctttatatctaccagattttaatcttggtaaacaattcgtctcatgcgattcaaagcattcggaccatgttcagttatgtgacattccgtcaacgttggtctggctttgggctaattttctcttcttcatcgtaa

SEQ ID NO: 43094 - DNA, 303 bp, Acinetobacter baumannii
atgaaattctggcaacgactcttcacagcatttttacaaagatttcatttgatgcgttttttcggtcgtaatcgatcttttaaagagctacatcaatctagttatgctcaagaaattagcaaaaatttatctaagcgtttgcttaatgcatcaaggactcaaacgaatgatctattaaaacaattcgatactcatttgacggggcttacagaagagcaagcgcatacccaacaaatgacggtgggacttaatgaagttactcgatattggtatttcagtagataccgcagtagatatcgctaa

SEQ ID NO: 43095 - DNA, 753 bp, Acinetobacter baumannii
atgaagttactcgatattggtatttcagtagataccgcagtagatatcgctaaagagtctgcggatttaatcttgcttgaaaaaagcctgatggttcttgaaaaaggtgtgattgaaggtcgtagaacttttgccaatatgctgaaatatatcaaaatgacggcgagttcaaattttggtaacgttttttcggtacttattgcgagtgcttttattccatttttacccatgttgcctattcacttactcattcaaaacttactttatgatgtttcacaaattgtgattccttttgacaatgtggatgaagagttaattgcaaaaccacagcgttggcaacctgaagaagttggccgctttatggtggtgtttggaccgattagctccatttttgacatgattacttttgggttaatgtggtttgtattttcagcaaatactcctgaacatcagacgctattccaatcaggctggtttgtggtggggttacttacccagacattaattgtccatatgatccgcacagctcaaattacatttattcagagtcgtgccgcgactccattattaataatgacagcggcgattatgtgtatcgggattttcttaccaatgggtcctttagcaagctatttaaaactacaagctttacctttaagttatttcttatatttacctgtaattttaggtacttatatgtgtgttactcaatgggtaaagaaaatctatatccgccgttatggctggcaataa

SEQ ID NO: 43096 - DNA, 720 bp, Acinetobacter baumannii
atgaaattgcaatttctacaacatacagacttatcaaatattattgatactttaattagtctctcggttgcttttgttttaggggcattgattgggttcgaacgtcagtataggcaacgtacagctggtcttcgaacaaatgttctagttgcggtaggtgcggcaatttttgtagatattgcaattaatcttactggagcagatggagctgttcgggtaattgcctatgttgtttcgggtattggttttttgggtgcgggtgtcattatgcgccaagaaggcaacatccacggtttaaataccgcagcgactttatggtgttctgcggcagtaggtgctgccgcgggtgctgatttaattattgaagcaatattggcgacagcctttattttatctgccaatacactattaagaccgattgtccatatcattgaccgtcgtccgttagacgatgacacagaagttttacatgtaatttacattatatgtgaccgaagtcagagcaaggtcgttatggatgaattaaacctaaccttaaagcatcataattatcctgctaaagatattgatgtcacaccttttggagaaaaagaggttgagatagaagtaacgctaattgcaacttcaattgaagcagaagaagcacaacacatcattaatcacttaaatgcaatgccgcaaatacggcaagcattttgggataaaaacacaattaattaa

SEQ ID NO: 43097 - DNA, 1173 bp, Acinetobacter baumannii
atgcaaaagattcttcaagatttctcaataccagccgtatttgctggttttattacctttcttattggtattagtgtttcagctattttagtgattcaggctgctcaagctttaggtgcgtcatctgaacaaatcacctcatggttttgggctttaggcttaggtattggtttatcaggactcatcctttcttggaaatttaaatatcccgtagcaacagcttggtcaacagcgggcctcgctttaattatggcaacaggtagtggctatagtttaaatgaagcaattggcgcttttttagtaggtggtttactcactgcgattttaggcttttcaggtatattccaaaaagcgctttcctatataccacaaagcctaaccagtgccatgcttgccggagttctgcttaagtttggtatttcacttttcgcgagcttgcaaaatgattggacatttgttttatctttactcgccatttatgtcattacaaaaagattatggccgcgttacagcattgtatttaccgccttggcaggtattgccctctgccctgtttttttagactttcatatgcctactcttgagtggtccttggctaaacccgtttggattagccctgaatttagctggtcagcacttttaggcttagcattaccactttttgtgattagcatggcgtcgcaatatttacctggtatagccatgatcaagagttatggctataaaccacatgttaatcaactgattggttggactggtttaactcaagttgtgctcgcaccttttggatgttacagcgttaatattgctgcgataagtgctgccgtaagcttagatgaccaagttcatcctgatccaagcaaacgttatattgcgggtataagctgtggctttttttatgtgttgatggggctatttgctgcaaccctcacaagcttgctgatgtcttttcctcatatttttattgtagctttagcaggcattgccttacttggtaccattagccataacattgcactagcgtttggtccagttgaagaccgcgaagcggcattatttacctttttatgtagtgcgtcaggtatccaatttttcggtgttggttcagctttctggggactggttgtcggtattgttgtatttatagtccttaaatttaaagctaaaaaataa

SEQ ID NO: 43098 - DNA, 474 bp, Acinetobacter baumannii
atggatgagcaggctgaaaatttaacacctcttgaattgaaaattatgcgctgtttacaagagaatggacgtttaagtaatgctgaactggcaaaacttgttggcattagtacttcgtcatgttggaaccatactcagcgtctttttaagattggggccatcttggatgtgcgtgctcgaattaatccgggtatggtgcaacgtgagactattgttttggtcggagtagtgctggatcgctcgacacctgatagctttcaggcatttgaacaagcagcaggtgatttggagaatgttcttgaatgttacttggttgccggagaagttgactactttctaaaaattcgtgttaaagatttggctgcttttaaccgttttcatagtgaaaaaattattgctttacccggggtaagacaggtaagaacattttttgtgctcaatgaagttaaaacagatggcatgctggcattttaa

SEQ ID NO: 43099 - DNA, 651 bp, Acinetobacter baumannii
gtgttcggcataacagacttaacaacatatattattggtacattcctaattgtgttattgccagggcccaattctctttatgtgatgtctattgcatcacgctatggtattaaaaccggatatatgggtgcacttggtatttttaccggtgacttaattttaatgctctgtactgtacttggtgcggcttctttactaaaagcattcccttgggtttttattgtactcaaactcgttggcgcactttacttgtcttatttaggttttaagcttttacaaggcagcattcagcgctggaaattacgtaatcaaccccaagcagaaatggctgatttacctgctttagataaagttcacccttataaaacagccttaagtattagtttactcaaccctaaagcgattttatttttcctgtctttctttgtgcagttcgttgaaccggattatgcctatccagctttaagctttttaattttagcggtgattttacaaattattagctttagttatttaactgcgcttattttctctggaattaaactttcaacttttttcaaacaaaaccataaaattgcagcaagcggaattttcttagttggcattttatttttcggatttggcttaaagctggcaacttcaacaatgtaa

SEQ ID NO: 43100 - DNA, 990 bp, Acinetobacter baumannii
atgactcatacagcacttgaccaattaaaaacattaacgaccgttgttgctgacagtagcgaccttgaagcaattcgtaaatttcgtcccttagatgctacaacgaatccttcgttaattaccgctgcggcagaacaaccagaaagtaaagagctcattgaagatgcttattatcaagctaaagaagaaggctataaaaatgatgaactgattgaaagaaccattgatattttaaccgtaaaatttggtgtagaaattttaaaacttattgaaggccgtgtttctacagaagtcgatgctgcactttcatacgacaccgaagcaaccattaaaaaagcgtatgaattatgtgagctttataaagggtatgggatcgatcagtcacgtattcttattaaaattgcatcgacttgggaaggtattcaagcggctaaagtgttagaagctgaaggtattgcctgcaacctcactctccttttcggtttacatcaagcccaagcgtgtgctgatgccaaagttactttaatctcaccttttgtaggccgtattttagactggtacaaaaaagctgaaggtgtagattcttacccaatcgagaaagatccaggtgtggtttcagttaagaaaatctacacttactacaagcagcaaaatattccaactcaagtcatgggggcgagcttccgtagcatcgaccaagtgctaggccttgcaggatgtgatttgcttacgatctctccaagcttgctaacgcagcttgaacaagatacgcgtacagtcgatgcagcacttgatgcgaacaaagcaaaacaggcagaagcgattgttagaccagctcaagatgagcaaagttttaaagatgaacttaaccatgacttaatggcattccaacttttacaaggtggtgttgatggctttattaaagcgcgagatcaattaagtcttttattacgtcaatcttttggaattgatgcagaaattaaatcttaa

SEQ ID NO: 43101 - DNA, 894 bp, Acinetobacter baumannii
atgaatattaatcaagaacaacttctcatgttccaagccgttatggaaacaggttcattttcagcagcagcaaggaaactcggtaaagtcccctctgctgtgagtatgtcgattgctaatttagaaattgatctgaacctgactttatttgaacgtaaaggccgcgaacctactcctacagccgaagcacgagtgctatatgaaaaaacggcgcaactattgattgaaatgaatcaatggaaacagcacgcgcatgcattaagtactgggctggaacctaatcttactattgttgtggtgtctgagctgctacataccaattggaccgactatgtttgcctgctagaaagtcgctttcccgatctacaaattaatattgtgtctgcccctcaagaagatgcgcttcaaatgttgttagatggatctgcccaactggcccttatgtttgaacgtgagcatttagacaatagagaacagtttgttgaactcaaacgtgaagccttaattccagttatttcaaaaacccatccgctcgcaagccaagagcatgtctcatatgagcagattttgggtacaagacaaattgtggtggcaagtcgagatgaaacattaaaacccgaattattattttcaaaacattactggcgtacagacaaccaccactctgcttgcttaatgattttacgtaatttaggttggggcgtacttccgcaagagatgtttaaagaaaatcctgagttaaacaataagcttaaagcattagatgtatttgattttacgcctcgatttgaatattacgttgatttggtctggagccgcgaaagtgaactcggtgctgctgcacggtttttgattgactatattcgtaataagcgaatgcaaccagctccgtaa

SEQ ID NO: 43102 - DNA, 435 bp, Acinetobacter baumannii
atgttgatttccaagagaagactcattcatgcaatcagttatgaaggaattttattggtcatcattgcgattgcattaagttttatttttaacatgccgatggaagtgaccggaacactcggtgtgtttatggcagtggtttcagttttctggaatatgatttttaaccactatttcgaaaaagtagagcataaatataattgggaaagaacgatccctgtacggattttacatgcgattggttttgagggtggtttgctgattgcgactgtaccgatgattgcatatatgatgcagatgacagtgattgatgcatttattttagatataggtttgaccttatgtattttggtttatacctttattttccagtggtgttatgaccatattgaagataagtttttcccaaatgctaaagcagcatcacttcattaa

SEQ ID NO: 43103 - DNA, 1569 bp, Acinetobacter baumannii
atgagcaaaacaactcaagaaaatccagcagtcgagaattctgctcaggaaaaagtgtcaaatacatcaaagtcggcttctaacacggctaagcgtaacagcactactcctaaagcagcaactaatacaccaaaaacgacacgtactcgttcaacgactgcacctgcacgtagccctcgtagtaagagcgctgcttcagcaaccccgtctacatcttcaaatgtagctgcagcaccaaaagcaacaaaaaccaaaacttctgttcaacaggataaaaccatgagtcaaaacactgttcgccgcgttgcaatccttggtggcaaccgtattccatttgcacgttcaaatactgcctactttaaagcgtctaattctgacatgctgacagcagcattgaatggtttggttgagcgctttaacttacaaggtaaacgtattggcgaagttgttgcgggcgctgttttaaaacatagccgtgacttcaacatgactcgtgaagttgtattgagcacagatcttgctcctgaaactcctgcttacgacatccaaattgcatgtggtacaggtttacaggcagcatttgttgttgctaacaaaattgggcttggtcaaatcgacgtaggtattgcaggtggcgtagatacaacttctgacgcaccgattgctgtaggtgatggcttacgtaaagttttacttgagcttaatgttgctaaaacaggtaaagaccgtcttaaagctctaacaaagattgattttaaaaagcttcttgatgcaccaagcaatggtgaaccacgtactggcctttcaatgggtgagcaccaagcaatcactgcattagaatggggtatcactcgtgaagcacaagacgagctagctgcaagcagccatcaaaaacttgctgctgcttatgagcgtggtttctttgatgacttaatgactccattcttaggtcttaaccgtgacaacaacttacgtcctgacagtacagttgaaaaacttgctaagttaaaaccagttttcggtaaaggcgaaactgcaacaatgacagcgggtaactcaactccgttgactgatggtgcttctgtggtattgcttgcttctgaagaatgggcaaaagaaaacggacatgaagttttagcttatctttctttctctgaaacagcagctgttgacttcattggcaagaacggtcctaaagaaggcttattgatggctcctgcttatgcagtacctcgtatgcttaagcgtgctaaccttaagcttcaagacttcgatttctacgaaatccatgaagcatttgcatcccaagtactctctaccctaaaagcttgggaagatgaaaaattctgtaaagaacgtcttggcttagatgcaccattgggttcaattgaccgctctaaactgaacgtaaatggttcatctttaggtgcaggtcacccatttgctgcaactggtggtcgtatcttggctactgcagctaaattaattaatgaaaaaggttcaggccgcgcattaatctcgatctgtacagcaggcggtgaaggtgtggttgcgattgtagaaaaataa

SEQ ID NO: 43104 - DNA, 1392 bp, Acinetobacter baumannii
atgactgatcaataccaagcatttacgcaatctcctattggtaaattcgttgttaaaaatctgggtttaccttcgcctgttgtattagagcgttttgaaagtgctcagccagtagtgaaaggtgcagtattggttggcgcggcgccatcaagcgttttgtctggtgcgattgcacaagtacttagcaatattcatgcagatagctatgtaggcaataatgttgcattacaacaagaagctgcaaaagttggtttaaatttacgtccattcaatgcaggcgataaagaatcaaaatttaaggctgttgtatttgatgcatctggtattcaaaactcagaacagttaaacgaactttataaattctttaatccgattgcacgtcaagttgcgacttctggtcgagtgattgttattggtacaacgcctgaaactgcgaaaactgtaaaacaagcgattgctcagcgtgcacttgaaggttttatcaaatctgtaggtaaagaatttaaaaagggtattactgctcaagttgtgtatgtagacgaaggtgctgctgcaaaccttgaatcaacattacgcttcttgctttcaccacgttcagcttatgtatctggtcaagtgattcgtgtatctaaggcagatgtagttgatgttgattgggcaaaaccgcttgctggaaaaactgcgttagtaactggtgcaagccgtggtattggtgaggcaattgcacacgtgttggcacgtgacggtgctcatgttatttgtttagacgtaccacaacaacaagctgatcttgaccgtgtagcagctgacattagcggttctacattggcaattgacattacagctgctgatgcgggcgaaaaaattaaagctgctgcggcaaaacaaggcggtttagatattatcgttcataacgctggtattacacgtgacaaaactttggcaaatatgaagccagagctttgggatttggtcattaatattaacttgtctgctgctgaacgcgtaaacgattacttgttagaaaacgatggtctaaatgcaaatggccgcattgtttgtgtatcatcaattagtggtattgctggtaaccttggtcaaaccaactatgctgcatctaaagcaggtgtcattggtctagtgaaatttactgcgcctattctaaaaaatggtattaccattaacgcagtagcacctggctttatcgagactcaaatgactgctgcgattccatttgcaattcgtgaagctggtcgccgtatgaactcaatgcaacaaggcggtttacctgttgatgtagcagaaacaattgcatggtttgcatcaactgcttctacaggtgtaaatggtaacgttgtacgcgtgtgcggtcaaagcttgttgggcgcttaa

SEQ ID NO: 43105 - DNA, 855 bp, Acinetobacter baumannii
atgaatactcgtcattttagccaactaccaaaagcggcattggcatatccaaaagtagtgcaaggtttaatttttaaaaaaccgaaaggtccaaaaatattaccgcaagttgaatatgtggtagataccctagaaattgatcagaaccatttgaaggcttataacgaagtatgtggctttcaaaataatggctttgtaccggcaatttatctagcggtactttctcaaagcttgcaaatgcacatgatgacagcagaagccttcccatttccaattttaggtttagtgcatattcgtaaccagattaaacagaccagaccgattggcgtaactgaaaaactcactctgtcatgtaaatttggggaactaaaaccgcatgataaaggcgttcagtttgactttattaccacggcaaaagttggcaatgaagtggtgatggaaggcttaacgacttatttatctcgccaaaaagttgagaaaagagtgggtgagaaagctaaagaagaacaagcaccagcttatgttccaaaggcagagtggaatattttagaaaacactggtcgccgttatgcgaaagtgtctggtgattttaacttaattcacattcatgccattactgcaaaagcatttggttttaagcaagccattgcgcatggcatgtggagcaaagcaaaagctttagcgaaccttgagttgccaaatgcttatgaagcagatgtgtggtttaagctaccaatgttcttgccatcaaaagttgagtttttaactgcaaatgcagataaaaagactgatttcttgattcgtaatgccaaatcacaaaaaccgcatgttgcaggaactgtaaaagcattataa

SEQ ID NO: 43106 - DNA, 1260 bp, Acinetobacter baumannii
gtgattaaagaaattttactggccgatacccataactatcacggtattttagatgaacgttttattgatttagctcaccagtttagccgtcttcaagatgctagaaccggacaaggtggagctgcattagcggtttattttagaggccaaaaagttgtagatatctacaccggtctaaaatcacaaactgaagcttggcaacctgacacattggcagtttgctactctacgggtaaaggtgtacttgcaactttagcgcatattttggtaagtgaagggtttttagaatacgacaaaccgattgcgacctattggcctgagtttgctcaaaatggaaaagagcaaatgactttgcgtcatgtgctaagccatcaaagcggcatgtttgatgttcgaaatatcatcgaaagtgcgagagaaatgctcgactggtcacatatgttagatgtggtcgcagcgactaagccaagatttcttgcaggagagggcaatgcttatcaagctttaacattcggttggcttgtcggtggcgtacttgaaaaagcaactggtcaatctctagatcagctcatgcaaaaatatcttgttgagccattacagttagatggtgcctattttggaacgcctgcaaatgagttggatcgtgtagcacgtttaattattcaaccaaaaccagaaaaaccagcatctactcaagttgaaaaacctaaaaagccacagatgcgtaagagttcactctctgaaaaagtgattacatggacgggtcaagacccgcaagactttcaggatgcgatgattccaaaaggaatgaaaaattttagtttctttagtgatgagggactgcaagcagtcattccggcagcgaacgggacatttactgcaaatagccttgctaaaatttatgcgatgctagcaaatcaaggtgaatgggatggacagcaattgattcgcccagaagtatttaaagaacttagtactattcaaagttatgcacgtgatcgtgtcatgccaataccgatgaattggcgcttaggatatcaccgtattattactatgggtaaacgtgcaaaaaatggctttggacatattggttacaatggttcaggagcgtggtgtgatcctgagcgtgacctcagctttgcttatactcataactttcagattggttcaatcacaggcgattatcgtttgtgggggctgacccaagaagctttacgttgcacagaccaaattttaaaaggccgtaaaggctggttctaa

SEQ ID NO: 43107 - DNA, 579 bp, Acinetobacter baumannii
atggcctatcttaatcgcgatcaacgcagagaaatgattctgcaagctgccatgcaaattgctttgactgaaggttttacagccatgacggtacgtcgaatcgcaacagaagcacaaacctctaccggacaagtccatcatcatttttcttcggcatctcatttaaaagctgaagcttttttaaagctgatggaacagcttgatgaaattgaacaaactctccaaacaactagccaatttcaaagacttttcatcttattaggcgcagaaaatatcgacagacttcagccctacttacgtttatggaatgaagctgaactcttgattgaacaagatattgaaatacaaaaagcgtataacctcgccatgcaaagttggcatcaagctattgtgcaatcgatcgaatgcggtcaaaaagaaggtgaatttaaaaataggtctaattccacagatattgcgtggcgactcattgcctttgtgtgtggattagaagggatttataaacttggtttacaaggtttagttgaagaagattttaagcgtcataccgaagcaattattcgcctagaattattataa

SEQ ID NO: 43108 - DNA, 1479 bp, Acinetobacter baumannii
atgcaaaaaaaatggttaatcctgacaattatcgtcctcatttatttaccagttacgattgatgcaacggtaatgcatgttgcaacaccatctttaagtgcaccattgaatttaactgccaatcagcttttatggattattgatatttattcactgattatggcgggtttgattttgccgatgggtgcacttggtgatcgtattggctttaaaaaattattatttattggaaccgcagtttttggtgtgggttcgttagctgcggctttttctccaactgcctatgctttaattgcttcacgtgctgttttaggcctaggggcagctatgcttattcctgccactttatccggtatccgtaatgcctttaccgaagaaaagcagagaaattttgcacttggtctttggtctacagtaggtggaggtggagcagcttttggtccattagtcggtggttttgtattagagcatttccactggggagctgtattcctcattaatatcccgatcattttagtcgttctagttatgatcgtgatgatcattcctaaacaacaagagaaaactgatcaaccaattaacttagggcaagctttagttttggttgtagcaattttaagcctcatctattcaattaaatcggctatgtataacttctcggtgctcacggttgtgatgtttgtggtgggtataagcacattaattcacttcattcggagccaaaaaagagctatgacaccaatgattgatctggaattatttaaacatcctgtgatttctaccagcattgttatggcggttgtttccatgattgctttggttggctttgaattattactgtctcaggagttgcagtttgtacacgggttttctccattacaggcggcgatgtttattattccatttatgattgcaattagtttaggtggtccattagcaggtatttgtttaaataaatggggtttacgtagagtatcgagcctaggtattttagtgagcgcgctcagtttgtgggggcttgctcagcttaatttttcaaccgaccactttttagcatggacgtgtatggtctttttaggctttagcattgagattgccttacttgcctcaactgctgccattatgtcatctgtgccccctcaaaaggcgagtgcagcaggtgctattgagggaatggcctatgagcttggagcaggattaggtgtcgctatttttggtttaatgttgtcttggttttatagccgctcaattattttgccagccgagcttccgtcagacttaattgaaaaagcgagtatctcgattggagaaaccatgcaattagcctctaatcttgaaaatcctttaggagggcaattagttgtagtggcgcagcaagcttttagctatgcacatagttgggtgcttaccctctcagcgatctgtttcttccttttaactgtattcgtctggtttagttttccgaagaaagtaaattaa

SEQ ID NO: 43109 - DNA, 2091 bp, Acinetobacter baumannii
atgtatcaagtacttgctagaaaataccgtccacgtaatttcaatgagttagtgggacaaaaccatgtttctcgtgcattaagtagtgcattggaacgcggtcgtcttcaccatgcttatttatttacaggaacgcgtggtgtaggtaaaactacaattgcacgtattttagccaagtgtttgaactgtgaaacaggtgtgacttctacgccatgtgaagtttgtaccacttgtaaggcggtaaatgaaggccgctttattgacctaatcgaaatcgatgctgcctcaagaacaaaagtagaagatacgcgtgaacttttagacaatgtcccttatgcaccaacgcaaggtcgttttaaagtttacctgattgacgaagtacatatgctctctacgcattcttttaatgcgttattaaaaacactagaagaaccaccagaacacgttaagtttttgtttgcaacgacagacccacaaaagttaccgattacggtcatttcacgttgtttgcaatttactctaagacctttagctgtagatgaaattacaaagcatcttggcgctattcttgaaaaagaacagattgctgctgacccagatgcaatctggcaaattgctgaatctgcacaaggctctttacgtgatgcattatctttaactgaccaagcgattgcttatgggcagggtgctgtacatcatcaagatgttaaagaaatgcttggcttgattgaccgtacgatcatatatgatttgattatagcggttcatcaaaaccaacgtgaaaaagtgagccagttattactccaatttagatatcaagccttagatgtctcgttagtactggatcagctcatttcaacattgcatgagttggctttattacaatatttaccagagctcggcttaaagtacagtgaagaaattaataccaaaattcttcagctttctaaactgatttctgctcaagatttgcagctttactaccaaatcgcatgtaaaggccggtcagacttgcagcttgccgtaacgcaagagcaaggttttgaaatgtgcgttttacgattattggcattccgtcctttagcaccaaatgaaattttaatttcagagcctattcaacaaaatgggcaagcagaagtaggtctaaattcacaagctcaaacagcccaagtgattgctcctgtaagtgctgttcagcctgttgaagttattagtcaacccgctatggttgaacctgaacctgaacctgaacctgaacctgaacctgaacctgaacctgaacctgaacctgaacctgaacctgaacctgaacctaatcaggacttaatggtatttgacccaaatcatcatgagttgattggacttgagtcagcagttgttcaagagactgttagtgttcttgaggaagatttcattccggtaccagaacaaaagttagtacaagttcaggctgaaacccaagtcaaacaaatcgaacctgaaccagcttctactgctgagcctataggtttatttgaagcatcgagtgctgaattttcacttgctcaagatacgtcagcttatgacttggtttctgaacctgttattgaacaacagccattggcgcaagctgaaattgttgaaacagttgcggtggtaaaagagcctaacgcaacagataactaccagctgatgccacaagatattttaaagttgccatcacaaactttgaaaggtgagtggacacttgaaaagtgggagttttggtttagaaatagccagctttctccagccgttcaagaacttgctcaacatggtgtgatgactggggaaattggtggcaacacggttttccatattcctcaagaatatgaaaatatgttgactcagctacaacaagccctaattgaagctttaaagcagcagtggccaaatacacaatttacggtcgagtatggtgcagtcaatactgctacaccgtatgttatgcaaagcgttcgtaaagaaaaagctttccatcgggctacagaactattacagcaacaacccgttattaaaagcctcatagagacttttgatggtgagctgcaaaatattcaattaaagccttaa

SEQ ID NO: 43110 - DNA, 2229 bp, Acinetobacter baumannii
atgattacacgtcgtaaatttttaaattactctttaaatatgggctttggcgctgcagcgttggcggctttcccatcgagtattcaaaaagctctagcaattcctgcaaataataaaacgggcactattcaggatgttgaacatgtcatcatcttaatgcaggaaaaccgatcttttgaccattattttggtacgttaaagggtgttcgaggctttgctgaccgttttacgatccctctgccaaatggtcgccgtgtctgggaacagctgagaagtaatggtcaggttttaaccccatttcacttagatggaacagccaataatgcacagcgtgcagatggtacgcctcatacgtgggatgacagtcagttggcgtgggacaatggacgtatggcaaactggccaactcataaaaccgatatatctatgggctattttaaagaaaaagaaatcccatatcagtttgcacttgccaatgcctttacgatttgtgatgcctaccattgttccatgcacaccggaacagatgcgaaccgctcttttcatttaactggtaccaatggtgcaacaccgaccaagcgttcatttgtaaataatgaatgggactggattgatggtaacccagcaacggcagaccgtggttacacttggaaaacctatgccgaaagattagaagaagcagggataagctggatttgttatcagaatatgccagatgaatggggcgacaatatgcttggtgcatttcgttcgtttagaaaggccaatattgcatctggctatcctgtttcaagtggcggtgaaccaaataaaccgtatgctgatacggggcaaaaactaccgtataaagcctatgatgctgcgactgataatgccaaaaatccactctataaaggcattgcaaatacgctaccgggcaataaaccagaagagtatctcgacgcttttaaaagagatattcgtgaagggaagttacctcaagtttcttggattaacgcgccatcgatatactgcgaacatccggacccttcaagcccggttcaaggagcttggtttattcaagaaattattgatgcattaactgctgtaccagaggtgtggagtaaaacggctctgctcatcaactttgatgaaaatgatggttactttgaccatatgccatcgccatcagcaccatctcgactcaaaaacggccagtacgcaggtaaatcgacactaagcaatgctgatatgcaagatgaatattttgatcatgctgcacctgaggggagccattcacagcctacacctgatggacgagtttatggtccgggtcctcgtgttcctttatatgtgatttctccatggagtcgtggcggttgggtcaactcacaagtttttgatcatacttccgtgctcatgtttttagaaaaacgttttggtgtaaaagagccgaatatcagtccataccgtcgtgcagtgtgtggtgatttaaccagtgcatttaactttaaaacaccaaatgcagatgttttaccgcagctgagtggtaaacaaacacgtgtgcaggcagatgcgctaagggaaaaccaagaagctttgccagctgttcctgtacccacggatattaagttacccattcagcaaagtgggatccgtctatcacgggcgctaccttatgagttgcataccagtgcgcgttgtaaagcagatggtaaggtgcaattgattttttctaatacgggtaagcaggcagcggttttccacgtatatgacaagctcaatttagaccgtattccaaagcgttatattgtcgagccgaataaaactttagatgatgaatggaatgctttaaacgataacttaggccgttatgacctatgggtacttggtccaaatggctaccatcgtcattttaaaggggatactcaacgtattatcgatagtggtgttaaacctgaaattcgagtgtgctatgacattgctaatggtgatgtttatgtcgaactcatgaatgagggaaccaaggatacaatattgacagtaaaaccttgtgcatatcgaccagatgcgccattgcaactgaccgtaaaagcgggacaagttgttaagcaacattggtcgttggctgatgttgggcattggtatgattttgaagttacgagcgagagtgatccgtattattaccgacgttttgctggccgagtcgaaacaggtgaggattcctttagtgatcctgcaatgatctaa

SEQ ID NO: 43111 - DNA, 435 bp, Acinetobacter baumannii
atgactaaacccgttttaaaaactcgtgatcaatttaagttctttttagatattcaaactcgctgggcagataacgatatttacggtcatgtgaataatgtgacttactatagctattttgatacggcagccaatgctttgctcatccagaaaacaggttttgatattcatgaagcaaaatcaattggtttagtcgtcgactcagcttgtagcttttttcaagagttatcatttccagaagttattcaggtaggtgttgcgattggtaaaattggtacaacatctttacgctatgaattggcaatctttaaacaaggtcaagaccaagcatcagctcaaggacattttgtgcatgtgtttgttgaccgtgaaacacgcaagactgttccaatatccgagtcagtccgtgaagttttagagaattttttattataa

SEQ ID NO: 43112 - DNA, 1158 bp, Acinetobacter baumannii
atgagccattttcagtttcagaccgttcccaacattatttcaggactcggttctatacaagaattacagaatgtgttggcatcaaaaacttaccgcaagttattactggtaactgatgcgggtatgattaaaaatcagttacacctgcctattcttcaaattttagatactcttaaaattgaacatgtcatttatgctgatgttcaggccgacccaccagagcaagtggtattagatgcagcaaattatgctaaacagcaaaatgtagatgttattgtcggctttgggggcggaagttctttagatgtagccaaagtgattgccttactcgcacatcctaaccaaactcaaaacctacaagaaatgtacggggtaaatcaggtcaaaacaacccgacttccacttattttaattcccactacagccggtactggctcggaagtgacacccatctcaatagtgactacaggtgaaacgacaaaaatgggaattgtctctccggtactctatgccgatacagcaattcttgatgcaacttttactcaaaatctacctgcccatattacggctgctacaggtattgatgcaatggtccatgccattgaggcatatacctctaaacataagaaaaatatttataccgatattttagcgaaacacgctttgaagctgctgaaccataacttaccgaaagttcttaaaaacggtaatgacttagaagcacgtcagaacatgctgttcggttcaatgcttgcaggtcaggcatttgcaaactcacctgttgctgccgtgcatgctttagcatatccattgggtgggcattttcatttgtcgcatggacataccaatgctttggtgctcgttgaagtactgaaatttaatgcgccctatgccaaacaatactatgcagaacttatgcaatggctagacccatatagcaacggtagcaccgatgggttatgtgatctgtttattgaccatatgcaaaatcacttagaccgtagtggtttgactttaaaacttagtgagttaggtattgaagagtctagcttaccaagacttgctcaagatgccatgttgcaaactcgattactgcaaaataatccacgtgacatgacagaagcagctgctttagcaatttatcaggcgatttattaa

SEQ ID NO: 43113 - DNA, 1245 bp, Acinetobacter baumannii
gtgaaaatagatactgatgtcaatactggatacagcaaggataccgacaaaaatggatacgcaaatattaagtatcgtgagctaattcaaaaattaacagcaacattatcattgacacttttgtcatttggatggggctctacagtaaacgcagcacaacaacaaatcgctttagtaggaacctggacatctatcccagatgcaccgcttgtgcaaaaaccagaaaaagccagtgaaggtttgtaccagctacaagttaatgctgacgggaccttaactcctgttaaggtattgcaaatgaaaagtccatcttgggttgtaaaatcgaaagatggccgttttgcatataccactaatgaagaaaatgaaggggcggtaacggcattatcgattcaaaacggaaaggtagaggtattgaacacggtaaatagtcatggcgggcatccaacacatgcatccatcagtttagatggtaaattcctatttgtgtcgaattattctgcatttgataaaggacgtggcggtgtcgctgttttgccaattttaccaaatggacatttgggtgaaatggtacaaaatattgtttttgcggagggttctggtcatgttaaagggcgtcaggatagtggccatgcccattcgacaacttttagcccagatggtaagtatttatatgcaagtgatcttggaaatgacaaagtctatgcttttcgttacaacccaagtaagcctcaaccacttgaagcggataagagccgagatgtgagttttaagcatggttctggtccacgtcatatggtcttttcaccaaatggtaaacaggcatacattaccgcggaaatgcgaagtgaaattgtgacgtttaacgtacaagatggccatttgaaaaaagtcgctgagctaaaactggttcacgaagacaaaacacctgaattcaagagtgcaagtggaattattcttagtccaaatggtaagtatgtgatcgctgcaaatcgtggtgcggacaacaaacttttggtatttaaaatccaacagaatgggcttttaggtcaaccacaagtttataaggccaatggtattgaaccacgtgctttttcatttgatgagtcaggtaaatatctgtatgtgacgaatgtttatagtaataacattagcttattccgttttgataccaaaaatggctcattaaaacctttaggcgatgcagctaaaatatcgactccaactgatatcaaattcttttaa

SEQ ID NO: 43114 - DNA, 504 bp, Acinetobacter baumannii
atggaagcacagtataaggtgttatgtgtctgtttaggaaatatttgccgttctcccacggctgaagtggtttttagacattattgtgatcagcatcaactcaatatgattgtcgattcagctggaacaagtaactatcatccaaataaagcacctgatcagcgtagccaattgcatgcaaaaaaaagaggctatgacttatcttctttgcgggcaagacaactttcaactcaagactttttagattttgatttgattttggcaatggatcatcaaaactttgatgatattcacgacttgctacaaagagctatcttccaatttggcagtcatcaaattcgggcaaaagtggcattaatgagtgaacatgatcctcaatatccacaacaagctctgcctgacccttactatggtggagatgagggctttgaacgtgtactcgaccaatgtgaatcaagtgcgttggcgtggattaatatcctaaaaaaacaattgaatgtttaa

SEQ ID NO: 43115 - DNA, 1035 bp, Acinetobacter baumannii
atgcaaattcaaaatcaagtacagcttaagccattcaatactttaagtttagatgttacagcttctcattacactaaggtcaaatctattgaagatattgaagaagctttagcttttgctaaagagcatgagctaaatgtacttgtattatctggcggtagtaacatgctattaccgcaacaaattaatgctttagttattcatcttgatattcagggtatagacgttttatctgaagatcaggattttattcgagttaaagtcggtgcagggcaggtttggcacgatttcgttttatatagtacaaagcagaattggtttggcttgcagaacttggcacttattccgggcttggttggtgcttcaccagtgcaaaatattggtgcttatggtgttgaggttggtgagtttattgagtcggtacaagtctatgaccgtctattaaaacaaaccggatcaatttcggcagcagattgtcatttttcttatcgacatagcatttttaaagatgacccagctcgttacatcattactcatgtcacctttaagctgcttaaacaagccaatctaaagctaaattacggtgatttaaaacaggcagtaggagataacctgactgctgaaaatttacaaaatcaggtcattcatattcgtcaaagtaaattacctgatccaaaagaatatccgaatgtaggaagtttctttaaaaatccgattgtaaatactcaagaatttgaacgattaatcgcacaattctcaacaattccacattatcctcaggctaatggtaacgttaaaattgctgctggttggttaattgatcaggctggatggaaaggtaaacagctcggtgtagtgggaatgttccataagcaagctttggttttggtgaattatgccaatgcatctcttgcggatgtaaagaaaacttatcaagctgtacaacatgatgttgaacagcgtttccaaattatgttagaaccagagcctgtgctttataacaatttaggtttaattgaaaatcatacggaatag

SEQ ID NO: 43116 - DNA, 1131 bp, Acinetobacter baumannii
atgccaaaagtacacttgatggtacgttttgtacaagtagttactgtactatttgtactattaggctgtttcgtgatttttttgtattcgccgttttattcaaaacttattgtagctggacttaactattttgttccggtagatgttaatgaggtggctgcggaaagccagcgaaaagcagcattaagtgaacatgataacttagagccggggtcaaatttatggattgctcgtcaggcttatttgaagttaacagaagatgctttacgtgaaaataagacagcagatttgggttacatacaagaaaactataaggctttgcagcaaattattcttttagaagaaaaagaacaagaactacaggaagagaaagaaacgacggctgtgagtgttcctttggttgcgaaaaactcagaaattgatgcggccgatgaagcaagtagtcctatcgatgcagcactttctattaatagttctgaaaataaagcccttacagagcaatatacggagtttttagcaagaaaacctgtagtgcctgagcatcaaaaagcggcgagtgagcctgagcagaaagttgaatatgttcgtaaaaaccctctgcctgctcaacctaaaaagttatcagaaccttatgcgattgtagtattgggcggtggtttaactttagataaaaatggcaaagatattgtagttaacagctatacgcggttaagactagaaaaaaccttagaagttgaaaagaaaaaccatctacctatcgtactaagtggagttgaagccccttatatgcaagcatggttgaaagcacgtggggtagatgcaaaattattagaaaagcgcagtatgaatacctgtgagaatactcgctttagttcattgttacttcaaaagaaaggtggtgcgcctacagttatgttggtcacagatgaatatcatatgccacgtacgcgccgtttatttgctttaaatgggatagagactattcctgttactgctccaatgccaacaccgcttacacgttggcaaccgagtatacaaaactacgatcatagtcgtcgtgcaaattatgaattacttgcgacaattcgtgacatgttatttggttcaagtgattgtcgagaggtgccttaa

SEQ ID NO: 43117 - DNA, 1029 bp, Acinetobacter baumannii
atgtctgagattccatttctcaatcctgccgtattaaaacaattagatttaccggttccgaaccgcgaactcactccacaagttttaagcccactcaatttaaataccttagaagaaccttctcgtgagcttttagcataccgtaaattatacggtttacatttactggactgtgagcattggcaaggctatgtccaaatgcctttatttcgtctgcatgtccaagtttttaaacctaaattagacaaaatccaaggaaccgtatgtttattgcatggttatctggagcatagcggaatttatcagcccattattcgcgaaatacttgaacaaggctttagtgttattacctacgacttacctggtcatggtttgagtaatggttcacctgcaagtattcaaaattttgaccattatcaacaagttctgatggcggtttatcaatatgtcaaacatgctgatcaattaccgaaaccatgggtaggtattgggcaaagtacgggtggggcaatctggatgcatcacttgcttgagtatgcagaaaaaagacaagacccaatcgtcgatagggttttattgctttcaccattaattcgacctgctaaaacagcatggtggcataatccggtaggtctaggcattatccgtcgtattaaacgccaagtgcctcgacactttagacggaataaccataatcctgaatttttaagatttattcgtttaaaagatccattgcagccacgcatgatgggcatggattggattttggcaatgtcaaaatggatgcaggaaatggaagagcgacctgcttgtcgtattcctgtctggcttgcacaaggggcattagatcaaacagtagactggcgttacaacatcgagtttattcgccgtaagtttaggcttcaaacattattgatgctagaagagggttctcatcaattaattaacgaacgtgcagatattcgtgcggctttaacaggtttaattccagcctttttgcatgcaaagccgaaacatttttattattaa

SEQ ID NO: 43118 - DNA, 1338 bp, Acinetobacter baumannii
atgtcccctacttctagcttttggcgtagtctcttccgtctcatacatatttatgccggtatttttattgccccatttatatttgttgccgcatttactggcttactatatgcaattacgcctcagttagagcaattcatctataaagatgtattaaatgttcagcctttaaatcagatatatcctctaagccagcagattgaaagcgcaagaaaagtcatgcctgcaactgcaaaaattacagaagtcagaccatcaccaagccctgtgcaaactacgcgggttattttttccgatcatacacaccatctaaataatgaagccatttttattgatccttatacgctttctgtaaaaggacaacttgctgtgtatggaaccagtggcgtattaccgttacgtacattcttagatcaattacacagcaatttattattaggaaaatggggacgtttttatagtgaacttgctgcaagttggcttggttttttaactttaagtgggctatacagttggtggaagcgtcgctcaaacttcaaaaacagacaaacaaataaaaatcacttattaaaatggcatagttctattgggttagctttactaccacttttattgttcattgcgattactggtcttacatggtctcaatgggctggtgataatattcgtattgcccgtcaatggttaaactggcaaacaccaatattgaccacctcactaaatcagatttcattgccagaaatggctcatcatgaacatcacgaaatgatcatggaaacgccaaatttagacatcatgccagctgaattcgattctgtattagcaattgctcgagcaaatgggattaattcaacagaaatacaaatcaaaccgccagttgctgagaaccaagcttggactgttgcggaaatacagcgtaaatggcccacacaagcagatagtattgcgattgatatgcatgaacacaaggtaatcgataaactcgcttttaaagattattcattagttgcaaaacttacacgctggggagttgatgcacatattggggtactattcggttgggtcaatcaattaattctggttctgtatgcgctcgggctatgtgtaatgattgtttatgcgtataaagcttggtttaaaacctccaatgtaaaacttacgacccatcattttattaaccaaactttgttcgtatggaaacatgcaactacacaacaaagaataattacgacattaatgcttgctattctagggctgagtttacctatttttggatttagcttagtcatcaccttatttattttgctcataaaaaaacagctccctcttaaagcttaa

SEQ ID NO: 43119 - DNA, 864 bp, Acinetobacter baumannii
atgtcaaaaaaatttgaagatttcgataatccaagacaaaaggcattactggggatgaagaatagtattcctacagaacagtgggaagaaaatctaaaatttctcaaacaattaagagcgagaattgctgaattaccagtatgtaaacatccggcgatcgaagttttaaataatggattgcttgataaattcactttaacaagaattcatttagaatatcgtcatgcgattgttcagatctttactgatgccttattaatggcccagttccagacaaaacaattggagcctaaactccattctggagctaaaatgtttccacgtgttttattaagtttaaatgtacttgatgaatttggttttagaccaggaacagacccggacaattattatctaggtaatccggagtatgcgcattatcctttatatgaagatttattgaatgattatggtttgagtgagaaggaccgtagagagtatcaaccttcaaaaattgcagatcaggtaagaaattttctagaatcatcttatgatagttatattaaagtagttgctttacttgcagtggcggaagaagaagtgattctttttagcccaccacttcgtgaagcgactaaagccattggcgtcgatgttgaaggtggcggctattaccatgttcatggggtatctactgacgaaacctcagaagcagcagatgatgatcatgaagatgatctctggtttgcgttagcgcaagcaataactaaagaagattatgagagcttaacaacgctttgtatggattattgtgctttatggaatgagttttgggattcacaaattgctgatattcactacttagaagcaaagaagttagcataa

SEQ ID NO: 43120 - DNA, 1092 bp, Acinetobacter baumannii
atgccgtattggaatttatatctccaagatcagggatttaattatcaagagataggtattttatcttctattgctattgtgacgcgcttctttgcccctttagtttggggctggatcgccgataaatccggtaaaagaatgctattagtgcggattgccacatggatggaggcatgtatatggttggctatttttataattcctaatacttttcagtcagttgctttattgatgcttatttttagttttttccaaaatgctattttagctcaatttgaaggagtaactttattttggttaggagaccaaagggcgaaactttatggcaagattcgaaaatggggatcagttgggtttattgtaggtgtatttacaataggggcaattttagaaatcattccaatttcaatgttgcctatattattgcttatcattgcctcattagcatttatttgggcatttacgatacgtgaaccagaaggggccccaacttcacaaaagcatttagaacctttattacctgtgctgaaacgtcctgaagttgctgcttttttcacaattgagtttattcttcttttttcacatgcacctttttatagcttctatagcaattttctgaaatcgttaaattttagtacgacggaaattggttttttatgggctatgggcgtggtttctgaaattgtgatgtttgcatatgcaactacgttttttaaatatttttcttggcgtagccttgtagcagtatgtttgattttgacaagtatacgctggttattagttgctattttctctcactatttcataggtcagttatttgcacagtgcctacacgcttttagttttggcttatttcatctcatcgcaatgcggcttatctttcaaaacttttcaatagggcagcaaggtcgaggtcaggctttttatagcaccatgtggggacttggagtggcgttgggaagtattttggctggtcattactggaaaattcttacgggtgagcatatttttatgatcgctgctttagtggttctatttggtttgtgctttgtctattggttacctaaacaaatcgaaaagtcagtttcttag

SEQ ID NO: 43121 - DNA, 504 bp, Acinetobacter baumannii
atgcgtttaatgattaataaatctatgaaaaatatttatattatgggattattattggcttgttctggttttgctatggctgagacagtgactcaacagcccccagcacaacctgttcgcactgcaagtaatcctaatgctatacgtattgttacgcgtcctgaaattatgggattatggggaatggagattccaaataataaaaaatgtgtagagtattataatttccgcagtagtaacgatgtagtgattaaaagtggtgaagagtggtcatacggtatttatgaatatcagccatctgatgaccctaaagagcagctatcggctttagtaatgcaaattaagtttgataataataaagtagattgttctggtcagaagcaagatcagacaggtgatatttctcaatatttcgtgcaatggaaaaatgaccatactattaatttctgctcaacggctaagggtgagcaatgtttcgcaactttacgccgaatgttgccataa

SEQ ID NO: 43122 - DNA, 1371 bp, Acinetobacter baumannii
atgttgcaaaaagttttaattgcaaaccgtggtgaaatcgctttacgaattacccgggcttgcaaaacattaggaatcaaaactgttggtatctattcagatgccgataaagatttgatgcatttacgtttcgttgatgaagcagtatgtattggtccgggtgcaagtagtgatagctatttaaacatcccggcaattattactgctgcagaaattactggtgccgatgcaattcatccaggttatggcttcctttcggaaaatgccgagtttgctgaaattgtagaaagctcaggtttcacatttattggccctcgcccagaacatatccgtttaatgggtaacaaggtttctgcaattgttgcaatgaaaaaagctggcgtacctacggtacctggctgcgaccatgctgtaactatccataacgcattagctgaagcgaaagaaatcggtttcccgcttattgttaaagcggcagctggtggtggtggtcgtggtatgcgtattgttgaacgtgtagacacactacttgagtcagttcaagcggctcaacgtgatgcagaaatgtggttcggcgatgataccgtatacatggaacgcttcttacaaaaacctcgccatgtcgaagttcaagttttaggtgatggtaatggccacgcgattcatttatatgaccgtgactgttcattgcaacgtcgtcaccaaaaagtgttagaagaagctcctgctccaaatctaccggaacaagcacgtgctgatattttacaagcctgtgtacacgcatgtcagttaatgcaatatcgtggtgctggtacgtttgaattcttatttgaagatggtgaattcttcttcattgaaatgaatactcgtgttcaggttgagcaccctgtaactgaaatggtaactggtgttgacattattgaacaacaattacgtattgcagctggtttaggcttagagcttcaacaagaagatattgaagttcgtggtcatgccattgaatgtcgtatcaatgccgaagatccaacaacattcttaccttcaccaggtaaaattgaaagtttctatgcaccaggtggtgcgggtattcgtttagattctcatatctatcctggatatagcattccgccatattacgattcaatgattgcaaaattgattgctcatggtaaagatcgtgaaacttcacttgcccgcatgcgtcaagcgttagatgaaatgattcttacaggaattaaaaccaatattcctttacataaagatcttattttgcaggataaaaacttctgttctcaagcaatggacatccattaccttgaaaaacacttgttaaagcaagtggaagaagaaaagaaagctgaaactgcataa

SEQ ID NO: 43123 - DNA, 420 bp, Acinetobacter baumannii
atggatatccgcaaaattaagaaactcatcgatttaatgattgagtctgacttgcaagcgattgaagttaaagaaggtgatcaatcgatcgctttaactcgtcgcaatcctgtcgttgctgcggctggtgtagcacttccggcagctcctgttgctgaagcacctgttgcaaaaacaccacgtggagcagttgaaacttctcctatggttggtgtgttctatgctgctccaagcccaggcgaagcaccatttgtcaaagtaggtcaaacagtatctgctggtgagactttgggtattattgaagcaatgaaaatcatgaacccgattgaagcaactcaaagcggtgtgattgaagaaattttagtgaaaaatggtgaagtgatccaattcggtcaacctttattccgttatcgcgcgtaa

SEQ ID NO: 43124 - DNA, 456 bp, Acinetobacter baumannii
atgagttcgaccattttggtaattcatggaccgaatttgaatttgctgggaaaacgcgaaccagaagtatatggtcatcttaccctagacaatatcaaccgacaacttattgctcaagctgaacaagcctcaatcacactagatacttttcaaagcaactgggaaggtgccattgttgaccgtattcatcaggcacaaacagaaggcgtaaaactgattattattaaccctgctgccctcactcacacttcagttgctttacgcgatgccttacttggcgttgctatcccctttattgaagtacatttatcaaatgttcacgcacgtgaagctttcagacatcactcttatttatcagacaaagcaattggcgtgatttgtggtctaggcgcaaaaggttatagctttgcactcgattacgctattgaaaaaattcaaccatctaacccaaactag

SEQ ID NO: 43125 - DNA, 1329 bp, Acinetobacter baumannii
atgaaagatatctcacaccgtgaagtttatgcactggttgatattaataattgctatgtcagctgtgagcgtcttttcaaccctaaactcaatgataaacctgtagttgttttatctaataacgatggatgtgtggtctcacgtagtgaagaggcaaaacttttagggattaaaatgggcgtaccgtggttccaaattgaaaaagatgctttacaagcaggcgttcaagcctattcaagcaactacactttatatgccgagatgtcccgtcgtttttttgctgttctcggtgagtttttctctccagatgatttagaagcctactctatagatgaatgctttattcatctcaccccttacctccaatctatcgatatctctgactactgcaacaaagtgagaaacactctcctaaaatggttaggcttaccttgttgcattggaattggatattcaaagacacaagcaaaacttgccaatcactatgctaagaaaattaaaagttttaaaggagtatgtaatttcatcaccttagatccattaattatggaagacctcatgcaacagacatcagtcaaagaggtatggggaatcggctatcaattagtcaaacagctacaaagttatgaggtgtacacatgcctagacttaacttttgccaatgaacaccatatggcaaaggcattttctgtggtcatggcacgcactattcgtgagctaaaaggccaatcatgtattgaacttgatgatccagctattccaacgaaacggattttagcatcacgaagttttgctcaagctttatccagtattgagattattaaacaagcacttatctttcaccttaaccgggcacatcgccgtttaatgaaacaagaacaactttgtgcctgtgttcaagttatgctttatgaaaaaaccgacaaaccaccctataaaaaagccacatctcaagcaattggtcttcattatgcaacagatgatttatgcatacttactaaagcagcgatgcagcaaattgatgttttatataaagaaaataaaagttacataaaaattggagtattattttgtgctctacacgcacgtcagcaacatattgatgatttatggcagcctctggaacttattcatcaaagacaacaattgatggaaactttaggtacagtccgtaagcgctttggtagtcactatttacaagttggatatcactcacgtaatccatcttggcaaatgaaacaatgtcatcgctcaaaaaattacctaacacgctggaatgaaatgttaacgattgaagatgcttatacccccgttacacaaaatacatga

SEQ ID NO: 43126 - DNA, 1011 bp, Acinetobacter baumannii
atgagcaaattagaaaagactcaattgcaactcggctatattcctttacttgattgcatcgctttactttgggcaaagcagcaaggtttcttcgaagaagtcgatttagatgttaccttagtcaaagaagcatcatgggcaagtctacgcgaccgtttagcttttggtttattagacgctgcacattgtttatctgcaatgctccctgcagcagcaatgggtgcagaccaaattggtattgcactgcaaaccccgctcgttttaagtaaaaaccgtgcttttatcagcttaagccaaaaattaattcatcaattggctattaaagaaaacgataatgcacaaactaccgcccaaaaagtgacgagctacattaaagaagataatgctctgtcattagcccatgtatttaaacattcaatccatcattattgtttaagagaatggcttgctttggcagactctagaatagctcaaacgctcaaactcaaagcacttccgccaccgtatatggtcgaagctttagataaccatgtgattgatggtttttgtgtgggagagccttggaatactcaaggtgaacttttaggtttaagtaaaatcgtctgctcaagtcaagacattattcccaatgtggcagataaagttctcgcagtaactcaagaatgggctgaacaacatcctcaaaccttagttgcccttacaacggcaattatgaaagctcaaaaagaattgagtaatttaaaagattttgcacctatcttaaagttattggtcgagtttgggattgtccgatttcactgctctgaagaagtacatgtcgataaatattatatgattcaaaatattgtaaagtacttggttaaagaaaatgcggctccccaacctgaagatttccattggttatttcagcaaatgcaaaaatgggaaaaacttcaattagcccctgatcaaatcatagaactgagtgcacaatgcattaatctcgagtgctacaatcaagccaaactctaa

SEQ ID NO: 43127 - DNA, 591 bp, Acinetobacter baumannii
atgccaaaactcaaaatagctcttatcgatgatgatcatgcgcgggccgactatataaaaaatagtctgcttgaaaatgactttgaagtggttgcctgccttactttggaccacttaaatatttttcgtcttgaagatttacaagccgatgtcatcttgctcgatatggatcatccccatcgtgacattattgaaagttgtgtgagtagctatgacctaccaactgttctattcactaaaaattcagataaagacaccatcaaacaagctatagatgcaggcgtaacggcttatattgtagatggcatagaccccgcccgcttacataccattttagagatttcaattgagcaatataaaaaacataaaaagctcgaaggtgacttaaaagaagctcaaaccaaactggcagaccgtaaagatgttgaaaaggccaaagtgctactcatgcaactgcatggtttacctgaagacacagcttttcaattactcagaaaaaatgccatgagtcaccgtataacgattggagaaatggcacggcgtttacttgacgctcaaaaattactaaatgatcaactaaaggatgaataa

SEQ ID NO: 43128 - DNA, 270 bp, Acinetobacter baumannii
atgtctttatttttattgcataaaaaagttacatctgaattaactaatttttcagtttcagcgatgcgagccttccgtatgagggggctcgctttttttatttgtttttatgactttgctatgcattgggtgtcgtcaacgagtggaaaaaatgggttccaagcagctatacgctttgtgatgttgatacgtttctcggtagagcacaaggcaaaacaacaatgtctatttgagaacgcaagaacgcagcttaaaagcaacgtgatttga

SEQ ID NO: 43129 - DNA, 2547 bp, Acinetobacter baumannii
atgaaattggtaatgattggtcatggtatggtgggccacaaattcatcgaagccattttagaaaaagcagatgatgaactggaaatcacgattcttgcagaagaacctcgtatcgcatatgaccgcgtacatttgactgaatacttctcagggaaatcggcaaaagatttatctttagcacgttttgattttgccgatgcgtatggcattgacctgcgtttaaatactaaagcagtggcaattgatacagctgcacaaaccgtaacaacccatcatggtgatgtgattagctatgacaagttggtgctggcgactggttcatatgcatttgttccgccaattccgggtaatgaccgcgagaactgttttgtttaccgtaccattgaagacctagatgccattcgtgcagcaagtttaaaggctaaaacaggcgtagtaattggcggtggtttacttggacttgaggcagccaaagcattacgtgatttagatttagaaacacacgttgttgagtttgcaccacgtttgatggcagttcaaattgatgacttagggggcaaggttttacgccgtaaaattgaagatttaggtgtaaaagtccatacacaaaaagcgactcagtctattgagtctggtgtaaataccactcatgtgatgaagtttgccgacggtagtgaacttgaaactgatgtgattttattctctgcagggatccgcccacgtgatgagcttgcgcgcaacagtgggcttgcgattggtgagcgtggcggtattgtaattaatgattattgccaaacatcagatcaaaacatttatgccattggtgaatgtgcgctttggcaaaataaaatttatggcttggttgcaccgggctatgacatggcgcgtattgcagcaaaacacattttagatgaagagtgtcattgcttcgctggcgcagacatgagcaccaagttgaagttgatgggcgttgatgttgcttctgttggtgatgcacatgctatgaccccaggtgcattaagctatttctatgcagatgaacatgcactggtttataaaaagattgttataaatgccgacaaaaccaaattgcttggcgcggttttagtgggtgatgccaaagaatacaacgaccttttacaaatgatgctcaatggtttggctttaccggaagtgcctgaaagtttaatcatgccgggttttgagcaatcagcagcaaaatctggtggcagcggagtcgatttgctgccagacagcgcgactatttgttcatgtaacaacgtatcaaaagcagacatctgccaagcaattagcgttggttcgacctctttaggtgcattaaagaaatgcaccaaagcagcaacagcatgtggtggttgtgcaccattagtgactcaagtattgaagtcagagttacaacgtcaaggtgtgactgttaataatcacatttgcgaacacttcccgtactcgcgtcaagagttgtatcacttagttcgtgtcaatgaaatcaagacatttgatgatttaattcatcaacatggtcatggtttaggttgtgatatttgtaaaccagcggcagcaaatattttggcatcttgctggaatgatttcgtacttaagccaagtcatgcaggtctgcaagacagtaacgattactacttgggtaacattcaaaaagatggctcttactccattgtaccgcgtatggcaggtggggaagtcactccggatggcttaattgcgattggccaaattgcgaagaaatataacttgtacaccaaaattactggtggtcaacgtgttgatatgtttggtgcgcaagttcatgaacttccatttatttgggaagagttaaatgctgcgggcttcgagtctggtcatgcctatggtaagtcgttacgtacagtgaaatcttgtgtaggtagcacttggtgccgttacggagtagacaactcggttggtttggcgattgaacttgaaaaccgctacaaaggtttgcgttcaccacataaattgaaaatggcagtgtctggctgtacacgtgagtgtgcggaagcgcaaggtaaagatgtaggcgtgattgccactgaaaagggttggaacctttatgtatgtggtaacggtggtatgaaaccgcgtcatgcagaattacttgcatctgacctcgataaagaaacacttattcgttatatcgaccgtttctttatgttctacattcaaacggcagaccgtttacaacgtaccagtgtatggcgtgacaacatggaaggcggtctagactaccttaaatctgtgatcgttgatgactctcttggtttagctgccgagcttgagcgccgtatggaacacattattggtacatatcaagatgaatggcgtacagctgtcgaaaacccagaagttcgtaaacgcttccagacttatatcaatgcaggagcaaatgaacaagctgatccgcacattcaatttacaactgaacgtggtcaaatccgcccattaactgaagctgaacgttcagaagaccgcattccaatggttgaagcataa

SEQ ID NO: 43130 - DNA, 1623 bp, Acinetobacter baumannii
atgaatattgtacaagacaaaaatatgcttcctaatgatcaatggattgacgtttgtgccctcgatgatttaaccccgaacactggtgcaggagcgctagtgggcggtcaagcggttgcaatcttccgtgtggggcatgaaaaacgtgtttatgtactgagcaataaagatccgtttagccaagcgaatgtgatgagccgcgggattattggtgatttacaaggcgaacgcgtcgttgcatcaccaatttataaacaacatttcagtttagctacgggccgttgtttagaagataaagaccaaaaattggcagtttatccgagcaaaattgttgatggtcgtgtttgggtcaatgcggtgccgcaaaaaacttatattaccaatacaggtgtatcacaagacaaacttagactggtgctgatcgggaatggtttggcagggatgcgttgtctggaagatttgcttgatatggcaccagaccgttatgaagttacggtgattggtgaagaaccatggggtaactataaccgtattatgttgtctccggttttatcgggtgagaaaaccattgaagacattatgttgcatccaccgaagtggtacgacgataaaggcattaaatttattgctggtgataaagccgtaaaaattgatcgtccgcgtaaagtggtttacaccgaaaaaggccagacagttgattatgaccgtttgattctggcaacaggctcggcaccatttattccaccagttcaaggtgttgacctaaaaggggtgttaactttccgtgatatttatgacgttaataccatgattgaatactgtggttcaaaaactaatgcagtcgtgattggtggcggtttgctgggtttagaagctgcctatggattaaagcaacgtggtatgaatgtcacagttctacatttgatggaccgtattatggaacgtcaacttgatgggcgtgcgagtcaattacttcgtcatagcattgagcaaaaaggcattcaaatcattaccgaagccaataccgaagcgttaatcggtgatgaaaacggtcatgtcaaacaaatccgtttaaaagatggcacagtgttagatgctgaccttgtggtgtttgctgtaggtatccgtccgaatattgctttggcgcaaagtgcaggattacgttgtaaccgtggtgtattggtgaatgacaccatgcaaacatttgacccaagtatttatgccgtgggtgagtgtatcgaacaccgtggtcaaactttcggtttggttgaaccactgtggggccaagcttttatttgcgcgacccatttagcagagcacggcagcttaacttttaaagcgccaaccgtaccgactcagttaaaggtgagtggagtcgatgtattctctgcgggcaattttgaaccgaaagatgattatgaagacattattctgaacgatgaaaaacgccagatttataaacgcattatcattcaaaacgatcgggtaatcggtgcagtactgttcggtgatactgaagatggcatgtggtatgcagagttaattgcagatcaaactcctgtttcttcatttagaaataaactgctatttggtcgagattttgcattaaaaaatgcaggctaa

SEQ ID NO: 43131 - DNA, 2781 bp, Acinetobacter baumannii
atgaatagtattccaagcgttgaaatcgatagctccgaccatgttgcaaaaacaactaaaacaacatgtccatattgcggtgtaggttgtggtgttagtgtaaacgttcaacaaaaacctcaaggacctgtggtgcaagttgagggggatgctgagcatccttccaactttggacgcttatgtattaaaggtagccgacttgcggatactttggggttagaaacacgtctacttcaaccgatgtttggtcgtaagccacatcggactgtaaccacatgggatgcagcaatcaataaaattgccgataaattccagtcttgtatcgacaaatatggtcgtgacagtattgcattttatgtttcaggtcagcttttgacagaagactattatgtggtgaacaagtttgtaaaaggctatttgggcactgcaaatatcgataccaactcacgtctttgtatgtcatctgcagtggcaggtcacaaacgtagtttcggtgaagaccttgtgccagcaagttatgaagattttgaacattcagacatggtggttttggttggctccaataccgcatggtgccatcctgtgctgtatcagcggattatgcaggctaaaagccacaatccagatatgtttgttgtggtgattgatccacgttttaccagtacttgtgaacaagcggatttacatttaccgattttgccgggtcaagatgtcgcattatttaatggcttatttcaatatttatatggaaatggtcatgccgatcaggcctttatagatacttataccgaaggtctgcaagatgttttggaaagcagtgagccagaaactgatattgaatatgtcgcaaagcgtacgggaattgcactcgataagttgcaacagttttttgagaaatttgctcaaactgaaaaaatcattaccctattttcaatgggtgtgaatcaatcaagtcagggcgtgaataaagccaacagcattattaactgtcacttactaacaggcaaaattggaaagctcggcgctgcaccattttcaatgacaggccagcccaatgctatggggggtcgagaagtgggtggcttagccaacatgctagcggcacacatggacttagataatccactacatcaaaaagttgttcaaactttctgggacagtccattcattgcaaatcaagcgggcttaaaagcagttgatttgttccgtgccgttgaagctggaaaaattaaagccatctggattatggcaaccaatccggtggtaagtttaccagatgccgatcaagttaaacgtgctttagagaagtgcgagttagtcgtcgtgtcagatatctgtgccgataccgatactacagcttacgccgatattttgcttccagctttaggttggggtgaaaaagatggaactgttactaactctgagcgtcgtatttcacgtcaacgtgcttttttacctgcgccgggtgaagcaaaggcggattggtggtcagtgagtcaagttgcgaaaaaattaggctttaaaggttttgactttaatagtgctgttgatatttttaatgaacatgcggctttgtcagcacaagataatgcgaacatcaatacacgtgagcaaactgatgcgttccgttatttcaacttaaaaggtttaatgaacctaagtactgctgagtacgatgctctgcaaccagtacaatggccagtctggagtaaaaaccaggatgctaaagctgttcaacaactgtttggcaagggccagtttagtcacaaaaacaccaaggcaaaactaattccgactgttgctattaatccggtacatgcaatttcagaagattatccgctcattttgaacacggggcgtattcgtgatcaatggcataccatgacccgtactggtttgtcgccaaatttaaccagtcatcgtgctgaaccattctgtgagattcatccgagtgatgcattgaaatttggtgtgcgtgatcaaggcttggtagaagttcgttcgaaatggggcagttgtgtactacgtgtgacattctcgtcgggagtacgtcgtgggcaaatttttgcgccgattcactggactgaacaagttgcgtccgatgctcgcattggtaaagtcgtgaatccagaagtcgatgctatttcaggtgagcccgagttcaaacatacgcctgtaactattcagccgttctataccacttggcaaggtgtgctttatatacgtgaaggatacgattcgcatattcaagaatcgctgcatcactgtgcatggtggactaaagtcaaaatggtgaaaaccaatcgctatgaacttgcagaccgccaaacttttcatgatactcaaaagaatctgaaaagctttttgccatttgccgatgaaacctttgaatggttaagcatagaagatatttcttcacaactgagccatagtattattttgaaagatggcattgtaattgcaagtctatatattgcaccgccagatttattgccagaccgtgattgggtagcgagtctgtttaaacgagaacgtttgagcgccttgcaccgaaaagctttactagcgggtatgccaatgtcggctaccaataatgatgggcctttggtgtgtagttgttttaaagtaggtaagaataaaattatcgaagcaataaaaacacaaaacattatccatgaaaaacaggtcactgcttgtttaaaagctggtggcaattgtggttcatgtttacctgagattcgtggcttgattaaagtttgccaacaagaggtggaagtgtga

SEQ ID NO: 43132 - DNA, 630 bp, Acinetobacter baumannii
gtgaataagggatatcccgtaactgatttggtcattttggcgggtggacaagcccgccgtatgaatggtttaaataagctgttgcagcaattcgatggcgatacgcaacttcttaagattcatcaaaagctaaaatcttcggtatctgaaatttgggtgaatagtcatcgagactattcaatctatcaaagtattgtgcccgatattaaatgttttcaagatgatgcttccggttttttcggcccgcttatggggatgaaaagtgcatggtcacatgtaaaggcagattatgttttgtttattccttgtgatgtgacctacatacccacgcaagtcgttgcgaaattacacagtgcacttcgcaaaaataaacaggctcaggcagcttacgtttcaattaacggagatgctttatacccattttgtttgttaaaacgtgaaagtctagaggttttagagcagcaaattgataagcaacaattgagtttaaaaaattgctttaaacttttacatgcacaagtagccatttttcaaaagcagaacttatttttccatagcattaattctttagatgaacttcaacaatacaaacaaattaaagcatttaaagagattttttcgacaaattag

SEQ ID NO: 43133 - DNA, 2274 bp, Acinetobacter baumannii
atgatggacgcagctcagcaaagtaaaacagatgtgaccgcatgtattttatgttcaagaaactgcggtttgagcgtagaaattaaagataaccaatttgtcaaaattaaaggtaatcctgagcatccattttctcaaggttacatttgccaaaaagccgcaagattacagcattaccagaaacatgcagaccgtttgaccgcacctttaaaacgccaaccagatggttcatttaaagaaattagttgggatgtagcgatacaagaaattgccgatcaattggttcagattagagataaatttggtggtactgcttttgcttcagttgggggcggtggtcagggtaaccacctcggcgcagcttatggccgacaacttttattggctatgaaaagttattatgcatataactcacttgcccaagaaaaaacaggcgatttctggctcaatggacgtttattcggtagtcaggcctgccatactacagaagatgttgaatacgcagattacgtactttttattggaacgaacccgtttcaggcacatggtattcccaacgcacgagacaccctaaaacatattaagaaagatccgaaccgaaccatggtggtgttcgacccgcgtgttaccgaaacggcaaaacaagcagacattcacttgcagctaaaaccgggaacagatgcttttttaatgtcggccatgattgcaatcattattaaagaaaagctttatgatgcagcatttattgagcagcatacacatgggtttgaagaagtaaaagctgcatttaaccatgtcccgattgaagactatattgctaaagctgatgtacctgtcgatttgatttatcaggttgttcgagatttttcaaaggcaaaaagaggctgtgtacgtatcgatttaggtattcaacatactttgaatacaacattaaatggttatttagaaaagcttttatacttactgacagggaactttggaaaacagggtaccaataatttgcataccatgtttattccaattttgaccgatacggatgaaagaaaaccaaaatatcgacgtagtgtttatcataaaatgttcccgatttccgggtttttcccgcctaatattttacccgatgaaatcctaaaagcaggggaaaagcgaattcgtgctgtgtttgtagatagttgtaatccgttattaacttaccctgacacacctgcctttgaggaagcctttaaagccttagatttgttggtggtagttgatgttgcgatgacagaaaccgcgagactcgccgactatattttgcctgctcatactcagtttgaaaaatgggaatttactggttttaacttggaatttcctaagaatggttttcacctgcgtcatcccgtattggctgctcaagcaaacactttaccggaagccgaaatttatactcgattactggaagcaatgaatgctattccgaagaattttccaattctagaaaaaatagctgcggtcgactcgaaaaaaaccgcctacttaccctacttgtcggcgctaggacttaccttggcacgccataaaaaatatatcccttttgctgcctctatcatttatcgaactcttggcaaacgacttggcaattctgcagattcagttgcttttttattgccgctatctattcaatatgctgttttacataccaaagcagtacgccgtgcaggttataaaggtaatccgttaacacaaggtgtcaaactatttgagcagatattaaagcaacgttcaggtatggttttatcgcaacatgaatatgacgaagtctggaaactggtagcttataaagataagaaaatacgtcttgtaattcccgagatgttaagtgaactcgcaagcttgaaaagccataacgttaatgttgaagagtttcctttcatccttttgtcaggtgaacgccgtagttacaatgccaaccaaatttaccgtgaccctgcttggcgaaaagtagatgcagaaggtgcactgcgaattcatcctgaagatgcaagacacttaaatgtagatgcaggagggcagcttaaatgtatctcagcgcatggagaaattcaggtagctattgagttggatgatgggatgagaagaggtgtcgtatcacttccacacggctatggtatgcgatttcaaaatggagaaccgattggaccacaattaaacttacttatttctgctgaacattgtgatccattgtcgaaaacgccgtaccataaatatgtacccatccgtttagaaaagtgttag

SEQ ID NO: 43134 - DNA, 1035 bp, Acinetobacter baumannii
atgatgaaacaatatcactctgaaactgcgcaaagccttctgcaagatcaatatgggcgtatcaagcgtaagttacgaatttctgtaactgatcgctgtaattttaagtgtgtatattgcatgcctgagcatccagaatggttaaataaacaagatttgcttagttttgaagcgctctttcaattttgtcattttatggtgcagcaaggtatcgaaagtattcgcattacgggtggtgaaccattaatgcgtcaaggtattgttcatttcattcgagatctacagtctttaaaaagtttaggtttaaaacgtatatcgatgactaccaatggtcattaccttgctaaacatgccaagcagctaaaagaagctggattagatgatttaaacattagtttagatagtttagatcctgttcagtttaaagagttgaccaagaaaaaattggagcctgttttagaggggatacaagctgcaaaagaagtaggattaccttttaaaattaactgcgtgttaatgaaagatagaaatgatgatcaaatcttacctatggtgaaatggtcaattgctcatcatattcctttgcgttttatcgagtttatgccgcttgatggtgatgcactttggtcaaataaagatgtggtaagtgaggctgaaattttacaggtattgcaacagtattattcggtacaagtcatcgagcagcaacatgagccagcgcgtcaatatctaattaacggtagctaccatttaggaattatttccacaattacgcattcattttgccaccaatgtgaccgtatacggcttaccgcaaaaggcgaactatataactgtttatttgcgccgcaaggcttaaatattaagcctcagcttcaaacgttggtaagcaaacaacatactccagaatatggtgtgtatatccaaaatttaaagaatttggttcatccttatatctggcataaagccaaaggtttccatgccttacaacatcaacaaacccgtaaaatcagcatgcatatgcttgggggataa

SEQ ID NO: 43135 - DNA, 255 bp, Acinetobacter baumannii
atgcaacaatctatccaaattaaagtcgaagcatttggtgcaattgaaaaattgcttcctgaaaatcttttgttagtttgtcctagccatagtctagttaaagatgtattagatgaaattgttttattgcatccggaatctacaaaagccatggaaaaatgtgcatgtgcgattggtgataatgtcataaccagacaaactgtcttaagtgagccatgcactttggttttattatcacccgttgccggaggatga

SEQ ID NO: 43136 - DNA, 489 bp, Acinetobacter baumannii
atgaaagagttcgcaagaatacaagagcaggctttaagcttggatacttttgatccgattcagtcttttcctgaatgtggcggtatcgatatttttatgggtacggttcgtaatcatcacgaaggtaaagcggtaaaggcgctgaaatatacatcgtataaaccgcttgcagaaaaaatgatacgtgaaattgaactagaaattgagaaaaagtatcaggtatcttatgtgcgagtggttcatcgaattggatatctggatgtcggtgaaacagccattattgcgattgcgtatgcagcccatcgccgtgaagcttttcaggcatgtgaggaagcggtcgaacgggtaaagcatgaagtacctgtctttaaagaagagttttttacagatggcacaagtcattatgtagagggctgttgtattcgtaaggatgcaccgcacgaccacaaacatcaccatcatcatgccggccatgagcactcacactga

SEQ ID NO: 43137 - DNA, 924 bp, Acinetobacter baumannii
atgaaaaacgtaggaatgaagccggaaagttatcgtgttgccgaagcacaagcgattttatatgcaccaccgcactgtattgaattattaagacaaggaaacacggaaaaaggtgatgcattaaaaacagcacgtgttgcaggaattttggcagcaaaacgaactgatgagctgattccactatgtcatccgctaccgatttatcgggcagatgtagaatatgaattggaacatgactttgtaaaaattattgctgtcgttgagaccattggaccaactggtgtagaaatggaagctttgacggcggcaagccttgcaggtttaactatttacgatatgttaaagcctcattgtgaaccagaagaactctggatggatcaatgtaaactacttaagaaaaaaggcggaaaatcccattttaaacgggtattacgtcagcctgtttcggctgcggttattgtattgtcagatactgtagcatcgggtagaaagccagatacggccggaaaatctgtagttgaaactttaactgaagctggatttgatccgatccattaccaaattttgcctgatgaagcagatgatctcaaagaattggtcctagaactcaccaaatcgtatgcttgtattatgacggtgggtggaacaggaattggtaagcgtgacattacagttgatacgctagagcctcttttagaacgtaaattagatggcttaatggaagcagctcgctcatttggacaaaaacgcacgccatacgcggctatgtcacgcggagtagcagggtttattgaccgttctttagttgtgacgttaccgggaagccgtggtggagcaagcgaatcaatggccgctattttacctgcattagtccatatttttgatgtttgccgtgatttaccgcatccaggaggctatgaataa

SEQ ID NO: 43138 - DNA, 1236 bp, Acinetobacter baumannii
atgtcaggttgtggtgctgagcgtggattaatcggtatagatgaagcgctagatttagttattaataagcctaaaaacttaagctctattcaaaagactctaataaatagcctaagtagttatcttgccaaaaatatttactctgaaattaatttaccaagtttttctcaaagtgcggtagacggttatgcactttgtagccatgcagaagatttgaataatcaaaagttccaagtcacaggtgagattcgtgccggaagcgagagtcatgacatactcggtgaaggtcaggcgattcgtatatttacgggcggcaaaattcctgaagggacaacgcatgtagcacggcaagaaatcgtatcggttatttcggctcaagaaatttgtttaacggaatatatacgccctcaagccgatatccgctttaccggagaagaaatccagcaagggcagttacttgctcaagtaggacagtttctaaatattggaagcttggctgctttaagtatggcaggtgtacaagaacttactgtttatcgtagaccaaaagttgcagttttagtcacaggtgatgaagttgctcaaacggcagaagatttaatcgatggaaaagtctttgatgcaaatggtccattactaaaagcttggtttgaagattatggtttagatgttgaactcattcatgtggcagatgaagcagatcaggtcacccattactttaaccaactaaaagacagctatgatgttgttataacgactggcggagtttcggtaggagactacgactttgttcggccctgtgctttcgaagttggatttgaacaaatcttttggaaagttaaacaaaaaccgggtaaacctttattctttgccgaataccataattcacaagctatccattcttgctatttgctaggtttgccgggcaatccggctgcggtatatgtcgcaatgcaagtttacggtaaatctttgcttgatgcattgcagggcaatagacatggaccagaatggtttactgcaattttagagcatgatttaaaagaagatgcacgtgagcgttttttacgaatgtatgcttattttgatgcaggacaacttaaagtaaaaagtttggccaagcagcagtctcatatgctgagtaatcttatgcaagccaatagtctagtccgtattcctgcgaatacaaaactagcatcaggaacggtgctaaagggaatctttatttcaaattaa

SEQ ID NO: 43139 - DNA, 483 bp, Acinetobacter baumannii
atgaaatgggatgacatcggtgatcagccttgttctgttgcccgtatgctatcagtgattggtgatcgatggacgatgctaatattacgtaatgcttttatgggaattcgtcgttttgatgactttcaaaaatcattaggtgtcactcgtcatgtcctttctgatcgcttaaaacggttggttgaatacgaaattttagtgaaagcgccttattttgaccgtcaggaacgctttgaatatcgtctcacggataaaggctttgagctttatccaattatcttatctatggcgaactgggcagataaatggatggaccaaggtttaggtaaacctttggaatatcgtcacaaagcatgtggtcataagtttgaacctgttatggtgtgttcagtatgtcgtgaaccattacatgcaaaacaagttcaggtttcggctgggccgggctattttgcttatatggaacaaaagcaaaaacaggcttaa

SEQ ID NO: 43140 - DNA, 1440 bp, Acinetobacter baumannii
atgtataaacaaacagtacagttagagataaatagtgtgaaccagaccaaaacaaaaatcgagcttgttatttcacagattgaacaacaaattaagaatcgttctttaactccaggaactcgacttccctctgtacgtaaactagccaaagatttaggcttttctgtttctaccattgtcgaagcttatgagcgattaattgccctaggtaaaattgaatcacgtagtggttccggcttttatgtagtggcaccacttgcacctttagccttaagtgaattaggacccaaattagatcgctctatagatccgttatggatttcacgccagtctttagaagcagaacctaatgcgtttaaacccggttgtggttggttaccaaatgattggatgccacttgaaagtatccgcaaagcattaaggtcagccacacgtagcgaagacgatagtttattgggttattcttcaccgttggggctgtccgcattaagagatctactggctagacgggcacaaagtaaaggtatagaggcaaaccttaatcaagtcctactaaccgattcaggcactcaagctattgatctggtttgtcgttttttacttaaaccagatgatgtagtcctaattgatgacccttgctactttaactttcatgctctacttaaagttcatcaagttaaagttgttggtattccctacactccaaatggcccggacttagaggcatttaaagaagctatcgagagctataaccctcggctttatattacaaattccggaatacacaatccaactggagcaacgctctcactctcgacagctcatcaattattaaagttgattgatcagtctaatttaattgtgattgaagacgatatcttctcagattttgaatatactcccgctccacgacttgcagccctagacaacctttcacgcgtgatttttattggaagtttttctaaaacgctctctgcttctattcgctgcggctatattattgcgaaaccagaatggattgatcagattgccgatttaaaaatagccaccagtttttctcacaatggactctcagccaagattttacacacagctttaaccgatggttcataccgtaagcatctagatttattaaaagttcgtttagctcaagccatgcaagaaacaatcgcgaagcttaaatcgattgggatagaaccgtggattgagcccaaggccggaatttttgtgtggtgtcgtctaccggaaggtgtagatgcagcgaagattgcccgtttttgcctgaatcggcaagtgattctcgccccgggtaatgcctttagccaagcacaatcggcaggtcaatttatccgttttaatattacacaatcaaatcatgattatatttataagacccttgcagaagcacttctacaagagtcattagagaaacaagtttaa

SEQ ID NO: 43141 - DNA, 864 bp, Acinetobacter baumannii
atgcaaaagtttatgaacggttgggtgaatggttttattggggttgcaatttttgccggttcattaccggctacccgtgttgcggtaacaggttttgagcctggttttctaacagcagcaagagctgtcattgcaggagttttgggtttaattcttatctttttgcttaaggaaaaaaagcctgctaaacaagattggtggccactcgctattgtggctttaggcgttgtagttgggtttcccttatttactgcgcttgctctacagtatatgaacgcagcccactcgattgtctttgttagccttctaccgctcgctactgccatatttgcagtagtgagaggtggagaaaaaccaaatttatttttttggatatttgcaattttaggcagtttggttgtttttacctatatgtttttcttatcgggtgaagcttcttttggcatcggcgatttatacatgcttattgcaattattttgtgtggatttggctatgccgaaggcggagtactttcgaaaaaaataggtggatggcaggtgatctgttgggcgcttattttagctttaccgattatgctgcttgctactcttttttatatgcccgtttcctttcaagatgtatctacatcagcggtagcaggactggtttatgtatctttatttagtatgctcatcgggttctttttttggtacaaaggacttgcacaaggtggtattgctgcaattagccagctacagcttttacagcctttaatgggacttgcgattgccgcacttttattacatgaacacgtaagttggtcgatgttaatggtaacggcagtaacaattttatgtgtcgctgccgctaaaaaattcgcataa

SEQ ID NO: 43142 - DNA, 312 bp, Acinetobacter baumannii
atgaatttagaattagatcaagatggtcatttagtcgactatacgatttggaatcccgaagtagcacaggaactcgccaaatctctcgatcttgaattaacagattggcattttgaagttttagctgcggttcgccaattttatcagcaatttgggcattctcctgcaacacgtcctttgattaagtttttaatgaaaaccgtcagtccagatattaataatgctgttttacagcaaaaatttaataccggtttagttgctcgccatctcagtcgcttggcaggtattcctaaaccggcaaattgtttatag

SEQ ID NO: 43143 - DNA, 285 bp, Acinetobacter baumannii
atgacgcaatcaactctttatcttgtgcaagcttcttatcaccatactcctcgcattattgaagaacttgcaaagctatttcataaagatgatcaaattgtttttatgggtgactcaactgctcaactttcggtaaatatttgtcagcagtttggctcagtttcttgtttgtctcatgaaaaagatttaattgatgcagaaaccttggctcaggttaaggtattgaactatgatcagtttgcggatctggttttacaatttaatcgatgcatttctttgaaataa

SEQ ID NO: 43144 - DNA, 351 bp, Acinetobacter baumannii
gtgaaaactgtactcgttattttgacccaagccaatctaaccagcctacaagtcaatgaaagcctcgccgctactatggttttagcaacctttggctcaccagtcaaagtattattaaaagatgcggctcttagtcttttacaaaatgaaggtaacttcgaccaattgcagcatgcttttaaaattgcttcaaacatggtggatagctttgagttttatgacttaagtccaatccttattgaagccaaaaacaaacagcatccatttgttcaaaacagcgagcaggaactagaatttgttcagttagatactgaactcatccggtctttcgatcatgtcttatattggtag

SEQ ID NO: 43145 - DNA, 369 bp, Acinetobacter baumannii
atgagtacattactactaataacctctgctcctacttcgatccatgcttggcatgcgctgggcctagctcaggcactcaaaagtaaaaatgaagactttcgtgtattcttttaccaagatggcgttcaagttgcgaatgattttcagtgggttcctgacgaccagcgtaatttaacgcatgaatggcaaaagctctcgatcagacttcctgtttgcgttagcgctgctcttgcacgcgggattaccgatgcagaaaatgcgagtcgccatcaacttagtcatcacaacctagcgaacaactttgagttggttggtctaggtgaacttgctgatgcagtacagtcagcctctcgtcttcttcaattttaa

SEQ ID NO: 43146 - DNA, 1008 bp, Acinetobacter baumannii
atgattttagtgacaggtggtttaggctttatcggttcacatattgcattgagtctcatggctcaaggccaagaagtggttcttgtcgataatttggctaactcgaccttgcaaacgcttgagcggttagaatacatctctggtatgtacgttccgtttgttaaacttgatgtacgtaacacgcctgcattgaacaaagtatttgaacagtactcaattgatgcagtcattcatacggctggttttaaatctattgaagagtctaatttaaaaccgcttgaatattataatgataatgtcagttgtatcatgagcctattgcgtgcaatgcaacgtacaggcgtccgtcattttattcatttatctagtttggcagtctatggaaaatctggttcacagttaagcgaaacagatgatttcaactatgcttatcctaacccttatattaagtcgcaacagatgattgaagaaatcatctgtgatacttacaaaattgatcatgaatggaaaattgcaattttacgtctatcaaatattgtaggtgcttttgagcatggcgtattaggcgagtatgtagcacagctccctaaaaatattgtaccgcttgccatgcaagttgcagcgatgcaacgtgatttaattgagttacaggatcagtcttctaccgaggaccataccgtagaacgtagctttttacatgtattagatgtatgtgaggcagtaagctcaactttacattggttacgtgatcaaagccattgctgtgaagcttttaatattgctcatgagcaagtgcattcgattcgtcaattattagatgaaatttcacaggttacccaagctgaaattccgacacaatctgcgatttataagcatgaagagttagcgcagattggtgcaaatataggaaaagcaaaaactttattacaatgggcacctaagcgaactttaaaacaaatgattgaagatgaatggagattttatcaaaatacattaaatggaagataa

SEQ ID NO: 43147 - DNA, 1395 bp, Acinetobacter baumannii
atgcaaacacgaattgaacatgacacaatgggtgagattgaagttccaaatgaagcgctgtggggtgcacaaactcaacgtagcttacagaactttaaaatcgggcaggagcgtttaccccgtgccatgattcgagcgatgggcttggtaaaaaaagcagcggcaataaccaatgcagagttaggccagttaccacaagatttgagccagtatattgtgggggcagctgaggaagtgattgcagggaaatgggactctcagtttccactcgtggtttggcaaacaggttcaggtacgcaaagtaacatgaactgtaatgaagtgattgcaaatattgcaaatcaaaagctaggccaagcgcttggagcacaaaagccggtacatccgaacgatcatgttaaccgcgcacaatctactaatgactcattcccaacggctattcatgttgcggcaagtttgcaaattaatgaattactgattccagccgtagaacagcttaaagcgactttgcaaaaaaagtcagatgaatttcaagatattgttaaaattggccgtacccatttacaagatgcgacgccactgacacttggtcaagagtttagcggttatgtttctcagctcgagcatggtttagtacgtttacaacaagctttaagtggcctgtatgagttgccattaggtggcacagcggtaggaactgggttaaatgctcatcctgactatgctgttaaggcggcagctcagcttgcagctttaacgggtttgccatttgttaccgctcctaataaatttgaagcacttgcaggacgtgatgctgctgtttttgcatcaggtgcattaaaaacactagcggtaagcttaaacaagattgccaatgatattcgttggttagcaagtggtccacgttgcggcttcggcgaaatccgtattcctgaaaatgaacctggttctagcattatgccaggtaaagtgaacccgactcaaagtgaagcaatgaccatggttgttgctcaagtgcttggcaacgataccactattaatgtcgctggtgcttcgggtaatttcgagctcaatgtatttatgccagtaattgcttataacttactgcaatctattcagttgcttggtgatgcatgtaatagttttaatgatcactgtgcagtagggattgagccaaatcgtgagaaaattgatcatttcttgcataattctcttatgttagtcacggctctaaatccggttattggttatgaaaactctgcaaaagtggcgaaaactgcttataaagagaataaaactttaaaacaagttgctgtagagctaggacttgttacagcagagcaatttgatgaagtggttaaacctgaaaaaatggtttcgccaaatagtaaataa

SEQ ID NO: 43148 - DNA, 297 bp, Acinetobacter baumannii
atgaagattcgcgcttcacgtacctattcaacttattcaaataattattttatttctaaagagtatgaatgcagtgttattccggtaaaaggaatgtgctttactgatcttggtttgaccgaaaatggtgtgattcagccagtagaaattaatgaggtcactatagatccagcatctaattcttatcatattcttttagctaaagactcacatgaatatacaaaagaagaattaaaaagaaagtttgaagagatgaaagctaatggctgggaatatatagaagatctattggtatag

SEQ ID NO: 43149 - DNA, 462 bp, Acinetobacter baumannii
atgaatagattacaattaattttattagttttaagtactgctactttttctccttttgtattttctgaaacaactatctccccaaccaaatatgaattttatggacaagagtcaaaacgccataagagtatgcttgaggtaaataatagttcagatcataaaattaacgaatcacaacacaatcctttccgctctgattcaaacaaacaaaacgtagatttttttgagattgcaaaacactaccaagaagagcaaccacaaaacacttattctcactctcctgaccatactgtaaatatgagtgatcatgaacgaagtctctattaccttagaagtcatgacaatatgggccttcaaagagatgttcgttatcaacaacatagatcattaaaacaacaatatgataaaggtgtcatttctcgtgatgaatataaaaataaagtttacaaaatctcaagataa

SEQ ID NO: 43150 - DNA, 225 bp, Acinetobacter baumannii
atgaagagattgttacttgtattggctacaggatttggtttagatgggtgtgcatcgttaacacaaaaagcagatgaaaattatattactaaatcgcctgttactccggtcaatactgcctttaatggcactaaagtacttgaacatggaatttttactgagcaggatattgctgatatgcctgaacactcaagtataaattcacgttataaaatatctttttaa

SEQ ID NO: 43151 - DNA, 375 bp, Acinetobacter baumannii
atgaaaaacgtcattattttaacttctatattgttattaagtgggtgcacaattaattctaagttattatcaccagcaaaaagtgatgatgacaaaattattgtagaagcagaaaagtacaagcaacaatatcaaaaaaagatctttaaaatttggaatgttccgccttcttcagtgggaatgagtgctagcgttaaagtctttttaagtgatactggtgagattgagcaaattatttttctagataaagaagaccaaaagtttaagtcgagtattgaaaaggcgatatggcgtgcaagtccctttgttttaccttctaatccggaagttagaaaacaagtaagaaagttcaatattaaatttactgcaaagtaa

SEQ ID NO: 43152 - DNA, 768 bp, Acinetobacter baumannii
atgttgaatcaacatgagataaatttaaaacagtatcaaaataaatctttaagttatttgaatagcaccgctcactctgaaggggtcgagtttgataaattcattaaagaaattgatgaatatccaaatgccgttgttttagatttaggttgcggtggtggccatgtagcttataacgttgctcgccatgcagatctggtttttgcttatgatttatctcatgaaatgctcgatacagtttcaaaagctgccaatgctcgaaaaataaaaaatatttttgtacaacaaggcattgctgaagatatgccttttactgatgaacagtttgatgtaattattagtcgatattctgcccatcattggcagcatgtcccaacagcaatgaaagaaataaatcgtgtattaaagccaaatggcactgttatttttgttgatattattagctcaagtttccctattttagatacatttttacagactatagaagtgattcgagaccctagtcatgtacgaaattacagtattaaagactgggttcactttattgaagatgctgggtttgaattaacaactttagagaaacaaaccctcaaactagattttgatagttgggtacagcgcatgaagacacctgaagatcaaataaaaacgcttaaatatctccaagaaaatgcagcagatgttgttaaaaagtattttaatattcaaaaagatggaagttttgaaagtaaggtcgggtactttgtatttaaaaaactatccttctaa

SEQ ID NO: 43153 - DNA, 1086 bp, Acinetobacter baumannii
atgaaacgcttaaagtcccttgtctcagaacaaagtcaaatcaagcacctctctacccgactatttcgtcctcaaacattagtattgtcacaaagcactccatttgaagtgattggtgaattcaaccaaacccgtgttcgttattatgcagctacagaaaagagctttagagaaccattaatatttgtggcacctttagccattaatatggcgatttatgatttatatccatatcgttctcttatcaaatacttccaaaatgcaggttttgacgtataccttgtcgattgggggcgtttaggctttaaagatagacatcttaactttttatcgtttattgaagattttattcctaaagctatagagtttgttcgcacacattcaggcagtgatcaaatttctctacacggatggagtatggctggcatattcgttactttatatacagcgcataatcatccaaattatgtcaaaaaccttatagttttaggtagcccaatcaatagctatgcttctggttatattggaaaactctaccgaaccataaacaaaactattgcccgcaataaaaagcttcaggaacgtatttactcaggtttaccgaagcgtttaattcatactccgggcattttaaattctttaggctttaaaattcttgaccctaaaggctggttcgatggtcatattcaattacttaagaaccttaatgaccttcagttcgtacaagaacatgccacattaagcagttttttaaacaatatgattgattatccgggaggtattaatcaggacatgttatttaatgtttggctgcaaaatccattaagacaaggttctattcagttaaaagataaaaaaatcgaattaaaaaatatcgactgttcactcttagttggagctggtcgtagtgatcaattagtgacggcagatgcagctcagccattaagtcagttaaccagtagccaagatgttacatttactcttattcctggcggtcatttaggtctaatgtcaagccaagcaagtgcacaggaattctggccaaagctagcaacatggctgagtgagcgttcaacaaaaatctaa

SEQ ID NO: 43154 - DNA, 1188 bp, Acinetobacter baumannii
atgaaccagtctgataatttagaataccaacttgatactttagccattcgtaccggacacactcgtagttttgaaggtgagcatggcgaaccaatttttttgacttcatcttttgtatatgaaaacgctgctgaagcagctgcaaaattttctggtcaggttcaaggaaatatctattctcgttttactaatccgactgtatcgatgttcgaaaaacgtttagccgctttagatggggctgaacgtgccgtggctacaagctcaggtatgggagcaattctatcgattgctatggcgtatctaaaagcaggtgatcatgttatttgctcaagagcagtttttggttctattgttgctttatttgaaaaatacattgccaagtttggtgtagatatcacatttgttgatctacgcgatttagatgcatggaaaaatgcagtacgtccagaaactaaactattatttgttgagtcaccgtctaatccattagctgaaatcgcagatatccaagcgcttgcagatattgcacatgccaatggcgcattacttgctgttgacaatagtttctgtacacctgttttacaacaaccgttaaaattgggtgcagatctcgtgatttactctgcgactaaatatttagatggccaaggccgtgcgttaggtggtgcagtggtaggtaaccatcaactcctagaagaagtttttagcgtagtgcgtactttagggccatctatgagtccgtttaatgcatggattttcttaaaaggattagaaactttacgtttacgtatgaaagcgcactgtgaaaatgctcaaaaacttgccgagtggttgtctacccatgaaaaagtagaaaaggtctattatggcgggcttccaactcatgaaggtcatgaacttgcagcaaaacagcaaaatggctttggcgggattgtttcttttgtagttaaaggtggacgtgaaggcgcgtggaaggtcattgataacaccaaatttatttctatcacgggtaatttaggtgatgtgaaatcaacaattacacatcctgctacaaccacacacggcaaactttctgctgaagcaaaacaagctgctggtattcaagaaggcttaatccgcgtttcggttggcttagaagatattaacgatattattggtgatatctcacgtggattagatttgatctaa

SEQ ID NO: 43155 - DNA, 237 bp, Acinetobacter baumannii
atgcttaagcctataattattttagttgctataggggcaattggtttggttggatacaaagtatttgcccaaaaggatgaaccgactcaaattaacgaaactgttttattgattaatgatgcaaataaatcagttgaagaagctgatcatacaatagaaaaagcgaatgcctcttttcagaaaattcctttaaatgaatataaacccgacaatagcaccctccaagcttcgcagtag

SEQ ID NO: 43156 - DNA, 330 bp, Acinetobacter baumannii
atgaatatcaatatgctcatgcagcaagcgcagcgcatgcaaaaagatatggaatcaaatataaaaaaggctaaagaagagcttgctcaaactgaagtacacgctgaagcgggcggtggtttagttaaagtaacaatgactggccgttatatcgtaaaacgtatcgaaattaatccagaattacttcaagacgaaccagacatgattgaagatttaatcgcagctgcggtgaatgatgctgtgcgtcaagctgaagtagtttctgaagaaaaaatgcaaaaagctaactcgggtatgggtttacctcctggtttagcaggcatgttctaa

SEQ ID NO: 43157 - DNA, 597 bp, Acinetobacter baumannii
gtgtttagtgatagatttgaacaactcgttcaagctttacgtattttgcctagcgttggaccgaagtcggcccaacgtatggctttacatcttttgatgaaaaatcgtgaaggtgcatttgctttagcacatgctctacatgaagcatcaagttatattcatgaatgtagtgtttgccactctttaacagagcacgaaatttgtgatatttgcgcttcaacagaaagagatgaccaattgctttgtgtagttgagtctccggcagatgttatggcaatcgagcaaagtggtagttttcgtggcaaataccatgtgttgggtgggcacctttctccattagatggaatcgggccagaagaaataggtattccttatctaatccaacggttaagccaaggtacgatcgaagaagtcattttggcaactaatgctactgtggaaggtcaggcgacagcgcattatttggttgaagcgacgaagcatttacctattcatatgacacgtattgctcaaggcgtaccacaaggtggcgagcttgaatatgtggatagtcataccttaagtcaggctgttcataaccgtatgcgtatgaaataa

SEQ ID NO: 43158 - DNA, 1125 bp, Acinetobacter baumannii
atgtttcagtttatccaacagcaaaccgaattggttgatgttcttcaacaaatggatcaatgttcaacttatgggcttgatacagaatttattaaggttgataccctttggcctaaacttggagtatgtcaagtcaatgtcaatggaaatgtatatttgctggatggagtgtctttagatttaagcgagttttggaaaaaaatctttcttgctcaacaaaatatttttcatgcatgtggtgaagatattgatttaatctatcactatgccgatgaacaaaatctattaaatgtttttgatactcaagttggattatcctttttgggacatggtttacaagtaagttatcaaggtgcattaaagctttgtttagagattgatattgaaaaggatcagactcgatcagactggttggcacgtcctttatctccgcaacagctatgctatgcggcaaatgatgttttataccttatgcaattggctaaccatattaaagatcagctcaaacaaaaagggctttatgagtatgttcttgaggattgtagtagtttaaccaaagaaattattagtgaaacaccaaccccgttgttatatacagatgtgggcaattatcgtcattcacgtcgtcaattaatgcaattgcaaaatttaagtgagtggcgtgaagaggtggttagagcaacaaaccagccacgtagttttatccttagaaattcgacgatgattgatttagtcgaaaaaaatccacgcaatagtttccaattatctcaagtaaaagatatccgtccgaatgttgtccgtgaatatggaaagattattcttgatcttttaaaagacttacctgttgaaggacactggccagctaaaattgctaaaccttttaaaattacatccaaagaaaccctaaataaaatggatgtattgattgctaaagcgatagaacaaacctctatacctaaagaagttttactacgtaagaaatggttaaatgcgattcatcagcatgtgcttactaaaggtgatgaacaggacctcccagattatttattgggttggcgctatgagcttttaactaagccgcttattcagttatttaaagaagagaaagccagtcttttattttag

SEQ ID NO: 43159 - DNA, 342 bp, Acinetobacter baumannii
atggatatgaacttccaaacaatactttcatcttttaaaaatcaatctactggtacagatgcatttaagaatttaaaaagtgcctgtgaacaccatctcaaacactcatcagacctaaacgaaaaagctgtaatttatctcatttatgggtttgcccgtagttatgtcatcttatatgaagatgaagcggtaactaccgagttcgctcaagcttcgaaagaaatgttagtgaattatatgaattgcttaaatgaagccttacgtactcaagatgaccatataatcttaaatactctaaatcaggtgagtaatgattatatgcaaggctcaagaatcttttaa

SEQ ID NO: 43160 - DNA, 165 bp, Acinetobacter baumannii
atgtctcggggcgacaaatcatcttatacggcaaaacaaaaacgccaggcgaaacatattgttgagagtgaagtagatagaggtcattctcaagaagaagctgaacgtattgcatggtctaccgtcaataaacaagatggcggcggcaagaaaaaatcacattaa

SEQ ID NO: 43161 - DNA, 306 bp, Acinetobacter baumannii
atgcactgtgatatttatagatcgagcaaaaaagatgaaatgtacatttatattgctcgtccaaactatcctgatgaaacggagcaagccgatccgtttgaaaaagttccagaagctgttttacaagcctttggccgtgcaacgtttgtcatgcatttagaattggctccaacacgtaaattagcgcgtgtaaatgttttacatgttctagactcattacaaacaaaaggcttctttattcagatgccgccagaagggttaattaacccaaatgcagttgaaccagagggcttacgtggtgcgtga

SEQ ID NO: 43162 - DNA, 390 bp, Acinetobacter baumannii
gtggtgcgtgaagatcaagctggaattttaaatcaattactttcttctctcgatgcaattcctgaagagattattgctttaacagcttatggcgttggcgctattattgccttgtggtgctggtggcgtttaatgcgccgcttacctaccactttgggcgcaataagctggttagttgtttttgctattttggtgacaccgactgtttcggaagggcctaatgcatctgtagcgccagctatttttggactactatttggtgttttaactaaagacagtcctttaatctggtcaaatttatccttaattctgtttgtaatcggtctaggtttggttattggctattgttggtcaaaatatataacaaacaaaagcatgcgttccatctaa

SEQ ID NO: 43163 - DNA, 852 bp, Acinetobacter baumannii
atgtctgctgatacccaacattttaccggtacagatcaatatatcgcgactgatagtcttaaacttgctgtaaaagcagcccgtgctttgcaaaagcctttattggttaaaggtgagccgggtacaggtaagactttacttgccgagcaagtggcagagagtcttgatttaaaacttattacttggcacatcaagtcaacgactaaggcccagcaaggcttatacgaatacgatgctgtgtctcgtttgcgtgatagccaacttggtgatgatcgtgtttatgacattaagaactatattaagcccggtaaattgtgggaagccttcaccagtgaagagcgctgtgtgcttttaattgatgaaattgataaggcagacattgaatttccaaatgacctgttacatgaactagataaaatgtctttttatgtttatgaaacaggcgaaacaattacggctactcaacgtccaatcgtaattattacttcaaataatgaaaaagaattaccagatgcttttttgcgtcgctgtttcttccattacattgagttcccagatgaagcaacgatgcgcgaaattatctcggtacatttcccgaatatctctgcaactttggtaaatgaagcgcttcaagttttcttcaagctccgtgaaattcctaacttgaagaaaccaccatctacatctgaactgatcgattggttgagtctgcttatggcagatgatatgcctgaagatgtactacgtaatcgagatacatcaaaagctattccacctttgtatggcgcactcattaaaaacgaacaagatgtgcaactgcttgaacgtttggctttcatgtcgcgacgttaa

SEQ ID NO: 43164 - DNA, 1188 bp, Acinetobacter baumannii
atgtttgtgcggttattttacaccttacgaaaatatggtgttccagtcacgactcgtgaactgattgacttaaatcgtgcagtaagcgaagggctagtttttgccgatcaagaagatttctatcaactcgcaaaaaccattttagttaaagatgaacgtttttttgataagtttgatcgtgccatgaaagattactttgatggcatagaaacctttgatattgatgagttactcaagcaagtccataaacttccaaaagactggttcgacttagaacttctagaaaagcatttaacaccagagcaaagagctgaacttcaaaaagcaggttctttagaagaactgatgaaaatgctagaagagcgtttacgtgaacagcataaaaaacatcaaggtggtaaccgtatggttggcacgggtggaacttcaccttttggtgcttttggtgaccatccggaaggtgtcagaattggtgggccaggtcgtaaacgctcggcggttaaagtctgggaacagcggaaataccaaaatctagatgatgaccaagttcttggtactcgtcagatgcaaattgctttgcgacggttacgtaaatttgctcgccaaggcgcagctgaagagttagacgttgatggaactattcgagaaacggccaagcagggtattcttgacgttcaaatggtgccagagcgtcgaaatcgaatcaaagtgctcatgttgtttgatgtaggtggttcgatggatgcacacattgcccaatgtgaaaagttattcagcgcagctaaaacagaatttaaaacgcttgaatacttttatttccataattgcctttatgactatgtttggaaagataactaccgaagaacagctactcgcatgaacacatgggacttgtttcatacctatggacgtgactatcgtgtaattgtcgtaggtgatgccagtatggcaccgtatgagctgaaatcggtaggtggctcagttgaatatatgaatgatgaagctggtgaagtttggttacgtcgcctacgccagcattttgataaaacagcatggttaaaccctgaaacagaagggtattggcattacactcaaacaattggttggattaaagagatttttgaaaaccatatgtatccaatgaccctaaaaggcattgaagatttgacgcgttacctttctcgataa

SEQ ID NO: 43165 - DNA, 1206 bp, Acinetobacter baumannii
atgcaacatcaaattaatggtattgctttaccgaatgaacaaggattttttggtgaatatggagggcaatttattcctccacatttaaaagaagcaatggatgaaattaatgttgcttatgaagaaattcgccatacaccagaatttcaaaatgaattagcagacctctttgcaaattatgtcggccgtccaagtcctttattttatgcaaaacgcctttcagaacagttaggtggcgcgcaaatttatttaaaacgtgaagacttaaatcataccggtgcccataaaattaatcactgtttaggtgaggctttacttgctaagtatatgggcaaaaagaaaatcattgccgaaacgggtgcgggtcagcatggggtggctttagcaacggcttgtgctttagttggtattccatgtgagatccacatgggtcaagttgatattgaaaaagaacatccaaatgtggtcaaaatgaaaattttgggcgctcatttggtgtcagtaactcgcggtacagcaaccttaaaagatgcggttgatagcgcgtttgaagaatatttaaaagatcctaaaaattttatttatgcgattggttctgtggttggaccccatccatttcctaaaatggttcgagattttcaatcgattattggtaaggaaattaaagagcagacgcatcaaagatttggaaaaaatccggattatattgtcgcatgtgtcggtggcggttcaaatgcaatcggtgcatttacagcttttttaaatgattcagatgtgaaacttgtaggagttgaacctgctgggcatgggctagatacaaatatgcattcggcaaccctaacattaggtaaaccaagccaaattcatggtatggcatgttatgttcttgaaaatgaggctggtgaacctttacctgtgcattctatcgcttcaggtttggactatcctggtgttgggccacaacatagtttcttaaaagatttaggccgtgtggaatatagcactgcaactgaccaagaatgttcagacgcgtttatgaccttatcacgagttgaaggtattgttcctgcgcttgaaagctcacatgctgtcgcatgggcaatacgtgaagcgccaaaactgccgaaagaaaccatgatcgtggtgaatctatcgggtcgtggcgataaagattctgattatgtggcagaaaaacttaagctttaa

SEQ ID NO: 43166 - DNA, 1005 bp, Acinetobacter baumannii
gtggagcgaccgacgattagccctgaacatttacaggaagcggctgaaaatttatcaacaattcgagatttcattcgttttggggtatcagcattacgtcaacatgatgcacatttaggacaaggtactgaagattatttcgcagaaagctctgcattagttttacaaaccttatctcttgaatggtcagcagattcagagattttagatgcaaagcttttaccaagtgaaaaagcagaattcttaagcttgttggaacgccgtattaatgagcgtattccgacttcttatttattaaatttagcttatttctttaataagccattttatgtggatgagcgcgtacttattcctcgctcaccaattgcagagttaattgagcaacgttttgcgccatattgtttagatgaaaatggccaaatgcgtgaagcgcttaataacttaccagaaaataccaagcctaaaactccacaacgtattttagatatgtgtacaggttctggctgtattgcggtagctttagcttatgcttatccagatgcagaagtagatgcaacagacatctctaaagaagctttagaagtagcatcaattaacgttgaacatcacaataaacaataccaagttgcattacttgagtcggatttatttgaaaaaattccagctgaaaaccagtacgatttaattgtaagtaaccctccgtatgttgatgccgaagacatggctgacttgccggaagagtttttacatgaacctgaacttgcattagcagcaggtcaggatggtttagacctggttcgtaaaatgcttgctcaagcggcagattacttaacggaagatggtcttattgttattgaagtcggtaactctgaatgggcaatgcgccaaaactttaatacagttgatttcaattggcttactttccaaaaaggtggttcaggtatttttgctttgactgctgaacaatgtcgtcgttatagaaaattatttgaagaacaagtttaa

SEQ ID NO: 43167 - DNA, 1092 bp, Acinetobacter baumannii
atggcagggaacagtattggacaactctttcgtgtgactacatgcggtgaatcgcatggggttggtttaatggcaattgttgatggagtgccaccaggccttgcattaaccgaagaagatttgcaaaaagatctggatcgccgtaagccgggaacctccaaatttgcgactcagcgtaaagagcctgatcaggttgaaatcatttctggtgtgtttgagggtaaaactactggtacgccaattggtttactcattcgcaatacagaccaaaaatcgaaagattatggaaatattgcacaaacttttagaccgggtcacgcagattacacttatacgcaaaagtatggtttccgcgactatcgtggtggtggccgttcaagtgctcgtgaaactgctatgcgtgttgcagctggtgctattgcgaagaaatatttagcagaaaaatttggtgttttgattcgcggtcatgtgactcaaattggtaatgaagttgctgaaaaactggattggaatgaagttccaaataatccatttttctgtggcgatgtagatgctgttcctcgttttgaagcattggttacgtctttacgtgagcaaggtacaagttgtggtgctaagttagaaattttagccgaaaaagttcctgtaggttggggtgagcctgtctttgatcgtttagatgctgatattgcacatgcaatgatgagtatcaatgcggttaagggtgttgaaattggcgatggttttgctgtagcaggacagttcggacatgaaacacgtgacgaattgactagccatggttttctagcaaatcatgctggtggtattttaggtggtatttcaagtggccagaccattcgtgtggcgattgcactaaaaccaacagcaagtattactactccgggtaaaacgattaatttaaatcgtgaagatactgatgtgttaactaaaggccgtcatgacccgtgtgtgggcgttcgagcaactccgattgcagaagcaatgttagcgatagttctaatggatcatttcttacgccaccgtgctcaaaacgcggatgttgttcctccatttgcgccaatcgaaccatag

SEQ ID NO: 43168 - DNA, 1230 bp, Acinetobacter baumannii
atgaagttgcaaggttccaatatattgggacaggaacaaatagatttattaaccacacgcggattaaatttcgtatggtttccaaagcaacttgaaacgatatatcgttttcaatatcaaaatggtgcagcctatgagtttcgctatagagcacctattattttaatattatatttatttttaagctttggtatataccaagttttaccaaccgaacaagttttatcctggttaagctattattcttgggtaggcataattgttttaatcgcctggattttatcatttattaaaaaattaaatcagtggtttgattattatgtcggaattggttcttccgctgccgttgccataacatttatcttaattaacgttttagaaaatggccaagataatgtactttttcatgctgcaatgatgtatgccattgtgattatctatggtgcggtaggcatgcgtttttatactgccattattgcaggatgggtcggcggtcttattggtattttggtaagtacctatttgaacggagacatagactggaccttcctgaaccgtacatatacgtttagtagtttcttaggcatgacccttgcctatgctacggatcgtcagcaccgtgaaaactatttacaaaactgtatgattgagctcaatcgtattgaacttatgcaacaagctcaacaactgtcactgctttctcaacaagatgctttaaccggacttgctaaccgacgttatcttgatgaaacacttgataatgaatggcgacgcgcattacgccatgagactcctcttactattatgatggttgatatcgacttctttaaaccatataacgatagcttaggccatctcaagggtgatcagtgtttaaaagatattgcgactgcaatttcctcaattgctgctcgtagtggcgatttggttgcccgttatggcggtgaagaattcttacttctattcccaatgacaaatgcacaacaagccaaaattcaggccgaaagattaatgaatgcaattaagaaaattgctattgttcatccatgtagtagtgtttcaccatacgtaaccattagtgttggcgtggcgaccacaattccacgtttaaatgattcaatttctgcttttgttagtcgtgctgatcatgcgctctatcaggcaaaaacaaatggccgcaatcaatatcaaattgctttgaatgaagaacaaattgtagatctaacttaa

SEQ ID NO: 43169 - DNA, 753 bp, Acinetobacter baumannii
atgactgctctaaatcaatatggaatgagtttagaaattacgccgcataatggatggtctcagcggttttgggaggatcttttaccagttaaggagcgggtgagtaaacatccgttttttactgaaatggccaatgggggattgagcctagaaagtttccgttatgctttacttaatttctatccattagtagcgcatttcccgtcatatatggccggtgcgttagctaaagcaactgcttttgcagaacctggtgttactgaaacaagagattggttaattcaaaatattaaggtcgaagagcgccatttacagtggtatcgggattgggctagaggttttggattaacggtagaacaactcgatagtgttcgtccgccagcttcgatgaatgcggtgaatcattttctttggaatgtgagtcatcgtggcaacttggctgaatgtctggcagcgaccaatttagcaattgaatgggcgacaggtgactggtctattcaagtctataaaggcatacacgcttatacggatcatccggaagttaccattgataagcgttctttagcttggttacgtgcacatgctcattatgatgatttacatccttatgaagccatggagctgattaaacgtttgtgcaatgaacgtcctgattggcagcaaaaagcatttcatgcggcagaagaagggctgcggtattatgaattagctttagacgattgctatagagtacagcttcaagcctctgcttga

SEQ ID NO: 43170 - DNA, 1140 bp, Acinetobacter baumannii
atggatatgtcaaaacaattattattgccttctacagacaaccttccgtctttctttagaccggaaacaatctctgaaacaccctgtttaggaaaaaagccgtcactcgatctagatgcggctcctatatttgatctagatcatgaatggcaacattccttatttggtcgttcaatccaagagtgccatagaaatttgatgcatattgctgaagatgcagatatggcaattggggtgactgaccctcacggtactttactctggacatggagtagtacgcctatgcgttcatctgccgaacaagtccattttgttgaaggtggacaatggtcaacccaagcagttggtcaaaatgcaattggtcttgcactaaatacacattctgcaagttgtgtttattcacatgaaaatcagatgaacagcgttagagactgggtatgttatgcagcgcctatcaccgatgcaaacacaggccagttttacggcattatgaacttatcaactaaatatcaaaagcataactcacttggaattttagctgttgaacgctgtgccgatattataaaacaagccattcaacttcatcaaaagaacattttatatattaaggcgctaggcacgcctaaggttcaatacaatcaacatggcttgacactcacgcagcgccaaatcgaaattttatgtattcttgctttatgtccggaaggcataaacttagaagagcttcactatgccttatatggcgatcgaccagtgagtaccactacactaaaagctgagctctcacagcttcgaaacctgattcccgatgtgatcgagtcacgaccatatagacttaactgtgaaattcaatgtgactttctcatggctgagcaagcactaaacttaggttttactgcaaccactttaacactgtatagaggtagttttttagccaagtcagaaagtccgtttttgtgtgcttggagagattgctttgacgcccgcttgagtcatgtgatttatcaaattgatgatgtagaccaactattacgtgtggttagccgtgttcccgaccgtgttgatgccgttgaacgcttacttgaacttctgcccgaagaaacaccgtatcgggcaaagctcttaaaattgcttgaataa

SEQ ID NO: 43171 - DNA, 987 bp, Acinetobacter baumannii
atggacttaaaaaggcaaatagagacaggtattaagttaagaggaatagataaagtttctcgtattcctattaaaattttacctaccgaagaactacctaaaaaacctgaatggattcgagcaaaaataactgatttcgaagaaattcaacgtatcaaaaatttattacgccaacaaaagctacatagtgtttgtgaagaggccgcatgtccaaatctacctgaatgttttggcggtggtacggcaacatttatgattatgggagatatttgtacaagacgttgccctttctgcgatgtagcacatggtcgtccaatgcctttagatgaaaatgaacctaaacatctagctgagacggtcgctaacctaaacttaaaatatgtagtcattacctctgtagaccgtgatgatctacacgatggtggtgcagcacattttgtgaagtgtattgaagaaatcagaaaccgttgtccagatacgctgattgaaattttagttccggactttcgtggccgtttagaaacagcactctctacattaagcttatcaccaccagatgtgtttaatcataatattgagacagtgccgcgtttatataaagcgatgcgccccggttcggactatcagcattcgttaaatttattaaaacgttttaaaaaatactgtcctgatatcaaaactaaatgcggcctaatggtagggctaggagaaattgaagctgaggttattgctctactcaacgatttaaaagatcatgatgtagatttagtgactattggacaatatttacagccctctaaatcacatgcccctattcaccggtttgtgaatttacaagaatttgaaagatacactcagcatggccagcgtttaggctttaaaaatatctggagtgcgccaatggtccgttctagctattttgccgatcggcaatatttcggtgaatctgcaccaaagccattttcaagagaagatgttttgtcatag

SEQ ID NO: 43172 - DNA, 963 bp, Acinetobacter baumannii
atgcaattaacggaagagcaactactcgcagcgtataaacgcatgcgtgatattcgtgaatttgaagatcgacttcatgaagaaaataccaatggtgatattccaggctttattcacttatatagcggagaagaagctgtagcagtcgggatttgcgaaaacttaaccgacaaagactatatcacttcaacacaccgtggacatggacactgtattgcaaaaggctgtgatattcacgccatgatgctggaaattttcggtaaagatgacggactatgccgtggaaaaggcggttctatgcatattgccgatttagataaaggtatgctcggtgccaacgggattgtgggtggtgggcctcctttagcaattggtgcagcgttgacagcgaaaaccttaaagactggcggcgtcggactgtcttttacaggtgatggtggttcaaaccaaggccttacttttgaagcgatgaacatggctgttgttcttaaacttcctgtgattttcgtttttgaaaataacggttttggtgaggggactggtcatgattacgctgtaggaagcaaagacattgctggtcgtgcagcaggctttggtttaccggcagttaaagttgatggtacagacttctttgccgtctatgaagccgctcaaactgccattgaacgcgcgcgccgtggtgaaggtccaagcgtgattgaaaccatcacaaaccgtttttatggccacttcgaaggtgatcctggcttgattcgttctaaagaagaagtcgagttcattaaagaaaataaagatcctttgaaaattttccgagaaaaagtcaaaggcaaaattgatgaagccaaactagacgagattgatgcagcttcaaaggcaaatgttgatgatgccgttgctaaagcccgtgctgcggcatatccgaaaccagaacaactccttactgacgtctatgtctcttactaa

SEQ ID NO: 43173 - DNA, 1020 bp, Acinetobacter baumannii
atgccaaataaaagttttcgtaatgcaattaaagaagccattgaatcagaaatgcgccgtgatccaaccgtatttgttgttggtgaagatgtccgcggtgggcacggcggtaaaaacactgaagaaaaccaattagaaggtttcggtggtgtattgggcgtaaccaaaggtttatggacagagtttggttcggaacgtgttattgatacgccaattaccgagtctgcaattattggtatggccgctggtgctgcagcaacaggtttacgtcctgttgccgatttaatgtttatggatttctacggcgtgtgtcatgacatgctctataaccaagccgctaaattccgttatatgtttggcggaaaagcaaaagcaccaatggttgtacgtggcatgattggcgcaggtttctctgcggcagctcagcattctcagtcaccgtataacgtatttgctgcggttccgggcttaaaagttgtggttccatctagcccatatgatgtgaaagggctattaattcaggctattcgtgatgatgaccctgtagtgttctgtgaacataaaatgctttatgacattaaaggcgaagttccagatgatgcatataccattccttttggtgtagcaaattacacccgtgaaggaacagacgtgaccattattgctttaggcctgatggtacaccgtgccaatgaagtagcagataaactagcaaaagatggcatttcggttgaagtggtcgaccctcgcacaatttcacctctggatgaagaaggaattttagaatctgttgcatcgactgggcgtgtggttattgtggatgaatcagcggcacgctgtggctttggtcatgatgttgccgccctgatcgcgcaaaaaggtttccactatttgaaagcacctgttgaactcgtaacgccaccacatacgcctgttccattctctccagttttagaaaaagaatggattccaagtgtagagcgtattgagcaagctgtgcgaaaaacattggaggcttag

SEQ ID NO: 43174 - DNA, 1536 bp, Acinetobacter baumannii
atgagcgaaattaaaacgctggagatcccgaaatggggattatccatggaagaaggcacgatcgcccaatggttgattaaagagggtgatagctttaataaaggcgatgaaatttgtgaaattgaaaccacaaaaatcgtcaatgtgttagaagcgccttttgctggaacgctccgtaaaattttagcgaaagatggtgatactttacctgttggtggtcttattgccgtatgtgctgatagtgaagtttctgatgcagaaattgaaaagtttattgcatcactaggtggttcagcagctcaagccccggaagcaccttcggagcaaagtaaagcggaaacatctgcacctgttgctgaaaaaacagaacaaccacagactgtagcagctagtgcttcagctcctgcaaaggtagcgaaagaggactacgctgtaccagagtcattacaaggctatcaaacatctaatgagttgtttgcaacaccgcatgccttgaagcttgcagaaaaacacaatgtaaacttggcaaaagtcacaggttctggtcgtgaaggacgtattagtgttcaagacatccagaaagctgtacaagctgctggtggtcaatggcctgatgttaagcagcaaactcaagctaaagtggttaaatctacggccgatgatagccaagttttagcgacgcctgtagcacgtcgtttagcaaagcagtggggcattaacctaaatgactgtcgtgtttcaggtactcgtggccgtgtctgtaaagaagatgttgaggcagtttactatcgtaataacccaacatcggtaaatgaacaacctgtacaatgtgcagcccaaccacaatcaaccgttacgacggtggcgatgaatgggatgcgtaaagcgattgcttcacggttacaggctgcaaaacgtaacgcaccgcatttccgtttagtggtcgatctcaacgtagaagctttgcaaaaactacgtaagcagattaatgagactgttccacaagtcaaactttctattaatgacatgctaattaaggcagctgccgccgcactgattaaagtacctgaggtgaatgttcaatttgatgaggcgacccaatcaattttacagttctctcaagcggatatttcggtggccgtagcgattccaaacggtttaattacacccattgtaaaagcagcaaatcagaagtctttagcacaaatttccgatgacatgcgtgatttggcaacgcgtgctaagactggcaagttacaacctgacgagtttcagggaggcagctttagcatttcaaatttaggaatgttaggcattaaacagttcgatgccattatcaacccaccgcaaggtgcaattatggcattaggtgcttcggaatctcgcgctgttgttgaaaatggcaatgtagtggttcgtgagattgtcacagcgacgttgtcatgcgatcaccgagttattgatggcgcagttggggcgaaattcttggccagctttaagcagtttgttgaaaaccctgctttaattttggtgtag

SEQ ID NO: 43175 - DNA, 1404 bp, Acinetobacter baumannii
atgtcagaagctcaatttgatttaattgtgattggcgcgggaccgggtgggtatgtggctgcaattcgtgcagcccagctcgggttaaaaaccgcaattgtagaagagcgacatttaggcggaatttgtctaaattggggctgtattccaaccaaagctttgcttgcaggggcagagctcgcaacccagtttaaacatgccggacagtttggttttcaggtatcccaactcgattttgatattcaaaagcttgtgcaacatagccgacaagtgtcagctcaattagtacagggcatcgattacttgttgaaaaagaatcaggtcactgtttttagtggtcgcgctcaacttacagcgaaagaaaaaattgaagtgaccgatgctcaaggtaataggcaggctttgagtgcaccacatatcattttggcaactggagctaaagcccgacatgttcctcaacttcctgtcgatggaacatatgtctggagctataaagaagcgcttgttccagagcagttaccgaaaagtttactggttgtaggttcaggtgcaattggtagtgagtttgctagcctttatcaagatttgggatgtcaggtgacccttattgatttggctaaacaaattttacctactgaagatgtggaagttgcccaatttgtcagaaaacaatttgaacaaaaaggtatgaaagtcttaaccgatgctgtcgttcaaagtattcagattgaaaatgagcaagtccactgtgtggttgaaacggcaaatgatgttcaaacgcttgtttttgaccgcgtgctttcggcaattggtgtacagccgaataccacagggctaggactagaacgtttaggtgtagaactcaatccacaaggttttgtggcaattgatgactattgtaaaaccaacgtagcagggctttatgccattggtgatgttgctggagcgccttgtcttgcccataaagcaagtcatgaagccatgatctgtgtcgagaaaattgctggtgtgaaaaacgtacattcactcgaccgtagccagatcccgggttgtatttttacacatccacaagtggcgagtattggtttaacggaaaatgcagcaaaagccaagaatctaccaatacgtattggtaagttttctttaactgcaaatggtaaagctttagcaattggagatgcgtcaggtttcgttaaaacggtggtacatgcagaaacgggtgaattacttggtgcacatatggtaggtcatgaagtgaccgaacatatccaaggatttgccattgcgaaatatctagaagcaactgatgaaagtttagctcaagtgattttcccgcatccaacattatcagaagccatgcatgaatccattttggcctcaatgcaacgagcgattcatatgtag

SEQ ID NO: 43176 - DNA, 786 bp, Acinetobacter baumannii
atggttaagggattaaaaaataaagttgttttagtgactggggcagctcaaggcattggccgtgggattgccctacgcttggcgcaagaaggggcacatattgcattagttgatatgaaacaagatcgactgaacgatgtgcagcaggaaattcaggctttaggtgtaaatgcgagcacttttattgctgatgtaagtgaccgcgagcaggtgtatgctgctataaatcatgctgagcaggcccttggtgggtttgatgtcatgattaataacgctggaattgcacaagttcaagcgattgcggatatcacacctgatgaatttcaaaaaattgttgatattaatattggtggagtactgtggggaatacaggctgctgctgcaaaatttaaacaacgcgaacataaaggtaaaatcattaatgcttgctcaattgcgggccacgatgggtttgctttactcggtatttactcggcaaccaaatttgcggtacgagcacttacccaagctgcggcaaaagaatatgccagtcacggtattacggtaaatggatattgccccggaattgtcggaacggacatgtgggttgaaatcgataaacgttttgctgaaattaccggtgctgcaattggtgaaacttataaaaagtatgtggaaggcattgctttaggtagagcccaaacaccagacgatgtagccgcattagttgcttttctggcaagtgaagattcagactatattacgggtcaatccattttaacggacggcggaattgtctatcgctaa

SEQ ID NO: 43177 - DNA, 1059 bp, Acinetobacter baumannii
atgaaagcagcgcgtttttatgacagaggtgatattcgtattgaagatatccctgaaccagaagtcactcccggcactgtaggcattaaggtagcttggtgtggaatctgtggtacagatttgcacgaatttatggaagggccaatttttattccaccgtgtggacatccacatcctatttcaggtgaatctgcaccgattaccatgggacatgaattttcaggtgtggtttatgccgtaggtgaaggtgttgatgatattgaaattggtcagcatgtcgtcgtagagccttatattgtggccgatgatgtgccgactggaccgggtgataattaccatctttctaaaaatatgaacttcattggtttaggcggtcgtggtggtggtttatcggaaaaaattgcagttaaacgccgttgggtgcatccaatttccaataaaattccgctagatcaggcagccttaattgaaccgttatcggtgggtcatcatgctttcgtacgtagtggtgcaaaggccggtgatattgcactggttggcggtgcggggccaattggtttattgctttcggcaattttaaaagcgaaaggtcttaaggtcatcattaccgaactaagtgccaaacgtaaagaaaaagccaaagagtcgggagttgcagattatattttagacccgtcagaagttgatgttgtttctgaggtcatgaaaattactaatggtgatggtgtcgatgtcgcgtttgaatgtagtagcgttaacaaggtattagatactttggttgcggcagtgaaaccaacaggcgttatagttattgtttcgatttggagccatccagcatcaattaatgtgcatagtgtggtaatgaaagagcttgatgtaagaggcacaattgcctacgtaaatgaccatcaagaaaccattaaactggtcgaagaaggtaaaataaatctggaaccttttattacacagcgcattcaacttgatgatttgatttcacaaggttttgaaaccttaattcataacaatgagtcagccgttaagattattgtacatccataa

SEQ ID NO: 43178 - DNA, 912 bp, Acinetobacter baumannii
atgattgttcgtgataaaagcaatgtatttaaactcttatttgcttggaaaggaacaattttgccgaaggttttgcctgcactgagttttgttgtacttatttcagcctgtgtggtctggctctcttattatcattggattcaaatacctaccgtacccgcgatcggatttaccatctttggcgtgattctttcgatttgtacaggctttagaaataacgcatgttatgaccgttggtgggaaggccgcaagctctggggtgctttaattgccaatgccagacatattgttagagatagccatgttttatctaatgaaaaacgcgaacatttaattcatcaggtcttaatttttagtaacttattgcgtgatcgtttacgtcaacaaacagttgaacccacaaaatttcttgaacatgcctatttaaataactcttcacttaattatttaaatgagcatattaatgcacctcaatttgtactcgaaaatattcaaaaggatttagtcaaagctctaaaagacggtgaaattagtgacatcatctatagcacgctaaatcgacatattattgagctaggtaatattcaagcgggttgtgaccgaattgctgggacacctttaccctactcatattcagtacttttgcaccgtgctgtttattgtttctgcttcatcttaccttttagccttgaagctgctttaggcatttggacaccgcttattgtcggcttaatcgcttatatgtttttaggactagatgccttaagtgctcaaattgaagaaccttttggcttgcaagaaaatgatttaccgctcgattctattgtgcgtttaattgaacgagagtctctaagctctttagggcagccattaccgcctattattgaagcccaaaacaacaatttactttaa

SEQ ID NO: 43179 - DNA, 1272 bp, Acinetobacter baumannii
atggcaaagttaaattttgagttagaacaggatttttatattttatttgagcagcttaaagctctattcccaaatgcgagtctgtttttagcagacacaacgactcaagcaattcactataaatttaatacagacgatatttctgtagagaacatagcagcgcttactcaagaccatcacaatcaatatcttgagatcaatactcctaaaatgagaaagcgatttatctatcaagaacatgatatttacatcgcagagcatcgaattatcgggaaattgcatattctacagcccgttagcatagagaatgatattgttgatgaagtagagctaacagaacaattgcaagacttggctaaagttttcaatagttgttcaccagaaatgactcgtatgttttcaattattcaaagagtggcaattactgagtttccagtgctcgtacgcggtgaatctggtagcggtaaagaacttgtggcaaaagcaattcatgattatagccagcgtaaaaataagatctttgttgccattaactgtgcagctttaaattctaatattttagaaagtgaactctttgggcatgtgaaaggtgcttttacgggagcaattcgtgaccataaaggtgtgtttgaacgtgccgctggtggaacgctgtttctggatgaaattgccgagattcctttagagcttcaagctaaattattacgggtgttagaaacaggtgaatttactcctgtaggtggtgaaaaaccaattcaggctaatgtccgcattattacagcaacacataaagctttacgcgaagaggctaaggctgggcgtttccgtcatgatctactctaccgtctacgcgtaattccaattttcataccaccactcagagagagaaaagtcgatattcctcttattgtcgatcagattttaaaagagagctcaacccaactcgatacaatgcctcgccatgttaatcaaaaagccatgcaagttttattgaattatgactggccgggaaatgttcgtgagttaaaaaacaccctgctttatgctttaaccatggcaaatggtaaagatgaaattgaagtcgaagacttaccaaatgaactattagatgcagacgaatacgttaaattacctgaaaataatgcagaacttacccctgaaaatgtacaagccgctttagaaaaatataaccacaatctgaatatggtcgcgaatatttttggaattagccgtaccacgctttggcgatacagacaaaagcataagctttag

SEQ ID NO: 43180 - DNA, 696 bp, Acinetobacter baumannii
atgttctttaagcagttttttgaaaaagaaagttcgacttatacatatatgcttgggtgtgaagaaacacgaggggctgttttaattgacccagttgcatcagatatagagatttatgcaaaagaattagagcagcatcaatttacactcatctataccttagatactcatgttcatgcagaccatattaccgctgcagatttacttcgtgaacggtttcattgcaaatcggttttacaccgaaactcagaagtaagttgcggagatattttaattactgatggttgcatgcttaaagttggcaacctcagtattgaagcgcgttacacaccaggtcataccaatgcttgtacgagttacctagttggaaacatgattttcactggtgatgcattattaattgacggctgcggtcgaactgacttccagcaaggtaatgcaggcacactttatgacagtattcataaacaactttttagcctgcctgacaacactattttatatccgggacacgattataaaggtcgtctgtcttcaacaattggttatgaacgcttaaataactcacgtctaggtcagaatcgctcgcgtgaagattttattgaattaatgaataacttaaatctgccatatccaaaacaaatcgataaagcacttcctgctaatcaggcttgcggctcaatttcacaattataa

SEQ ID NO: 43181 - DNA, 1656 bp, Acinetobacter baumannii
atggaacttaaacgagttaatcaagatttttatgttgctggccagattactgccaacgatattgtaaaaattgcagaccaaggaataaaaactctgatatgtaaccgtccagatggagaaggtgcagatcaacccaatgtgattgaaattgaagaagcagctcaacaatatggcctaaacgtaatctatcagcctgttatcagtggtaaaattaccgaccaacaagttaccgagtttaagcagctttatcagaatgctcagaagcccgttttagcatattgtcgctctggtatgcgtgcaatcagtttgtgggctttggctgaagttgctccacaagatgcagcactgttagttgagtcgggtaataagcttgggtttaacttaaaaggcttggtgccacgtattttaaaacgtgatcatgaaccagccacaattccttgttatagcgttgtgattgttggcgctggggcagcaggaatttctgtagcgtcgagtcttttatgtcgtgaacctcatttagatattgtcattattgatcccgcagatacacattattatcaaccgggctggaccatggttggtggcggtattttcaaaccacaagtaaccgcacgctcaatggtaagtgtgattccttcaaaagtgaaatggatgaaagctgcggttgccggattcgaccctgagcataatcaggttattttggaaggatgccaacccattcaatataaagctttggtcgtgtgtcccggtttaaaactgaattggcatggaattgaaggtttagtcgaaaccttaggaaaaaatggggtgacgtctaactatcgttatgatctagcgccgtatacatgggaactggtgcaacagttaaatagtggaacggcaatctttacccagccgcctatgccgattaaatgtgccggtgctcctcaaaaagcgatgtacctttcagccgactactggttaaagcaaggcaaacttaaagatatctctatccatttttataacactggtgctgttttatttggtgtgaaggaatatgtacctgcactaatgcaatacgttgaaaaatatggcactgaacttcattttaaccatcaacttgtcaaagtggacgggtctgcaaagaaagcatggttcaaagtggtgaatgatgaaaatgcagcattggtcgaaacagatttcgatatgttgcatgttgttccaccgcaacaagcgcctgattttattcgtgcaagtactcttactgatgaagccagctgggtgagtgtgaatcctcaaaccctacaacacacacagcacgccaatatttttgctttaggtgatgtgatgaatgcgcctaatgccaaaactgctgctgcggcacgggcacaagctccgatcgttgcggttaatgttatagcccagctcaaaggtgagcaaaacttctgcgagtacaacggctatggctcatgtccacttacggtagaacgaggaaaaatcgttctggctgagtttggctacggcggcaaattacttccaagttttccaaaatgggtgattgatggacaaaaaccatctcgtttggcatggctacttaaagagcaaattttaccgccgatttactggcaaggcatgctcaagggccgtgagtggatggtcaaacctgagcgaggataa

SEQ ID NO: 43182 - DNA, 792 bp, Acinetobacter baumannii
atgttattacttgtcgttgaaggcattgtgattggctttttacttggtcttactggtgcgggtggtggcattcttgctgtacccgcgcttatgaccagtcaaggctggagcgtggcgcaagctgcgccaattgggttattggcggttgcgctatctactctcataggaaccattgaaggcttatttaaaaagattgttcgttatcgtgctgcgatctggattgccttaattggtgctcctatggcacatatcggcattttaatagctaacacgatttcacctatttggctcatgttaatgtttagcttggtcatgtttacagtgggctatcgacttatcagtaaccgagtttcagattttcataacccgccgtgtcaggtcaacccaagtacgggacgctttatctggaattttaaaactggtagtgtgcttgcaagcatcgggattattgctgggcttttaacggggatgttaggggttggaggcggctttgtaattgtacccgcgcttagaaaagtcacaaatttggatatgcatagcattgttgcaacctcacttatgattattttcctaattagtggcatgagtattgtgatgcatattgcagagggctttcactatccagtcgccattactagtgcgttcgcgctcgcatgtgcattcggtatgttattaggacgccgagctattcggtttattccgtctgcaattgtacaaagggtctttgctttaatggtttttgctgtcgcaatttatatggttattaagattgttaatctaacaaatatctga

SEQ ID NO: 43183 - DNA, 1005 bp, Acinetobacter baumannii
atgaagcgaattaatgtagcaatttgtggttttggacggattgggcaacaaattgcagagcttcttttaaatcgatcgacatactataaacaaaaatatcaaattgatgcccgtttagtgggtgtctgtaactcatcatcaggcttaattgatcaagaaggtttacaagcttcaaagtggctagataaaacacaatatcaagcaggcctaacagagcaaaagtttttagaacaggttcaagcagatgtcattattgaaactggaccaagtgattatgttaccggtgggaaaggcctattttatttaaattatgctttaacacataacatgaatgcgattgcggtatctaaaggtgctttagtcgtagaaggcaaaaaaataattagcttggcacatcaacataataaaaaactattttttagcggtgcaactgctgcagctttaccgacggttgatttgtttgaatataacttggcgggctgccaaattttagaaatagaaggtgtatttacaggcaccacgaattttattttgaatgatatgttgcaacatgaatgcgcatttgcagactctcttgaaaaagctcaagcaaaaggtattgctgaaccgaatagttcttttgatgtagatgggtgggatactgctgcaaaaattacgatactagccaatactgttttaggagctgatgtaaaaattcaggatattccacgacaaggaattagtcatgtcacagccgaccatattcgtgattggaaaaaagaaaatgtaattcctcgtctggttggttttatccatgttaaaaatcagcaaattcaaacaggtgttgaattaaggttagtcccagcaaatcatccgtttgctcatctgcaaggttctaataaatgtattcgggtgttaacgcaagaaatgggggaatttgttgtcagtggaggggcatctgcgccattagccacagcagccgcggctttaaaagattttgagttgatgctaaaaacgggctgctaa

SEQ ID NO: 43184 - DNA, 918 bp, Acinetobacter baumannii
atgaatattttactctatgttgcggtggtgttaatttggggaacaacatggattggaattgccgttcaaagccattatgcaacaccagttgtcgcgattttatggcgttttgccatttcagccttattactgtgggttgttttactatttttaggaaaattacagcgaattgctttaaaagatcatttgttctgtatgctgcaaggactttgtgtttttggcctaaactttatttgtttttatactgcggttaaatatgtaaatagcggtttagagtctgtcattttttcgatggccgttttctttaatgccattaatgcgcttatcttttttaagcagaaaccttccccaaactttgcaccagctgcacttttgggcctaagtggtattgttttactgttttggcatgacctgattaatagccagtttaatgcgcagttattaatgggtattgggctatgtgcaataggcacttacggtttttctttagggaacatgattagtgttagacaccaaaaacgtggtctaaatatcttttcaacaaactgttatgccatgacgtatggcgcattggtgatgttaattctggcattatttacaagacaagatttaatgccgccgatgaatttcccattcttaagctcggtactatacttagctgtatttggtacggttattgggttttcagcttatttttctctagtcggacgaattggcgcagctaaagcagcctatagcacgttgctctttcctttagttgctttaacagtttctactttctttgaaggatatgagtggactttaaatgctgtatttggaattttactcatcttacttggtaactacttaatgtttagtaagtttgaaattggaaagaagttatttagcaatcaaaaaaattgtgagaagcaggcataa

SEQ ID NO: 43185 - DNA, 855 bp, Acinetobacter baumannii
atggcctatcaaactttagaacagctgcagcagtctaaagccaagcttcacgaaactgtggtgcttgatgaaaatatgcaacttgcattttggtctaatcagcaagatcgtgtaagtgtctgtagcgatcaccacactttaagtctttatattcaagatggctatgaaagctatcaaaaaacacctgcgggctggaaaaatggcggtggaccaggacgtttttgcctattgcccgagcatcaggagtcgacttgggacatacgtggtgggcttaaatttgtccacttgtattacaccgatcaacatttgcgtgatgttgctgaaaaaatatgggacaaagagccgaatcaaatcgagctaaacgaagttgtctttaatgacgatgaacggattcgagcgttatatcaatttttcttattagattgcgattggcaagattcttcaaatcatttgcaaatgagtacaacggcaagtttattgttgaatcacttaattcgaaaatatagcagtgttcaatggcaacagcctactatcaagggcggactggcaccccataaactcaaatatattcaggaatggattgaagatcatctagatcaggcactcactttgtctgatttggcgaatgtggtgaatttaagcgaataccattttgctcatatgtttaaacagtccatgaatatggcgcctcaccaatatgtcatgcaaagacgcttaactaaggccaaaggactaattcagtcatctcagctttctttgcaagatattgccctagtatgtgggtttagttcagcaagccatttaagtcatcgctttaaacaattttatggcatgagtccttcgcagttacgttaa

SEQ ID NO: 43186 - DNA, 396 bp, Acinetobacter baumannii
atgactgtaaccatacctcatgatattcagagttcagattgccaaagagttagtcaagtattggctagagttggagagaaatggagtatactcattgtaatgacacttgcatcacatcctcatcgcttttctgaaataaagagacgtatcaatggaatatcgcagcgtatgcttacattgtgtttgcgtggtttagaacgagatgggttggttaaacgtacagtttatcctgtagttccacctcatgttgaatatgaattaactccactgggccattcacttacagaacctgtaattgctttaggccaatgggctcagcagcatattgcggatattgatgcggcaagagctgcatttgacgcagctcaggagaaaccaattacattagacacttaa

SEQ ID NO: 43187 - DNA, 609 bp, Acinetobacter baumannii
atgaaactacttcaaattgacacaagtattttaggtgagcagtctgttagccgccaactcacctcatctgttattcgtcagctcagcacagcttatccagatgcagaaattattcatcacgattttgctttagagccaattcctcatttgtctgatgctgagtttttagcatggcaaggtgttgaacctaataatgaagcagcgcaacaacgtgttgcacgaaacacccaatatttggatgagtttttatcgtcagatatcgttgtaattggcgcacctatgtataactttagcttcccatcacagttaaaagcgtggcttgaccgcctatctgttgctggtaaaacattccgttacacggaaaacggtcctcaaggtttagtagaagggaaacgtgtcattattgcttcttcgcgtggtggtgtgtattcagaaggttcaccagccgaagctttagactatcaagaaacttatatcaaagcgtttttcaattttattggggtgactgatatcacttttgtgcgcgccgaaggaatcgctttcggaccagaggcacgtcaagctgccttagataatgcagcagcgcaaattgcccagttagcgggttaa

SEQ ID NO: 43188 - DNA, 1350 bp, Acinetobacter baumannii
atgcaacaaaaacaattaaatacccctgatgattcagtggaacaagtcaccttctggcaagccttcttattttggctcaagcttggttttattagctttggggggccagctggacaaatcgctgtgatgcatcaggaactggttgaacaaaagcgctggatatcagaaaaaagatttttacatgcactgaactactgcatgttgttacccggacctgaagcgcagcagttagcaacctacattggttggcttatgcatagaactgtgggaggattggttgcaggtattctatttgtattgccctctttatttattttaattggactatcttgggtttatataaaatttggagatgtgcctgttattgcaggtatcttttacgggataaagcctgccgtcactgcaattgtctttcatgcaacttaccgcataggcagtcgttcgcttaaaaataagtttttatgggtcgtcgcaattgcagcgttttttgccatttttgtcttaaagcttcctttcccgcttatcgttttatcagcaggtattgctggctatttagcgagtaaaaagtacccagaactattttcctccgcgggtgggcataaagctagtcaaaaagattatggtccggcatatattgatgatgatactccgacaccagagcacgctaaattccattggtcacggttagccagacttatttttgtggcaatcgctttatggttattgccaattttagctttaggcgcatattttggatggcatcattcctatacccaaatggcttggtttttcactaaagctgcgctgcttacgtttgggggcgcttacgcggttttaccttatgtctatcaaggggctgtcaatcattttggatggctttcacctacacaaatgattgatggattggcacttggtgaaactacacccggtccactaattatggtcgttgcctttgttggctttttaggaggcgtcaatcattcattacttggctctgagcatttattttttgctggagcactcggtgctgttattgtgacttggtttacatttctattttcatttgtctttatttttgcgggtgcaccgattattgaatctacacataacgaaattaaatttactgcacccctcactgcaattaccgcggctgtggtcggtgtcattttaaatttagcactattttttagttatcacgtgttatggccacagggtttttcaggccattttgatattgtcgcggccctcattactgtagctgcatttattgctttattccgatttaacattaacgtgctgtatgtcatttttgcttcggcactggttgggctcgcagtcactttcttttag

SEQ ID NO: 43189 - DNA, 744 bp, Acinetobacter baumannii
gtgagccagctaccccaagatcccaaaaatcacaagcctctttacgatcaattaagggaactcatccttaacaaaattgtaaatggtgaatatgccgtactgagccaaattccatctgaaaacgagtttgctgaacaatttggtgtaagtcgaattacagttcgccaagcgctcaaccaattacagttggaaggctatatttttaaggtgccaggtaaagggacctttgtaagcaagccaaaaacgttccagaacatctcaagtttgcaaggttttgcagaagcaatgtcatctgctggtcacgaaattttaaaccgtgtcatctccgccgagcttaagcagatcccgatgcacgttgtgcccaaattaaagttacctgttaaagccaatgtgtatgaaattcaacgtgtccgtttactcaaccgtcagccagtgtcttatgagttgacttatttaccagagcatattggtttgaaacttaaagaaaaagcgattgatttacgtacaaccgatattttcaaggcattagaacaagagtgtgacatccctttgggacatgcggatttaagcattgatgccacggtagcggatgaagaattagcagctttgttgcaagtcgaaatcggaactccggtattacgcgttgaacgtttgactcatgacgcaaatggccaaccgattgactatgaatatctctatttctcaggcgataccttccagtaccgtttacgtattcatcgttaa

SEQ ID NO: 43190 - DNA, 1734 bp, Acinetobacter baumannii
atggaaaataaatatcttgagttcgatattgtggtgattggtggtggaactgcagggccaatggctgcgattaaagccaaacaagaaaacccgaatttaaaagtcttgctcattgaaaaagcgaatgtaaaacgtagtggggcgatttcaatgggaatggatggactgaataatgctgttattccgggctacgcaacacctgagcaatacaccaaagaaattaccattgctaatgatggggtagttaaccaaaccactgtatatgcatatgcgaagcatagtttcacaaccattcaacagctcgatcaatggggtattaagtttgaaaaagatgagactggcgaatttgcagtaaaaaaagtacatcacatgggggcatatgttttaccaatgcccgaaggccatgacgttaaaaaagttttatatcgtcagttaaagcgtgctcaagtcaaaattaataatcggattgtcactacgaagcttctaaaaaatgagcaaggtgcaatcaatggtgtacttggttttgactgtcgtagtggtgacttttatgtcattaaaacgaaagctgccattttatgttgtggtgccgcagggcgtttaggtttgccagcttccggctatttaatgggcacttatgaaaacccaaccaatgcaggtgacggctatgcaatggcataccatgcaggtgctgagcttgctaacttagaatgcttccagattaatccattgattaaagactataacggcccagcttgtgcctatgtgactggtcctttaggaggttataccgctaacagtaaaggtgaacgtttcattgaatgtgactactggagtggtcaaatgatgtgggagttttaccaagaactggaaagtggtaatggtcctgtttatttaaaagtagatcatctggccgaagaaaccattcaaaccatcgaagaaatcttgcataccaatgaacgcccaagccgtggacgttttcatgagggccgaggaaccaattaccgtcaagatatggtggaaatgcatatttcagaaattggtttctgtagtggacacagtgcttctggtgtatgggtcaatgaaaaagctgagacttcagttaaaggattatacagtgctggcgatatggcggctgtacctcataactatatgcttggtgcatttacctatggttggtttgcaggtgtaaatgccgcgcaatacgtgaatgcagttgaagatagtgaattaaaccaaagcgaaatagaagcagaaaaagctcgaatatttgcgccactaaattgctcagaaggtttacctccagaacaagtggaatataagctgcgccgttttgtaaatgactatttgcagccccctaaaactcgccaaaaaatggaaattgggctcaagcgttttgaagaaattaaacaggatattaagcgaatttctgccagaaacccacatgagctgatgcgtgccgctgaagtttcttttattcgagattgtgcggaaatggcagctagagcttcactgtttagagaggaaagccgctggggactgtaccactatagagcagattttcctcaaaaaaataactcggattggttctgtcacgcgcatttgaaaaaagatgaacacggcaacatggtcagtttcaaaaagccaatcgagccttatgtggttccgattaatcaagatgaagctgtgtcgtatgaccatttacgtattcaaaaagatgttgctctagcagactaa

SEQ ID NO: 43191 - DNA, 246 bp, Acinetobacter baumannii
atggcttttatttttaaagaagtacagcaccgtactgtcgcacccgtcattatcgatgaagataaatgtattgctgataaaggatgcactgtctgtgtagatgtttgtccaatggatttattggcaatcgatccaacaactcaaaaagcttatatgcaatttgatgaatgttggtattgcatgccttgtgaaaaggactgcccaacaaatgcagtcaaagtaaatatcccatacctactcaaataa

SEQ ID NO: 43192 - DNA, 1431 bp, Acinetobacter baumannii
atgagacaaaataaattgatcaataaaaaactattactcagtagcttaattggtgccattgtacttggcactttggggtgcggcagtaaaacagaaactgtgcgtgtagccattggtacacaagacacgaccattaactgtgcaacaggtgggttgctgattcgtgaattgaatttattaccaaaatatttgcctaaagatggtaaatacaaacacgttaaatatgacattcaatggaaaaactttacctctggtgcaccacttaccagtgagatggtggctgggcgtttagatttgggagcaatggccgactttcctgcggttaataatttagcggcatttaaaaaggctggaaaagaaagcatatttttagcgccattgtcaggcagtgttaatggtagcggtaatgcgattgttgttccaattgactcaaaagtgacctcactgaaagaactaaaaggacaaaccatttccgtaccttttgcctcaactgctcatagactgttgctacgagcgattcaagctgaaggctggcaacttgataaagatattaaagtgattgctcaggcgccagaggtggcagggcctgcgttaaaaagtcataagattgctgcgcatgctgacttcgtaccatttggagagttatttgcttaccaaggttttgctaaaaaaatctatgatggttcacaagcaaaatcaccaacatttcatggttcacttgccagcaaggattatgcacagcagcatccagaagttataaaagcttatttacaagcaactattgaagcaaatcgcctgattcgggaacaaccagaaaaatatagtgaacttattgctgaaaaaacaggtattcctgccgaagttgtttatctatttcatggccctttaggtctgcaaactcgtgacttaacgtggaaacctgaatatcgaaaagcgactcaaattgcgatagataccttaaaagttttaggcaaaaacgacggtacgcttgatgtaaataaatttattgatgaccaatatattaaggatgcatttcaggcatctggacttaattacagccagcaacttgctgactatgcaaaatcacctttggttgccaatgacgcattaacgggccaacccatcaaaacatttgatcgggtgactcaaatttgggtaaagggtgaagaaaaagtgcgtagctatgaaacgcctgagcatgctttttctgatttaaagaaaatacaagccgatggaaaaacggtgcgtgtggtttatagccaagatcatcagtccgacattaagttacttgccaatttggcatggtatgccacagacaaagcaggacaaattcaagcctttttattaaaagatgatgctgaaaaatgggctaaacaacagggcggaaaagtatatgactttaaagctattcagcttgtaacacagagctga

SEQ ID NO: 43193 - DNA, 855 bp, Acinetobacter baumannii
atgagtagtttagcccagacaaaacctaataaccaaagtacatttttgactaaattttttcagcagttgagatcatatccgccgcgtttaaaaagctatgtcatcgctttcacatctatagctttttggatagtcatttggcaaggacttgctcagtttaaaataaatttaggcattgtgaactttagcaatgtaccaacacctttagacgttattcatgcgctttgggctttctttcaactcagtactgcatttgaacatgttgaatctagtgtgtttcgcgtagtggttggttttgtgctagcggctttaattggtgtaggaattggtttgttggcaggacgttatcaaaaactggctgcctttctaatgccaccattagaagtattacgtccaatcccagcagttgcatggattcctttagcgattctgatttttccatcctcagaagcgtctatgatttttattacctttattggggctttatttccaattttattaaacacggtacatggcgttggtgcagttgacccaaggctcgttgcatctgcaaaaagtctaggtgcttctgatctcgccatcatttatgaagtcattattccgggggcattaccgaatattattactggtttatctattggaatgggtacttgctggttctgtttagtgactgccgaaatgatttcggggcaacatggaattggatacttcacatgggaatctttcaccttgcaaaactatagcaatatcgtggttggcatggtgctaataggagcgttaggtatgtttagcagtacattggtgcgtgtgattggaaaccgatttactccatggtatcaattgaggaagtcttaa

SEQ ID NO: 43194 - DNA, 840 bp, Acinetobacter baumannii
atgtcaattacacaaggccatgtacgtattcaaaatctatctctacatttagggcaagctaaaaatcgttttcaggcattagatcgggttaatttcgaaatacaaccgggcgagtttatatgtctacttggcccgtcgggttgcggtaaatcaacattattaggtgctttggcagggcacttacccattagttctgggtctttaacggtcgatgatgaatcgatatttgaaccgcatccagatagaggtttggtgtttcagcaacataccttattcccgtggaaaagcgtactcgaaaatattgcctttggtttaaaaatgaaaggcatcgctaaacaaaagcgtattgaacaagctcagaaaatgattgatctggtcggacttaaaggttttgaacataaatttccagctgaactttctggtggcatgcagcaacgagttgaaattgcgagagtattgattaatcaacctcgcattttattaatggatgagccttttggtgcgttagatgctcaaactcgtttaaaaatgcaaatgctattactcgaaatttggcaagaaattcaaacgtcggttttatttattacccacgatattgatgaggcactttttttagccgatcgagtgttgattatgagccatcgaccagggcgaattattgaggaaatttcgcttaagtttgaacgtccacgggatgttgagcttgtaacgagtagtgaatttacagccattaaaaaacattgcatccaaacgttaaaagaagccactcaacaagaagagttaagccgtttaaatccattagggcttggaaagaaatcacaaattaaggaatacgaatga

SEQ ID NO: 43195 - DNA, 999 bp, Acinetobacter baumannii
atgagtttttattatcaagctttagatgatatcgatgaatataatcaggaatttcttgcgcagctcaatcatgcagatgaaaagatccgctttgtcgctttaatgaatattggtgatgaagaaaatccggatttacttccttggttgcatacagcactacaacacgactcttcagctttagttcgtgaagaggcagcaaaaaatttagaaagctgggaagacccaaccagtttgcaagtattggcgcaagccttatttgatgttgatctgaatgtgagacaagctgccagccagagtttaagtgaagttaaaaatgcggcatcagcccagatactggcaccgtatttaaagcatacggatacttttgctcttagtgcaattctgcgtgctttaaaacctttacgaccacagcaattatttgaagagatatctgctttggtacaccacgaagatgcatttgtacgccgtgaggcagtcagtgcattaagttggttacaacaagaccaagcaattacgatattggcaaaaattgccgaaacagatacagatgatgaagtccgccgtattgcaacaggtggtttagcttatagtcagaacatatcggttgaagttatccaagcacttcaacattctttaacttcggaaagttggcaactaagagtggaagctgcactcacgattggaaaattacgtattgttcagctcgaagctcctttaattcatgctttatcagacttgtattggcaagtacgtattgcagcagtacggagcttgggattaattaaatcacatctggcagttactcatttgactgaaaactttaagcatgaaattagcaatttacgtaaagaggtcgctttagcactcggtgaaattggcacatcagaagctcaaacgttattggaacaacatcaaaatgatccagatcctgaagtacgaaaagcgattcgtattggattaaatcaaattggtgaggtgaagtatgcaaatcagacctga

SEQ ID NO: 43196 - DNA, 282 bp, Acinetobacter baumannii
atgcaaatcagacctgatatccgtgtcgacactataaataagcaggttcactttatatggaccgatggctcaagcatatgtttgagtcatcaaagtttaagggaaatttgcccatgtggcttttgtcgagcgaagcggattaaacaaattaaaatagagtatcaaaatgttgaagtgacagctatgtttgatcaaggttatggtgcccaaatttgctttagtgatgggcatgacaaagggatttttccgtgggcttttttaaaagaatttgctaagagctaa

SEQ ID NO: 43197 - DNA, 1287 bp, Acinetobacter baumannii
atgacatatactcaggaagaaaaacgtagcaggatacgtgggattgtaggcgcagcctctggtaatttagtcgaatggtttgatttttatatttatgcagtatttgctgcttactttactcaagctttaaccgcgccagatatggatagcacaactaagtctatttatgtttggggggtgtttgccgcaagcttctttatgcgtccgattggaagctggctatttggtcgtattgcagatcgacatggccgaaagaagtcgatgatcatatcaatctgtttgatggctttaagctcctttttatttgcagctttgcctacttatgatcaagtcggtttatttgccccttttctgttactccttgttcgtttacttcaaggcttatcagtgggtggtgaatatggcgccgttgccacttatatgagtgaattaggcttaaaaggtcagcgtggtttttactcatctttccaatatgtcaccctttctggtggccagttacttgccagcttactgggcgttattttgttggcatttttaagtgaacaacaattacatgatggcggttggcgtattccgtttgtgattggtggtatcgcggcaattttatctttacttgctcgtagtcgtttagaagaaacgctttctcatcaagatagcgaacgtaaagagtctggtagcttaagagaactctttaagaaacactggaaaacctttttattagtggttggatacacttctgctggttcattaacgttttatgtagagactgtttattcaaaaacctatttaaccaacttagggatggacggaaaaacagttggttatatcatgaccttcgccctatttgtctatatgtgtgctcaacctgtatttggtgcaatttcggaccgtattgggcgacgctcttcaatgttggcatttagcttattgtccgccatttttatttatcccgtcatggtgatcgggatgcgtgcctatatagattctccgatcatcattacattgctactcatctttatgatgatgttactcagcttctatacttctattagtggcttggtaaaagctgaaatgttcccacctcatgtgcgagctttaggtgtaggtttctcttatgcagtaggtaatgcgctgtttggtggttctgcgccttcggttgccttacagtttaaagctgccggaattgaaaataccttctttatatatgtgattatcatgctggttatctgtttcttatgtagccttgcgcttccgaaaaaaccagattatttagaacatgatcattaa

SEQ ID NO: 43198 - DNA, 2184 bp, Acinetobacter baumannii
atggaaagacgttcgttaaatcttcacttcatgacatgctctaaaacagcattggcttcatctattgcactcataacatctgtcgtctatgcaaatgaagcggaggtttcgcagctcccaaccattactgtgaacgctacacaaaatagtgatgcgctatacacatcaaaaaaagtgagtttatctggttttcaaactggtgatgtaaagaaagtacctgcatctattaccaccattacatctgaacgtatagcagatcaacacgcaaaaatactgaccgatgtgattaaaaatgattcatccttaggcgatggctatgctgcaattggctactatccaaactttgtagcacgtggtttcgcactcgatttaggctcaagctatctcattaatggccataccatacgtggcgaacaaaatgtagctttagaaaataaagaacaagttgaaatcttaaaaggcatttctgcaattcaaagtggaatgtcgacaccaggtggtgtggttaactatgtaaccaaaagaccagccgatgttaaaaacattactgtagatgcaaattcagaaggcggctatacactggcaacagatgttggcggctttgttaatgatagttttggttatcgaatcaatttagcccatgaaagcatccatccaaatgttcatcatgcaaatggtaagcgtgagtttggttcagtagctttagactggaaaattaatgagcgttctaaattattgttcgatattgaagcccagcatcaaagtcaacgttcagtacccggttatcaactgcttgatgggcaagaagtaccaacaaatgtagatcaagaccgtttattgggttaccagtcttggagtaagcctgttgtaaataacagtctaaatgcgagtttgaaatatcaatatgcatttaacgatcaatggaatggtagcttaagtgcgtctcaaagccgtgttgtgattgatgattatattgtatttccttatggaagttattactcatcaggtaatgaacttgcagtattcgacaaagatggcaactatgacatttatgattatcgcagtccagatgatgcacgtataaccaatcagtttgctgctgggttaaatggtcaattcaatactggcaatatacagcatcaaatcgctttcgaattacaacatacttataaaactctaaaacaccatacaccacttaatggatttataggaacaggcaatatctatgaaaatacggtcgactacaatccgtcattggaaagtccaggcgatcgttacaaagctctacagagtgatcagactgcatttactgtatctgaccgagttcaatttaatgatcactggtcaaccttactcggtgggaaactgattcatcttgatgagcaagcttataattcagatgggcagcaaagccgtgatacggatttaaacaagttcttgccacaattagcgctcatgtatagcccaactgctacgactaatctatatgcttcatatgctaaaggtttatcagacggtggcgaagctccgtggtatacaaataatattaaaaataatataggcccttcagtactatcacctagaagctctgaacaatatgaaattggtattaagcaacaaattcggaacttcttagtaacagcagctatttttgatttaaaacaagacaatcaatatagcaaagtgaatgcagaaggaactttcgattttgtttcacaaggtgaacaacacaatcaaggtattgaattaggtttaacaggtgctttaactgataaactcgatataagttcaggtattacctataccaaatctcgtcttgttgatattgatactgacagctacaaaggtcatcaaactcaaaatgtgccgaaagtacgtgccacagcccagttatcttataaagtaccgtcagttgaaggtttaagattattgagtggtatgcaatacagtagcagtaaatatgcaaataaagagggagctgcaaaagtaggcggatatagtgtctttaatattggtgctgcctataaaacaaattttgctgggcatgacacaacttttagatttaatattgataacttatttaataagaaatattggcgtgatgtaggcgcatttatgggagatgactatctgttcttaggtaatcctcgcacggctcaattttctacaacttttagcttttaa

SEQ ID NO: 43199 - DNA, 1419 bp, Acinetobacter baumannii
atgatgaacgctgatattactacccgtattgagaaggatcttattggtcatcgagaaatcaacaatgaccattattacggagttcaaacattacgtgctttagaaaatttcaacttaacaaatagcaaagttggaaatttccctaatttaattaaagcattagctatggttaaactagcttgtgctgaagcaaactataatcttaaaaacttagatcaaactaaatttgaagcgattgaatacagctgtaatcagcttattcgtggtaatttccatgaccagttcccaatcgacatgatgcaaggcggtgctggcacttcaaccaatatgaatgcaaatgaagtattagcaaacgttgctttagaatatatgggccattctaaaggtcaatatcaatacttgcatccaaataacgacattaatatgtcgcagtcaacaaatgacgtataccctactgcaattcgtttaggtttattacttagcctagatgagttaaatcttccatttaacaatttgattcttagcttcttgaataaatctcaagagtttgcacacattttaaaaatgggtcgtactcagttacaagacgctgtgcctatgacattaggtcaagagtttggtgcttttgcggtaactctacaaaaagaccttgagcaaattaatacgcttattccaaatgttttagcttatatgaatcttggcggtacagcgattggtacgggaattaccactgaatatagttaccgtgaactcgcgattcaagcacttggaaaaatctctggtaagaaaattaagtcagctccagatttgattgaagccacttctgatatgggtgactttgttcttttatctggtttattaaaacgtactgcaactaaactttcaaaaattgccaatgacttgcgtttactttcaagtggtccacgtactggcattaatgaaattaacttagaagcacgtcaaccaggtagctcgattatgccgggtaaagtaaacccagttattcctgaagcaatgaaccttgcttgcttccagattattgcaaatgatttggctgtaacgttagctgctgaagctggtcaattacagttaaatgcaatggaaccacttattgcattcaaactgtttgaatcgatggacttgcttggtaaagcaatggcaatgttccaaaccaaatgtattgatacaattacggcgaaccctgaacactgtaaagctttggttgaaaactcaattggtattgtgactgcacttaacccatacctaggttatgaaactacaactcgtattgctaaaacagcaaacgaaactgggcaaagcgtattggctttagttcaaaatgaaggtttattatcagcacaagtacttgatgatatcttgtcgattaataatatggttaaaccaaaaatgtcggcttaa

SEQ ID NO: 43200 - DNA, 186 bp, Acinetobacter baumannii
atgttaaaagtaactgctgctttattaatattgggaagttttgcttgttatctcctttggggtaatgaagaaaaagctgaaactaaaagttcgcacatgcttaaagaagctgagcaatcaattaagaatgctgagttatctattcaaaaagctaaacaaaatatccctactgcatcgtatcaataa

SEQ ID NO: 43201 - DNA, 228 bp, Acinetobacter baumannii
atgagaatgaagtttattgcatatgaccctaactctggtgagaaactcagcttaaaagagcatattcatcacatggataaatacacaacttatgttttttttagtgatgaaaaagacaatatggttttcaatccacagaaaaaacagatatttgaaatcagtcaatatacttctaatatgatggttgaaatttcaagaaagttatactacttgattggtgaatattag

SEQ ID NO: 43202 - DNA, 897 bp, Acinetobacter baumannii
atgaatttagaagtccgttgggtagaggatctcctcacattagaacgcgaacgttcaatctcaaaagcagcagagaaaagatttattagccagtctgcatttactcgaagaattcaacaaattgaagaaatgattggtgctgaagtcattattaggaacaacaaaaacaacatcgaatttacagacattggtcgaattttattagtgatgtctaaaaatattgaaaaacaggtagaggagaccgcaaaactcattaaaaatattaaaaatgaaaatgaatcgaccattcgtttctgcgttgttcattctttagcttctggatttttaactacttttttaaagaaatttcctacacttattcgtgatttaaaaattgaaattgtcgcaacgaatagtggagaaggcctgtctttgttaaaagaaggtgcttgtgactttatgatttgctatgcagataaaagcaatattagaaaggttggggatgatattttaagtggtatcaaaattgctgaaacggttattgtaccggtttctgcaactgaacccgaccatagcccgaaacatacaatacaaagtaactttgctctgctagcgtatagtaaacacgcgtacttaagaaaactggtggatcaactgattgaaggtaaacttatatataaaacgttatatgaaacagataatgccaccaatttaaaagagctggttttacaaggtctaggggttgcttggattccaaaaattaatgttgaagaagatcttgcagccggaaaattagtcattttagaccaacaagaatattgccttgctcaagatatttatatcttcaaaaataatttgagtgataataagtcggtacagaaaatatggaatggttttaaaggccagcaagacctataa

SEQ ID NO: 43203 - DNA, 897 bp, Acinetobacter baumannii
ttgtttgatctagacagtagattattaaatattttttatcatatttatcggttcaaaagtgtttcaatggctgcagatgccataggtttgacacagccgagcgttagtaatggtctaaacaaaatccgccaacattttaatgatcctttgtttattcgagtcggtaatgaaatgattccgactgaactggcaaagcaaatttttccactcattagcgaagttattgataaggttgaaagcattaataattttaatgtgaactttgatcccttgacctcagatcagttgtttacgattgcgatgactgatgtatctcatttggttttattgccgcaactgaccaattatttaaaagaaaaagcacctttgattcgtttaaatattaggccgattacaccagaaactagctatcaaatggcaaacggtgaaattgatctagccataggttttttaccgcagttagaagaaggtttttatcagcagaagttttttcgtcaacactatgtcgtaattagctcaaaaagccatccacgtttagacccaaataatttcactttagaggattatatgcgtgaatctcacatcgatattgatgcgggtattgggcattatcacattaaaaatgagctgcagaataaagggctggaccgaaatattttaattcgcttaccaagttatttaggggtgggattggtcgttcaggaaacagatgctattgccactgtaccatattatttaagtcaggttttattggttagagagaacttacagattttaccggcaccgcttgattttccaacttatgatgttaagcaacattggcatatgtcttgtcaccacaagagtagccataaatggttccgtcaaacctgttatgagctatttaaaactgcttaa

SEQ ID NO: 43204 - DNA, 1173 bp, Acinetobacter baumannii
atgagttcaattgttatagtttcaggtagccgtactgcaatgggtggttttcagggtagtttatcttctctaactgctccagaacttggcgctgctgtcatccgtgaatcgatccaacgtgcaggtgttaagcctgaacaagtagatgaagtgattttcggttgcgtactcagtgcaggtattggtcaaggccctgctcgtcaagccatgcgtaaagctggcgtgcctgatcatgtcggagctgtgaccattaataaactttgcggctctgcaatgaaagcggtcttaatggcatcagataccttaaaagcaggtagtgccaatattattgtggctggcggcatggaatctatgacgaatgcaccttatattttgcctaaagctcgcggtggttatcgtatgggacacggcgaaattaaggaccatatgtttttagatggcctcgaagatgcagaaactggtcgtttaatgggatcttttgctcaagacatggcaaataccaaaggctttacccgtgagcaaatggatgactttgcaatttcttcacttaaaaaagcgcaaactgcgattacggaaggttatttcaaagaagagattgttcctgttgaagtaaaaacccgtaaaggtgttgaagttattgatcaagatgagcaaccattaaaagcaaatcttgagaaaattccaactttacgccctgcttttagcaaggacggtacaattacagccgctaactcaagctcaatttctgatggtgctgctgcattagtacttaccactgaagaatatgctcaaagtcacgggttaaatactttagcaaaaattgtggcaacttcgactcactctcagcatccaagcgaattcacaattgctccaattagtgcaattcaaaaagtacttgagcgtgctggttggtctgttgatgaagtagatgcttgggaaattaatgaggcttttgcaatggtggcaatggcaccaattcatgagctaggaattgatgaagcaaaagtaaacgtccatggtggtgcatgtgcattaggccatccaattggtgctacaggttcaagaattatcctttctcttatttatgcattaaaacgcttaggtaaaaagaaaggtgtcgctgccctatgtattggtggtggtgaagcaacagccgttgcgattgaaatttaa

SEQ ID NO: 43205 - DNA, 1410 bp, Acinetobacter baumannii
atggaaaaacagcaaggaatttttgaaagatttgctcttcggattagtgactggtctgaaaaatggtttcctgattcatatatttttgctctgcttggcgtcattattgtctctgttgccgccttgggtattggtgctccaatccatgatgtagcgacctcatttggtaatggcttctggagtcttattccctttaccctgcaaatgactatgctcattattgtaggttatgtcgtttctgtatctaagcccgtaaaattcctgatccaaaaaatggcgcgtattccaagttctggacgtggtgctattgttttggtggcaaccgttagtttattaatttcactagtcaattgggcaataagtacgattcttactgcacttttagtgattgcattagcaaaacgtaaagagctgaatatggattatcgtgctgctgcggcagctgcaatcattggtatgggcgcaacttgggctcttggaattagttcatcagcagcacagcttcaggcaaataaaaccagtttacctgagtcaatttataacctaactggtgttattccatttaccgaaacgattttcctttggcaatcaattgcaatgaccattattttagtgattgtttcaatcgctattgcatattggtctgccccaaaaggcaatagcgttaaaaccattgatagttttgatgtgcaatttgaagaagaaaaaacaaatgaagcaaaatctactcgtccaggtgactggttagaaaattcgcctatcttaacgattattgtggtggttttaggcttaatctggatgttttttgaattttcaaaaagcaatcccatcattgccatttcaagtctcaacacctacaacttcgtgtttttaatgcttgggttagctttacatggcacaccacggaactttttaaatgctgttgcaaaagcagttccggcagtatcgggaatcttaatccagtttccactgtacggaagtatcgcctttattatgacccaagctttaaatagccaagacttatcgctgtcacattatattgccgaatttttcgtttcaatcgcttcaaaagaaacctttgcaattgtgatgggaatttactctgcggtacttggattttttgtaccttcaggtggtggaaaatggattattgaagccccatatgtaatgcaagcagcaaatgatttaaaggttcatttgggctggtctgtacaaatttataatgcagccgaagctttaccaaacttaatcaatccattctttatgcttccaatgttaggcattttaaaactaaaagcaaaagatgtgattggttttacagtgacacagctcgttgtgcattttcctttagttttattcttgctgtggttctttggtagaacgctcagctatacccctccaactttttaa

SEQ ID NO: 43206 - DNA, 642 bp, Acinetobacter baumannii
atggcttggtcacgtaatgaaatggcacaacgtgctgcaaaagaacttgaagatggtttttatgtcaatttaggtattggtttacctactcttgttgccaattatattcctgaaaatattaatgtttggcttcaatctgaaaatggcctattaggtattggtgaattcccgactgaagaaactgtcgacgccgatttaattaatgccggcaaacaaacggttactgctcgccctggtgcagcctttttctcaagctcagaatcttttgccatgattcgtggtggccatgtcaacattgcaattttaggtgcaatggaagtttctgaaaaaggagacttagcgaactggatgattccgggtaaaaaagtcaaaggtatgggcggtgcaatggacttggttgttggtgttcaaaaagttgttgttctaatggaacactgcgcaaaagacggtacaccaaaaatcgtgaaaaactgtagtttgcctttaacaggtaaaggtgttgttcatcgcgtaattacagacttaggcgtaatggatattacgccacaaggtgtagagctcattgaacttgctaaagacgtaacgctcgaacaaattcaagctgctacaggtgtcgagttttataaaaccttagtcgcgtaa

SEQ ID NO: 43207 - DNA, 705 bp, Acinetobacter baumannii
atgaataaagtttatgccaacgcagaggcagcactgaaagatgtaattgcagacaatcaaacacttgctgttggtggttttggtttgtgtggaattccggaaaaactaattgttgcagttaagcaaagtggtgtgactggtctcacatgtatttcgaataacgcaggtgtagatgatttcggtttaggtatattgcttcaaaccaaacagatcaaaaaaatgatctcttcttatgtgggtgaaaataaagaattcgagcgccaatatttaaatggtgaattagaagttgaactaaccccacaaggcaccttagctgaaaagttacgtgctggaggtgcgggaattccagcattttacacacaaactggcgtaggtacactcattgctgaaggtaaagaagaacgtattttcaacggcaaaaattacattttagaagaatctttaacagctgatgtagctcttgttaaagcatataaggcagacaaggcaggtaatttagtatttcgtaaaactgcacagaattttaatcccgaatgcgcaatggctggaaaaattacaattgcagaagttgaacaggtggttgaaattggtgaattggatccggatgaaattcatttaccaggtatatatgtgaaccgcattgtattaaatgcatcgcctgaaaaacgcattgagcataaaactttaagcacggaggcagtataa

SEQ ID NO: 43208 - DNA, 882 bp, Acinetobacter baumannii
atgacgcttaaacaactaaaagcttttttggcccttgcgcgtacactcaactatgccaatgcttctttagagttacatctcagccaatctgctttaagtctcaccatcaaaagcttagaagaagagttaggcggtaaactgtttaaccgtaatacacgccgtgttgaacttactcaagaaggcaaatcgctcattccgtacgctaaaaaactccttgccaattgggatgaaatggagaacgatgttaaacagcgctttaaactcaatcgcggaacattaagtattgcctcaatgccctttgtgactcatgcaattttgccagaggtgattcatcaatttttagcagtccatcccaatcttaatttttcaattcacgatattccaaatgagaccattatagaaaaagtacaagacggtatttttgagcttggtatttgttttgaacctgatctcaccgaaggtttagaatttaaaccgttgtttgaagaagacttcttagctctattacctaagagtcacccactcgctcaatcatcttctattacatggcatgagctttgttcaaatccatttgtaaccttgcaaaaaccctcaattgttcgatatttagttgagcaaaattgtttgcgaaataatataacgctagatttaaaagttgaatgccaccaaatttcatctctttcaagtttcgttgcttatggaattggggtaagtgcaattccaaggcattttgctaaacacattgataaagaacataacgttctgattgatttaaaagatgaagccattcataaaacagtaggaattgtttataaaaagaactttgaaatttcaaatatttctgctcaatttattgaggcactcgttcaatataaattttaa

SEQ ID NO: 43209 - DNA, 390 bp, Acinetobacter baumannii
atgatgtggattaaatttatattgtatcctttggggatgtttgtactgtggcaagctatttttataattacgcaactctctttaacatctctaaatatgccacaagtctttgtaggtataatttcattggtcataaattgcgggatgcaaattcttattggttataaaatccctcatctagcaccgaaatataaatttgtagtgagtgctacatacgtcattctcttcacctttttattggcaatctattcaacaactgttttattagaaggcttgaaagttgctcctcaagcaatttggctaggttatttgtttttccatgtaattggcgtgtttatatatttttctaataatagaaacgagttttgttgggacaatttattaaagtaa

SEQ ID NO: 43210 - DNA, 828 bp, Acinetobacter baumannii
atgaataaaactattcttggcttaatggtagtaccacttgtgttgagtggatgtataaaaaaagcagaggaaaaaccaacagaaaaaccggaaaaaacctccactataaaagcaactgaacagcccccaaaagaagaaaatataattcctgctatgctagtacgtaattttcttgtgaagtttcaacaacccaaaatttgtgctccaaatccagatgttgatggaattgtatgtacctctaaagaagcgattgcacttaaaagtaatattgaatggattgatcaagtaatcgataaggaaatccgtaaagattatgcagatgctcttacacctccttcagaaaagcaaaagcaactaaatcaaacccaagctgaagggtttaataactggtcacagagtgtggtttatcgctttaatggacagtttggccaatatgtgcaaatttcgaaagtaagttcagaatattctggcggggctcatggtatagcaacttttgaagattatatttttgatttaaaaagtaaaaaacgcattgaattaaaagatattgttatcaatggaaagatgaatgcgcttaaagaagaattgtggaaacaatacggatattggtgtcaagaaaaagatatgcagccttatattagtaaagaagactttaaagtaagtgaaaatttctatattaatcaatcaggcgggattacatttgattttcagctttacgaattggctccatatgctgcaggtcctgtgagtttagaactctatgatacagatcaactgataaaatcagattttttacagccaatgcctactttaaaaactgaaatgtaa

SEQ ID NO: 43211 - DNA, 168 bp, Acinetobacter baumannii
atggttggtgcaggaatactagccattttcactttactttgtattcctattggacatcctttttggaaattagctgaaccacaaagaactcaggatttccaaattgtattagaacatattgctttaagtggagggcttctattagcagcaatagccaccaagaaataa

SEQ ID NO: 43212 - DNA, 255 bp, Acinetobacter baumannii
atggcatccttaattcataatactttatcaagtaattacacattagttattggacgaatagttttatcttcattctttttaatcgctggtatttttggtgtgtttaactttgatactgttgttaatgaaatgattggagcaaatttaccacttcctcaattatttgcttttgcaactatagccattcaacttataggatcaattctacttatttcaaattttgcagggcttacatggttggtgcaggaatactag

SEQ ID NO: 43213 - DNA, 615 bp, Acinetobacter baumannii
gtgataagtgaaagtaccaaaaccaatcaaattgataataaaaatcgccttataattcaaacagtaggtgatctttttctagagtatggttactcaagagtttctattaatttaattatttccaagatcggggggtctaaaagagatctatatgctcagtttggtgataaggaggggctttttaggagtgtgattgcggatgtgtgccagcaagtacttgatccactaaaagccttaccagtagaaggtggctcaattgagcaagctcttacttcttttggaagaatatttttatcagtacttttatcttctcgcgtaattgctttacagaaactggtactttcagaagcgactcgttatccagagtttgcaaaaacatttgtacaattaggtccagttagtgcatataacttagcagcagaacttttaatgaaaagggctgaggttggggagataaaagtttcaaaaccgaaagtcatgggtgctttattttgcgatatgctcatctcagatctacaatttaaaattatatctggtgaaatagttactgatagtcaaatagatgaacgtgttgaaatggcagttttaactttcctaaatggtataaaaagctaa

SEQ ID NO: 43214 - DNA, 417 bp, Acinetobacter baumannii
atgaaaaaaaacatttttttagctttagttctgggcttagttgggtgctcaacagctccagttgttccgaatacagcaaaaccgatacctaatgagagagtgtacaatcagaactatttaaagaaacagactcctgaacaagcaaaagttactttttcacgagataaaggttttctaggatctggttgtactcatgatatgtatgtaaataacgaaaaagtattttcaattcgctcaaacgaaatagctacaatttatcttgagcctaaatattatatctttagattagaaactggtgggggaatgtgcccaaatattgccacttctcaagaaacagaagtcaaaccaggggcagagatagaatatcgaattttacttccatctgactttaatttaagactaactcgaatgaaataa

SEQ ID NO: 43215 - DNA, 1047 bp, Acinetobacter baumannii
ttgtatgaaaatatatcaaacagttttgcttatgccgcttatttacagtgcgcgaaatttggtaaaaaatatattggattaatggggtcacgtttaccaaatcactttgaaattcaaaattctattgtggagggtgagttaaaaaaactagaaaccttggctaaaaaaccaataacacaagatgagatggaatggtttgaaaactataaaaagagtattgtagatattcaaccagattatatgaaacagaatggattggataatgttgcaatttctagaatagtgaaacttaataagtttttaaaagcattacgcttacttactattggttttaaatataaacattattacgattatcagttcggtaatccatttatggtgcctattaaaacaatccgagtaaatattaaaagatatttaaatacaaaaaaatctcaaaaattttatataaataatgacgagttagaaatttgctcatctaaagaaagattttatgtatatccgatccactttcatcctgagtcttcaacttctgtattggcgccagaatatacaaatgaatattcgaatattataaatattgctaataatcttccttttggtacttatttatatgtaaaagaccacaaaagtgcaaaaggtgtgcagagttatgaattctataaaaaagtaagttcattacctaatgttcgtttagttaattttgatgtgaatattaagagattaattctaaagtcagtaggtgttattactgttaatagcacggctgggtatgaagctttacttcttggaaaaccagtttatcttttgggtagagtgttttatgaaaactttaataacgtatataacctcaaatcttttagagatattagagatattctggattttcaatttttagatgtaaaaaaagattttatcgcatataaaaaatatgtttataaaggtgtaatttttattgattatggtaatagagtcaatgataaaaaaagatactttagtgaattggtcgattcgatattcttaaatattaataaaaatattgagtga

SEQ ID NO: 43216 - DNA, 981 bp, Acinetobacter baumannii
atgacattatttatgtattgttttctatgtttaatagctttaggttttactattgtgcaaaaaaaacattttctgaattatgtttttgttttctcctgtttgatggggtggtctattgttgcgcggtttaactcaattcaacaagatttgacagtttattcggaagtaatgacttatgattggggattttttaaaagcttttatgtattaagagagccagtttattggattacaagtaaaattctttatgatttttttaaagaacctatttttgtatttattatatgggatgctataatttttagcttacttacctatattgcttataaaaaagatgtaaaaccatattttattttggtttttatattgttctttcctaatgttatgggttttttaaacgtttatagacaatatatatcaacagtatttcttttcttgtcttttttgcttgtttatgagaatcatataaagtccaagtttttttatttagcttctttttttagtcataatgtgggagctatattcttgcctttgattttcataaggaagaaattttttcaaattaaatttattttagcttctattacctctatatttgctatgattctcctatcgagctcaaaatctgaaatggataccggagaaacatctccattgcttttttttgctgttgtgtgtgctggaatgctgatttttttatcattgaataaattaatattatatagaaaaaatatagatttatattatataaacatgtactgtatattcgtatctcttttttctgttttatttttatctaatgctccagcaaaaagaatttgtatgattgctttaacctttttattatattcaatttattggtttattgaagaaaataaaaagaatcttttcttctttagaggagctcttgttttaattgctttaatcccaacatttatgttctcttcagtttttaatatgcttgtgtatatggataagtaa

SEQ ID NO: 43217 - DNA, 1035 bp, Acinetobacter baumannii
atgaaaattctttttataattaactccttgaaaaataaatctggttctgaacgagttgcagttgagttggctaataaaatgtcagcgataagaggctataatattactcttttgaatagagaggctataaaagaaaatacaggttacccaattgcagataaagtagaagtaattactttatttggcagtttatttgagttttataaaaagcttagaaagcacatttcttccaataattatgatgttgtagttgtacataatatgggtaaattatctctactatgtacttttgttccaaattcaaataaattagtgattctcgaacatgtttcttttgtcagtcgccctaaaaaaatacaaattttaagtaaacttctatatcgaaaaattgatcaagttgtgactctcactcaaaatgataaagaacaatttgataagtttcattcaaatgtaattgtcattcctaatttttctcccttttctatcgcttcgcaaccacaaaataatagtaaacaaattgtaacgattggccgtttaactgatcagaaaaactatattcatttacttcaagcttggaagaaaatatatcaaactattccggattggcagcttaatatttatggtgaaggtgagcaccaagagatgttgcaagattatattaaacaacagtctcttaaaaatgtgagtttgaagggtagtacctcaaatgtaaaagaagtttatgaacaatctagtttttttgtaatgtcatccaaatatgaaggtttgccaatggtcttaatagaggcacaaagctttggtttacctgttgtgtcatacaattgtccttatggtccaagtgatgtcattcgcgatagtaaaaacggttttttagttgaagaccaaaatgtggatgagttagctgcagcgattttaaaacttgctttatctcctcatctattagaacaattttctcaaagttcattgttaaatgccaaaaaatatcaacctgaacagattttaagaatgtggattgaaaaggttttagaaggttaa

SEQ ID NO: 43218 - DNA, 828 bp, Acinetobacter baumannii
atgttttctgtactaagttctatttaccataaagaatatcccgaacattttaatacttgtatggaaagcatttgggataaacaaactttaaaacccacagaaattattttaattgaagatggtcctttaactcctgagttagaccaaattattgctaaatggcaagcaaaattagggaaagttctgcgggtcaaaaaacttgaacaaaatgttggaactggaaaagcaaaaaatattggtttgcaagaatgtacatatgacattgtttgtattgttgatacagatgatatttatgtaccagagagattcgaaaaacaaattaaatttttagaaaaaaatcctgatgtatcaattgtaggagggcaaattcttgagtttgttgaagatactcaaaatccaacaggtatgcgtaacgttcctttatcaaatgaagatctaaggaattatgcaaagaagcaaagcccgtttaataatatgacaattacatatcggaagtcccatatccttgaggtaggtggctatcagcatcatttgtggatggaagactataacctctttttacgagtgattgctaaagggtataaaattgagaacttaccagatatattagtctatgcacgaattgataacggtatgcatggtcgccgcaaaggtttccaatatattaaaagtgaaaaacagttactagatttaaaaaaacaactaaagttacaaaatcctctatatgctaacatgctgtttctggtacggtctgcgtttagactgttaccagcgaatttattaggtacaatttataatacctttcttcgtaaagatattaaaaaatga

SEQ ID NO: 43219 - DNA, 621 bp, Acinetobacter baumannii
atgaagcgtttagtagacatagtcatttctttaatagctttaactgtactatcgccaatatttctgatagttgcttataaagtccgtaaaaatttaggttcaccaatattcttttaccaagaaagacctggtaaagacggaaaattatttaaaatgattaagttccgttcaatgaaagatgcttttgatgctcaaggaaatccattgccagacgaagctcgtattactccgtttggacaaaaactgcgttcaactagtctagatgaaatgccacagctcattaacgtactaaaaggtgacatgagtgtggtagggccgcgtccaatgttaaaagattttgttgctttatattcaccagaacaagcgcgtcgtttagaagtatgcccaggaatgacgggtttagctcaagtaagcgggcgtaatgaacttgattatgaagaacgatttaagtgtgatgtatggtatgtagataaccacaacatttgggttgatttcaaaatcatgtttaaaacagtcaaagtgatgttaaaacgtgaaggaattaatgctccagggcatgttggaccatctttatttaaaggtaatgatacccaagaaaatattgattcttctgttaagtaa

SEQ ID NO: 43220 - DNA, 876 bp, Acinetobacter baumannii
atgattaaaaaagcagttttaccagtagctggtttaggtacacgttttctaccggcaagtaagtctattccaaaggaaatggtaacggtcattgatcgtcctgcaattgaatatgtagtacgcgaggcggtagaggctggaattgaacaaattattttagttactcattcatcgaaagcatcaattgaaaattattttgatcgtaactttgagttggaaaccaccctagaacaaaagaaaaaattcgatttacttgcagagattactcaaattgtgcctgagcatgtgagtgtagtaagtgttagacagcctcagcctttaggcctagggcatgctgttttatgtgcaaagagtgttgtcggtcaagatgattttgctgtgctattaccagatgtattagtaaaagatagctctggacaaaatgatctatctcgtatgatttctcgttacaactcaagccaagctgctcaaatcatggttgaggcagtgccagaccatttagtagatcaatatgggattgtggatgtaaaacatagcccaaatgaaggtgaaagtattgctatgcagggtattgttgaaaagcctgcagtaggctctgcaccatcaaatttatcggtggttggtcgctatgtgttacctgccaagattatgcaattacttgagaacacgccgaaaggtgcgggtaatgaaattcagttaactgatgcaattgcaatgcttcaagacacagatattgttgaagcttatcgtatgcaaggtcaaacatttgattgtggtagtaagattggctatttaaaagctgtactacactatggagttgaacaccctaagttaggaaatgattttaaacagttgattcaggaacttaaattataa

SEQ ID NO: 43221 - DNA, 1263 bp, Acinetobacter baumannii
atgaaaatcgcggtatttggaaccaccttacatgctggtgtaatggcagcattattagctgaatatggcaatcagatctattggtgtacaagtgtcacctgtgaagaaaacatttctatactttcttatcaagatcaagaagttaatcattatttaaataaacagagaaaagcaggttttttaaaagaaagtcctttttctgaaattcctttagatattgaagtttatttattttgtttcagtccaacacaaatcgagcttgctttaaagacagttgaaaagttgagcgagcgccctatagttcatccacgcttaatgatcaatggctctacttttggtctacatggtacagatcaattaaaacaacatttgccaaaagatgagtgggtttattttcctgatgtgattcaagaaggaaatgcgattaatagcgtgctgaacgtaaaacatgtaattgttggtgttgaatcgaactatactcaagacactatgcaagagctgttacgtccttttttccgttttagctatcaatatttatttatgccaattttagatgctgaatttacaaagctcagcatttcgggaatgttggcaactcgtattagctacatgaatgatttggcgatggttgctgaaaaactcggtattgatattgctaatgtaaagcatggtattgctgcagatacacgtattggtgcagcctatttgtcggcaggtgttggatttggtggtgaaaatttttcacatgatattttaacgctttcgagtactgtatctggaacaggcgctaaaagtcggctactcgagcaagtgtgggcgattaatgaacaacaaaaagaaattttattccgtaaattatggaattattatcactgtgatctgagcagtaaaactgttgcgatctggggggcttcatttaaggaaaacacctctagtactcataactcaccgattcatattttattagctgcattatgggcgcaaggggtaaaagtgcgtttgcatgatccacaagccttagatgagatcgcaacaacttatggagaccgtgaagatctggttttatgtgctgaccaatatgaagctgcacagggtgcccatgctttatgcttagtaacagcatggaaacaatattggagccctgattttaaaaagttgcaacaattaatgcagcatcctcttattttggatgggcgtaatatttacgatccggcatatgtgaaagcaaaaggtttcgcttatgaaggagtaggtcgattatga

SEQ ID NO: 43222 - DNA, 1671 bp, Acinetobacter baumannii
atgagtaaatctatcgagaagtttcctaaagagttagtctcgcctatagcacagcttcattccttagttgagaagaattcaaaattacatatcaaagaattatttgcagccgagcaagaccgctttcaaaactattcggtaaagttcgatcaattggtttttgattacagtaaacaccgtataactaaaagtgttctagaacaattgtttgctttagcaaagacgaaacaattgactcactggattgagcgcttattttcccaagacaaagtcaactgtactgagcagcgtgcagctatgcattgggccttacgtttaccatcggaatattctaaatttcctgaactcacaaaacaggttcatactcaattacagcgtatgtatgctttggttgaaaaaatccatgctgggcaatatcgtggtgctacgggtgaggtgattcaggatgtcgttaatattggggtaggtggttctgatttagggcctcaaatggtgacccatgcactatgcgattttaaagtaaaaactgccaaaccacttaatgtacactttgtttcgactatggatggtagccagttatcagacttactccatcaactgcgtccggaaacaactttatttattatttcttcaaagtcatttggtaccattgataccttatcaaatgcacaaacagttcgtcagtggcttgagaaagctttagggaagcatgaccgcgttgtaaaaagtcacttcattggtgtatctacaaaagctgaaaaaatgactgagtggggaattgctcctgaaaatcagttgttgctttgggactgggtaggtggtcgttattctctttggtcttgtattggtttccccatagccctaacgattggtatagatggctttcaacagcttttagctggcgcacatgctgttgatgaacactttcaaaatacaagctttgagcaaaatataccggttctcatggcattactcggtatctggaataataattttttaaatattcaaacccatgcggtattaccttatgacggaagattaaagtattttgctgcctatttgcagcagcttgaaatggagtctaatggtaagtcggtacaacgtgatggccaaaaagttgaattagatacttgtccgattgtatggggggaggttggtccaaatgcccaacatgcattttatcagctacttcatcaaggaacacaggcagtaagctgtgatttcattgcaccgatccaacgttataatgcagatcactttacgtatgtagagaatgctgaggcattgtttgaacaacatcacctcgcattatcaaattgtttggcgcaatcacgtttattggcttttggtaatgaagctttggattcagctgaactaaagaatttaccaatttataaacaatatgaaggtaatcagccgagttcgacattacttttaaaagaactaaatccatatagtttagggatgttaattgctttatatgaacataaggtatttgttcagtcggtaatttggaatattaatccgtttgatcaatggggggttgaaaaaggtaagcagattgctgatcagttacttccaattttaaacggtgctcaaaatgatctttcaacacttgatgcttcaacacgtggtttgattaaaattttattaggaaaagtcgatggctaa

SEQ ID NO: 43223 - DNA, 1017 bp, Acinetobacter baumannii
atggctaaaattttagttacaggtggtgcaggttatattggttcacacacttgtgtagagcttttagaagcaggccatgaagttattgtatttgataacctttcaaatagctcaaaagaatctttaaatagagttcaagagatcacacaaaaaagtttaacttttgtggagggtgatattcggaattctggtgagcttgaccgagtgtttcaagagcatgcaattgatgcggttattcattttgcaggtttaaaagcagtaggtgaaagccaggaaaaaccgcttatttattttgataataatattgcaggcagtattcaactggtgaagtcaatggagaaagctggtgtttatacattagtatttagctcttctgcgacagtatatgatgaagcaaatacctctcctttaaatgaacaaatgccaacaggtatgccaagtaataactatggatatacaaaactaattgttgagcaattattacaaaaactttcagtagctgactctaaatggtctattgctttactacgttattttaatccagtaggtgcacataagagtgggcgtattggtgaagacccgcaaggtattccaaataatttaatgccttatgtgactcaagttgctgtgggccgccgtgagaaactatctatttatggtaatgattacgatacaatagatggtacaggtgtgcgagattatatccatgttgttgacttggcgaatgcacatttatgcgctttaaataaccgcttacaggcgcaaggttgccgtgcatggaatattggtacaggtaatggttcatctgttttacaagtcaaaaatacctttgaacaagtgaatggtgtacctgttgcttttgagttcgctccacgtagagcaggggatgttgcgacttcttttgcggacaatgctcgcgcagttgctgagttgggttggaaacctcaatatggcttagaagatatgcttaaggatagctggaattggcaaaagcagaatcctaatggctacaattaa

SEQ ID NO: 43224 - DNA, 1371 bp, Acinetobacter baumannii
atgactactttaacgtgttttaaagcttatgatatccgaggcaaactcggcaccgaattgaatgaagaaatcgcctataaaattggccgcgcttacggacaaatctataaaccaaaaactgtggttgtaggttgtgatattcgtctaagcagtgaggctttaaaacaagcgaccatccgcggtttaaatgatgcgggtgtgaatgtgcttgatttaggcatgacgggtactgaagaagtgtactttgccgcttttcatttagacgtacaaggtggtatagaagtaactgcgagtcataacccaatggactataacggtatgaaattggttcgagaaaatgctcgtccaattagtgccgatactggtttaaaagaaattcaggctttagcagagaccaataactttgaagaagttagccaaaaaggtacaacgcaaagctataacattttgcctgagttcgttgaccatctactgacttatattgaacctgcaaaaatccgtccattaaagttagtggtaaacgcgggtaatggtgcagctggtcatgtgattgatgccattgaagaaaaatttaaagcgcttaatgtaccggttgaatttattaaaattcatcatgaagcagatggcactttcccaaatggcatccctaacccaattttaattgaaaaccgtgacagtacccgaaatgctgttcttgagcataaagcagatatgggtattgcatgggacggcgactttgaccgctgtttcttgttcgatgaaaaaggtcagtttattgaaggctattatattgttggtttattggctcaagctttcttaatcaaacagtcaggcgaaagaattgtgcatgacccacgtttagtgtggaacacatttgatatcgtcgacgaatataaaggtgttgctgtacagtcaaaatcggggcatgcatttattaaagatgttatgcgtgaacacaatgccgtatacggcggtgaaatgagtgcccaccactatttccgtgattttgcttactgtgacagtggtatgattccttggttactcaccattgctctactctctgaaacaggacaatctctctcaacactcgttgaaaatatgattgccaagttcccttgtagtggtgaaatcaactttaaagtagccgatacgcaaactacgattcaaaagattttcgacttctatgccgatcaaaatccacaaattgaccgtaccgatggtgtaagcctcgactttggcgcatggcgctttaacgtccgtgcttcaaatactgagcctttgttacgtcttaatattgaaagccgtgcagatagtcaagctcagccaatgcaatattatgtagatgagttgactggattaattcagaactaa

SEQ ID NO: 43225 - DNA, 1662 bp, Acinetobacter baumannii
atgctcaatatgtggcaacaactttatgaccctttaaataatatttggctgtctagtgcggttgcattaatcccgattattttcttctttttggccttggctgtttttcgtttaaaaggcagtatcgcgggtacgggcacagttattattgcattactgattgcgctatttttctatcaaatgcctggtcaaatggcctttgcgtcaatcatttacggtttcttctacggtctatggccaatttcatggatcattattggggcagtttttctatacaagatttcggtaaaaacaggccagtttgaggttattcgctcaagcattctatctattaccgaagaccaacgtctgcaaatgttactcgttggttttgcatttggtactttccttgaaggagctgcgggctttggtgctcctgtcgcaattaccgctgcactacttgtcggtttagggtttaagccactttacgctgctggtttatgtttaattgtaaatacagcaccagttgcatttggtgcaatgggtattccaattattgtggcagggcaggtgtcaggcgtagacactatggaaattagccagatggtgggtcgtcagttgccatttttaaccattattgtgctgttctggattatggcgattatggatggctggcgtggtgttaaggaaacttggcctgcggtattggtcggtggtggtgcttttgcgattgctcagtatctcacctctaactttattggccctgagttaccagacattaccgcagcaattgcttcattggtcagcctgacgttgttattccgtgtttggaaaccaaaacatattttccgttttgaacctgaagcgggtcagactttgactcagcaacctacaacagttcaacgttatagcattgggaaaattgcaaaagcatggtctccatttgctattttaacggtaatggtcacgatttggagcgttaagccattcaaagcattatttgcaaaagatggtgctcttgaacactggatttttaaacttgaagtgccgtatttacacaaattggtcgagaaaatgccaccgattgtgtccgagatgaaaccatacgaagcgatttataagtttgactggttctctgcaacaggtactgcaatttttattgctgcgatcatcacagttattttcttaaaaatgaaagcaagtgaggcagtaacaaccttcggtgagacgctcaatgagttaaaaacaccgatttactcgattggtatggtgttggcatttgcttttattgcgaactattcaggtttatctgcaactttggctttggctctatcgcatacgggtcatgcgtttactttcttctcgccatttttgggttggcttggtgtgttccttacaggctcagacacgtcttcaaatgctttgttctcggcattacaggcaaccaccgctcagcaaattggtattccggaagtgttattagtcgctgcgaataccagtggtggtgtgacaggtaaaatgatttcgccacagtcgattgcgattgcttgtgccgcagtaggcttagttggaaaagagtctgacttgttccgtttcacggtaaaacatagcatcatattcactgtctttgttggcatcattatcacggttcaggcttatctggttccgtggatgattccataa

SEQ ID NO: 43226 - DNA, 753 bp, Acinetobacter baumannii
atgagaatctccgatcaagtggtcatgaaattgcaggcattaattgaagagcgtcacatgaaaaaaggtgatcgtttgcctgccgagcgccagcttgcaactagcttaggagtttctcgtccgtctttgcgtgaagcaattcaacagctcaatagtcaaggtgtactgattagtcgccgtggcgatggaacttatattcagcaattacctgaacaatggccacagcaactgattgtgaacccgattagtaacctgattgaagaagatccgttataccgttttgatgtgcaagaggcgcgtttggtacttgaaggggggactgcatggtatgccgcgttacgttcgaccccagaagatcgcgccaaaattcatcattattttaatgaaattagccgccaccaaaatgcaggtgactcagcacaggcggcggtggccgatgctgaattccacttagcgattgctgaagcatctcacaatgtggtgctgattcaaatgatgcgaagtctatttgatttgctgcaatacaacgtcttgttagggcgtaaaaaagtttataacgaccccgtaaatggtgacttgctcagcgagcagcattttcaggtgatggatgctattgatcgtaaagatcccgaggccgcacgccaagctgtctgcggtcatattgaatttgtgattaatcatgtgcgttctctggatgaagacgaagctcgccagaaacgtgcaaaccgtttaaatagagttgattcaaaatga

SEQ ID NO: 43227 - DNA, 1152 bp, Acinetobacter baumannii
atgattatttcttctggcaatgattatcgtgctgcggcacaacgtcgcttacccccatttttatttcactatattgatggtggagcgtatgcggaatataccttaaagcgtaacgtacaagatttgtcagaaattgcattgcgtcagcgtgtgctgaatgacatgtccgcgttgagtttagagacaaaactatttaacgaaaccttgtcgatgccagttgctttggcgcctgtaggtttaacaggtatgtatgcacgccgtggtgaagtgcaagccgcaatggcagccgataaaaagggtattccatttacgctttcaacggtttctgtttgtccgattgaggaagttgcacctgcaattaaccgtccgatgtggttccagctttatgtgttacgtgaccgcggttttatgcgtaatgctttggaacgtgcaaaagcggcaggttgttcaactctggtgtttaccgtagatatgcctgtgccgggtgcacgttatcgtgatgcccattcgggtatgagtgggccaaatgctgcgatgcgccgttatatgcagtcagtatttcatccgcattggtcatggaatgtgggcttaatgggtcgtccgcacgacttgggaaatatctctaaatatttaggtaagccgactgggcttgaagattatattggttggttaggctcgaactttgacccatccatttcatggaaagaccttgagtggattcgtgaattttgggatggcccaatggtgattaaaggcattttagaccctgaagatgccaaagatgctgtgcgttttggtgctgacgggattgtggtatcaaatcatggcggtcgtcagttagatggtgtgatgtcatctgctcgtgcattacctgcaattgccgacgcagttaaaggtgacttagcaattttggctgactcgggcattcgtaatggtttagatgtagtgcgtatgttggcgctcggtgccgatacggttttacttggccgtgcgtttgtttatgccttggcagcagcaggtggacaaggtgtgtcgaacttacttgatttaattgataaagaaatgcgtgttgcgatgaccttaacgggtgctaagtcgatttcggatattaatgcggattgtttagtacaggcgattaaacaaggactttaa

SEQ ID NO: 43228 - DNA, 1707 bp, Acinetobacter baumannii
atgcaaacattttctcctcaagcagtgattgaacgcttacaaaacattgtagggcgttcgcatgttttgaccgatgatcaaagcacacgtcagtaccgccaaggtcgtcgttttggagaggggaaagtgcttgcagtggttgtaccagggaccttgctagagcaatggcaagtgttgcaggctgcaattgaggcagactgtattgtgattatgcaggcggccaatacgggattgaccggtggttcaacgccatatggcgatgactatgatcgtcctgttttggtgatgagcacgcgccgattaaagggcattcaggtcattcatgacggtaagcaagtgatttgtttacccggtgcgaccttagataatttagagcaaattttaaaaggctataatcgtgaaccacattcggtgattggttcatcttgtataggtgcatcggtactcggtggtgtctgtaataactctggtggtgccttggtacgccgtggtcccgcgtatactgaactggcgttatatgctcaagtaaatgctactggtcagttagaactggtaaatcatttaggcgtaaatttaggctcgactcctgaagaaattttgacgcgtttagagaagcggcaataccaagccgtagatattttagatgacaacgaaaagcaggcatcggaccatcgctatgctcatgatgtgatgcaagttgatgaagatacgcctgctcgttttaatgcagacccatcacgtttgtttgaagcctcgggttcagcaggtaaggtctgtgtgtttgctgtacgccttgatacctatgaaaaagtagagagcagtgttttttatattggtagtaatgatgccgatgatttaacggccattcgtcgctacttactgacctcactgccaagcttgccaattgcaggcgaatatattcaccgtgatgcttatttgattggtgaaaagtacggaaaagacacgtttttatttattgaaaagtttggtacagccaatgttccaaaagcctttgcgatgaaagataaagtcgatggctttttagaaaaatttaaaattaaaggcttaacagaccagattttacaggcgattaccttctttttaccgagtcatttgcctaagcgtatgaccgaatatcgagatcgttatgagcaccatttagtgttacgtgttgaaaataattcaaaagctcagaccgagcagtttttaaaagaatattttgcagtgcatcagtcaggcaactatttcgtatgtagcgaagaagaggggcgaaaggcgttcttacaccgttttgcgattgcaggggcggcaattcgttatcgtgatacgcaccgtagtgaagttgaagatattgtagcgcttgatattgcgctacgtcgtaatgaccgcgaatgggtagagcaactaccagccgagatggaaaagaaaatcatccataaactctattatgggcatttcttttgtcatgttttccatcaggactatattcttaaaaagggcaatgaccctttagaaatggaacatcaaatgtggaaattactcgatgcgcgccgtgctgaatatccggcagagcataatgtcgggcatctttatattgccaagcctgccttagccaacttttatcaaaaactcgacccaaccaatagctttaatgtgggtattggccatacctcaaaactgaaatattggggtaaggctaaatcttaa

SEQ ID NO: 43229 - DNA, 1215 bp, Acinetobacter baumannii
atgtttcaacatatccccccatacgcaggcgatccaattctctctttaatggaacagttcaatgctgatactcgttctgaaaaagtaaacttgagtattggtctttattataacgaagacagcattgttcctcagttagagaccattatcgaggcacaaaagcgtattgagcctaagaacggtaaaaccaaactttatttgccaatggaaggcttcaaaccttaccgtgaagcaattcaagcacttttatttggtgcaaacagcccagcagttaaagctggccgtgctgtaaccatccaaacgcttggtggttcaggtgcattgaaagttggtgctgacttcttaaaaacttatttcccaaattcagacgtttgggtaagccaaccaacttgggataaccacgttgcgattttcaatggcgctggcatcaagactcatttctacccatatttcgatgcagaaacgcgtggtgtagattttgacggtatgttgtctacacttaaaactttgcctgagcaaagcattgtgttgttacacccatgctgccataacccaacgggtgctgacttaaacccagcgcaatgggaccaagtgattgcagtattaaaagatcgtaaccttattccattcctagacatcgcttaccaaggttttggtgacggtatagaagaagatgcgtatgcaatccgtgccttagaccaagcgggtctaaacttcatcgtgagcaactcgttctctaaaatcttctctttatatggcgaacgcgttggcggcttaactttcgtatgtgacgatgcagaagctgctcagtgcacattcggtcagttaaaagcgactgtacgccgtatttactctagccctcctactacaggcgcttggttagttgatgaagtgttaaatgacgctgaacttaaccaacaatggcaaggcgaagtgaaagagatgcgtgagcgtattattaaaatgcgtagcatcttgaaagacgaacttactaaagcattaccagaccgcgactttagctaccttgtaaaccaaaaaggtatgttcagctacacaggtttaactgctgaacaggttgatatcttgcgtgaagaatatgcaatctacttagtacgtagtggccgtatttgtgtagcaggtttaaacatgaacaatgtttacactgttgctaaagcaatggctgaagtgcttgctaaatcagtagaagcagcataa

SEQ ID NO: 43230 - DNA, 711 bp, Acinetobacter baumannii
atgcaagatttgaccttcgcaccagagccattacaaagtcagggaagaacactgaccgagcatgtatttaagcaaatacagacggcgattgttttgggtcaaattccggcaggtagcaagatttccgagcctgaactggcgcgcacttatggcattagccgtgggccattgcgtgaagcgattcatcgccttgaaggtcaacgtttggttgagcgtactgcacatgtgggcgcgcgcgtggtttcgctctcactgcaacagtttaaagagctttaccaaattcgggcttctttagagggtttggcttgcaaacttgctgcacagcatattgataaaaagcaaatcttggcattacgtgatgtattgcgtatgcatgctgaagatgaaaactttaaagcaggtaaaggatattacctgcaagaagggcaggacgattttcactactgcattattaaaagtagtggcaataaaaccctagaaaaaatgctatgtgatgagctttatcaccttatccgtatgtaccgaattcagttttcaaacacacccgatcgaccaagcaaagcttgggacgaacatatccgtattttagatgcaattgcagaaggcgatggtgaacttgccgagctgctcatgcatcgacatatcaatgcttcttacaaaattattgagcaaacactgctacaagcacaaggagaacataacaatggctaa

SEQ ID NO: 43231 - DNA, 885 bp, Acinetobacter baumannii
atggctaaacaatccgcaggtcagctatttcgcgatgccgtagcccaagaaaagccattacaagtggttggaaccatcaatgccaatcatgcacttttggcaaaacgtgcaggttataaagcgatttacttatcaggtggtggtgtagcagctggttctttaggcttacctgatttaggaatcagtaaccttgatgatgtgttgactgacgtacgccgtattactgatgtatgtgatcttccattattggtcgatgctgacacaggttttggtgcttctgcatttaacattgcgcgtactacaaaagcactgatcaagtttggtgctgcggcaatgcacattgaagaccaagtgggtgcaaaacgttgtggtcaccgtccgaacaaagccattgtgactcaagaagaaatggttgaccgtattaaagctgcggttgatgcgcgtggtgatgacagcttcgtgattatggcgcgtaccgatgcgttagcggttgaaggcttacaagcggcaattgaccgtgcgggtgcctacattgaggcaggtgcagacatgttgttccctgaagcaattaccgagcttgatatgtacaagcaatttgctcagaagacaggcgtaccaattttggcaaatattaccgagtttggttctacaccattgtttactactgaagagttagcatctgccgatgtaagccttgcgctttatccgctttctgctttccgtgccatgaacaaggcagccgaaactgtgtatgaaaccttgcgtaaagaaggcacgcaaaagaatgtggttgatattatgcaaacgcgtaaagagttatatgaacgcattaactactacgcgtttgaagactacttagacaacgcatttgctaaaaagaagtaa

SEQ ID NO: 43232 - DNA, 1158 bp, Acinetobacter baumannii
atgagctcaaatgaaacaacaacaggcttcaaaccaaaaaaatcagttgcactaagtggacaagttgcaggcaacacagcactttgtaccgtaggacgtagtggtaacgacttgcactatcgtggctatgacattcttgaccttgcggcaggtagcgagtttgaagaagttgctcacttgctcgtacatggcaaattaccaaacaaagctgaactcaaagcatataaagcaaaattaaaagcacttcgtggtttaccggcagcacttaaaactgcacttgaacaattaccaccgtctgcacacccaatggatgtgatgcgtactggtgtttcagttctaggttgtttaactccagaacatgaagaccacaacgaagctggcgcaaaagacattgctgacaaattaatggcaagcttaggttcaatgctgctttattggtatcacttcagcaacaacggtcgtcgcattgaagttgaaacagatgacgactcaattgcagcgcatttcttacatttacttcatggcgaaaaaccatgtgaagagtggattcaagcgatgcatacatcacttattttgtatgctgagcatgagttcaacgcatctacatttacgtcacgcgtggttgcaggtacaggttctgacatgtactcggcaattacaggcggtattggtgcacttcgcggacctaagcacggtggtgcaaacgaagttgcattcgtgattcaacaacgttacgacaatccagacgaagcagaagctgacatccgtaaacgtgttgaaaataaagaagtcgtaatcggatttggtcaccctgtatatacagtttctgacccacgtaacgaagtgatcaagaaagtggcgcatgacttagcagaagcgcaagagaacaccaaaatgtacctcatcgctgagcgtttagaagcagtgatgaaagaagtgaaaaacatgttcccgaacctcgactggttcagtgcggtgagctatcacttaatgggtgttccaactgcaatgtttacaccgttattcgtgattgcgcgtacagcaggctggtcagcgcacgtgattgaacaacgtcaagacggcaaaatcattcgtccaagcgcgaactacacaggccctgaaaacctcgaatttaaaccattggcggagcgtggttaa

SEQ ID NO: 43233 - DNA, 2607 bp, Acinetobacter baumannii
atgaatacaaaataccgtaaaccgctggcaggtacccagcttgaatattacgacgtgcgtcaagccgttgaagatattcagccaggcgcatacgaaaaactgccttacacctcaaaagtactcgcagagcaattggtacgccgtgccgatgccgagaacttaactgcttatttaacgcagttaattgaacgccgtcaggacttagattttccttggtatcctgcgcgtgtggtgtgtcatgacatcctaggtcaaactgcattggttgaccttgctggtttgcgtgacgcgattgctgagaagggcggcgacccatctaaagttaatccagttgtaccgacacagctcattgtcgaccactctttagcagtggaatatggtggtgctgacccagacgcttttgcaaaaaaccgtgctgttgaagaccgccgtaatgaagaccgtttccactttattgagtggaccaaaacagcatttaaaaatgtcgatgtaatccctgcggggaacggcattatgcatcagattaacctagagaaaatgtctccggtgattcaggcgcgtgatggcgtagcattcccagacacatgtgtcggtacagactcacatacaccacatacagacgctttgggcgtaatttctgtgggtgtaggtggtttagaagctgaaaacgtaatgttgggccgtgcatcttggatgcgtctgccagacattattggtgttgagttggttggacaacgtcaggcaggcattactgcaacagatatcgtgttggctctaactgaattcttgcgtaaagagcgtgtggttggtgcttaccttgagttctttggtgaaggcgctgacagtatgtctgtgggtgaccgtgcaaccatttcgaacatgactccagaatatggcgctacggctgcgatgttctacatcgaccaaaacacaatcgactacttacgcctaacaggccgtgaagatgctcaagtggcattggttgaacagtacgcaaaagaaattggcctttgggcatctgaaatgaccaaagcagagtacccacgtgtactacgttttgatctatcgacagtcacacgtaacattgctggtccatcaaacccgcatgcacgtgtttcaaccagcgacctaaaagaaaaaggcattgcgggtgtagttgaaaaccattctgatggcttaatgccagatggcgcaatcattattgctgcaattacttcatgtaccaatacctctaacccacgtaacaccgtggcggcaggtttgttggcacgtaaggcaaatgagctaggtttagttcgtaaaccttgggtgaaatcatcatttgcaccgggttcaaaagcggctgcactttaccttgaagaggcaggtgttctaaaagacttagagaaacttggttttggtattgtggcttacgcttgtacaacgtgtaacggtatgtctggtgcgttagatcctgctatccagcaagaaattattgaccgtgacttgtacgcaaccgcagtactctctggtaaccgtaacttcgatggccgtatccatccttatgcaaaacaagcgttcttggcatctccaccgcttgttgtggcatatgcaattgcaggtacgatccgttttgacatcgaaaaagatgcgttaggttatgacaaagaaggtaacccgatttacctcaaagacatctggccatctgacgctgaaattgatgcgttagttaagcaagccgtgaagcctgaacagttccgtaaagtctacattccaatgtttgacttgggcgaagttgaacaagcgaagagcccactttacgactggcgtccgcaaagtacttacatccgccgtccaccatattgggaaggggcgttggctgcaccacgtactttggcgaacatgcgtccgcttgcgattttgggtgataacatcactaccgaccacttgtcgccttcaaacgcgattttgatggactcggctgcgggtgaataccttcacaaaatgggcgtaccagaagaagactttaactcatacgcaacgcaccgtggtgaccacttgactgcacaacgtgcaacatttgcaaacccgaaactctataacgaaatggttcgccgttcagacggtaccattaagcaaggttcaaaagcgcgtgtagagccagaaggcgaagtgatgcgcatgtgggaagcaattgaaacctacatgaaccgtaaacagccgttaattattatcgcgggtgctgactacggtcagggttcaagccgtgactgggctgcaaaaggtgtacgccttgcaggtgttgaagcgattgtggcagaaggttttgagcgtattcaccgtaccaacttggtgggtatgggcgtgttaccacttgagtttaaaccgggtgtaaaccgcaagactctaaagctagatggtacagagctttatagcgtgattggtaatattgcgccgcgttcgactttaactttagtgattgaacgtgccacagcggatggtaaagaagagattcttgaagtgcctgtgacttgccgtttagatacagaagaagaagtttctgtatatgaagcgggtggtgtattacagcgttttgcgcaagactttttagaaggccaagtggcttga

SEQ ID NO: 43234 - DNA, 426 bp, Acinetobacter baumannii
gtgagtgattcgcaggtacttggtgatttacttgatcagattccacaagatgagcagattgactccgtatatactgatggggcttatgatacaaaacaatgccgtcaagtaatttcggatcggcaagcacatgcagtgattccacctaggaaaaatgcaaagccttggaaagatacaaagatttgctcgttagagcgaaatgagctgcttcgaacagttaagcatttaggaagaaccatttggaaaaaatggtcaggttatcaccggcgaagtttggttgaaactaagatgcattgcatcaaattattaggggataaactcagtgcgagaaactttcaaagccaagtcaatgaaatacatacacgtgtggcaatcttaaataagtttacggaattaggccgacctcaaacccgagttgtaacttaa

SEQ ID NO: 43235 - DNA, 135 bp, Acinetobacter baumannii
atggtaacagcaggcgaaaaacccggaacaggcttctatttctgtgctcagtgcggacatagagtgtttttagaaattaataccgaccctttaccaccttgcacaaaatgctactgcacgcaatttaaacgttaa

SEQ ID NO: 43236 - DNA, 576 bp, Acinetobacter baumannii
atggaaacaatattgggtttatgtattggtgtgggcctgagcgctgcctgcggttttcgcgtgtttgtaccgctattggtcatgagcattgcaaccatgatgggctggtttgagccatcaaaaggctttgagtggttagctctgccatcggtgtgtttggctttaggtgtggcaacggtgtgtgaagtcgcagcttactatatcccgtgggtcgataatgccttagacacagtcgcgactcctgcggctatgattgcaggtacattagcgacaatggcggttagcagtggagaaatgtctcagtttgccagttgggcagcagccattattgtcggtggtggtacggcaggtgtggtgcaaatgagtaccgttgctgcacgtggtgtttcaactgcaaccacgggtggcttgggtaattttatcgttgcaacaggggagtggattggagcaatcttactttcagtttcagctatgctggtgcctgcgcttgttgcaatagtggtactgattgcggttatttgggtggtgcgttggattcgccataaaaagcaagaacaggctcatactccgctatag

SEQ ID NO: 43237 - DNA, 342 bp, Acinetobacter baumannii
atgagcttttatacagaactacaagtccgttatacagattttgacacgattgatttatctactgaaaagcagaatatcctagaaatattaactgaagattcaatccacgaagatgtttataatgctttagtagatgccttttctaatggtcaggcaggccttaatgtcgatccagtttattgcctagaactcatagaaaaaattaccgctctatttccaaatgcaaattttgaatgtcgaggactaggagaagagtacttctatacgtggatcctctgtgttgaaaatggccagattatttttagtagcaagccttgggaaactgaaaatccttttatataa

SEQ ID NO: 43238 - DNA, 285 bp, Acinetobacter baumannii
atgacaatttataaaccttttttggctttaagttttgttctagtgagtttgggtatttcaggctgtaacctccacactcagcaagaatttgaaaaaatttgcctatcgggtgggcatagcaagaccagttgcgaatgtatttaccagcgacttgagcaaatttattcccccaagctgatgcagcgtctagaacatgtcagtttgcaaagtcctgttctcccacgggactttgcccctacttttttaagcaccatgcagcggtgtgacaaaagtagtctgggctaa

SEQ ID NO: 43239 - DNA, 450 bp, Acinetobacter baumannii
atggctgtcttaagttcacaagttggttgtgcccaaaaaactgacaataaaacagaaatgagtattcaaaactctaactctattgttattcaacaattagaaaagtttaaaacacaagatcattttgcgggagatggacaactatatacaggggttcaaaatcctgcattacgtatgagtttaaatcaaaaggtggctgatgttgcacaagcttttattgtactttatcaacaaaagaatgagccaaccaaggcagaacttttacaagttcttgctcatggaattagtcaaatcgatcctgacaagttggatacagaagatcgagaacaagtggcaactacatttgaaagttttctagatattgtaggcctagaaagttcagaaggtattttaaataaatgggtatacggtgaagaaattagtaagttattggagcaagataaacattaa

SEQ ID NO: 43240 - DNA, 702 bp, Acinetobacter baumannii
atgaacaacaatattataatttttggttatggaacaggtatttccaaagccgtagcacataagtttggtaaagaaggctataaaatcgggttagtggcacgtaatgctgaaaaactcgaaaaagccattttagaacttaaaacacaaggtattgaagcttacgcttttgcatgtgatttagcggttcttgaagatataccaaatcttattaatcgtattaaagaccgattaggagagattaaaaatattcattggaatgctttccatgatattgaaggcaatatcttaaaaacccctccactagagctcaccaaaagctttcatattcgtgtttcgagctatattgcgacggtacaggcttgcttaggcgatttagagaagaatcacggtagcattttatcgacaaacggaatttttgctttcgatgcagtgggtatcgacttggtggctaaagagtactcatccttagcaactaccgctgccgctcaatacaaagccaccaacttgcttgctcatagtctagcggactcaaatgtttacgtgagccaagtgattgtgaatggttttgttgatgggacatctggagcacaagataagacttacacggtacatccagaaaccattgcggagcagttctggtacttacaccagcataagcaagaaactgtttccttttgtggtgaagccattcaagctgcttaa

SEQ ID NO: 43241 - DNA, 585 bp, Acinetobacter baumannii
atgcgaaccaaagaatttgaaactgatgaaattgctgaggctgcaatgcaggtcttctggcgtcgtggttatgctgcaacttcagttcaagacttggttgatggtacgggattatctagaagtagcctttatagtacctttcaaaacaaacaagggctttatcaaaaggcattacaacgctatgaacttttaactacacttaataatgtaaagctgttgtctggttcaggttcagcaaaagcacttattcgacaattactgatgagggtggttgaagatgagttgaatgattcagaacataaaggctgcctcgttgcaaatgcttgtttggaactggctggacatgacgaagaagtctctcaattcgttgtaagtaatttacagaaacttcaacatgctttggagagtttgttaataaaagctcaacaatctggtgaaattggttctacccaaaacccgtgtgcattagcaagtttctttctaaatacgatgcaaggtttacgtgttttagggaaaggcagtcctcatgaacaaagaaagcaatgtttaatggatgtggtcgaggttgctttaaacgttttataa

SEQ ID NO: 43242 - DNA, 1200 bp, Acinetobacter baumannii
atgaatactaagagtaatgaaacatctcatcagttaactgatgaattctctactcaattaccgatttggaaattgttggcttttacagttgcaggctttctgaccattatgacagaaaccatgccagcagggcttttaccccaaatcagtcaagggttacatatttcagaagcttatgcagggcagcttatagcagtgtatgccttaggctctgttttagcggcaataccgctgattagccttacacgtagttggaatcggagacccttattactcagtgctattgcagggttacttttatttaatgcaattacggccttatcaaatgattatattctgactttgattgctcgtttcattgcaggtatggctgcgggtgttatatggggacttttagcgggttatgtaagacgtatggtccctgcgtcctaccaaggacgagctttagcaattgccggggttgggcagccaattgctttatcaattggagttcctttgggagcatggttgggagcgttatttgagtggcggggtgtcttctggatcatgtctttactggcattgattttatttgtctggattcgttttagtattcctgattttgcgggacaaactgcacagaaaaggttgcctattttaaaagttcttttaatgccgggcattagagctgttttagcagtcgtcttcctttggatattggcgcatagcattctttatacttatatttcaccatttttggcttcaacagggcattcatacaaagttgagaccattctttttatattcggcatttcttcaattgttggcattctcattacaggcatatttattgatcgttcattaagaaaaataacgcttttgagcttatttatctttgcaatcgcaacagcgctcttgggtgtttatagttcttcaagttttgttgtactgacgggtgttatgttatggggaataacttttggtggtgcaccaaccttattacaaacagctttggcaaatactgcggatcatgaagccgatgtagctcaatctatgttggtcactgtatttaaccttgctatcgcattcggtggaatgattggcgggggactgcttgaaagttttggggcggcttcttttccgtggtttatgcttgcttttgcccttatcgctttatgtaccgtttaccaagcccgtaagcatggttttatttctttataa

SEQ ID NO: 43243 - DNA, 702 bp, Acinetobacter baumannii
atggagaataaaaatcagtgtcgccaatgcgccgtatgtggaaagagctttcctttaaaagatttagtatctggtgaagtcatccgtaacgtgattagtgatgaaattttaaaagaccatccagattggagttacttaagctttatttgtcgggccgatctggcagattatcgaattaaatatgtgcagtccttattacgctcggaaaagggtgagttatctaacctagaaaatgaagtgattggcagtatgcaacggcatgaactgattagccgaaatacagagtcagattttgatcaaaactggacgtttggagaaaaactggcagataaaatcgcatcatttggtggtagctgggcttttcttatttgttttgctttatttttaacggggtggattgttttaaatacggttgtgatggtggtccgtcccgtcgacccttatccttttattttgctgaatttagtgttgtcatgtttagctgcaattcaggcacctattattatgatgagtcaaaaccgtcaagaagcaaaagaccgtttgcgttcccaacatgactatcaaattaatttaaaagccgagcttgagattcgccatttgcatgaaaaaatggaccatcttttatcgcatcagtgggaaaggcttgcacatattcaagaaattcagctcgatcttttagctgaaatgaataaaaaacgataa

SEQ ID NO: 43244 - DNA, 666 bp, Acinetobacter baumannii
atgcctttaaacgacaactttgtttacgctccaccacaagatccgctttcaattttatttgaagatgacgatttaattgtggttgataaacctgcgggtttgttgtcggtcatgggtcggttacctgaacatcatgacagtgcgtatttaagggtattggaaaagttccctttagcaaaggttacgcaccgtttagatatggcaacctcaggtttacttatgtttgccaagcatcgcgatgcagaagttgcggtaagtaaaatgtttcaggccagaacagtcaaaaaacattatattgctttggtacaaggccaagtaaaacaagagggcagtgttgaagttccactcattactgactgggaaaatcgcccaagacaaattgtacattttgaattaggtaaacatgctaaaaccttgtttcaaccattggtttatgatgaaaccacagatcaaagtcgagtattgctggagcctgtgacagggcgttcgcaccagttacgtgtccatatgatgcatattgggcatccgattatgggggacaagttatatcatcctgaacctaaacggtttcatttgaatcgtatggctttacacgctgcatatctcgcttttcaacatcctttgaagggaacagatgtggtgattgagtcacaagtgcctttttaa

SEQ ID NO: 43245 - DNA, 375 bp, Acinetobacter baumannii
atgaaccgcgattacgaacaatttccagatgatgataacggcaatgtactttggcaaatggttgaagacggggatgatttaaccgagcttcatgaaattgaattttcaattgcatttcaagatcagcaaaatgcagagcaatgcgcgatgcatttactctatcaagagcaaaaaatttctcttttccaagatgattctgttgaaccgaatgaatggatcattaccatctttgttacgatggaaccagagtattcagatattgttgatctggagcagtggttttcgacaatcgctgagcaatttaacggcgaatatgatggatggggctgcatggcttatgtcttcgacgaagaagaagatgacattttacaataa

SEQ ID NO: 43246 - DNA, 381 bp, Acinetobacter baumannii
atgagcttatctcaaaaagaaattgcggtacgttttttagagcttgctgctgctggcgaggtcgatgaagcctacggcaattacaccgccccaaactttaagcatcacaatccttattatgctggtgataagacttctttgaaggaagggatgcgtgaaagtgcaattgaaactccaaataaagttcttgaagttcagcatgtcattgaagatggcgctttagttgcagtacattcgaaactggaaatgcaaatgaatgacaagctaacaattttagctgtggttcatatatgccgttttgaaaatggaaaaattgcggagttttgggatattgggcaaatacagcccgatccactcgttaatgaaaatggtatgttttag

SEQ ID NO: 43247 - DNA, 2091 bp, Acinetobacter baumannii
atgcgacacaaattaggattgttgtcttcgttaggtctatcatttatatcgacactcacttggggagaggaaacgtcaacggtacttgaaaccatacgtgttcaggccgaaagtactcgagaagatgtgagccaaaatagctcggcaactaaatttactcacgatgttttagatgtcccttttaaccgtgcttatctttctaaacaaataatggaacagcaagacgtgcaacggattgatgatgcattaactttagtcagtggggtttttcatcaaaatagctttggtggtggtttttgggataactactcatttcgtggctttagtaccgaccccaatttaggtgcagctatgatccgtaacggtttgagtgttaaccgaggaattagcgctccaaaagatgtagtgaatattgaatctttagagtttttaaaaggaccaatggcggcgctatatggtcgcggcgaaacaggaggtttgctgaacctcaacagtaaaaaaccacagtgggaaagcgaaagtgaacttaacctacgcgccaatacccaagaacaatatcgcataagtctggaacacaccgcgcctattaacgatgaactggcctatcgtttagcagtggctcacgaagataatcaaagctttcgtgatcatgttagcagtgaacgctggttcttttcaccacagctcacatggaaaatttcagaccaaacacaactcgactttgacagtgaatttacagagcataaaggaacctttgaccgcggtgtcagcacagtcaatcatcagtttgtgatggacccgaaaacctttacaggtgaacctgacgatggtgatttgaaaataaaagattacttttaccaattacgtctgagtcacgagtttaaccctgattggaaactaaacagtgcggtcagttataaagatgcacaaatggtcggctttgcaaccgaacctcgtcgtatgcaagccgatggccgcactctagagcgccaacgccgctatcgtgattatacaagtgaagatgtgctggctcagaccgagttacttggcaagattgatacctcatgggctcgtcatgaaattttactttcaaccgagcttggtcaactcgactacaaacaaaaccagcttcgtcgcaaccacagcacagactcaccaaacacaattgatatttatcaacctaaatatggcaaatatttaccaaacctcactccgtttaccgacaccaaagagcgccagcgttactttgcacttaatctacaagatcagatctttttcaatgaccagtggagtgtgttactcggtaatcgttttgatcaggtcgaacaagactttaaaaatcatataaaacagaccgaagacaaccagacacttcaccagaatagtccacgtttcggagtaaattttaaagcctctgaccaatgggcgttttataccaactatggtcgctcatttgccatgaatagtggtatgaaccgaaatggacaaaccttcgctcctgaaaaaggcgaaagctatgaagtcggcaccaaatataaaataaacgaccaaagtgtgctgagtctcgctctgtttaaaatgaaaaaacagaacgtgctaacgacagacccaatcgacaaagactttcaaaccgcagcaggcgaagtgagcagtaaaggagttgaatttgacttaaatagccaaatcactgaccgttggttcgtcaatgccaactatagttataccgatgctcaaattgaaaaagaccaagacttggcaaaaggcgctcgtctaagcaatgttccaaaacaccaaggctccgtaagcaccaattatgagtttctccaagacggtgcaagaaaagcaggcgtaggtgccaaccttacctatgtcggtgagcgcagcgggcataacctagataatggctttaacttacctagttatacgctggtcaatttaaatggctactatgcaccatctgaccgtttacgctatcagctgaatgtaaataacctatttgataagacctactatgtctcaagctatagcgatttatgggttcaaccgggtgaaccattgaacgcctcaatttcggcacagtggaagttttaa

SEQ ID NO: 43248 - DNA, 1146 bp, Acinetobacter baumannii
atgtctttagaaaagaatattgaacgtttacagtcaattgatgcattgcgcggtttggtgatcatcattatgttgctcgaccatgtaagagaaactttctatttacataaacaggttaccgacccaatggacgtaacagtaacagaaccggctttatttggcagtcgattattggcccatatttgtgctccggtttttgtacttttaaccggtatttctgcttttttatttcagtcaaaaaaacaagatttacaacaaacgcgcgcttttctattaaaacgtggcttatttttgattgcactagagctcacgctggtgaactttgcatggacagcaacttttccacccgaagtcatttatttacaagtgatctgggcgattggtattagcatggtggtgctggcttgttgtgtaagtttgcctttgtctgttcttgcaggtgtagcgttggtgattatttttgggcacaacttattagattctgtgcacttctcacaaggcgtcttgcaaaatatatggtttgttttacatgaacgtggctggattgagattgcaggcatcaagcttcgtacaagttatccggttttaccttggattggtgtgattttattaggctacgttttaggtcagttctttagttcaaaatattcagcaaagcgaagaagccgcgctttactcagccttggtttagtaagtatcgggttatttgttttactacgttttatcaatgtctatggtgaccagccgtggcaacattttgagtcattacaactgagcctcatgagcttttttaacctcaccaagtatccgccgtctttattgtttattttgctaaatgttgggattggcttgcttgtgctcgttgcttttgaacgtatacagcaatattcatttctaaaaccattggtcgtgtttggttcggtgccgatgttcttttatttattgcatttatatgtgctgaaactgatctatgtgcttgcgctaagtgtgtggggagctaactacggaaactatttgtcggtcaaccatgtgtggatgttgtggctaattacgatagtactgtcttttgcactctatccagcggttaaatggttctcgaaatttaaacatcaaaataaacatatttcgattttaaaatatttctaa

SEQ ID NO: 43249 - DNA, 468 bp, Acinetobacter baumannii
atgcgccccttagatcgtatagatcgcatgattctggatattttgcagcgtgaaggacgaattgcaattagtgaattggcatcaagagtcaacctctctaccaccccttgttcagagcgtgtaaagcgccttgagcgcgatggtattatcatgggttattacgcacggctaaacccagcctacgttgaccgtaacctgcttgtctttttagaaattaagttatctgccaaatctggcgatgtatttgatcaggtggctagagacttagttgagattcctgaagtactcgaatgtcaccttatttcaggtgaatttgactaccttgtaaaagcgcgtttaaaagaaatgagcgcataccgccgcttgttaggagatttattaaagaaacttcctgcttcggcatcttcacacagttatgtggtcatggaagaagtgaaagaaactctatatctagatgtaagcaagtaa

SEQ ID NO: 43250 - DNA, 1266 bp, Acinetobacter baumannii
atgcgcgtaattgtactaggtagcggcgttattggagtggcaagtgcctattatctggctcgacaaggagccgaggttactgttctcgatcgccagtcaggtcctgctgaagaaacaagttttggtaatgcaggtcaaatttcgcctgggtattcgaccccttgggcagcaccaggaattccttttaaagctgtgaaatggatgttccaacaccatgcaccgcttgcgattaatttagatggcagcatgtggcaattacagtggatggcgcaaatgctgaaaaactgtaatccgcaaagttatgctgtgaacaaagaacgtatgatgcgtgtggctgaatacagccgtgactgcttacgtgaactcagaaaagatacgggtattcactacgaaaaccgcgccaaaggtactttgcagctattccgtaaagaagcacaaatggaagcggttcaacgcgacattagcgtgcttgaagagtgcggcgtaagctatgaattattaaatgctaatgaactcggtcgtgtagagcctgctttagcaaatgcacaagataaacttgtgggtggtttacacttaccaaatgatgaaacaggcgactgctatttatttaccaatgctttagctcaaattgctaaagagttgggcgttaatttccagtttaaccagaacgtagaaaaattgattgtcgaaggcgatcaaattaaaggcgtacaggtcaatggtaaaattttaactgcagatcgttatgttctagcgtttggtagctattcacgtgatttcttgaaaccgcttgatctacagttacctgtatatcctgtaaaaggttactcgttgacgattccaattgttgacccagcttttgctccgcaatctacggtgcttgatgaaacctacaaaattgcgattactcgttttgaccaacgtattcgcgtaggtggtatggctgagctaagtggctttaacttaggtctgaacgaagaccgccgtgcaaccttgcaaatggtgacgcaagatttgttcccaggtggtgatatggaacaagcatctttctggacgggtttacgtccaatgacgccagacagtactccaattattggtgcgactcgctttaaaaatctgttcttgaatacaggtcatggcactttaggttggaccatggcgtgcggttcaggaaaattaatcagtgacatcgtattgaatcataagactgatatcagtaccgatggcctttcaattcagcgttattcacacgcacatgcggcttaa

SEQ ID NO: 43251 - DNA, 1104 bp, Acinetobacter baumannii
atgcctcgtcctattaccgcagtgatccaccgtcaagccttacaaaataacttggcggtggtacgcaaagctatgccaaatagtaatgtctttgccgttgtcaaagccaatgcttatggacatggaattgaacgtgtctatgaagcatttaaagcagcagatggctttgccttactggatattgaagaagcaaaacgaattcgtgctctaggttggacgggtccgattttattgctcgaaggagttttctctcctcaagatttatttgattgtgtgcaatatcaactcagtttcaccattcatagtgaagcgcaaattgagtgggtagaaaagcatccttatccggctcaatttgatgtttttttgaaaatgaacagtggtatgaaccgtcttggttttaaaccacagcattatgtgcaggcttgggaacgtttaaataatttggcaaatgtcgtcaagattacccacatgatgcatttttcggatgcagatggtgatcgtttcggtcagcaaggtattgattatcaaattactgcctttgaagaaattgtgaaggatttaccgggtgaaagatcggtaagtaatagtgcggcaattctgcgttatcaagaccagctcaaatcagattatgtccgtagcggcatcatgctttatggcagctcgccagattacccaacccatagtattgcggactggggcctgcagccgaccatgagcttacgtagtgaaattatttccgttcagcatttggagccgaatgaaagcgtaggttatggctcaaactttgtcgcagagcaacccatgacgattgggattgtggcttgtggctatgccgatggttatcaacgtatttcgccaacaggtactccggttttagtggactcagtacgcacgcgtacagttggccgcgtcagtatggatatgttggcagtcgatttaacgggtattgagagcgccaaagttggtagtgaagtggtgctctggggtcagtcaagtacaggcgtcattttacctatagatgatgttgcagtttcatccggtacggtgggttatgaactgatgtgtgccgtcaccgcccgtgttcaatttattaatcaggtataa

SEQ ID NO: 43252 - DNA, 360 bp, Acinetobacter baumannii
atgtctaattcagatatacaaaagattaacactaacgaagtcatgagcgccgtgactgtttttaacaaagtggtttatttgtcaggtcaggtgcctaaaaataccgagcaagatgtggcaggccaaacccgtgaaattcttgcaacaattgatgaacttttggcattagccaataccgataaatctcgtttgctctctgcgcagctctatttgaaaaatctttctgacttttcaaccgtaaatgcaatttgggttgactggttaaaagggtgtgttgctccatcgcgtgccacaattcaggccgatttggtcaatccagattggttaattgaaattgccgtgacggcagcacaaaagtaa

SEQ ID NO: 43253 - DNA, 1440 bp, Acinetobacter baumannii
atgacaacggctcgtcattcagatacggaaaattctcccgatcatctgcaacgaaaactgtctaaccgtcatttacaactgattgcaattggcggtgcaattggaactggcctatttatgggctcgggtaaaaccatctccctcgcaggtccttcaattctctttatttatatgattattggaggaatgttctttttcttaatgcgtgcaatgggtgaactactccttgcaaatctgcattacaaatcttttgttgatatggctcatgacctgattggtccttgggctggttactatttgggttggacctattggttaggttgggtgctggtcggtattgcggacctttcagcagttattaactatttgagcttctggctacccgatggtgcaagcttctcaccaatacagcaggccatgattagtgcaggctgtgtgttgtttgtgatgggtcttaacctccttacagtacgactatttggtgaaattgaattctggtttgcccttattaagattctggcaattattggcctgatcggtgtaggtggctatatgattttcagccattttcaagctccgcaaggcgctgttgccagcattagtaatgtctggtcacatggcggtttattcccgaaaggtacagaaggcttcttggcaggattccagattgccgtttttgcgtttgtcggggttgagttggttggtacgacagctgctgaaacgaaagacccgcagaagaacttaccgaaagcaattaacgcgattccggtacgtattattttgttctatgtattggcgttatttattgtgatgtcggtaacaccgtgggatcacattcgtgcagataaaagcccgtttgttgagttattcttaaatgcgggtattccagtttctgcgatcattatgaatttggtggtgctatcttcggtcatgtcttcaatgaacagcggtgtgttttcaaccagtcgtatgctgttcggtttatcaaaagacggtcaggcaccgggagcatttggacgtttatcaaaacgtgcagtcccatcaaatggtttgattttctcttgtactttcattatgggcggggcagtgcttcagtactttgttccaaacacaatggaggcatttacattagcaagttcgctctgtgtgattctattcattagtgtctggagtctcattatggtgtgctatttacgctatcgtaaattacgtcctgaattacatgaaaaatctacattcaaaatgccgggcggcatttggatgagttatgttgttttggcattcatgcttttcactttggtgatcttggcattagagcatgataccttaaaagcgctatatgtcagtccagtatggttgatcattttaggtgtgacttatcatgtgctgtataaaccgcgtatgaaaagactaggacgtgaactcgtcaacgaccattaa

SEQ ID NO: 43254 - DNA, 1431 bp, Acinetobacter baumannii
atgacaatggttcatcattcagatgaggcaagttcccctgatcatttacaacggaaattaagtaatcgccatttacagctcattgcaattggcggtgcaatcggtacaggcctatttatggggtcgggcaaaaccatctccctcgcaggtccttcgattctcgttatttacatgttaattggcggtatgttctttttcctcatgcgcgcattgggtgaattactgcttgctaatttacattacaagtcatttgttgatatggcatatgacttaatcggcccatgggctggctattatattggctggacctattggttaggctgggtattggtcggtattgccgatctatcagcagttattaattatttaagtttctggttgcccgagggtgccagtttctcaccaatgcaacaggccatgattagtgcgggctgtgtactattcgtgttaggacttaatttgcttacggtcaagttgtttggtgaagtagaattctggttcgcactcattaagattttggcaattattggcttaattggtgtgggtggatacatgattctcactcatttccaagctcctcatggtgatgttgtcagcatcagtaatgtctggtcgcatggtggtttgtttccaaaaggtgtaagtggttttttagccggattccagattgccgtatttgcctttattggtgttgagttgattggtaccacagcggctgaaacgaaagatccgcaaactaacttaccaaaagcaattaacgcgattccggtacgtattattctgttttatgtgctagcactttttgtcgtgatgtcagtgacgccttggaatcatatccgtgcagataaaagcccgtttgttgaattgttcttaaatgcaggtattccgatttcagcaattatcatgaacttggttgtgctgtcttcggtcatgtcttcgatgaacagtggcgtgttttcaacgagccgtatgttgtttggtttatcaaaagatggtcaggcaccgagtgtcttgggacgtttatcaaaacgtgctgtaccgtcaaatggcttaatcttctcatgtattttcattatgggcggagcagtgcttcagtactttgttccaaacacaatggaagcatttactttggcaagttcgctctgtgtgattttattcattagcgtgtggattttaatcatggcatgttatttacgttatcgtaaaattcgcccagagttacatgcagcatctaccttcaaaatgccgggcggtgtgttgatggcttatgccgttattgcattcttcttgtttaccttggtgattttggcattagagccagataccttaaaagcgctatacgttagcccagtatggttagtggttttaagcgtgacctattatgtgttctataaaccgcgtatgagaaaattaggtcaagaaatcttttaa

SEQ ID NO: 43255 - DNA, 882 bp, Acinetobacter baumannii
atgaaagtggattgggatcatctacagttttttctggttttagcacgcactaaaactctaaccaatgctgcacgtattataggtgtcgagcacagtacggtggctagacggattcaggcactagaacttgctttaggtaccacgctatttaagcgtgaagcaacgggctatgagttaactctcgaagggatggcacttgtccctcgagttgaacaaatggaacaagctttcttacaaattgaaaaaccgcatcaacctttacaaggtcgtgtgcgaattggcacacctgagggttttggaactgcatttttagcccgcttactggctgagttctccatacagtatcctctgcttaccatcgacctgatacccgtaccaaaaatgattaagctctcgcaccgtgaagcagatattgtggtgtcgattgaacgcccaacctcagggccttatatcattacgcgcttgtctgattactgtttaaaaatttatggtagccaaaactatctagcgcaaaacccaccaattcgccgtctggaagatttaacccagcaccgctttgtgaactatattgatgatctggtgtatagccccgagctgtattgtctagaacgcttacctttaaagcttaacgcgaactttcgcagtagcagcattttggcacaacaaattgcggtcagcgcaggcgcaggtcttgcaattttgcccaagtttttggcagatgataagcctgagcttgaagaggtgttagaacaacaagttcgttttacccataccttctggatgctgaccttcgttgatttacagcatgagccgcgcattaaactggtttgggattacttgcgtaaacaggccgataaataccaacatttactggttgattaa

SEQ ID NO: 43256 - DNA, 1518 bp, Acinetobacter baumannii
atgaacacaatccagaaaatcgaattggataccgctaaattacttattaacggacagtttctcgaatctaaaacacaagaatggcaagacattgttaaccctgcaactcaggaagtgattggccgcgtaccttttgcaacggttgaagaagtcgacgctgctattcaagctgcacaagatgcttttgcttcatggcgccagaccccaattcaggcacgtatgcgcatcatgctcaagctacaagacttaatccgtgccaacatgaaagaaattgcacaagtattgacggctgaacaaggtaaaaccttggcagatgccgaaggcgatattcaacgtggtctagaagtggttgaacatgcctgctcagttggtactttacaaatgggtgaatatgttgaaggtgtagcacgtggtgtagatacgtataccttgcaacaacctttgggtgtttgtgcaggtattacgccgtttaatttcccagccatgatcccgctttggatgttcccaatggcaattgtgtgcggcaatacttttgttttaaaaccttcagaacaagatccattatcgaccatgatgttggttgagcttgcgattcaagcaggtattccggcaggtgtgctgaacgttgtgcatggcggtaaagaagtggttgaccgtttgtgtacccataaagacattaaagcaatttcatttgtaggatcaacagcggttggaacacatgtttataaccttgcagggcagcatggcaaacgtgtgcaagccatgatgggtgcaaaaaaccatgtggttgtgatgccggatgccaataaagaacaaactttaaatgctttagtaggtgcagcattcggtgcagcgggacaacgctgtatggcattgtcggttgcagtgatggttggcgacagtaaacagtggattcaagagttagttgaaaaagccaaaactctaaaagtaaatgcaggtcatgaaccaaatactgacattggtccagtgatttcaaaacgtgccaaagcgcgtgtaattgacttgattaatagcggtgttgagcaaggtgcagagttactactcgatggtcgcaatgttcaagtacaaggttatgagtcaggtaactttgtgggtgccacgatttttagtggcgtaaataccgacatgcgtatttataaagaagaaatctttggcccggtactttcaattatttgtgtcgatacactcgatgaagcgattgctttgatcaatgccaatccatttggtaacggtgtaggtctattcacacaaagcggtgccattgcacgtactttccaaaacctcatcgatattggccaagtcggtatcaatattccaattcctgtaccagtgcctttctttagttttaccggctcaagaggctcaaaactaggtgatttaggaccatacggcaaacaggctgtgcagttctatacccaaaccaaaacgattaccagtcgctggtttgaagatagccatgaagttggcggtgtaaatacaaccattagtttacgttaa

SEQ ID NO: 43257 - DNA, 891 bp, Acinetobacter baumannii
atgaatatcgcctttatcggtctaggtaatatgggcggcagaatggcccaaaacctactaaaagccggactcaaagtttatggttacgacctcagtgaagttgctattcagcacttcgccgaggcaggtggtgtggtctgcgacagcccacagaatgcagctaaacaagcagatgtagtcattaccatgttgcctgcggcgaagcatgttaaagaggtttacttgggtgaaaatggtgtcttggaagtgctaaaagcaggtagcttatgcattgatagcagcaccattgacccgcaaaccattaaagacattgctgctgttgcacagagtaaaaatattaaaatttgtgatgcaccagtttctggtggaaccattggtgctcaagcaggaaccttaaccttcatggtcggtgccgatgagcaaacctttaatgagttgaaacctgtgctcagccacatgggcaaaaatattgttcattgtggtgatgtaggtgcgggtcaaattgccaaaatttgcaataacctgattttaggaatttcaatggctgcggtggccgaaggcatggcactcggtgtgaagctaggcatcgacccacaagcattggcaggtgtaattaatacttcaagtggccgttgctggagttcggatgtatgtaacccatggccacatattaatgaaaatgcgcccgcatctcgaggctatcaagacggttttgcgacacagctaatgctaaaagatttaggactcgctgtagaagccgcaggccaagtgaaacagccggttttattaggtggtatggtacaacagctttatcagcaaatgtgtatgcgtggtaatgctcatctcgatttctcgagcattattcagcaatacctgccacaagaggcataa

SEQ ID NO: 43258 - DNA, 1650 bp, Acinetobacter baumannii
atgatggattatcaaaatgctgtacaggctttcgatttggaaagcactgctaaacagatgttgtcaggttcactcgatgcactgaacgcttgttatgaatgttgtgatcgacatgcagatggcgacaagatcgcgctgtactggcaaggaaaagacggtcgcaaagaacaatataccttccgtgaactaaaagaatggtcgagtcagtttgctaactttttaaaatcacaaggtgtgaaagcgggtgaccgtatttcaggcttattgccaagaacacctgaactgatcgtgaccattttggcagcttggcgaattggtgctgtgtaccagcccctatttactgcctttggtcccaaagcgattgagcaccgtattcagcttgcacaaagtaagctggtggtgaccgatataggcaaccgtagcaagctcgacgaaattgaaaattgccctgcaattgtgacagtggccgacgcacaaggtactccgcttaaagcaggggattttaatttctggagtgaagtaaagcagcagtccgatcaatgtgatctggtgatgcgtagcatccaacatcctttcttgcttatgtttacgtctggcactacaggaccagcgaaaccattggaagtgccactaaaagcattgattgcttttggtcgatatatgcaagatgccattggtttaaccgaagaggattcattctggaatattgcagatccgggttgggcgtatgggttgtactatgcgattactggaccgttatttttaggccatgccactttgttctatgaaggcggttttagtaccgatagcctatgccaaattgtgaaagattataaagttaacaacttggcaggtgcaccaacggcttaccgcatgatgatggcggctgatccggcacaaatggcgccgttaaaaggacaattccgtgtggtgagtagtgcaggagagcccctaaatccagaagtaattcgttggtttaaacaagtccttgatgctccaatttatgaccactacgggcaaactgaagtaggcatggtggtgtgtaatcatcatggtttaaaacatgaaattcatgctggttcagcaggttttccaagtccgggctatcgtgttgcgattgttaatgaacaaggtgaagaacttccgccagacacaccgggaatcttagcagtcgacattagccagtctccaatgatgtggtttggtggctataaagaaagtcgaaaatcgccatttgttggtcattactatttaacgggtgatactgccgaactccatgccgatggcagtatgagctttgtaggccgtagcgatgatgtaatcaccacatcgggctatcgtattggacctttcgatgtagaaagcgcactacttgaacacgacgctgtgattgaagccgcagtaataggcgtgcctgatccggatcgcactgaagtggttaaggcttttgtaattttagctgcgggcatacaaccttcagatgcgcttgctgaagaactcagtcagtttgttaaaagacgactttctgctcatgcttacccacgattagttgaatttgtgagtgaattacctaaaactccaagtggcaaaattcagcgctttttattgcgtaatcaagaaattgctaaacaacaagctaaagcagggtaa

SEQ ID NO: 43259 - DNA, 1128 bp, Acinetobacter baumannii
atgcaatttaccgaagaacaattactcattcgtgatatggcgaaaagtttcgcccaagaacaaatcaagcctaatgccagtgattgggaccgagatggaacttttccaaaagaaactctgactcaaatgggacaacttggttttatgggaatgcttgtttcagaggaatggggtggttcagacacgggtaacttagcctatgtgctggcactcgaggaagttgcagcagcggatggtgcaacctcgaccattatgagtgtacataactcggttggttgtgtgcctattttaaaatttgggactgacgagcaaaaagagcgctttttaaaacctttggcacaaggtgaaatgataggagcttttgccttaaccgaaccgcatactggctcagatgcagcagccatcaaaacccgtgcggtgaaagatggcgactattacattttaaatggtgccaagcaatttattacctcgggtaataatgccggcgtcattatcgtgtttgctgtgaccgatccgagcgcaggaaaaaaggggattagtgcatttttagtcccacgcgagacaccgggttatgaagtgattcgtgttgaagaaaaactaggtctgcatgcttcagatacgtgtcagattgctctaacagatgtacgcattcacaaaagcctcatgctaggcaaagagggcgaaggcttaaaaatcgctctcgccaatttagaaggtgggcgtattggtattgctgcacaagcagttggtctagcacgtgcggcgctcgaagaagcaactcgttatgccaaagagcgtattacttttggcaaaccaatttttgagcatcaaaccatcgcgtttcgccttgctagtatggcaacagaaatcgaagcagcgagacaattggttcactacgctgcacgcttaaaagaagcaggtcaaccgtgtttgaatgaagcttcaatggccaaactatttgcttcagaaatgacggaacgtgtgtgctcaagtgccttacaagtgtttggtggctatggttatctcagagacttcccaattgaacgtatttaccgtgatgcgcgtatttgtcaaatttacgaaggcaccagtgatatccaacgtttagtgattgcacgtagtctataa

SEQ ID NO: 43260 - DNA, 774 bp, Acinetobacter baumannii
atgcagtggcaaagtattttattagaaaagcgtaatggggttggattgattacattaaatcgccctcaagcactcaatgccttaaatagtgaattaattagtgaaattaatcaggcattagatcaactcgagaaagaccgcgaaattggctgtatcgtattggcaggctctgaaaaagcttttgccgcaggggccgacattaaagaaatggccgatttggcatttcccgatatttatttagatgacttttttcatcttgcagaccgtattgcacagcgccgtaaacctttaattgctgcggtgagtggctatgcattgggtggtggctgtgaattagcactcaagtgtgactttatttattgtgctgataacgccaagtttggtttacccgaagtcactttaggggtaattccgggtattggtgggacacaacgattaacccatgccattggtaaagctaaagcaatggaaatgtgccttaccgctcgtcaaatgggcgcagtagaggcagaacaaagtggtttggttgcacgtgtgtttagtaaagaagaattacttggacaaaccttgcaagccgctgaaaaaatcgcagcacggtctttaactgcaaacatgatgctcaaagaaaccattaaccgagcttttgaggtgaatctcaccgaaggtttacgttttgaacgccgcatgttccactccatttttgcaactgcggaccaaaaagaaggcatgcaggcatttgttgaaaaacggcaggcaaattttaaaaatcagtaa

SEQ ID NO: 43261 - DNA, 1026 bp, Acinetobacter baumannii
atgaatacagaaaatcacttaatgattgagcgacaaggtaagcttggcgtgatcaccttagatcgtgtggctcatctcaatgcattgtcgctagatatgattgaaggaattggcgcccaattggagttgtggcgaaatgatgctgctgttcaggcgatcttaattaaatcaaatagcccaaaagccttctgtgcaggtggcgatattcgctatctctatgacagttataaaaatggcacagccgattacaaaggctactttagtgcagaatataaaatgctcaatacactgcgcgaatatgaaaagccaatcatcgttgtgcttgatggctatgtattaggcggtggttttggcttggctcaggcgtgtcacattgtggtaagcagtgaaaagtccagatttgccatgcctgaaacagcgattggttttttcccggacgttggcgcaactcatttcctgtctcgccttgatgatattggcgtttatatggcaattacgggtgagcagatcagcagtagtgatgcgctctatctcgacttaattgactaccatgtgccaagcgagcagttacaagctttacaagacgctctcgtcgaagcgccaagcttaagcaaagagggaattgaacacatcattacccgatttattactcgtcctgccgaaagtgagctcaaacagttggcagaaggtatccgtaaacacttcggatatcagcatttagatgagatcgaacaaagccttgaaaatgaaaaggatgagagcttaaagacttgggcgagtaaaatgcttagtattttgcagcagcgttcatttattgccaaacaaaccagcttgaaactgcaacatttaggccgtggactttcactacagcagtgtatgcagcttgagcgtgacttacaggatatctggtttgagcatggtgactttattgagggcgttcgtgcgctcattgttgataaagataaacaaccacggtggcaagaacgtaatcctgagctggaacaaattttagaaaaactaagctaa

SEQ ID NO: 43262 - DNA, 1353 bp, Acinetobacter baumannii
atgcaaataatacatggaaacggttcacatcctaaaaagtcgtcacatcgattagcaggcatctctagcatggtcggcaccacgattgagtggtatgacttttttgtttatggtgcagcagcagccctcatttttaacaaactatttttcccaaatctggacccacttacaggtgtgcttgcagcatttgcaacctatgctgttgggtttattgggcggcctttaggtggtttagtctttggccatttcggtgacaagattggccgtaagtcaatgttgttgctaacgctgatgctcatggggattccaaccgtactgattggcctattaccgacttacgagtcaattggatattgggcggcaattggcttggtgatcttgcgatttattcaaggtatggccatgggcggtgagtggggcggtgccgtgcttatggcagtagaacatgcacccgaaggtggtaaagggttttggggaagtttgcctcaagccagtaccggtgggggcttaatgctcgcctcaatcgcactaggactggtgtcgttattacctgagcaagcattgtttagctggggctggcgtttaccatttcttgccagcattattttactggcagtgggttggtatattcgtgtaaaagtgcctgagtcaccagactttgaaaaagtaaaacaacagtccgaagaagtcaaagttccggcttttcaggtttttaaaaatcatccaaagcaactcatcactattattttggcgagagctgctgaaaatgcatggttctatattgcttcaacttttacgctagcttacaccaccacacaattaggtattccacgacaagacattttgtttgctaccatttgcggtgcagccgtgattttatttatgacgccgttatgcggacatttgtccgataaagtcggtcaacgcaatatgtttatgtttggactatgtgtattggcactttattcttatccattttttagcatgctcaataccaaagatccggtactggtctggacggcaattgttttggcaattggtgtagtgttcccgattatgtatgcgccacaagctcagctttttgcgcgtcaatttcctgctgaaattcgttatagcggtatttcgatttcggtacagttggcaggtgttttgggtggtggtttagcccctatgattgccactaaactgctcagtattgggcaaggcaatccatatttaattatgttttatatcggaagtatggctgtagttgcgattatatcgacatcatttatgccgcgcgattggagctataaaaaggatgagatttattataagaaagcaaacttaaatctaaaaaccaagattgattga

SEQ ID NO: 43263 - DNA, 552 bp, Acinetobacter baumannii
atgaatattattgctggatttcaaaacaatttttcagaaggcctatataccaaatttaaaagttaccgctacagggtatttgttgaatatttgggttgggagttgaactgtccaaacaatgaagaactagatcaatttgataaagtcgatacagcttatgtcgtggctcaagacagagaatctaatatcattggttgtgccagactactacccaccacacaaccttatttactcggggaaatatttccccaacttctcaatggaatgcctattccctgctcaccagaaatttgggaattatcaaggttttcagccgtagatttttcaaatccgccttcctctagcagtcaggctgtgtcatcacctgtctcaattgcaattctgcaagaagcaatcaactttgcaagagaacaaggcgcaaaacaactcattacgacttctcctcttggagtagaacgtttattacgtgctgcgggttttcgtgcccatcgtgcaggtccaccaatgacgattgatggatattcgatgtttgcatgcttgattgatatctaa

SEQ ID NO: 43264 - DNA, 417 bp, Acinetobacter baumannii
atggttagcataccccctcatttctctatctcaacagatggttttattcgaatgaacgaaaaccaactcatgagttatcctctccaacacatcatctctaccgttgaatctagacatactgaagcgtctcaaattttctattatggttttactgaatgggcaacttcgcaaactccagctttaagtaccggatgggattgggaactcattgagaataatggcatcactaccgtaaaacgagtggggttacctcgaagcaatatcatgattgttgatgtatctggtatggatatcggatttgatattaatgaaacattactcgagaaaaaaatagatactttattctgggaaccgtttatttatgcccaaatcaatacgtccttaaccaagtcttcattaagtcaaaccttctcttag

SEQ ID NO: 43265 - DNA, 441 bp, Acinetobacter baumannii
atgtcgaatgataaatcgcgtgacgcattgagcgacgcgccaattcctcaaagaaataattctgctgaagttgttcgttctggttcgcctttagatatcgttctatgggtgatagcaattgcattattgctctcggctaccatggtgaatcagcatttaccagcgtattgggcccctgcaaatgatgtttgggtgcgcgttggggtaatttttgcttgtatcgttgtggctttaggtttattatacgccacccatcaaggtaaaggcttcgttcgtttgctgaaagatgcacgagtcgaattgcgtcgagtaacttggccaacaaaacaagaaacagtcacaacatcgtggcaggttctattggttgtagttgttgcatcattagttttatggtgttttgactatggtttgggttggttaattaagttgattatcgggtaa

SEQ ID NO: 43266 - DNA, 534 bp, Acinetobacter baumannii
atgaaacgttggtacattattcatgcctattctggttatgaaaaacaagtgatgcgttcacttaaagaacgaatccagcgtagcgctgttgccgatagctttggtgatgtccttgttcctaccgaagaagtggtagaaatgaaggatggtaagaagcgtaaatctgagcgtaaattctttcctggctatgtgctagttgaaatggaaatgaatgacgatacttggcacattgttaaagagtgtccaaaagtattaggttttattggtggtacacctgaaaaacctgcgccaatcactcaacgtgaagcagatgcgattcttgcgcgtgtacgtaatactggtgaagctccacgtcctaagacgatgtttgagccaggtgaagaattacttgttattgacggtccattcacagactttaaaggtgtggtggaagaggttcaatacgataagtcacgtttaacgttgacgattaacgtgtttaatcgaccaactcaggttgaactcgaatttcgccaagtcgaaaaaacgatttaa

SEQ ID NO: 43267 - DNA, 429 bp, Acinetobacter baumannii
atggctaagaagattgacggctatatcaagctgcaagttccagctggtaaagcaaatccatctccaccgattggtcctgcactaggtcaacgtggtgtaaacatcatggcattctgtaaagaattcaatgctgctacacaaaaagttgaaccaggtcttccaatccctgtagtgattactgtgtacaacgacaagtcgttcacattcatcatgaaaactcctccagcttctattcttcttaagaaagctgctggtatccaaaagggttcatctgtacctaacaaaactaaagttggtaagttgactcgtgctcaattagaagaaatcgcgactactaaagaaccagacttaactggtgctgacttagacgcgcgtgttcgtaccattgctggttctgcacgttctatgggcttggaagtggagctataa

SEQ ID NO: 43268 - DNA, 696 bp, Acinetobacter baumannii
atggcaaagttaactaaacgtcaaaaagccattgctgctgctgttgaagcgaacaaagtttacactttggaagaagcagtacaggttcttaacagcttgcctgctgcaaagttcaaagaatctttagacatctctgtaaaccttggcgtagatccacgtaaatctgatcaggttgttcgtggtgcgactacattacctgcaggtactggtaaaactgtacgtgtagctgtatttgctcaaggcgcgcaagcagaagctgcgaaagaagctggtgctgatgttgtaggttttgatgaccttgctgaaagcatccaaggtggaaaccttgactttgatgttgtaatcgctgctcctgacgctatgcgtgttgttggtaagctcggtacaattcttggtccacgtggtttaatgccaaaccctaaagttggtactgtaactcctgacgttgctggcgctgttaaaaacgctaaatctggtcaggcacgttaccgtgtagacaaagcgggtattattcacgctgcgattggtcaagttggctttgatgctgctgcaatccgtcaaaacgttgaaactttagttgctgacttgaaaaagttaaaacctgcaacttctaaaggtgtatacatcaagaagatcactttgagctcaactatgggtcctggtcttactgttgatgtaaacaacgtttctaactaa

SEQ ID NO: 43269 - DNA, 507 bp, Acinetobacter baumannii
atggctcttcttattgaagacaaaaaacagatcgttgcagaagtaagtgaagttgcttctaaagcgtttgcagccgttgttgctgactatcaaggtttaagcgtagagcaattaacaacactccgtgttgaagctcgtaagttaggtgtaactacacgtattgtacgtaacactttggctaaacgcgcatttcaaggtactcagtttgatatcttgaacgacaaccttgttggtccaacaattctaggtttttcaacttctgaagatgacatgggtgcagctgcacgcttgttcgaagaatttgctaaaactaacaaagcatttgaattaaaagctgctgcatttgacggcaaagtttatcaaggtgctgatgttagcgttattgctaatcttccgaaccaagagaaagcgcttactatgcttgcctctgtccttcaagctcctatttcgaaattgggtcgcctcattacagcactcaaagagaaaaatgagtcagaagctgcttaa

SEQ ID NO: 43270 - DNA, 372 bp, Acinetobacter baumannii
atggctttaactaacgaagaaatcttaaatgcagttgctgaaaaaactgttcttgaacttgttgaattaatttctgctttcgaagagaaattcaacgtatctgcagctgctgtagctgttgctgctccagctggtggcgctgctgctgctgctgaagaacaatctgaattcaacgttgagttgacttctttcggtgctaacaaagtagctgtaattaaagctgttcgtgaagcaactggtcttggtcttaaagaagctaaagacttagttgaaggcgctcctcaagttcttaaagaaggcgtttctaaagaagaaggcgaagaacttaagaagaaacttgaagaagctggtgctacagttacacttaagtaa

SEQ ID NO: 43271 - DNA, 4089 bp, Acinetobacter baumannii
atggcatactcatataccgaaaagaaacggatccgtaagaattttggtaaattgccccaagtaatggatgcaccgtacttattatcgattcaggtcgattcgtacagaacattcttgcaagatggcaaatcaccaaaaaaccgcgaagatatcggtctccaagccgcatttcgttcagtttttcctatcgaaagttattctggcaatgctgctttagaatttgttgagtatagccttggtaaacctgagttcgatgtacgcgaatgtattcttcgtggctcgacttatgcggcaccaatgcgcgttaaaattcgtttgattattaaagatcgcgaaactaaatcaattaaagacgtacgcgaacaagaagtctatatgggtgaaattccgctcatgactgaaaatggtacctttgttatcaacggtactgagcgtgtaatcgtatctcaattacaccgttcgccaggcgtattctttgaccatgataaaggtaagacccactcaagtggtaaagtgttgtattcagcacgtatcattccttaccgtggttcatggttagacttcgaatttgatgcaaaagacttagtttacgtacgtatcgaccgtcgtcgtaaattacttgctacagttgtgttacgtgcactaggttataacaatgaacagatcttgaatttgttctatgaaaaagtacctgtgtatcttgacatgggtagctatcaaattgaccttgtacctgagcgtttacgtggtgaaatggctcaatttgatattactgacaatgaaggtaaagtcattgttgagcaaggtaaacgtattaatgctcgtcacgtacgtcaaatggaagctgcaggtttaactaagctttcagttcctgatgaatacttatatgagcgtatcactgctgaagatattactttacgtgatggtgaagtaattgctgcaaatactctgttaagccatgaagtaatggtgaagttggcagaaggcggtgttaagcaatttaatatcttgttcactaacgatattgaccgtggttcattcgtagctgatacattacgtgctgacttgacgcgtgatcgtgaagaagcattagtagaaatctacaaagtaatgcgtccaggcgagccaccaacaaaagaagctgctgaaaacttattcaataacttgttcttctcttctgaacgctatgacttatctccagtaggtcgtatgaagttcaaccgtcgtttaggtcgtccttacgaagttggtactgatcagaagtcacgcgaagttgaaggtattttatcgcacgaagatattatcgatgtattacgtacattggttgaaatccgtaacggtaaaggtgaagtcgacgatatcgaccacttaggtaaccgtcgtgtacgttctgttggtgaaatgacagagaaccaattccgtgtaggtttagttcgtgttgagcgtgctgttaaagagcgtttaagccaagcagaaacagataacttgtctccacaagatttgattaatgcaaaaccagttgctgctgcaatcaaagaattctttggttcaagccagttatctcagtttatggaccaaaacaacccattatctgagattacacataaacgtcgtgtatctgcgcttggtcctggtggtttaacacgtgaacgtgcaggcttcgaagtacgtgacgtacaccaaactcactatggtcgtgtttgtccaattgaaactcctgaaggtccaaacattggtttgatcaactcgctttctgtatacgcaaaagcgaatgacttcggtttcttggaaacaccataccgcaaagttgtagatggtcgtgtaactgatgatgttgaatatttatctgcaattgaagaagtaggtactgttattgcacaggccgactctgcagtagataaagatggcaacttaacagaagaattcgtttctgttcgtcatcaaggtgaattcgtacgtatgccgcctgaaaaagtaacgcatatggacgtttctgcacagcaggtagtatctgttgctgcatcacttattccattccttgaacacgatgacgcaaaccgtgcgctcatgggttcaaacatgcaacgtcaggcagttcctactttacgtgcggataaaccgcttgtaggtacaggtatggaagcgaacgttgcacgtgactctggtgtgtgtgtaatcgcaaaccgtggcggtgtaattgaatatgtagatgcttctcgtatcgttattcgtgtaaacgaagatgaaatggttgcaggtgaggcgggtgtagatatctataacctcatcaaatatacacgttcaaaccaaaatacttgtattaaccaaaatgttatcgtgaacttgggcgacaaagttgctcgtggtgacatcttggcagacggtccgtcaacagacatgggtgaacttgcgcttggtcaaaacatgcgtgtagcgttcatgacatggaatggttacaactacgaagactcgatcttgttatctgagcgtgtacttcaagaagaccgtttaacatctattcacattcaagaattgtcatgtgtagcacgtgatactaagttaggtgcagaagaaattactgccgatattcctaacgtaggtgaagctgcgctttctaaacttgatgaatcaggtatcgtttatatcggtgctgaagttactgctggcgacatcttagttggtaaagtaacgcctaaaggtgaaactcagttaactcctgaagaaaaactgcttcgtgcaatttttggtgagaaagctgctgacgttaaagactcatctttacgtgttccatctggtactaaaggtacagttattgacgttcaagtcttcactcgtgatggtttagagaaagatgaccgtgctttagcaattgaaaaagcgcagcttgattcttatcgtaaagacttgaaagaagaatacaagatcttcgaagaagcggctcgtgagcgtgtaatccgtttacttaaaggccaagagtctaatggcggtggttcaactaaacgtggtgataaactttctgaagatttattatctggtttagagcttgttgacttacttgaaattcaaccagcagatgaagcaatcgctgagcgtttaactcaaattcaagtgttcttgaaagagaagagcgcagaaatcgatgagaaattcgctgagaagaaacgtaagcttgcaacaggtgatgaattaacaactggcgtattaaaagttgttaaagtttacttagctgttaaacgtcgtattcagcctggtgataagatggctggtcgtcacggtaacaagggtgttgtatctaacatcttacctgttgaagacatgccacatgatgctaacggtgtgccggtagatatcgtattgaacccgctgggtgtaccatctcgtatgaacgtgggtcagattctagagactcacttgggtatggcggctaaagggcttggtgacaaaatcgaaaaaatgttgaaagaacaacgtacagttttagaactgcgcgaattcttagacaagatttataacaaagtcggcggtgagcaagaagatcttgatagcttgactgatgaagaaattctagcgcttgcaggtaacttgcgtgcgggtgtgcctttagctactcctgtatttgatggtgctgaagaaagtcaaattaaagacttacttgaattggctgacatttcacgtactggtcaaacagtattgtttgacggacgtacaggtgaacagtttgaccgtccagtaactgttggttacatgtacatgcttaaattgaaccacttggttgatgacaagatgcatgcgcgttcaactggttcttactcacttgttacacaacaaccgcttggtggtaaagcacaattcggtggtcagcgtttcggtgagatggaagtatgggcacttgaagcatacggtgcagcatatacactccaagaaatgcttacagtgaagtcggatgacgttgaaggccgtactcgcatctataagaacattgtagatggtaaccattatatggatccgggtatgcctgaatcgttcaacgtattgaccaaagagatccgttctttaggtatcaacattgaactaaaaaatggtgactaa

SEQ ID NO: 43272 - DNA, 4194 bp, Acinetobacter baumannii
ttgaaagacttgctcgatatcatgcgtaagaaaacggactcagatggtcatgcgccagttgagttcgaccgtatccgtattggtcttgcgtcaccagaaatgattaagtcatggtctcatggtgaagttaaaaaacctgagacaatcaactatcgtacgttcaaaccagaacgtgatggtttgttctgtgccaaaatctttggtccagtaaaagattacgaatgcttgtgtggtaaatacaagcgtatgaaatacaaaggcgtcatttgtgaaaaatgtggcgttgaagtaactacagcaaaagttcgtcgtgaacgtatgggtcacattgagcttgcttctccagttgcacatatctggttcttaaaatcgttaccatcccgtatcggtttattacttgatatgacacttcgtgatatcgaacgtgtattgtatttcgaatcatacgttgttactgatcctggtatgacaccatttgaaaagtatcaacttcttaatgatgaagaatactttactgctctagaagagcacggcgacgaatttgttgcaaaaatgggtgcagaagcagttcaagacttgttgaaagacatcgaccttgaagctgaaatttcacgtttacgtgaagaaattcctcaaacaacttctgaaacgaagttgaaaaaagcgtctaagcgcttgaaattgatggaagcattcaaagactcaaacaacaagccagaatggatggtaatgaacgtacttccggtacttccaccagatttacgtccattagttccacttgaaggtggtcgtttcgcgacttctgacttgaacgacttatatcgtcgtgtaattaaccgtaacaaccgtttgaagcgtcttcttgaccttgcagcgccggacatcatcgtacgtaacgaaaaacgtatgttacaagagtctgtagatgcgttgcttgataacggtcgtcgtggtcgtgcaattactggttctaacaaacgcccattaaaatctttggcagacatgatcaaaggtaaacaaggtcgtttccgtcagaacttgttaggtaagcgtgttgactactctggtcgttcggtaattactgtaggtcctactttacgtcttcaccaatgtggtcttccgaagaaaatggcacttgaactattcaagccattcattttcgcgaaattacaagcttcaggtcaggcaacaaccattaaagctgcaaagaaaatggttgagcgtgagactccggaagtttgggacgttcttgcatctgtaattcgtcaacatccagtaatgttgaaccgtgcgccaacacttcaccgtttaggtcttcaagcatttgaacctattcttattgaaggtaaggcaatccgtcttcacccgctcgtctgtgctgcgttcaacgccgacttcgacggtgaccaaatggcggtacacgttccattgacacttgaagcacagttagaagctcgtgcattgatgatgtcaacaaacaacatcttgtcaccagcaaacggtgagccaatcatcgttccttctcaggacgttgtcttgggtctttactacatcactcgtgatgcagtaaacgctaaaggtgaaggcatggtgtttgcggatactcacgaagtaaaccgtgcacttgcaactggtcaagttgcgatccatgctcgtgttaaagtacgtgtgcatcaaacggttatcaatgaaaatggtgagcgtgaacagcaaactattattgttgatacaacaccaggtcgttgcttactttgggaagttgttccagaaggtttaagctttgacatgatcaaccttgagatgactaaaaagaacatctctaagttaatcaactcttgctaccgtaaacttggtttgaaagatacagttatcttcgctgaccaattaatgtacttgggcttccgtcaagcgactcgttcaggtgtatctgtaggtatggaagacatgttaattccacctacgaaacacacaattattgacaaagcggaaacagaagttcgtgaaatcgaacaacagttcgaacaaggtttcgtaactgctggtgaacgttataacaaagttgtcgatatttgggcgcgtacaaacgaccaagttgctaaagcaatgatggataacttgtcttatacacttgtgaaaaacaaacaaggtgaagacgagaagcaaaaatcattcaacagtatctatatgatgtctgactctggtgcccgtggtagtgcggctcagattcgtcagcttgcaggtatgcgtggtttgatggcaaaaccggatggctcgattattgagactccaattaaagcgaacttccgtgaaggtttgacagtactccagtacttcatttcaacacacggtgcgcgtaaaggtttggccgatactgcattgaaaactgcgaactctggttacttgactcgtcgtcttgtagacgtggcacaagacttagtaattactgagccagattgtggtacaagtggtggtctagtgatgactccattcattcagggtggtgatgtcatcgagccattacgtgaccgcgtattaggtcgtgtaactgctgaagatgtacgtcgtgcatctgatgatgaagttgtattacctcgtggtacgttaattgacgagaaaatcgcagctcagcttgaagaggctggtgtcgatgaagttaaagtacgttctgtaatcgcatgtgaatcaacattcggtgtatgtgcgaaatgttatggtcgtgaccttgctcgtggtcacttggtaaacccaggtgagtcagtaggtgtaatggctgcacaatcaatcggtgaaccaggtacacagttaacaatgcgtacgttccacgtgggtggtgctgcaagccgaacttctgctgcaaacagtgttcaagtacgtaacaaaggtactgtacgtttccataacgtaaaaactgtacaacatgcgaaaggccacttggtttcagtttcacgttcaggtgaaattggtattgccgatgagttaggtcgtgagcgtgaacgctacaaacttccttacggtgcgagcatcttgttgaaagatggtgagcttgttgaggctggcggtatcgttgcgacatgggatccgcatacgcatccattggtaacagaagttgctggtaaagcacgtttcagccaaattgctgatggtgtaactgcaacatctaaaactgatgatgcaactggtatgacaactgttgaaatcttgcctgtaacagcacgtcctgcttctggtaaagatttacgtccagcaatcgtattagatacaactgatggcggtgaacagttctacttcttaccacaaaacacaattgtgactgttcgcgacggcgaaacaattggtgtgggtgacgttatcggtcgtgtaccacaagaatcttcacgtactcgtgatattaccggtggtcttccgcgtgttgctgacttgttcgaagcacgtaagccgaaagaacatgcgatcttggcagaagtatctggtatcgtaagcttcggtaaagagaccaaaggtaagaaccgtttagtgattactccagatgacggttctgaaatttacgaagagttgattccaaaatggcgtcaaatcaacgtgtttgaaggtgaacatgtgaaccgtggtgaaaccatttctgatggtccacaaaatccacatgacatcttacgcttgaaaggtgaagttgctttaactaactacatcgtgaacgaagttcaagacgtttaccgtctccaaggtgtaaaaatcaacgataagcacattgaagttatcgtacgtcaaatgttgcgtaaagttgatatcatcgatggtggtgatacaagcttcatcaaaggtgaacaagtggattacatccgtgttgttcaagagaaccaagctgtcttggctcagaacaagttccctgcgaagtttgaacgtcaattgatgggtattacgaaagcatcgctttctactgactcattcatctctgctgcatcgttccaggaaacaactcgtgtgttaactgaagcggctgtaacaggtaaagaagatgatttacgtggcttgaaagaaaacgttgtagtgggtcgcttgattccagctggtactggtcttgcataccacttagagcgtcgtcgtcaagaagcggaagcagcagaacatgctcttcacaatgacttcagcgaagtagaccaagcatttagccaagctttaaactcagaacaattctaa

SEQ ID NO: 43273 - DNA, 366 bp, Acinetobacter baumannii
atgaaaaaaatgatgatgattgcaggtgttggtttaatgtcaactactctatttgtaggttgccaaaatgctagcccagaaagcaaacgtattggttcggcagctatcggtggtggtgcaggcggtgctgtaggtaaacatataggcggtaatattggtgcaggtttaggagcagcacttggtgctggtgttgccgctaatgccaaaggctctagcagtaaaacagtacgtaatagtgcgattggtgcaggtgttggggcaatcttaggcggtgcagtgattggtggtgacgctggtgctgctgcaggtggagcactcggcggtagtgctggtgcagcctatgaagagaaaaaaggtaagtactaa

SEQ ID NO: 43274 - DNA, 357 bp, Acinetobacter baumannii
atgaataaaaaaattggtttaatatctactgtcatattatcaacagttatgttcaccggctgtcaaaatatgagtccgtctgaccagcgtattggtgcagcagcagcaggtggtgcattgggtggcggtcttggtaaccatgttggtggtggtatcggtgcaggtttaggtgctgcggtaggtgcaggtgtgggttctaatactcaaggcggcagtaaacaaactacaaccaagagtgcgattggtgcaggtattggttcggtcgttggtaaagctatcataggtggtgatacaggtgctgcaattggtggcgcaatcggcggcggtgctggtgctgcgattgaagaaaagaaataa

SEQ ID NO: 43275 - DNA, 498 bp, Acinetobacter baumannii
atggctattttaaaaaaacttcagaacattccttcaatttccaaattcttatttaatcattacccaccttaccgtggagctggaattcatattgaagtcatgaatttagagctctgtcatgttcgggtaaaaatgccacttacttggaaaaatcaaaatctggtaggcactcactttggcggaagcctttattcaatggttgacccgttttatatgttgattcttatgcatcatctcggatcaaaatatattgtttgggataaagcagctgaaattaattttttatcacctggccgaagtaccgtttatgctgacattcgcgttgatttagcagaaattgaacaaattcgtgaacttgccgaaaactatgctcctgttcttagaacatatcatttaaatattttcgatgaatcaggtgtgagaattgctgaagtccaaaagacactttatatccgacgtaaaaaagcaaaaccttctactaataaaataagcgcctga

SEQ ID NO: 43276 - DNA, 873 bp, Acinetobacter baumannii
atgcagccaaagatttatgccgtaacgacaagtgatcaacaaaccctgtgtgccaaagcttggggtgatgagaaaaatactccattagtgttagtgcatggttatccagataatcaggaagtatgggaatcggtcattgagcatttaatcaatgatttttatattgtgacttatgatgtccgtggggcaggcttatcatctattcctaaacggatacgggattaccgtttagaacgtttatctttagatttgcaggaagtcgtagatgaggtaatcccaaatcgacagttccatatggctgcgcatgattggggttcaattcagtcttgggaatctgcaacagaacctaaatttaaaggccgtttactctcttatacaacaatttccggtacatgcttggatcatgcggcacttttcttaagagagaagtttaaaacatcacctgcacagatcctaaaaatactcacaaaatcatggtatatcggagcattccatttaccgctaattgctccaactgtatggtcgctgtttagcccagaaaagtggggtaagatcttaaaagatttagagcgaaaagataatttgcctttaaatagtaatatttcctcagatgggaaatacggtattaacttatatcgtgcgaattttattccacgtttaactagccctcgtcagcgttatgcgcaatgtccagttaaagcaattattttaaagtacgacacttttgtcagccccgaatatattacagaagcgatgccaaaatgggttgaaaacttcgaatatgttgagcttgaagcaaatcattgggcgattttaagtcaggctgaaaaagtggcagctcatattcgccaatttattgactcgcagagctaa

SEQ ID NO: 43277 - DNA, 1425 bp, Acinetobacter baumannii
atgaatgctgtcgttattgcgattgcagtgatgttcttattatcactggcgcgcgtttctgtcgtactgactttagtggtttctgccattgtgggcggcctcgtagcgggtttaagcctttctcaaactgttgaagcctttaacgctggtcttggtgatggtgctgaggttgcacttgcctatgcagtgttaggggcatttgctctggcactttcaaaatctggattacccgatttacttgcccataaactgattggtttattaggaatggaagcggggaaaagccgagaaactaaagtgaaatatttactcttaggtattttactgatcgcagctattttctctcaaaaccttattccagttcatattgcttttattccagtattggttccgcctctattacgggtaatgaaccatttaaaattagaccgccgcgccgcagcttgtgttcttactttaggcttggttgggacatatattttcttacctgttggctttggtgcgattttccttgaacagattttgatgggaaatatcaacaaaattggtgctgcttatggcttacatgtagaacgtggcatgatgcctattggtatggcaattccagttttgggaatggttctaggcaccttggttgcggtatttatcagttaccgtaagccacgaatttatgctgaccgtacgataagccctgtaactacaattgatctagataaacctcttcgtgcaactgcacaagatgaaacagcagacttaaaggcagacgcagaagaacttaaacatgaggcagagcaagggcctattattgctaaaaaaacaatttttatggctttactggctattgggctcactttagttgcgcagctttattccggctcaatgatcttgggtggtttagtgggctttgcagtgctttctacggcaggcatttttaaatggcaagatgcagatgatgtctttgtacaaggcatgagaatgatggctctagtcggctttattatgatctctgctgccggttttgcttcggttatgactcataccggagatattaaccagttggttaaaggtgtggtagaaatcattggtgataaccgtgcgcttgctgcatttttaatgctttgtattggcctatttgtcacgattggtataggttcatctttctcaagtgttcctgtattagctgttatttatgtacctttatgtgtccagttcggtttctcaccgttagcgacaattgcacttatcgggacagctgctgctttaggtgatgctggatctccggcttctgattctaccttaggaccaacagcaggtttaggtgtagatgggcaacatgaccatatttgggatactgtgataccaacatttattcactttaatattccgctattaatttttggttggattgcagccatggttttataa

SEQ ID NO: 43278 - DNA, 582 bp, Acinetobacter baumannii
gtgttcaaaaaagtattagttgttgcattaatgggggtgtcttcatttacttttgctggtaattggcaagtaaaatttgggggcagcgttattgctccatcggaagatacaacaactgctttaggtgtggtaaaggcggaccatgaatatgcatttactccatcagtagaatacttttttggtcaatctccattttcggcagaattattattagcaacacctattaatcatgatgttttattagatggtcagaaagtagcgcgtattaaacaattgccaccaacaattacagcaaaatatcattttaaaaactcgactcgttttacaccgtatattggtatcggggcaacagcatttattccttgggatgaacaaggcgtagctgacaaagtaaaagaagattttggtgtcgctggccaagttggttttaacttccaacctgctgatgctaaaaattggggagtatttgtagatgttcgttatgcagatattagtccagaagttactttaacaaatggtgctaaatttgacttagatattaacccgtttgtttacactttaggttatagctataaattctaa

SEQ ID NO: 43279 - DNA, 357 bp, Acinetobacter baumannii
atgatgaatagaaaatttgccatggggctagcactttttagtggtttagcttttacgcatagtttgcaagctgctagtttctcttgcaatgctgcaaagacaaagactgaactcagtatttgtaaaaatcgttctttaaatgatgctgatgtaaaaatggcaacaacgtatcaaattgtcctgcatgctttacctatgggtggacgtgatagtcagaaagatgctcaatatcaatggctgaaaaagcgaaatgcttgtgcggctagcgtaagttgtatcagcaaagcttatcaacaacgccaaaaacagttagacacgatattgcaagatagggtgttaaaccacggtccgttttaa

SEQ ID NO: 43280 - DNA, 1779 bp, Acinetobacter baumannii
ttgcgtttcgaaggaattaatcatcctgaatattatgaaaatgaccctaatttacatgtacgaatcagcttaaataaagaagataaaactttaacgatttctgataatggtattggtttaagccaacaagaagctattgataacttgggtacaattgcaaaatcaggtactaaagatttcatgtcaaaattgacgggtgaccagaaagcggatgctcagttaattggtcagtttggtgttggtttctactcaggttttattgttgccgataaaattacggttgaatcacgccgcgcaggtctagatgcttctgaaggggtgcgttggatcagtggtggtacaggtgagtttgaagttcagcaaattgataaagcttcacgcggtactgacattattcttcacttgcgtgatgacgcgcttgattatttagagtcttataaagttaagcaaatcgttaataaatattctgaccacattagcttgccaattgaaatgcaaaaagaagtttggcaagaagaagaggttgctgaaggtgaggagcctaaaggcggccaaatggtcaaaacagatgagtgggaagcaattaactcggcaagtgccctatggacacgtaacaagagtgaagtgactgaagagcaatatgttgagttctataaaaacttaactcacgattttgaagctccgcttgcatgggcacataaccgtgtagaaggtagtacggaatatacccagttactttatattccaagtaaagcacctcatgacatttttacacgtgaagcaaaagcaggaattaagctgtatgtaaaacgcgtatttattatggatgatgcggacaatctaattccaaactatttacgctttgtacaaggtgtcgtggacagcgctgatttaccgcttaatgtcagccgtgagttgttgcaagaaagccgtgatgttaagacaatccgtgaaggtaacgcacgccgtgtactcactttgcttgatggcttagctaaatctgaagatgaaaaagaccaagaaaaattcaaaacgttctacactgagtttggctcagttcttaaagaaggtttgggtgaagacttcggtaaccgcgaacgtattttaaaattattacgttatgcaacttcaacaaatgatgaggtaacaacttcttttgcggactataaggcacgcatgaaagaaggccaaaaagctatctattatgtgactgctgaaagtttagctgctgctaagaactctccacagttggagttgtttaagaaaaaaggcattgaagtattattaatggcagagcgtgttgacgagtgggcaatgaactttgttcacgagtttgacggtacaccattgaagaatgtatctaaaggtgcagttgatttaggtgacttgcaagatgctgaagagaaaaaggcacttgagcaagcggctgagcagtttaaacctgttgttgagaaattaagtgactcattgaaggctaaaaccaaagaagtccgtgtaacgactcgtttggtagattctccggcatgtttagtgactagtgaaggcgagttgtctcctcaacttattcgcatgctcaaacaagcagggcaagccgtacctgaaatcaagccaattttagaaattaatcctgagcatcctttagtgaaaaaacttgaaggttcagaacaatttgatgatttggcgaatgtaatttttgatcaggcggtgattgcagaaggtggattaccggaagatccggcagcttatgtgaagcgtattaatagcttattgctaaaataa

SEQ ID NO: 43281 - DNA, 903 bp, Acinetobacter baumannii
atgaatcaattctcttctttttcatttgaatacagatctactgccttactttgcatttatagcttaggtatgctgattttaattcctcatatacagctttttcctatttctttgaaacacttacgctctacaaggcgacccctgtattcgtctgtggttactctcaaaacaaaaagtcagactgtatcttttttacattcaccatgcgaagtagaaccagatcatagttcagataccgcacttattcaggacctgatggctgtatttggaaatgatacgttgtggagtcgcgcagcccaacgcaaacatccttataaaacctttggcaaggttaagaagaaagcttcaactcttcatgtttcagaaaataatccgctcacagcaagttggaataccatttcaacctggatgccgtttgaaaatgatcttgatctaggctcaaactcggaaagtgatgtttatgtacaatttcttgccaagaaaaaatggaatttacgacataacatgagtctagatactgagcaaattttccgatatggttcgaccagccgaaattacactgaaacgacgctgaacctaacgcagaaaatgcaagataacacattattttccaatacatttaatgtaaataagagtggaaaagaagattacaactgggagaattggactttccaacaatttgaatttgtaaaagataatcgtctgacttacggtatttatagcggtggtgtatatgccaataatgatatccgcctaaatagttggggaccttatatttcatggcgtcaaccgatatggagagattggatttttatgcaaaatgatcttaatttctttaaccatctggatgatgatccgaagcatcagctcagtgtccaaatgaatctggaagctaatttttaa

SEQ ID NO: 43282 - DNA, 1140 bp, Acinetobacter baumannii
atgaaaacatttcacatcattacatatcggcagctttttgcccttttgaccttaggatttggttcagtatgtatggctcatgcagaagtaaattcttcctcaacccaacaagtaaacggtttatcatctggagcacaaactgaagaaaataaagatgaaaatcttttagaccaaattccgagatggattgatgcaaccccaacgattttcccggagcagtccaacgaaccaattgttccaccaaccgagcaaaccgaagatcagacttggtttgaccgtaaacaaaagaaaattcgtaattgggccgatcgtacatctggaaaaattgataattggtttggtgaagttgacccacaaaaacccgcgtcagccaccattcgggtcatgatcgataactattggaatgaatatgataattatgaaatcaagcccagaattcgcggtaagattaaattacctactctagagaagcgtttaagtgtggtatttggtgatgactctttagatgacgaatttaataatagcccagccaatatcaatcaaaacccaaatcaagatccaaataaaaagttagatggtaaaagaactcgagatgacaacagctcaatcgcattacgttggtcaaatttctcgaaaaagctaccttttgaaacagacgctgacttaggtatccgttctggcgatgatatttatgtccgtttaaaagcatcgagagactggcaactccgtaatgattttaaattttatgcagaacaaatttatcgttatggcatagatagtgaaaactacttacgtactaatcttgaactcactcatgctcgtccaaatcagccgatcttatcaaaccagttcagcttaacttatgccgatgatcaagatgacgatttaacatgggaaaaccgtcttttccgagaacatagcttctttgcaaataaccgttttaactatggtatttatacaggtggctactacaatgacaacgatttacgtttaaacagttggggaccatttgtatcatggcgtcagcctgttttacgtgaatggttctttgtacaaggggacctcaattactttaatgaccatcgtgaagatcgcaaccattatgtgagcacattcttacgattagaagcccttttctaa

SEQ ID NO: 43283 - DNA, 705 bp, Acinetobacter baumannii
atgcgtgttgatgtctggtctgatgtagtatgccctttctgctatatcggcaaaaaacgccttgaacatgtcgctgccgaggcaggtatcgagcttgatattcactggcatagtttcgaactagatcctgatgctcccgcaaaacatgacacttcaaatactgagcgtttagctaaaaaatatggccgtacctatgaagagatggaagaaatggaacgcaacattgcggccatggctgcttctgaaggtattgacttccaatggcaaaaagccaactcaggcaatagctttaatgcacaccgtattatccaccttgcacaaagtaaaggtttaggaaacgaagcaaaagaagcctttttccatgcttatatgactgaaggtttagctattggcgaacgcgaagttgtagaagaaattgcttctcgtattggccttgataatgccgaagttgagtatgtactcgatacaaatgagttggctgactttgttcgtcatgatgaaaaaattgcacatgagcagctcaatgtaactggcgtacctttctttgtatttgaccaaagaatcgcacttgcaggagcacaacctcgtgaagtgtttttacaagtactagaacaagctaagctcaaggcaaatgctgaaaatattgagcaagatgacgcagctgtttgtaatgatgaaacatgcgatattccacaaaataaatag

SEQ ID NO: 43284 - DNA, 759 bp, Acinetobacter baumannii
atgcgccgagttttgattgcaattgcaagtctggttgttattacgagtattgttttttttacctatcaacatataaaacagcagcaagccaaagatagcagtcaaatgtttgatgtggtaatgactgaaaaaatgaatcagctttatgatcaggcccaagactggactaaacctgtacaacttgatattcacgataaacggctggcaggacactacaaacaagtctcagagtttcttttgagttattgggtccaaaatgtaaatgcacgtaatgaatatttaagagaattaaaagctgcgaaatgggatacgtttttaaatgttgaccgtttagatcatgataaaaaacaaaaatatgctgaaaccgaaaaaatgctagccgatgttcgcagagcttcagataagtatcaatccgaatatgaaaaaattcataaaaccttcttggcaaaaattcaggaactgtctgttgataaagagatgagacaaatcctcgaaataaaattaggagctcagcaaaaagccgatcaggaccatgcaatttttatgattgagctacaaattttagataaagcagaagaaatgtttaagcttttaaaaacttatccatggcaaaagaaagatcagatgatacttttccatgaaaatgctcaggtcaaaaagtttaatgcactgtatcaagacgttttaaaacttaatgcaaaaattgaaaaaattaagaaaaagaatgtagctgccttggaaggagagttaaaagaatag

SEQ ID NO: 43285 - DNA, 366 bp, Acinetobacter baumannii
atgaacttagctaaagtttccgagctcacaaaagtaagcccacgtatgctgcggtattatgaaaatttagggcttatacagcctcatcgagcgagtaataattatcgaagttatacgcaaaaagatattgaaaatattaagaaaattaaaatattaaatgacgcaggtatgaacctgaaagacattcatgttttattgccatgttttgatttagatgaacgggtatttacgctgtgtccagtggttcaagaaaaactgcaaacagaacttaagcatgtgtccgatcagttaaacaaactgcaaacttctcaaagtttattacaatctttcttggcaaaaggaaaagctgagagcaccaatatttaa

SEQ ID NO: 43286 - DNA, 558 bp, Acinetobacter baumannii
atgcgtcaaatatttgtgcttcacggttactcagcttctatcaatgatcattggtttttggacttaaaacatcaaatagaagatgaaaatacaactgttactttaatatcatttccagattctgagcatccggacgtcgatgcttggcagaaagtattagatgagcagattcctgcagttaatgaaaatacttattttgttgcccacagtttaggggtgattaccttgctacactttttacaaagacatgattatcaaaatattggaggaatgattttagtatctggattctctggaccaatttcagactcttcacctcttagtccttatataacaaagagtaaagtcgacaccaattatttccgtgacataaagaaaaagttggtttatttgtctgataatgatgatttggttccaccacaactaacgattcaattggctaaggatattgatgcgccttatattaccgttcctaatggtgggcactttttaggtcgggaaggttatacggaatttccgcaattagtcgattctttaaaagaaatgttagaaaattga

SEQ ID NO: 43287 - DNA, 717 bp, Acinetobacter baumannii
atgaactttaaaatattaaatcagaatattcttatgagctgcttactagccagtttctttctcactggttgtgtgagtaatcgaattattggtgaaaacacgcgagagctatttacaaaatacgactcaggctatgaatggatcactttaacagaagatgatgtaattgcattcggtaaaccatcagtatctctcccaaatgaaccagaggacagtattgttatcgcagggaaaaaatatagttatgtcattagtaaaggcggtaacgatttcattcaattaattagtcaattaaatccacaatatattcaaataagtaatgagctagattttaatgctccagcttcgaatagtaaccatttttacggacatattagattttcttacaccccacctaatgggaaattgaacgagaaagaatcagctttatttaaacaatatggtgtagttccatgtgactatgaaaagaccttagaactacataaatttgagttaaatcttagaggaactgtttatcctcctttaaacaatcttaaaaaaataacccctttatctaagccatatcacgttagaatccaatatcttcatgataaaagcggaaaagtgcccttatcaactaaggagaagctagcaagtttaccactgcttccgtttaccttaactttcgatattatcgctttacctgcgaaagtcatgggtatcatttaccagccttaa

SEQ ID NO: 43288 - DNA, 492 bp, Acinetobacter baumannii
atgaactttctaaaacaatcagccttcattgctgtatttgcttttatgggtttaccaactgttcaagcagaagaagtggctactttacctacaattcgcgttatggccgaatctgagctacgtgaagaagtaggctttgtcccatttcaagaagataaaaaagtgcgtcaggctctacaacatcgtgagtataaaactcataacgatatacagaatgctttagtccctgaaggtatgacgacagtagactatcaacctgtcatggcacagccagacttgtctcagctttctccatttttacgagaatatattctagctgtagcgggtggaatccaatcttctgacccaaccaatggtctttttgaaatgttaaagccgctgaacattaaccgaagtaatgtcgatgcttatcgtgaaggtacgatgaaagtaaatttagatgatattttgaaattacagcagcaaattcaagatggtttaaaaggccgataa

SEQ ID NO: 43289 - DNA, 1173 bp, Acinetobacter baumannii
atggctactttaaatccacgtgacgttgtgattgttgatggcgttcgttctgccatgggcaaatctaaaaacggtatgttccgtaatgtacgtgccgacagtttatctgctgaacttgtgcgtgcgctcgttgcccgtaaccagtttgatgtaaatgaagttgaagacctgatttggggctgtgtaaaccagaccctagaacaaggtatgaacattggccgtaacatcggtttattggctggcttgcctaaaactgtggctggtcaaacagttaaccgtctttgtggttcttctatgcaagcgatccacactgcggctgcacaaattgcaacaaaccaaggtgatatcttcattattggtggtgtagagcacatgggtcacgtaggcatgatgcacggcatcgaccttaaccctgaagcatctaaacactacgctaaagcatctaacatgatgggcttaactgctgaaatgttaggtcgcatgaacggcattacccgtgaagaacaagatgcgttcggtgttgaatctcaccgtcgtgcttgggctgcaactcaagaaggccgtttcaaaaatgaaatcattggtgttgaaggccacgatgcaaatggctttaaaatcctttgcgacatcgatgaagtgattcgtccagatgcaaaccttgaagcgttcaaagcattaaaacctgtatttgaccctaaaggtggttcagtaacagcagcaacatcttctgctctttctgatggtgcttctgcaatgttgcttatgtctgctgaacgtgcacaagcattaggtttaaaaccacgtgccgtaatccgctctatggctgttgctggttgtgatgcagcaatcatgggttatggtccagttccagcaactcaaaaagcacttaaacgtgctggcttatcaattgctgatatccagactgttgagttaaatgaagcatttgctgcacaaggcttgtctgttcttaaaggcttaggtctgtatgacaaacaagacatcgtgaacttaaatggtggtgcgattgctttaggtcacccactaggttgttcaggtgctcgtatcaccactacgttgttaaatgtaatggaacaacaagatactcaaatcggtcttgcaacgatgtgtatcggccttggtcaaggtatcgcaacagtaatcgaacgtgtttaa

SEQ ID NO: 43290 - DNA, 2154 bp, Acinetobacter baumannii
atgatccacgctggcaatgccattaccgtccaaatgcttgcggacggaattgcagaattccgctttgacttacaaggtgagtcggtcaataaattcaaccgtgcaacaattgaagatttcaaagctgctatcgcggctgtaaaagctaataacgatattaaaggcttagttgttacctcgggcaaatctacattcattgttggtgcagatattaccgaatttggtcaaaactttgcacaaggcgaaaaagcgattgttgactggcttatgcctgttcacgaaatcttcaatagctttgaagatttagaccttccaaaagttgctgctattaacggcatggctttgggtggtggttttgaaatgtgtttagtttgtgactatcgcgtgatgtcagaagctgcacaagtcggtttaccagaaatcaaactcggtatttaccctggtttcggtggtagtgttcgtttaagccgtctcattggtattgataatgcagttgaatggatggcaatggctactccaaagaaaccggctgctgcacttaaagatggcgctgtagatgctgtggttgctgcggacaaattacttgacgctgctactgatctggttaagcaagcgatttctggtcgtttaaactggaaagcaaaacgccaagaaaaacttgaagctgtaaaattgaacccacttgaacaaatgatggcgttcaacacagcaaaaggtgcggtacttgctaaagcaaatcctgctcaataccctgctccaaaattattacttgattcattacaagctggtgcaagccttacacgtgatgaagcgttaaaagctgaggctgaaggctttgccaaagcagccgtaactcctcaagctgaagcattaattggtttattcattaatgaccaagttgttaaaaaagcatctaagcaacatgaaaagggtgctcatcctgtaaaccaagctgctgtacttggcgcgggtatcatgggtggtggtattgcttaccaagcggcaagcaaaggcactccaatcatcatgaaagatattggtaacccacaacttgcattaggtatgaaagaagcaaacaacttgttaaccaagcaagttgaacgcaagaaaatgaaacctgcgcaaatgggtgaaacacttgctcgcatccgtcctactttaagctacgaagagtttaaagaagttgacatcgtgatcgaagcggtaactgaaaatccaaaagtaaaagaaatcgtacttgctgaaactgagaaaaatgttcgtgaaaacacgatcattgcttctaacacctctactatttcaattacacgtttagcaaaagcattacaacgtcctgaaaacttcgttggtatgcacttcttcaacccagttcacatgatgccacttgttgaagttattcgtggtgagaaaacttctgaagaagcaattgcaactacggtcgtgcttgctcaaaaaatgggtaaaacaccaatcgttgtaaatgactgcccaggattcttggttaaccgtgtattgttcccttatttcggagcatttgaccttcttgtaaaagacggcgcagatttccagcaaatcgacaatgtaatgtctaagttcggttggccaatgggtcctgcttatctgatcgatgttgtaggtatcgatacaggtgtacatggtgctgaagtgatggctgaaggtttccctgaccgtatgaagccagagtacaaaggcgcgatcgaagcaatgtacgaagcgaaacgtcttggtcaaaagaatgatgtaggtttctacaaatacgaactcgacaagaaaggcaagaaagcaaaaactgttgatccaacagcgtatgaagtaattgctccattcgtaactggcgaaaaacgcgaatttgataaccaagaaattattgaccgtatgatgcttgctctttgcaatgaaactgttcgttgcttagaagacaacattgtagcgactgcatctgaggcagacatggcaatgattatgggtattggtttccctccattccgtggtggtccatgccgttacatcgaccaaacaggtgttgctgaatacgttgcactttgcgacaaatatgcgcacttaggtaaggcttatgaagcgccacaaatgttgcgcgacatggctgctaacaacaaaaaattctacggttaa

SEQ ID NO: 43291 - DNA, 915 bp, Acinetobacter baumannii
atgattaagtggatcatattagcgatttttgtgatatctgcattgtatatccaacatcgcggcaaagtgcgtcactcgttttatcgtcaattttttgaccattcaaccttgctcgcaccgattaactttttaatgtacatcttttcaaaggtaccgaatcaaccctatatcgacactcaacactttaaagatttaaaagtgttagatgaaaattgggaaatgattcgagatgaagcgaaagctttatatgaccaaggtgggattaaagcatcaagtacctataacgacttaggttttaactcgttctttaaaacagggtggaaacgtttttacctcaagtggtatgaatcaagccatccttctgctgctgagctttgcccaaaaacaacggctttactcaaaacattaccaaccattaaagcggcaatgtttacagagcttgctcctgacagccgtttggtcagacaccgtgatccatatgcggggtcactccgttatcatttgggcttgattactccgaatgatgaccgttgtttcattgatgtagatggtgaaagatactcttggcgtgatggtcaaagtgtcgtgtttgatgaaacttatattcactatgctgaaaataagactgatcaaaaccgtatcatcttctttgccgatgttgaacgtccaatgaaagtaaaatggatggaacgtttcaaccattggtttggtcgtaatgtgatgactgcggcaagttcaccgaatgaaactggtgaccaaacagggggcttaaataaagcctttggttatgtttaccaaattcgtattaaagctaaagctttaaaagctaaaaaccgtaaattgtattacttcttgaagtggttcctcatgcttggaattttcttcctgatttttgttcgaccatacgtgttttaa

SEQ ID NO: 43292 - DNA, 531 bp, Acinetobacter baumannii
atggctcatgctcatcacgcagctcatgcacatgttcatcatatcgaagagagaaaagaagaccgttctcaaggcgatttaaaaacaaaagtgatgttaagacaagcagcttcgacgactgaaaaatctaaacgatctagaactaaaaatcataaaactgaagaccaaaatattgatctacataagttctcaagtaagcttgaaagtatgtctgcaaagcacagtaaagaaaaatgtgccaagaatattcgcattgccttacaagctgcgggtgcagatgtatcaaagcatcctgtagctgcatctgactgggggcacaccttagaaaagaatggttataagaaaatcaagccggcatttaatcgtcctcaagaaggggatatttatattatcgaacgtaccagtggtcatacttacgggcatattgcgggctatacgggtaatggctggttctcagattttcgtcaaaaaacctatgcggtctataaagaaaaagatgtgaaatatagttactatcgcctcgactcttaa

SEQ ID NO: 43293 - DNA, 1809 bp, Acinetobacter baumannii
atgccaatagtgaatcaaaacgctcgtccccatattgaaaaaattttagctaatctgacccaacttccaggcgtttataagatgctagggaaagagggggagttgttatatgttggtaaagctaaaaatctaaaaaatcgggtgtcgagttattttgttaaaaccattgagcatccgaaaactcaagctttagtcgctcgaatttatgatattgaaacgctagttacgcgttcagaaaccgaagcgctgcttttagaacaaaacttaattaaacaacatcgtccgccttataacattatgctgcgagacgacaagtcatacgtctatatctttgtatcggcagataaaccgtatccacgaattgccagtggacgtggcaaaggtaagcaccaaattggtaaattctttgggccttatccaagtgcttatagtgcccgagataccttactggttttacaaaagctttttaatgtccgtcagtgtgaaaatagttacttttcacagcgcaaacgtccatgtttgcaatatcaaatcaaacgttgttcggctccgtgtgtaggcttggtctcaccagaagattacaaagaagatgtgaataacagtattcgtttcttacaaggtgataccaaagagttaaaccaggaactgattgcgaaaatggagcaggcagcggcagatcttgaatttgaaaaagcggttttttatcgagatcggttgtctttacttcgcgaagtacaagcacagcaagctgttttcaaagtgaaaggtgaagctgatattttggcaattgcctatcaggctggcgtgacatgtgtgcagattatgcatgtacgtaacggacgtatgttgggaggtaaaagctatttccctgatatgttaggcgatgaccttggtcaaatgctaagtgacttcatggcaaacttttactttcaggttgccgatgaagtaccaagcgaactgattgtgaatactgccttacctgaccgtaaagagctggaagaagccttagcacagcagtttggaaagaaagtccagattaagagcagtgtacgagaaacacgtgctgaatggttagaacttgccgaaatgaatgttcaacatgcaattaaagggcagttgagtaaccatttagaactcaatgagcgtttccaccagcttgagcaggtagttggccgtccgatcgatcgtattgaatgttttgatattagccataccatgggtgaggcaccgattgcatcatgcgtagtgtttgaccaaggtggagcacgtaaacgggactatcgccaatttgccattcaagatattactgcgggtgacgattatgcagcaatgcgccaagctttaacgcgtcgctataaaaaggcaatgttgccagatctgcttttaattgatggtggtaaaggccagctccatatggccatggaagtaatgcaagagcttgggttagaagcttttatggtaggtgtatcaaaaggtgaaggccgtaaaccagggcttgaaacgcttcattttaccgatggcacaaaaattcagttacctgaagatagtaaggcgctacatttgattcaacaggtgcgtgatgaagctcaccgttttgccattactaaacaccgcgctaaacgtgataaacgccgcagtacttcagttttagaagcaattccgggcttaggacctaaacgccgccgagatttattaacacattttggtggtatccaaggtgtgttaaaagcatctgaaaaagaactgacagtcgtgccgggcttaggtgaagtgatggcaagaacgatttataaaattttgcatgagtag

SEQ ID NO: 43294 - DNA, 795 bp, Acinetobacter baumannii
atgtcattattgcacctatgggaagatgtaaaacaaaatgaatggattgatatacctgcaggatggttacagggccgcaccgtttttggtggccttgttgctgggttattaatgcaaaaggcatgctcctatattcaagattcaaataaaagattattaagttgtagtgttacttttgtaggccctgtacaacaaggcgctgcccaattgactattgaagttttaagagaaggaaagtcagtcactacgcttgaagcgcgtttatggcaagatgatgcggtacaaacgattttggttgcaagttttggggcttctcgtgcatcgagtattgaggtaaagcaagagccagtcgtccctgcttatgtaccacctgaaaatttatctgtcattccttttgcgaaacatatgcctgaatgctttcagcattttgaagtctgttgggctgaggggaattatccggtaacgggaagtaaacatcccgactttggtggctggtcaaggttctcaccagagcagcatgcgaatcgtcaaatgacattatctgatttgattgttcttatggatatttggccaccgggtgttttgcctatgtttaagcaagttgcacctgcaagttctttatcatggcatattacgtatgttcatccagttcggcaccagttgtgtgactggtttaaatataaagtaactactgaatatgcagctgaggggtactccacagaatatgcatatctttgggatcaaaatgatcatttaattgcaatcttgcggcaaactgttacggtatttacctaa

SEQ ID NO: 43295 - DNA, 588 bp, Acinetobacter baumannii
atgaccacagggcgaatcctgaatatcccaaatatcctaactttggcgcgtattgcgcttattcctgtatttttggtgattgcatattggccgcctgcaataggtattggtgagcacgtaggaagtatgacacgtcatattatcttaacggctattttcgtgctggctgccgtaaccgactggtttgatggctatttagcacgaactttaaaccagacttcagcatttggccgtttcctagacccggttgcagataaacttatggtcgcagctgcacttattgttttagtgcagtggaaaccgacaattgcgatggctttcgctgcaattgttattatttcacgggaaattactgtgtctgctttacgtgagtggatggcagaacttggcgcgcggaccagtgtagccgtatcaacagtgggtaaatataaaactgcatttcaaatgattgcgattagcgtgttcctgttgaattggcagcctttagaagtattggcctatgctttgttatataccgccgttattttgactttatggtcaatgtttatttatttaaaagctgcatggccatacctaaagcagccataa

SEQ ID NO: 43296 - DNA, 855 bp, Acinetobacter baumannii
atgcaaatgctttcttctcggcaatttgctgcgattgccacaattattgaatatttatatgaacatctagaccagcaaccaagcttagaagatgtcgctacatatatgaatttaagcccgagttatatccagcggcagttccaagaatgggtaggcattagccctaagaagtttgtgcaatatatgagcttgcagcaagcaaaatattatttaatgcagcaacgtagtttattagatacggctttaaatactggactgtcgggtacgggtcgtttacatgatttgtttattcagcttgaagggatgacccctggtgaatacaagcagcaaggtgatggcgttgaattgaattattcagttgaaacgagtccatttggtgacttattggtagtaagtagtgataaagggatttgttctgttcgctttgttgatcacagtgagaacatacaagaaatcgttaaacagtattttccgaaagctcagttaaaaaatcactctccgatttggcatcaacagattgcacagtggtttagacaagacttctcagaacatttacagcagaaattaccgcttaatcttgcaggaacaccatttcagctacaagtatgggaggcactgcttactattcccgaagggcagttacgaacctatcaagatattgctgagcaaattggaaaacctaaagcagtcagagcagtggctacagcaattggccaaaatccgattgcgtatttaattccatgtcatcgggtcattcgcgcaacaggaatggtcggtgagtaccattggcaaaaagggcgtaaactggcattgttagcttgggagatggctaagcagcaaggggagattgcatga

SEQ ID NO: 43297 - DNA, 612 bp, Acinetobacter baumannii
atgacattagatttattttctccggaaccttgttcaaacttattgccttatgatggtgaggttcaggattatggatgtattttaactgccgaagaagctgaacaatattttcattatttgtaccaccatttggcgtggcgacatgatgaagcgaagctatatggcaagcactttataacacctcgtaaagttgcttggtatggagatgagcattatcgatataaatattctggtgtctttcgtgattctttaccgtgggacaaagcacttgctcagctaaaacagcaagtagagaagatcctttcagaaaaatttaattcttgcttggcaaatctttatgaagacggaactcaaggaatggcttggcatagtgattcggatgtgtctttagccagaaccactacaattgcctctttaagttttggagcaacgcgaaagttctcttttaggcatattcaaactaaagaaaaagttgagatgtggttacaaccgggtcaacttattgtgatgcgtggtgagactcaacaatattggcaacaccgtttaaatcgttcaaccaagattttacaaccacgcattaatctgacttttcgtcagttcaaattttcataa

SEQ ID NO: 43298 - DNA, 774 bp, Acinetobacter baumannii
atggcaatttcaagttttggcaaaattttaaccgtactggatttattttccgtttcacgaccagtgattaatgtcgatattatttgcgaagaacttggcttgtctaaaccgaccagctaccgttatctgaaagaactcgtatcagccgacttattaaaacgtattaatggtacttctggcgattacactttaggctcaaaaatagcagttcttgactatgtatctagaacaaccgacccattggtccaaatcagcacgccatttatgcgaaatattgtagagcgtactgaactttgctgtttactcacctatttaaatgatgactactgcattgatattcatcatgagatttttaaagatactgaattactttcatatggtcgaggctgcccacgcccaatttatgttggggcttcaccaaaaacgatggtttcacatttaagcaaacaacgcatgcatgactactatgaacgttttcaacatgagctgtctgaatcaggttttgctgtagacgaacctagctttattcagcgtatgcgtaaaataaaaaaacaaggcttctatttctcgcaaggtgagattgaccccaatgtttcagggcttgctgtacccgttcgtttttcgagtaaagaagttcctttggctttaacgttagtcgcatcaaagaaccgctttgattttttaaatattgaaaagttgattgaaattttgcaagaaaacgcggcattgattgagcagcgctttatggaactttcagaaaagggcgaaatctaa

SEQ ID NO: 43299 - DNA, 2100 bp, Acinetobacter baumannii
atgttattaaagcaaatactggctttccgcccgagtaagcttgatctaatttttgcaataaagacatttattgccggtatgttggcattatttgtatcgttcgaattagacctgattaatccaatgtggtcgatcggtaccgtcctgattatcgccaatccttattcgggtatggtgtcgtctaagtgtgtttatcgtttattgggaacggtaggcggggccattattgccttaaccattactccgcatctgattaatacgccgtggatctttacggttgtgttatcactatgggtgggctttgcgctttatgtgtctttattagaccgtactcctcgcagttatgcatttatgttggcaggttattcaaccgcaatgattgtgtataacgcgattacttatattgatcagtacaatatttttgatattgctttggctcgtgtacttgagatttctattggtgtgatttcgagtgcggttgtgtctgcaactattttgcccatgcatattggttcggcaatcaaacagcgcgtaacgaaaactctcaaagatacagaaaacctgtttgctaatttgttaaatgcagatcaacagcaaaacaatacacagcttttagctgctattactcgtgatacgaccgatattcatgctctggcagttcacttgagctatgaaaaaggtgagttgcatggcatgaccaaacctttgcaagaaatgctccatcaaatgtcgatggtggttgcgaacttggttgccttatctgaacgaattaaacaactgcaagaactcaattttattgaaagtcattcagataaattaaagcagctttcagggcatgtgattcattttctagaacaaaaagatcagatgactgatgaaaatattctgcagttacctgacgagtttgaaaatgatttcttgaacttaaatgattcggcttctgaacatcagcaagtgttattggctgccatgaaaatggatgtgcgtcatttcattagtaatgttttagctgtaaaagttttatggcaacgcatcaagcaaggtaataaagagattccagataacattaccccaatgactacgacctatccaagtttacaccgagatcatggtgtggcagtcagagggggtattagtgcagtgctgattacatttattgtaactggtgtgtggattctttctggctggaaagctggatttatgatggcacagatcggtgcagtcactgcctgtatcttaacagccctagataaccctgttcctgtcttacgtatttttatatggggcagtgtggcttcggcggttttagtttttatttacgcgtttggtatttttcctcatgtcaccacattttgggaactgggactcgttttattaccaatgttcttgtttgcggtttctatgatggcgaatcaggcactcatgccagtgggcatggtgctgggtattaataccatgatgggcctgaacttgcacaatgcttatagcatggatgcagtgtcttacctagacagttcatttggtatggtcatgggcgtattggtatcgttagtcgttattgatgttgtgcgtgccatgtcacccgataccagtgcaaaccgtattttggctttacattaccgtgcgatgcgccaagccatatacattccttatggtattgaatttaaagttcacttacgggggatgttagaccgtgttggtgtcttaaatactaaaatggttcagtcagaagagattaaaaaatctattcaacaggctttggttgaatcaagtgcgatcattgatttaagccgactacaagagctagcaaatcaagttccgacatcttcagaattggcccatcacattggccgtttgcaacaagatttagatgagctatttagagctaaagaaaatgaaaaaggtgaaagtgatgtattggtacagcacattcaccaaaccttatttgaacttaaacaacttgcttcaaatattgaagatatgactctgcgtcaaagattatttatttcactaaataatattgcttatagcatgtgtcatgtttcatcaaaccaaatgaatgcagatcgtacgcttacaggagccacagcgcatgggtga

SEQ ID NO: 43300 - DNA, 207 bp, Acinetobacter baumannii
atgggtgagtttaatgtctatggtatttacgtgcctgctttgctcgtccaagccatttttgcatatatatgttttcgctggttaagtcccttaaccaacaaatggattgcacaaggctggattgcattacccagtattttcaatttgtgtttttaccttttactacttttggtgatacaccaaatttttgttgggttaggtgcttaa

SEQ ID NO: 43301 - DNA, 1002 bp, Acinetobacter baumannii
atgaatcaattggagttgaaaaaagtcatccgtccagtgattttgattgtcgcattaatgattgctgtctataccattgtgcatttatggaactactataatgcagcgccgtggacacgtgatggtcgagttcgtggtgacgttattcaggtctcttcagatgtagcaggacttgtaacggaagtattggttcaagataaccagactgtaaaaaaaggtcaggtgctttttaaaattgatgtctctcgccgagctttagatgtagagcaagcaaaatctgatttggcaaaagcaaaagcggcctatgctcaagcacaagcaggtctagcccaagctaaagcaaacttgattaagtcgagtactaacattaagttagccgagaaaaacgcaaaccgttattcaaacttaatggatggtgcaatttctaagcaggaacaagatcaggtctttgcaactcgcgatcaatcacacgcggaacacgagcaactccaagctgctattcaacaagctgaagccactattaaacagcaacaggcactggttgaagcagcaacaagtaatttacatttagcagaactcaatatgcaccgtgcggctgttgtggcgccagcagatggaacattatctaactttgatttgcgtccgggtaattatgttcaagttggacaagcggttgcagcattgctagatcgtaagcagctttatgttgtgggatattttgaagaaacaaaattagaccgtattcatattggcgatgaagcaactgtgcaattaatgggtgatagacagaaaattaaaggccatgtgcagggtattgcatcgggtattgaagatcgtgagcgttcaagtagttcgaaactgcttgcaaatgtaaacccgacatttagctgggttcgtttagcgcagcgtgtacctgtaaaaattgtgttagacgaagcaccaaaaaatgagttggcttttgtgtctggccgtactgctacagtacatattattgaaaaataa

SEQ ID NO: 43302 - DNA, 441 bp, Acinetobacter baumannii
atgactgcaacacaatcaaaatcaattatggcttttgactttggcactcaaaagatgggaatggcgattggtcagtctgcaattgaaagtgctaacccattaccactttttgtgatgaaagatggtattcccaactgggaccaacttttaaaaattgtgaaagagtggcagcctgatttatttattgttggtcttccattgaatatggatgatagcgagtcagaactttcaacacgggcacgtaagtttgcacgtcgcttacgccatcaaaccaatattgaaacgtggatggtcgatgaacggctcaccactcgtgaggcaagagaagaacttggtttttatcaagaacaaggtcgtgccaagaagttgtcagccgatagttttgccgcggctttgctaattcagagctggtatcgcaatcctgttggtttaacgccataa

SEQ ID NO: 43303 - DNA, 555 bp, Acinetobacter baumannii
gtgaccaaacaatatatgactcaccgttgtctgattgccccgccagaaatggcagatgacttttttgcaaatacagtaatttatcttgcccgtcatgacgaagaaggtgcccaaggtattattatcaatcgccctgccggtatccaaattaaagagttactcaatgatttagacattgatgcagacaatgtaaatccgcatgaggttttacaaggtggtcctttacgccctgaggcaggctttgttcttcatacaggccaaccaacatggcactcttctattgctgtgggtgagaatgtctgtatcaccaccagtaaagatattctcgatgcgattgcgcataacgaaggtgttggccgctaccaaatcgcccttggttatgcgagttggggtaaaaaccagctagaagatgaaatcgctcgtggtgactggcttatctgtgatgccgacatggatctgatttttaacttgccgtacgatgatcgttgggacgcagcctataaaaaaattggtgtagatcgtacatggctggcttctgaaatcggacacgcttaa

SEQ ID NO: 43304 - DNA, 1668 bp, Acinetobacter baumannii
atgctcacacatttaactttaatcaattttgcattagctgatcatttagctattgatatagaacaaggatttaatgttctaacaggtgagacaggtgcaggaaaatcattattactggatgcactatctgcctgcttaggggaacgtacagatacaaattatgtccgctatggttcggacaaagcggatgtaaccgcagtttttacttatcaggacaatagccctgaagcaaaatggttaaaagaacatgaactagatgatgattcaggggaaattcatttacgtcgggttatttttgcaactggccgtagcaaagcatgggtaaatggtcgtccaagtagtctctctgagcttaaagaattaggccgcttattggttcagttgtatagccagcacagccaacaacaactacttgaaccgccttatccaaagcattggctagaccgttatagtaatttttacgccgaagcaaatgatgttcgtgaagcatatagtacatggcagcgtaatatccgccagcatcaggctgcgctcgacgctcaggcaacccgtcttcaacgtattgcgaccttagagttacaaattgaagagcttgaggaagtcattcaaaccgattacaaagaaatcgagcaagagttcgatcgcctcagtcatcatgaacatatcatgcaagactgtagctatagtttaaatgcgcttgatgaagctgaacaaaacattactcaagaaatgtcgtcgatcattcgccgtctagagtctcatgcggggcgtagtgggcagctttccgaaatttataattcgttattaaatgcgcaaagtgaaattgatgatgccacatcaaatttacgtcaatttattgaccgtcagagtttcgatcctgaacggatggaagaactgaactccaagctagaggttttccatcgacttgctcgtaaataccgtactcaaccagaaatacttaaagaagagtacgaaacttggcaaagtgagcttgagcaattacatcagttagaagaccctgaaactctggctgaacaagtagaaaagtcacatcaagaatttttagaaaaagcccagcatttagacaatattcgtcgtgaagctgctgctccacttgcaaaacaattaactgaacaggttaaacctttagcgctgcctgaggcacactttgagtttaagtttgaaccattagagcaaccaaatgcagaaggtttaagttttattcaacttttatttactgccaataaaggcatacctcctcaaccattggcacgtgtagcatctggtggtgagctttctcgtattgcactcgttatgcaagtcatgaatgctgaaaagaccgaagcagaagttttggtatttgacgagattgatgtcggaattagtggtggtacagctgaagtggttggacgtttattggccgacttggctcagcatgtccaacttttatgtattacccaccaagcacaggtggctgcacaatccgatcaacatttgttagtcaaaaaacaacaaactgatccggcaagtagtactattgtacaacttgatgaaaatcaaattatttccgagttagcgcgcatgtcaggaggtgttgaaattaatgaaacaaccttgcagcatgctaaacaattacgtcaacttaaatttcaggcttcttcaacttaa

SEQ ID NO: 43305 - DNA, 1311 bp, Acinetobacter baumannii
atgaaaaaaacattaagcttaccgaaagcaccaatagggatgatcaaccgccataaaaaaactaatcctgctgaaatgaataaaattttaaatcagcattttaatgcatttaaacaggctgctgcacaaggtgattatgtcaaagcatatcaacatgtaaaaaaagcagtaagtctggttcccagacatcccggagcattgtctgatttagcttatactgagctacggttacgccgttatgacgatgcatatcaacattatatgcaagccattaaagcaagtggttctaacgttaatacaaatttatacgatggattgaccgaagtttgtcatcatttaaataaaaaagaagagaagattaaatttgggcgtttagccatttcaaccaaaaaagaacttacaaagaatgagcctactttaaatatacccactcataaacccgtgccctttagcccaaatccacaagaaaatattattgctttttctctatttggagcaaatccgcggtactgtgaaacttccattttaaatactaagttagctcaagaaatctatcctgaatggacgtgtcgattctatgtggatgagagcgttcccgaacttgtacaacagcggttacaagcaaatggtgcacaagtcgtacatgtcagccccactcaaaaacagttatcaggtttattttggcgctttttagttatggatgatccggtggttaaacggtttttagtacgtgatgccgactctatcgtgtcttatcgtgaaaaagccgctgttgatgcttggcttaagagtgatcaatggttccatttaatgagagatagctattctcatactgaattaattttggcgggtatgtggggcggttgtacaggtatttttcataatattgaagcacatatcagggattatgttgccactggaaggtatccggacaatcgagtcatagatcaacattacctgcgttattgtatttggccgactttaaaacaaagtgtgcttgtacatgatagccagcaatttgatgaaaatagtgccgattttccggtttatgatctaacttcaatgcaaaatgaccaagacaattttcatgtagggatggataatggttcaccagtcgttacaactgcggttaatcatccaacggcagaaaaagtttactggattttattcgatgaaaatcacgatgaagtttgcagatatgatgcaattgtgtcgaagagtcgaaatattgaagtgaatttaccccacgcttttgctaaaaaaattcagttacagcagtggaaattacaagtctatccgtatgaaaactga

SEQ ID NO: 43306 - DNA, 327 bp, Acinetobacter baumannii
atgagttcaacccaatttgatcatgtaacggtcatcaaaaaatcaaatgtttattttggtggagcatgtatcagccataccgtgcaatttgaagatggaacgaaaaaaacattaggtgttattttgccgactgaacagcctttaacatttgaaacccatgttcctgagcgtatggaaattatttcaggtgaatgtcgcgttaaaattgcagacagcaatgaaagtgaattgttccgcgctgggcaatctttttatgtaccaggcaatagtgttttcaaaatcgagactgatgaagtgcttgattatgtttgccacttagaaggctaa

SEQ ID NO: 43307 - DNA, 750 bp, Acinetobacter baumannii
atggcaaaaccggaatattattatggcgttcactcagtggagtcattgttagaacttgagccggagcgcgtgctgaccctgtttacattgaaagggcgcgacgatcagcgtttgcagaagattctgcaattggccgagccttttgggattagtgtacaaaaagcaagccgtgatagcctcgaaaagcttgcgggtttgccatttcaccaaggcgtagttgcagcagtacgtccgcacccgactttaaatgaaaaagatctagaccagctcttggctgaaactccagatgccttattgctggcattagatcaggtgacagatccacataacttaggggcatgtattcgtactgccgctgcaatgggtgttcaggcagtgattgtgcctcgcgatcgctcagcaagcttaactccaactgctcgtaaagtcgcagcgggtggggccgaaaaagttaaatttattcaagtgactaatttggctcgtactttagcgcatcttaaagagacaactcatgtccgtgtgatcggtacgatgcttgatgaaaatgcattacctattcagaagtgtgatttctcgggtgctgttgtgattgtaatgggtgcagaagacacaggtttacgtccaattactcaagcacagtgtgaccaaaaagcctatattccaatgtcaggtaacttacaaagtttaaatgtaagtgtggcaacgggtatggcactttatgaagcttgtcgtcagcgttctgaggtataa

SEQ ID NO: 43308 - DNA, 915 bp, Acinetobacter baumannii
atgtctccccgtacgcaaggttatttttttgtattggtgaccatgtgtatttggggcgggtttacgctttttgcccgcttaaatgcacaatggcacatcagtgcttgggatattgccgcactacgctttgctatagccttcctaattttgatgcctatcttaatttataaaaaagatctcgcttttttatggagtaagcatgcggttattttggcattgattggtggagtcatttactgccttacggtttatacagcttttctttatgcaccagctgcccatgctgcaatatttttaaatggttgtattcctatctgtactgctatagctgcttatattttatttagacagccatttgataaacatacatgggtgagtctggcaattatgattactgccttggccctcatgagcgcattgatgttacaaagtagtacctctgcttttggaattggagatttacttctgtttatcagtgcgatttggtgggggatttttactgtactacttaaacagtggaagctctctgcttggcattctatggcaagcgtcgcaatctggtctgcgattatttatttgccgatttatctgttgttcttacctaagcacttcatggatgtagatcctttgcacttagctgtacaaagtattttccatggcgtgtttgtcgttattattgcgacattaacctatgttgctgctattcagcgtcttggcgcatttaaaacgggaagtattgtaactttggcaccgtttattgctgctattttagctgtacctttacttggtgaatcattaagcccgtcaattgtagtgggcttagtcggtatgggaataggcgctttacagccttggcgctggtttagacaagatagcctgacacaaaagattaagcagcaaaatacacaaaattag

SEQ ID NO: 43309 - DNA, 597 bp, Acinetobacter baumannii
atggcttttattctgggaatcacaggtggtataggcagtggtaaatcagctgcaacacaatggtttgagtcccaaggaatccaagtcgtcgatgccgatattgttgctcgcgaagtagttgaaaaagggcaacctgcccttcaaaaaattcaacaaacctttggagattgggtgcttcaacccgatggcagtctggaccgccgtgccttacgtgaatatatttttcaaaatccacaagcgcgtcatacactcgagcaaattacccatcccgcaatccgtcaatctattattcaacagctacaaaatcctaaaagtccatatgtgattttagtttcgccattattgtttgaaacaaatcaacatgaactagtcaatcacacgctactgattgatgcgagtgaacaaactcaaattcagcgtgcgagccagcgcgatggacaaaaccaagaacaaatccagaaaattattgctgcacaaatgccacgcgaacgaaaacgtgagcttgcaaatgacatcgtgtttaacgacggattactcgaacatttatatcagcaattagagcctttacatcaaagctatttgaagcgtgcaaactaa

SEQ ID NO: 43310 - DNA, 861 bp, Acinetobacter baumannii
atgcaagacatcattgcgtattttattcaaaacttaactgcactttatattgctgttgcactcgtgagtctatgtatcggtagctttcttaatgtagtgatttaccgcacgccaaaaatgatggagcaagattggcagcaagaatgccaaatgttactcaatcctgagcaaccgattattgatcatgagaagttaactttaagtaagcctgcttcatcgtgccctgcatgtcagcaaccgatccgttggtatcaaaatattcctgttataagctggcttatgttaagaggaaagtgtggccattgccagcacccgattagtattcgctatccagccatcgaactactcaccatgctatgttcattagtagtagtcatggtatttggcccaaccatacaaatgctttttggactcgtcctcacatgggtactgatagcccttacctttattgatttcgatacacaattattgcctgatcgctttaccctacctttagctgcgctcggcttaggtattaatacctttaatatttatacctcacccaactcagccatttggggttatctaattggttttctatgtctttggattgtctattacttatttaaagtgatcactggcaaagagggtatgggctacggcgactttaaattgcttgcagcattaggagcatggatggggccattgatgctgccgttaattgtgttattgtcatcgttacttggcgcaatcattggcatcattttattaaaattaagaaatgacaatcagccttttgcttttgggccatatattgccattgctggttgggttgcctttttatggggtgatcagattatgaaaatttatttgggaggttaa

SEQ ID NO: 43311 - DNA, 1227 bp, Acinetobacter baumannii
atggctgtcaaaaaggcacaaatgatgccgacttttgcttatgaaggggttgaccgtaagggcgtaaaaatcaagggagaacttccggctaaaaacatggctttagccaaagtaaccttacgcaaacaaggggtgactgttcgaactatacgtgaaaaacgtaaaaatattcttgaaggtttattcaagaagaaagtcaccacactcgatattacgatttttactcgacaactggcgaccatgatgaaagctggtgtaccactcgtacaaggctttgaaattgtagctgaaggtttagaaaacccggccatgcgtgaggttgtactcggtattaaaggtgaagtcgaaggtggtagtacttttgcctcagctttaagaaaatatcctcaacattttgataacttgttttgttcacttgttgagtctggtgaacaatcaggcgcactcgaaacgatgctggaccgcgttgcaatttacaaagaaaaaagtgaattgctcaagcaaaaaatcaagaaagcaatgaaatacccggcaacagttattgtagtagccattgtggtgaccattattttgatggttaaagtagttcccgttttccaagatttatttgcgtcttttggagcagatttacctgcatttacgcaaatggttgtgaatatgtcgaaatggatgcaggaatactggttcattatgattattgcgattggcgcagtcattgctgcctttctggaagcaaaaaaacgcagtaaaaagtttcgtgatggcttagataaactggcgcttaagttacctatttttggggacttggtttataaagccattattgcccgttatagccgcacgcttgctacaacatttgccgcaggtgttccgcttattgatgcattagaatcgactgctggcgcaaccaataacgtgatttatgaaaaagctgtgatgaaaatccgggaagatgtcgcaacaggtcaacagcttcagtttgctatgcgggtctctaatcgttttccatcgatggctatacaaatggttgcaattggtgaagaatcgggtgcactagacagcatgctcgataaagttgccacttattatgaaaatgaagtggataatgccgttgatggtttaacttctatgatggaacctttaattatggcaattttaggggtgctcgtaggcggtctggtcattgctatgtatcttccaattttccaaatgggctcagttgtataa

SEQ ID NO: 43312 - DNA, 1713 bp, Acinetobacter baumannii
atgtcagcattacatacatctccaaaatttacggggttttttcgacgtttagtcgaagaaaagcatgtgtcggcagcgaccatgcaaactgcattagatgcagcgaaaagagcaaagcaggacacagtcgcatatttaattgaagaggttcacctctccccttcgttattggctgaaacaatttctgctgagtttgctgaaccatatttcgatctggatgtttatgacacttctcagattcctaaagatctggtcgatcagaaactgattttaaaacatcgaattttgccgctcattcaaagagggcaaattttatatgttgcgaccagtaatccaagcaatatcgaagcgattgatgcaattcgttttaatagtaaattgctggttgagcctgtaattgtggagcaccataaactcgaaaaagttttaggccagcattttgcagaagaaagcagctttgacttcaatgatgaagagcttgatctcgatgttaatcttgatggtcctaccgctcaagaagatgaagaagaagctcctcaaggcgatgaagccccgattgttaaatatattaataagttattaattgatgccattcgtatgggtgcttcagacttacattttgaaccgtacgaaaaatcctatcgggtgcgctatcgtgtcgatggtgtgttacgtcaaattgccaatccccctttacagcttgcaaaccgcttggcatcacgcttaaaagtaatgtctcaaatggacatttctgaaaaacgcgtcccacaagatggtcgtatcaagctcaagctctcaaaaaccaaagcgattgattttcgtgtgaactccctcccgactttgtttggtgaaaagttagttctacgtattcttgacccatcaagcgcaatgctaggaattgatgcactaggatatgaagaagatcaaaaagctttgttcatggaggcattagataaacctcaaggcatgcttttaattaccggaccaacaggttctggtaaaaccgtatcgttatatacaggtttaaatattttaaatactgaaagctccaatatttccactgccgaagacccagtagaaattaaccttgaaggaattaatcaagttaacgtaaaccccaaggtagggcttacttttgcggccgcacttaaatcatttttacgacaagaccctgacattattatggtgggtgagattcgtgacttggaaacagcagaaattgcgattaaggcggctcaaaccggccacatggtgatgtcaacactacatactaatagtgctccggaaacattgacccgtctacgtaatatgggggttccttcttttaatattgcaacatcagtaaacctagttattgcacagcgtttagcacgtcgtctttgttctcaatgcaaaatacctgctgatattcctaaacaaagcttattagaaatgggctttaccgaacaagatttagcgcacccagattttcgggtttttcaacccgtaggttgccctgaatgtcgtgaaggctataaaggccgtgtcggtatttatgaggtaatgaaagttacacctgaaatttccaagattattatggaagatggcaacgctttagaaatcgcagctgcttctgaaaaattggggtttaataatctacgtcgttcaggtttaaaaaaggtgatgcaaggggtgacctctttacaagaagtcaaccgtgtcaccagtgaataa

SEQ ID NO: 43313 - DNA, 795 bp, Acinetobacter baumannii
atgtcgggttcgacgattacgccttgggtagttggtaactggaaaatgaatccaatgcgtgccaacgccaaccaacttatagaagaatttaaacaattattgcaacaaaaccaaattgcagatgaaaactgccatgtgggcgttgcccctgtttctattgcccttacaacggtacaagcgcaattacaggatgctgcaagaacggtatatacggttgcacaggatgtatcacgtgttgctggtacaggtgcttatactggcgaagtcagtgcagaactattaaaagatagccaaattaatttcgtactggtcggacactctgaacgtcgtgatatttttggtgacaacgttgaaattttgaaggcaaaactccaaaatgcattaaatgcgggtatgactgtcatttattgtgtgggcgaaagccttgaacaacgtgagcaaggtcaggccgagcaagttgttctacagcaaatttgcgatattgcacctgtagtgactgctgaacaatggcaaaaccaaatggttattgcctatgaacctatttgggcaattggtacaggtaaaacagcttctccgcaagatgcgcaagcgatgcacgctaaaattcgtgaaggcttatgccaacttacaccggcaggctcaaatattgctattttatatggcggtagtgtaaaagctgaaaatgctgttgagttagctgcatgtccagatatcaatggtgcgttggtgggtggtgcttcattaaatgcagcatctttttatcaaattgtacaagccttcgcgcaaagcaaataa

SEQ ID NO: 43314 - DNA, 330 bp, Acinetobacter baumannii
atgcactcttttgtacttgttgtacatattattttagcagtactaatgattgcattaattttagtgcaacatggtaaaggcgcagatgcaggtgcctcttttggtggaggtggcgcagcaacagtatttggtgcgtctggttcaggtaacttcttgactcgcgtgactgcaattttgacagctttattctttgtgaccagtttgactctggctgtttttgccaagaagcaaacgactgaagcatatagtttgaaaactgtacaaacgactgcgccagcgcagactacatcgcctgaaacttcaccaaatgcaccaaaaactggccaataa

SEQ ID NO: 43315 - DNA, 1962 bp, Acinetobacter baumannii
atgactacccagttaactacaagtaatctgcaaggtagttcaacggggcctgaagtgactggtgttaacccaccagccaacttccctgatgagtccaccattgctcgacttgctaatgagtttttttcagcagtgccaagctcaagcagttcgacttcttcatcgggccttaacttggacttacctgttggagcgccacctcacccaccgcaaccgggtgaaccattttctgcactcagtggtcgtgcgcccaatatcgcctttcagaaaagtctcaatccggaatatcctgagcatattccaaatttgccagactaccctgaacgccgaattgtagcgtctgcacctgtggttggtggagctaatttgccacggccaccatttgaaccacatttgccacaagctgctcatagtgaaccaaatgtgccacgcattgaacccagcttacccactggtgcaggtgaatcaccttattattttttaaatgatttttctgcccccaatgcaacagaaccatctgttaaaggtgttgaagataattattcggttgcacagtcatttcaattaccacatggtgatcagctaaagtccttactgacggaagatcgttttgcaacgaacacgcccccccaaagttcagcaagctctgcattttactttttagacttgcctcaaagtggacaaagttatagtcactatcaaccatcacaaccaacctttgtggcaagcagtgcgcaaccactcgatgtgcatgccatccgtcgcgattttccaattttgcaagaacgcgtcaatggccgtccattagtctggtttgataacgccgcaactacacaaaaaccgcaacgtgtgattgatcggattgcttatttttatcagcatgaaaactcaaatattcaccgtgctgcacatgagttagcagctcgtgcaaccgatgcctatgaacatgcgcgaaatgtggttgctcgatttattggtgcaccctcttctaaagaaattatctttgttcgaggaacaaccgaaggcattaacctgattgcaaaaacatggggtgagcaaaatattggtgaaggtgatgaaattattgtttctcacttagaacaccatgccaatattgtgccttggtatcaactcactaaaaaaactggagcaaaattacgagtcattcctgttgatgacacaggccagattattttagaagagttaccaaaactgattaatgaacgcactaaactgctgtcaattactcaagtttcgaatgctttgggtacagtcacacctgttgctgaagtcattaaaattgcccatgccaaaggtgtacgcgttttagttgacggtgctcaatctgtttcgcacatccctaccaatgtacaagctctcgatgcagacttttttgtgttctctggacataaagtgtttgggccgacgggcattggtgcggtctatgcaaaaccagaactacttgaaagcatgcctgtctgggaaggcggcggtaacatgattcaggatgtgaccttcgaacaggtagtttaccaacctgcaccaaacaagtttgaagctggaactggaaacattgccgatgctgttggtttaggtgctgcacttgaatatgtcgaaagtctaggaattcataacattgctcgctatgaacatgatctactcgaatatggtcaaaatgcactgagcagtgtgtcaggtttacgcctgatcggaacggcacatcacaaagccagtgtgatgtcctttactttacaaggctattcaactgaacaagtcggtaaagctttaaatcaacatggcattgcagtacgttctggccaccactgtgcacagccaattttacgtcgttttggtgtagaacagaccgtgcgtccgtctttggctttttataatacgactgaagaaattgatttattggtgtcggtgttacatcaactgacacgtaatagacgtagcaattaa

SEQ ID NO: 43316 - DNA, 933 bp, Acinetobacter baumannii
atggcgaaaaatacagacaaagcccaacttgcacttggggaccatgcggcccgtcaactggccaatgcaaccaagacagctccccagctttctacaattactccccgctggctgactcacttacttcaatggattcctgttgaagcaggtatttatcgcctaaaccgtgtcaataataccgatgatattcaggtagcttgcacacaacgtgatgaagcaactttacctcaaactttcgtcgattatgatccagaaccacgtgaatactttttaaatggtgtatctactgttttagatgtacatacacgtgttgctgacctttacagcagcccacacgaccaaattaaagaacagctccgtttaaccattgaaaccattaaagaacgtcaagaaagtgagctgatcaataaccctgaatacggtttactagcaagtgtgacagatgaccaacgtatttcgaccttaaatggcccacccactcctgatgatcttgatgatttgctacgtaaagtctggaaagaaccgggatttttcctagcacaccctgatgcgattgcagcatttggccgtgaatgtacacgccgtggtgtaccgcctccaacagttagtctgtttggttcgcagttcattacatggcgcggaattccacttattccatcaaataaaattcctgtagaagatggcaaaactaaaatcttgctgcttcgtgttggtgaaaagcgtcaagggattgttggtttgttccaaccgggtcttgcgggtgaacagtcaccggggctttcagtacgttttatgggaatcaaccgtaacgcgattgcctcatatctaatctcattatattgctcacttgcagtattaacagacgatgctttggcagtgttagatgatgtggaggtggacaaatatcatgactacccagttaactacaagtaa

SEQ ID NO: 43317 - DNA, 924 bp, Acinetobacter baumannii
gtgactcaatggaacattaatgcggttgtacaaggtttacaacaagcaaggcatgactggcgtcagcaacagcacaggacaaaagaatttgggggccgcgaacttccatctaaagaagctttaaaggccattttagatgacctgtgcggcattttatttccaatgcgtttaggccctgccgacttacgtcaggaaactgaagattcttatattgcctatactttaaatcgggtgctaacagccttacatgctcaagtacaactggctttgaattatgaagcaaaacgtcatttgggtcattcaagcccagtgcagcagccacaagaacttgctcaaactattgtgcaggattttgccaacactttgccctctatacggcgccttttagacggcgatgtgcgggcggcttatgaaggtgatccagcagcacatagtgtagatgaagtattactctgctatccgggcatatttgcgattatttatcacagaattgcccatcagctctatgctcaagtgcctttattgtcacgcattatttcggagttggctcactctgcaacaggtattgatattcatccgggtgcgcaaatcggcaaaggatttttcattgatcatggtacgggtgtggtgattggcgagacttgtgtgattggggaacgcgttcgtatttatcaggccgtgacccttggagcaaaacgctttgaaaccaatgatgatggtggtttgaaaaaagattatatacgccatccaattgttgaagatgatgtcgtgatttatgcaggtgccactattttaggccgtattaccattggtcgagggtcaattattggggggaatgtttggctaacccatagtgttgctgcaggtagccagattttacagtcaccgaatgagtcttatcaaaaaaatcatattgccggttaa

SEQ ID NO: 43318 - DNA, 510 bp, Acinetobacter baumannii
atgaacgctaaattaaatactgaaactccgcaaagttttatctcaaatggttcaaatacatcctttttagccgaagatattcttgctaaagcacagcaatatgcacaagaacacgaactaaattttagtggcagtttatcacctgttgatgcatggcagcttgtacaacaaggagaagctgttttagttgatgtgcgtaccaatgaagaacgtaaatttgtgggttatgtccctgaaagtatccatgttgcatgggcaacaggcacatcatttaaccgtaatccacgctttttaaaagaacttgaatcaaaagttggtaaagacaaaaccattcttttgttatgccgtagtggcaaccgttcagcacaagctgccgaaaccgcatttaatgcaggttttgaacacatttataacgttcttgaaggctttgaaggtgatctaaatgaacagcaacagcgtaatcagaaaaatggctggcgcatccaccaacttccttggcaacaagactaa

SEQ ID NO: 43319 - DNA, 738 bp, Acinetobacter baumannii
atgaatatttcaagaaaaacagctctggttactggtgcatcacgtggtattggccgtgctattgcagaacgtttagctcaagatggtttttatgtgattgttaactatgctggtaataaagtgcatgctcaagccattgtagagcacattattgagcaaggtggtcaagcctcagctattcaagcggacgttgcaaatgaacatgaggtgagccgtttgtttcaagaagctaaagcgattaacgggcaattagacgttgtggttcatagtgctggtattatgcctatggcaaaaattacacctgaaagcctgccagatttcgataaagtgattcataccaatttacgtggcgcgtttttaatattggcgcatgcggccgaaacggtgccagatggtggtcgaattattacgctttcaaccagtgtaattgccaaatcttttccggcatatggcccctatattgcttcaaaagcaggtgttgaaggtttggtacatgtgttagcaaatgagttacgtgggcgaaatatcactgtaaatgctgttgcgcctggcccgacaggcactgaccttttttacaatggaaaaactgaagagcaagtggcagctattgcaaaacttgctccattggaacgaatcgggacacctgacgaaattgctggcgtagttgccatgctggctggtccagatgggcgctgggtaaactctcaagtcattcgtgtaaatggtggatttgcttaa

SEQ ID NO: 43320 - DNA, 921 bp, Acinetobacter baumannii
atggataaatttgataccttgcagctttttacccgcatcgtagagctgggtagttttagtcaggcagccgatcagctaaatatcccacgtgctacagcaagtaatgccattaaagagttagagaataatttacagtgtcgtttgttagagcggacgactcggcatgtaagaccatcactagatggacaagcattttatgagcgctgcacacaaatattatcggaacttgatgatgccgaatcatctttacgcaatgtaattgctcagccccgtggtttattacgtgtcgatttatcaggcgcacatgcaactaaaattgttttacccaatatcgaccaatttcacgagttgtatcccgacattgaactggtaatcagtacaggtgatcgcttggttgatctgattagggaaggcatagactgtgtggtgagagcggggcgtttggatgattccactttaattgccagacatttggtggatatgccacaggtcatttgtgcaagtcctgactatttaaataaacatggaacgccagagcaaccagaagatttgttatcacattattgtgtcaatttcttttcgacatcaggcgggcggaattatccatttgaattgatggtgaatggcaaaaaacaagattattttttgaaaagctggatcgcggtaaatgacgctgaaaactatgtattatctgccttacaaggggctggcttaattcaagtaccgcactaccatgtggcaaatgaattaaaaaatgggcgactggttgaggttttatctgaatgggaaagcccgaagatgtcagtttctgctttatatccgcagcatcggcagctctcgccacgcgtacgagtttttgtcgcttggctgagtgagttatacacgggctattttgccaactttgaatacccgcaaaaatga

SEQ ID NO: 43321 - DNA, 861 bp, Acinetobacter baumannii
atgagcgattcaaactatattcctccacaagtttggcaatggactggagagaaaaccgatttaaaccaacctacctcaggtgcgcgttatgagcatacacttccagtagggaaacatccgctccagctctattctttagcaacgcctaatggtcaaaaagtcactattttgctagaagagcttttaacgttaggacataaagatgctgaatatgatgcttggctgattaaaattggtgaaggacagcaatttggtagtggctttgtagaaattaatcccaactctaaaattccagcattggttgatcatagccaaaacccgccattaagaatatttgaatctggctcaattttgctttacctagctgaaaagtttaaagcgtttattccgactgatattgctgcacgtactgaatgcctcaattggttattctggcaaatgggcagtgcaccttacttaggtggtggttttggacatttttatgcttatgcccctgttaaaattgaatatgcaattaaccgctttgcaatggaaacaaaacgcttacttgatgtattagaccagcatctggcaaaaaacgaatatttggctggttctgaatatagcattgctgatattgcagcgttcccttggtatggcggtcttgttaaaaactgggtgtataacggcgcggagtttttaggtgtcgatcaatataaaaatgttcaacgttgggcagatgcgattttagcgcgccctgcggtacaacgtggccgtatggtcaatcgtacttttggtgatttagctacgcagttgcatgaacgccatgatgcgagtgattttgagaccaagactcaagataaattgcagaatcagtcttaa

SEQ ID NO: 43322 - DNA, 627 bp, Acinetobacter baumannii
atgaataacgagcattttaagctgtatacagattcacaatttctaagtccctatgcatttacagtttttgtaggactacacgaaaaacaaattccatttgaaatagcaaccatcgacttaggtcagcaaggccagtttgaaacatcttttgtagaaaagtcattaactgccaaagtgcctgtacttgagcataacgattttgccttatcagaatcttctgccattttggaatatttagaagaactttatccagacacagctatttatccaaaagatattcaagctcgcgcaagagcaagacaaatacaggcattgctcagatcggacttagtggcactaagaactgagcgtccaaccgatgttatttttattcagcccacctccactccactttccgaacaaggccaaaaagcagccgagaaacttttctttgttgcagaaaaacttcttgcatctgatgccgaatttctttttggttcatggagcattgtagatgctgaacttgccctgatgttgcaacgccttattcaaaatggtgatgctgtaccacagcgtttaaaaacctatgcattacagcaatggcaacgtccgaccgtacaaaaatggcttgccttgcgacataaataa

SEQ ID NO: 43323 - DNA, 906 bp, Acinetobacter baumannii
atgctttctctaaaatcattacagtgctttgttactctggttaaaactaaaagttttacccgtactgctgaagagttatatctgactcagcccaccattagtaaaatattacaacaactcgaagagcagcttcaggtacagcttttggttaaacccgatcatggacgaaaaagacaaattgaattaactgaaattggagagcgtatttatcaacatgcggtcgaacttcttcaggcagagcaaaacatctttcttgaaatagaaaactatcaacaattaaaaacaggtactttaaaacttggcgttccacctttaggttcccagctcctaacgactgccctatttgactttcatcgtcaatggccagatattgaattagcttttatggaagtgggttcacgcggtattgaacaggctttactcaataacgagctagacgttggtgttttattgcagccttttgatgagcaaacttttaatagcatcgaattatgtaactaccctttaatggtacttttacgccgtgatgccacttgggcaacccgcaaaaaaataaatctagaagagctacaacaccaatcatttttaatgtttcctgaaaatttctctttgaacagtattattctcgatgcttgtaagcagtatggtttttacccaaccattgcttgccgtaccagccaatggcatctcttggcagacatggtgttacaacgtatgggaattgcgcttctccctcaatattataccgacatgcttgacccgactttatttgcagcagtgccactcgaaaaaccaaatattcagtggcacttagtcatggcttggaaaaagaatcttcctgcctcaccagcggtacaagcttggcttagcattgttcgtcaacattttcagcacattaaaccctaa

SEQ ID NO: 43324 - DNA, 432 bp, Acinetobacter baumannii
atgagtactgaatctgcttctggaacaccctcacaaccatcactgttcgtgttagttaaacaaattctcattttggctggtttttggtgggtcggatatctcttacaccaaaaactcggtgtgcctgtctcggcaggtattttaggtatgtttttattgcttttatgcctgttctttaaaattatcaaaatggatcaggtagcaatgggagcaactgtggttttaggtgagctattactgttttttgtgcctgtagtcgttgccgttgtccagtataaaaccctgtttatgaccgaaggatggcaaatcgtcttaagcattggggttggaaccattttagtcatgttaagcacttcactgactattcattattacaatcgtttgaaggcttacttacaggctagaaaacgtcttcaacataagcatatctaa

SEQ ID NO: 43325 - DNA, 690 bp, Acinetobacter baumannii
atgaatatctggtcaattctttgtctcatctggactttggccgcctatgttgtggcaaagcgaatctatcaaaaacatccaaaactttggttatcacccgcaattagtgtgcctgtacttaccatcattttgatgacgatttttggaatttcataccaaacttattcagaagatacccagtggattgttaatttattaggtcctgcaacggtagctttcgctataccgatttatcgttatcgggaaacgattcgtaaaaacctcggagttcttacgattgcgattattgtgggcatgagtgtaggcgtgatgactgcttataaaatggcgcagtggttccactttagtcctgaagtcactaacagtttgatggcacgttctatttcaacaccttttgccatgattttagctgaagatattcatggttcggcagcattggtttccctatttaccgttattaccggtttggtcggtatgatttgtggcgatgcaattttggcaattactaaaatccgttctaatgtggcaaatggtgccgccttgggtaacgcagcgcatggttttggtacagtcagagcacagcaaagaaatagtgaagaaggggtgattgccagtttaactatggttattgctggtattttaatggtgctgattggaccatttgcgattcatctatggttgatgttgtaa

SEQ ID NO: 43326 - DNA, 1491 bp, Acinetobacter baumannii
atggcaagaatggcaaaagttgtagaacttccgtctattgcaaagattgacaaaagccaaggaaagattagtgctcaactgactcaagctttacgtgaagctgtacaaagtggtgatttacaacccggcgatccgttgccttcttctcgtgaactggctttaaccctaggtgtcgctcgcggaaccattattgaagcttatgatcagcttttagctgaaggtgtgtttgactctcaaccacgaactggcacttatgtgtctcatgctttggttaaaacatctgtaatacaacattcatcaaaagaaaataaacctaactcgatatcgttgaccaaatcggcacgttcttatgccaaagtgcttgatgaatttaagccacttccccatgttccttttgcagtatctgtccccgtcggtcgtactcaaccaagtgatatttggcgtaaatttggtaataaatatagatcacggggagcaggtgttccttcaggatatggtgaacctcaaggtgtattatcactaagaattgctatagcagactatatacgacggtcacgttctgtccactgcgaacctgaacaaattgtgattacacccggtattcaacagtcactttatatttgtagccagattttatttgaggcgaaagatgaagtttgggttgaagatccagcttatcgcggtacaacagccatttttgaacatgctgtacaaaacattcggatggtgcgtgttcctgtcgatgaagaaggtattcaagttgaaaccggaattaagctttctaaacatgcacgtgctgcttttgtgacaccgtctcaccaatatccacttggtatgccaatgagtctagcaagacgtacagctttattagcttgggcaaaacagcaaaaagcatggatcattgaagatgactacgacagtgaacttcgctataacgggcagcccttcccatctttacaaggcatggcacctgaccaagtcatttatcttggcactttcagcaaagtcttatttccatcgcttaggcttggctatgcagtgttgcctaaagaactggtagctcctttttgtgggcttagagtcttaattgatcgacacccgcctgctgccgaccaacacgttttggctgcttttattcaagagggttatttagagcgacatattcgacgtactcgaaatgtctatgcagaagttcgagaatacattattggcttgattgaaaaatacatacctcaagagcttgcttggttacaaccgggcgatcaaggcatgcacatggtgttatggcttgctcaacatattaatgatattgaagttgcaagctcggcagtcgatgcaggtattgccattaaagcaatttcaccgacattttcaaaagagcggcgacgttcgggtttaattgtcggcttaggcgattttgaacccgaactgatgcaacaagctatcaaaaaattatcaaagattattcaacagcacgccaaatcaatgtag

SEQ ID NO: 43327 - DNA, 636 bp, Acinetobacter baumannii
atgtatatccctgatgattttgcagaaaaccgtttggatgtattgcattctcttattgcagaacatccatttggggtgctttttacgcatggaagtaatggcttagatgcaaatcatcttccattcgagttacaagcaaatgaagggaaatttggcatgctacatgcccatgtgtcacgaaataattctgtttggcaggacattaaaaatggagatgaggtacttgtcgtgttccaagctggcgatgcgtatatttcaccaaactggtacccatccaaacatgaacagcacagacaagtaccgacgtggaactatagggttgtgcatgcttatggcaaagtgacgattcgagatgacgaacgctatgttcgtggtgtagtggctcgcttaacccgcacccatgaagtttctcaacctgaaccatggaaaatgtcagatgcaccaaaggattatcttgaaccgatgttaaaagccattgtaggtatcgagattgaaattaccaagctgcaaggaaaatcaaaactcgggcaaaacaaagaacgccgagacattttaggcgcagcagatggcctattgaaatctggtcatcaaactatagcgaatgccatgtacagtgtggctgagttaaataaataa

SEQ ID NO: 43328 - DNA, 594 bp, Acinetobacter baumannii
atgtctttgactacacctgttgaattagtgggtgagcacgttattttaaagccgctagatgtaactcaagctgaagcgctcaaagaggccgtttgcgatggggagctctataatctttggtatacccgtgtgccaagacctgaacagatgactgctgaaattgaaagacgtcttgatttgcaaaaatccggctctatgttgcctttttatattgaagaccgaaaaacgggacgagcgctgggcatgacaacactcatgcatattgaagaagcgcatcgccgtgtagaaattggttcgacatggtaccgaaagtctgcacagcgtacgcctgtaaatactgaatgtaaaaaactattgctagctcatgcatttgagactttaaactgtattgcggttgagttacgcacatcttcattaaatgttcaaagccaagccgcgattgtacgcttgggtgcaaagctcgatggtgtgctaagaagtcatcaaattgtgaaagatgatattttgcgggacactcatgtttacagtattttaaaacatgagtggcctgcggttcgccaaaatttggaatggttattgaataaaccgcgttaa

SEQ ID NO: 43329 - DNA, 1188 bp, Acinetobacter baumannii
atgcttcaaaatactatgcaccgccaagtattaattttggcgagttcccaatcccttttccaaaccgtttctgtcatggtcatgaccattggtggcttggctggggcaaatattgcaaataccccaacacttgcaacgctgcccatcgcatctatgtttttgggtacggctttaatgatgttccctgcctcaatattaatggcacatattggacggcgtaacggttttctattcggtgcttttttaggtgtgctcggcggcattatcgcatcaattggtattttttatagttcactcatgcttctggctctgggtacgctatgtgtcggggcctatcaatcctttgctcagttttaccgttttgctgccagtgaagtggcaaatgatgcgttccgctcacgcgctatttcttgggtgatggcaggtggaattgttgcagcactgattggtccgactttagcccgttttggtggacccttattccagcatttagaatatatcggttcatttttaattattagtatcatctcacttgtggcaatgggcattttatctagcttacatatagctgatacagttgagcaaaagtctgactttactgctggtcgtccatggcaacagattgtctttcaacccacctatttagttgctttatttggcgcaataacaggttatggcatcatgattttaggtatgactgccacacccattgccatgcgacattcacaccatgaacttgggtcaattacgacagtcattcagctacatgtgcttggtatgtttctgccttcattctttactggaaacttaattactcgctttggtgtgcttaaaatcatgtttgcaggtcttttattatttgtctgctatatcggatttgctctctcaggtattcagttcacatcttttgctatttctttaattttattaggtgtgggatggaactttttatttattggcagtacttctttactcacaggaacttattctgtggctgaaaaagccaaggcccaagctattaacgatatgactgtttttgttgtcggtttgatttgttcgtttagtgcaggtgctttactggatttatttggctggaaagcaatgaatatggctttaataccatggttggtgattgccgcagcttctctcttttggctaagccaaaaaagagaaaaacagcttgcttaa

SEQ ID NO: 43330 - DNA, 675 bp, Acinetobacter baumannii
atgttgatccatgccgatttttcacaggctgtgattatcaaacctgaagactatcactgggtgaaatctccccgtggggaagttgatcgtgtcatgctcgatcgtattggcgatgaagtagcccgtgcaaccagtttggtgaaatatgcaccccatacaaccttccctgaacatcgacatcatcatggtgaagaaatcctcgtactttcaggcgtatttactgaaaatcaaaatcagcactaccctgctggatggtatttacggagtccccatcagtcgggacaccaaccatcgagtgaagaaggtacattgatttttgtcaaacttatgcaaattcctatgtcagaaactcaagctttacgaatcaataccaacgacccagcacaatggcaaaaaatagattcgcgtttaatttgcacattaattgatgcaagttatgaacacacttatttagaaaaactcaagccgcagcaactttttattgaagaagctgagggtggaatcgaaattttgattacccaaggtcagttggttgataaagaaatggtttttgacgctggaacatggatacgcctacctccaaaaacacttgcctattttcaagctggtttgtctggcgcttctctttatgtaaaaactggacacctagcctcagccattgcggaatataattaa

SEQ ID NO: 43331 - DNA, 915 bp, Acinetobacter baumannii
atgaattcaccagtttatttgaatgcacttcgtgcttttgaagccagcgcacgccacaaaagtttttctgctgccgcaaaagagttgaatgtgactccggccgcagtggggcaattggtacgcacacttgaagattggttaggttttcctttatttcatcggcaaactaacggtaaaaatcggctggtcgctactgaactggctgaatcggttttaccagatattcgggcgggttttgataagctcactttggctttggagaaattaaaacaagattctctatcaggtgtgcttaatattgcggtcagtccagcatttgccgaaaaatggctattaccaagaattgatcattttcaaaaacaatatccagatattgatattcgtttagacattaacttgaaaaccgtagattttttagaacaaaaagtcgatgtgggtgtcagatatggtcaaggacaatggcaaggtttagaagccgttaaacttatggatgaagaggtttatcccgtatgttcgcccgcatttttaaatgaacattcatttctcttaaccccaaatgatctgaaaaatatcactttaattcatgatctttctatggaaaaacatcaacaatttccggggtggcaatcttggctaaaaagtgtaggtttgaatgacatcaatattagccgtggtatgcaaatcaacagttcatctgcagttttacaggctgcaatggaaggacatggtgttgcattagcgcgtagtgttttggtgcaaaaagatatacaaaccggacgtttgatacgattatttcctcaaattaacttctcatcgcccttttcttattatttggtgtaccgaccacaatacgcaaatttacccaaagtcaaaatctgtctagattggttttttgaagaaattcatcgaatataa

SEQ ID NO: 43332 - DNA, 1680 bp, Acinetobacter baumannii
atggaaggatcagttcagaataaagaacgattatggacaaagcggcgtcatgccaaacaactaaaactagagatggcaaaccaatataccgatggtgtggtgattccaactcaagacattattaaagttttggaaaccttaattacaccgggtgacaaagttgtactcgaagggaataaccaaaagcaggctgattttttatcgcgctctttggctcaaaccaatccagatattttgcatgatttacatatgattatgccgagcgttgggcgttcagaacatcttgatctgtttgaaaaaggcattgcgcgtaaactcgatttttcttttgctggcccacaaagtttgcgtattagtcagttaattgaagatggtttactagagattggtgcgattcatacctatatcgaactatattcacgtttggtagtcgacctcattccaaatgtggtgctctcagcgggctttatggcagaccgtcaaggcaatatctatacaggcccaagtaccgaagactctccagcactcattgaacctgctgcttttagtgacggtatcgtgattgttcaggtcaatgaactggtcgatgacgtctcagagttaccccgtgtcgatattcctgcttcttgggtggattatgtggtggtggcggatcagccattttatatcgaaccgttatttactcgtgacccgaaacacattaagccagtgcatgtgcttatggcgatgatggcaattcgcggaatttatgaaaagcataatgtgcaatcattaaaccatggtattggttttaacactgcggcaattgaactgattttaccgacctatggtgaatctttaggtttaaaaggaaaaatctgccgaaactggacactaaatccgcatccgaccttaattccagcgattgaaacaggttgggttgaaagcgtgcattgttttggtaccgaactcggtatggaaaaatatgttgctgctcgtcccgatgttttctttacaggtcgtgatggcgctttacgttccaaccgcatgatgtgtcagctcgcaggtcagtacgccgttgatctatttattggcgcaactttgcaagttgatggtatgggccattcttcaactgtcaccaaaggtcgtttggctggtttcggtggtgcaccaaacatggggcatgatccacgcggacgtcgtcatgatacacctgcatggttagatatgcgtttgcaaggtgccaatgaaaccgaaacttatttggcacgtggtaaaaagttagttgtacaaatggtggaaaccttccaagagggtggtaagccaacttttgtggatcgtctcgatgcaattgatgtggccaaaaccgcaggcttgcctttagccccgatcatgatttatggcgatgatgtgacccatttactgaccgaagaaggcattgcttatctatataaagcaagcagccaagaagaacgtcaagccatgatagctgcggtggcaggtgtgaccagtattggtttaactcaagacccgaaaacaacagcacgtttaagacgtgaaggtctggtggtattccctgaagatttaggtattcgtcgcaccgatgccacacgtgaacttttagcggcgaaaaatattgccgacttggtgacatggtcagatggcttatatcaaccacctgcaaaattcaggagttggtaa

SEQ ID NO: 43333 - DNA, 885 bp, Acinetobacter baumannii
atgatggcacaagttcaatatcaaacgctcagcgatagtcagcttttggcagatatggcagtcgaagcgttaattgatgaagttaatctgacaccgaaaccagctttggtcgatcgccgtggtagtggtgcgcatgatgacctgactttggagttaatggagcgctctgcgaaaagtttagggcctatgtttgatgcgatggcgcaagctgcaaagcatcatggaaaagtctgtttagctttgcgtgaagacattggtgaaatcggtcgccaaggtgaaaacaccatgatgttggcaacagatggtgtaaatacacatcgcggtgcaatttgggcattagggttaatggttacggcagcaacattggcgcgcacgaatcaacaatatttatcggctgttgagctatgccagttagcaggccagattgctcagcttgaagatcgttttattccagagcaggccttgagtcatggtcagcaagtacaaaagaaattaggcatcttaggtgccaaagaacaggctcaacaaggttttccaactattgtgaattttggtttaaagcagctttaccaaagtcgtagtaaacctatgaaagaagagttcgctcgcttagatgccttacttgccatgatgactgatctaaccgatacctgtgtgctttatcgttctggaacaaatggcttaaagcgtatgcaacaaggtgctcagcaaatactggatttgggcggcagctcaagcttggaaggtcgacgtgctttgcatcttttagagattgatttgcttcggatgaaagcttccgctggtggtgccgcagatttattggcagccacattgtttatagatcgtgttgagcagtcatctgcgaaaaataaaaaggaattctga

SEQ ID NO: 43334 - DNA, 300 bp, Acinetobacter baumannii
atggaaacacttcattttgaatttgtggcgacagagccacctgtaaaaaaagcattggtaggatgtgttggttcaggtgatttagaaattttgatggaacccggcgaaataggaaaagcttctattcaagtggtgacttcggtagatggcagtgcggcgcgttggcacaatctttttgaacggatttttactgcgcaaataccgccagcggtcaatattgatattcatgactttggtgcaactcccggtgtcgttcgcttacgtctggaacaagcattggaggagattgctcatgactga

SEQ ID NO: 43335 - DNA, 852 bp, Acinetobacter baumannii
atgactgatattcagagtttgttaagtaaacaagattttattgagctgagtgcgagagagcgtgctaaagcattattagatgaagggacttttcgagagttattggacccatttgcccgtgttatgtcgccttggttggttcagcaaaatattgtgccgcaagccgatgatggtgtagtgattgcaaagggaactattcaagaacagccaatagttttaatttctattgaaggcttatttcaaggtggaagtttaggtgaggtaggtggtgccaaaattgcaggagccttagaacttgcggttgaagacaatctaaaaggcattccaacagctgcaattttattgttggaaacgggtggcgttcgtttacaagaagcaaatctgggcttggctgcaattgctgagattcaagctgcaattgtgaatttacgtcagtatcaacccgtgattgccgtggttgctggtagtgtagggtgttttggcggtatgtcaattgcagctggactatgtagctatattgtaatgacacaagaaggacgtttaggtctaaatggcccacaagtgatagaacaagaagctggtgtacaagaatataacgccaaagatcgtccatttatatggagtattactggcgggaaccaacggtttgctagtggtttggcagatgcttatgtagacgatgatcgccagaaaattcgtcagcgagtcatcgattatttaactcaaggcgtacctcatcagcatcgtagttcaaattacccattctatttagaaaagctacaacaagttgatactgctgagcagattaccccagcacaagttcaagctttgtatcaaggagagcaagcatga

SEQ ID NO: 43336 - DNA, 828 bp, Acinetobacter baumannii
atgaatatcgccgttgatacattaaaagcatctactcgtggtgcacattggtttaaagcactcacgcaggcctttaaaacagttgaaggttttccagcttcgatttgggtggctgatggtcagcttgaccagcaagcggtacgtgtgattgccgttgttcaagacagcaataatctgttccctcgggcaaaacaaggggaagttggattattagaaggctggagtttagcaaaagcagttaatgaagtgattcaagctgatattcattcggaaactaaacgcgctattttatgtttagttgatgttccaagtcaggcctatgggcgccgcgaagaattattaggtattcatcaagctttagcgggtgcagtagatagctatgctagagccagattggcaggtcatcctattgtgagtttattggttggtaagtcgatgtctggggctttcttggcgcatggataccaagccaatcgtattattgccttaaaagattcaggtgttatggtgcatgcgatgggtaaggaatctgctgcacgcgttaccttgcggtcggttgatgagttagagcaattggcatcaagcattccgccaatggcttatgacattgaaagttatgcaactctaggtttgttatctgaactgttatctgttgaaaaccctgaacaaccgacaaacgatgatcttttgttagcgaaacaggcaattgctcaagcgtttaaagaaattaatgctgagcaatcgagaggactggaacaaagactgcatggccaaaaccgtcaaatgtctaaaaaggtccgtgaattattgcgtgagcaatggttatga

SEQ ID NO: 43337 - DNA, 603 bp, Acinetobacter baumannii
atgaaacttaagctcgaagcccatgatttgttgtggggtatgacggtcgattgcttggctgatgatgctccgcattgggtgagagaggtattgcaacgtggtgatcctgttgtggttcgacgggcaattactcctgtagatcaggtggctgtgggtgtaagaggacaacttcgctatcaacgatatgcagctcaaatgccaagatctttaattagcagacagcttaagccagaagcgctgactcgcgtagatacgcaacagtttgagcacttggcagaacgtttacagagcatttccagcattatgaaaaacttttcagaatgttggggatatacaggaagtttcggctttgaactagcaacgggaattgaaacagtaaccgagcaaagtgacatagatttgttgattcgagctgaacagccttttgccaaaaagcaggcggttgagctactcgaaaattttcagcaagcagggctgaatgtggatatacagcttcaacttccacaaggcggtttggcattaaaagaatgggcaaggaatagcagaaaagttctattaaaacgtcctgatggtgctgttttattagaaaacacatggaattag

SEQ ID NO: 43338 - DNA, 939 bp, Acinetobacter baumannii
atggcttcaatttgggtatatccgggacaaggtgtgcaaagaagcaatatgttgcacgatttacctcaaaccgcactggttaaagaataccttgagcgtgcatcggatgcactcaaagaagatgtcttgatgttagatcgtccggcagcattaaagtcaacgcgtgcagtacagctgtgtttgcttatttcaggtgtggtgagttcagctctattaagggctgaaaacttaaaacctgattatgtagcaggtctatcaattggtgcatggtcggctgcagttgtagcagaagttttagcctatgaagatgctgttcgtttggttgcctatcgaggtgaactcatgcaaaacgcctatccaactggctatggtatgacggccctgattggtacagaccgtgcagctgttgaaacatgggtcaaacaaatttatgaaataacgccagaggtgtttgtcgcaaatattaatgcacataaccagattgttatttcaggaagctttgaagccatgactcaagttgctgttttggcaaagcaacaaggcgtggtggcaaaaaaattagatgtatcggtgccatcgcactgtgaattattaagtcagcaagcaaagcaacttgcagcgtctatggagggagtgactttaaagcagcctaaaatacgttatttaagtggtacaacggctcgtacgcttagcaggccagaacagattggtgatgacttggcttttaatatgagtcgaactgtagattgggaaagtaccatccaagctgcatgggagcgaggtgtgaggttacagatcgaagctttgccgggaacggtgcttactacacttgcacgtcgaacatttaaagaaggaactgtattgtcatttcagggaacacgtttagacagcattcagatggcaatgcaaaaagaacaggcaaatagtttttctttttga

SEQ ID NO: 43339 - DNA, 417 bp, Acinetobacter baumannii
atgattatatatggagttggtttactcgcactttgcaccttggttggtgtaattgctggtgatctattaggcgttttattgggtgtaaagtccaatgttggtggcgtgggtatcgccatgattttactcatttgtatacggttatggatggaaaaacgtggaatgatgacagttgaaactgaaaaaggagtttcattctggggcaccatgtatatcccggttgttgttgctatggcagcccaacaaaatgtagtggcagcattatcgagtggccatatggcactctttgcggctgtagtctcagttgcagtttgtacgctcactattgctggtctaagtcgatttaacaaagccagccctttacctaaagaagaggacacagccttaaaccgaatcggaggtaaagttcatggttga

SEQ ID NO: 43340 - DNA, 765 bp, Acinetobacter baumannii
atggttgaattattattaaaagacttaacacatttaggtttaattacagcttttgctttaattgccttaattatgtggctgtcgaccaagctctctaaatatttaaccaatggacgtgtgcatgcttcagcaattgcgattgtaattggtttgattttggcatggtttggcggaaaaatgacaggtggtgaaaaaggcttgactgaccttgcactttttacaggtgtaggactcatgggcggtgcaatgcttcgtgactttactattgtagccacagcatttgaagtacaagcgactgaggccaaaaaagctggatttattggtgccttctctttatttctcgggaccattttgccatttattgtcggttgtatgtttgcgtggatttttggctatcgcgatgcggtaagtattaccacaattggcgcaggtgcagtgacttacattgttgggccagttacgggtgcggccattggtgcgagttctgaggtcatggcgttatcaattgcaactggcttggtgaaagcaatctgtgtaatggtttcaacaccactcactgcgaaatttatgggattagacaatccacgttctgcgatgatttttggtggtttggcaggaatggtaagtggtgtgtcagctggtttagctgctacagaccgccgtttagtgccttacggtgcacttacagcaacttttcacacgggccttggctgtttaatgggtccaactattctgttctttgcagttaaagctttggtgggttaa

SEQ ID NO: 43341 - DNA, 918 bp, Acinetobacter baumannii
atggaaatagatgaagaactgactcttaaaaaaatacagatttttttggcctttatgcgctgtggcaacttgtctaaaaccgcggcagaaatgcaactgagtaatgtcagtgttcataaagcactacactctttagaaagcgctttacgttgtcctctttttaaaaatgaaggccgtaacctcattcctttaaaaagtgcttatgtatttgaagaacgggcgcaaaaaatcgtacaagacatttttatcaccgtaaataaaactagagaagccgctggctttgcagccaaggttttacatttagggtctctttattctttgacggtaaatacaattccaaatgtgattagcggtctcaaactcagacgtagtgagcttgatattcaactgttgctgagttcaaatcaggatttggtgaaaaagctcaaagcaactgagctggatgcaatcattgtagctttaaatgaaaccactcaagatgatgactttgaaattttgccgatgttttcagacgatatctttctggcagtcaataaagattcaaaatatgctgagtttaaagatattgatttaagccttttaaaagaagaaacttttttaactttaactaagggttttgcaactcataacgacagcgatattatttttaaaaaagctggtttttcacctaaagttgctttacaggtcaatgatatctttaccctaattagtatggttagctcaggtgtaggtttcgcactattacctggtcgtatttctgcggtttatgaaagttcagttaaacttattccactaaaacagcaatatcatatgcagcaagaaattggtctggtctttttaaaaagtaaagaacgcgacccaaacttacttgctctgattgctgaatgtcgtatgtttgcctctaattttaaaagatag

SEQ ID NO: 43342 - DNA, 1419 bp, Acinetobacter baumannii
atgtataaatcagaacaactcgcccatagcattcgccaacttattgaaagcggcactttaaatgcacatgagaaattaccttcattaagagatcaggtccaacgttctggttttagtttaatgactgtgatgaatgcttatcaggagcttgaatcacaaggtctgatctattcaaaggaaaagtctggctattttgttgccgagcaaattgcactaaagccactggaacaatattcgatcgtttcacttaattctaaaattgaaattaattctttagtttttaaatatcttaaatcgattcaacatgagtctgttgtgccttttggttcagcttttcctgatagtcaacttttagctgctcccaaacttattcaaattatggggcaacttgcacggcaaaggcaaagctatgaccagacagcaagcctacctcccggtaatttagcgttaagaaaactaattgctcagcgctactgtatgcaaggcatacagaccgatccagatgacattgtcattacatctggaggattagatgcactcaatctttctttacaagcagtagccaaaccgggtgactatattctattgcaacaaaccgtgttttacggtgcttggcaggctgctgaacgtttagggcttaaggtcattaccattcccgaacatccacaacatggttttgacctagaggcttttgagcaggttattcatacatatccaattaaagtatgttggctcatgttaaatagccataatccgattgggtttacggtcagtgatgagattaaatataaaattgccaaactgcttcatgaacaccaaatttacttaattgaagatgatgtctatgaagagctttattatggcgggcaaaaaccactttcgatgaagtactttgaccaacaaaatctggtactgcactgctcttcattttctaaaactttaggggcaggttttcgggtaggttgggtctatgcgggtaaattttcggaccatatccaacacttgcagctcatgagtactatttcagtgaatgcactcatccaaaatgccttggttgagttcttgtctcatcatcattatgaaaagcatttgcgcacacttagactttcacttgaacgttataaaaagcagttttaccactatttgaagcaacatctgcccgcgatctgcgagatttattattacccaagcggttattttctatgggttaaattgcctcataaactcgatagcatgcaaatttatgaagaactcatccaacaagatattggtgttgcgccaagcccactctttagtgtcttacccgcacagcaacattatttaagaatcaattgttcttttgagtggaacgaaaaaattcaagctgctttagatcaagtcatcaaaactattcaacaaagggtcgaagcaagcctgtaa

SEQ ID NO: 43343 - DNA, 1005 bp, Acinetobacter baumannii
atgattgatctttctttaatatgggtcggtattatcggtttaggtgttttaatttacgtggtcatggatggctttgacttaggaatcgggattatgttccccttcattaagaatagccaagaacgtgacgtgatgatgaataccgtcgctcctgtctgggatggtaatgaaacctggatggtacttgggggtgctggcctgtatgcagccttcccgctggtctattcaacggttttatctgcgctctacctgcctattattttcatggtcattgccttgattttccgtggagttgcttttgaattccgttttaaagctcatcggaccaaacacctttgggacttagcttttatttggggttcggttttaacgagcttcctccaagggattattttaggggcctatattcaagggattaaaaccgaaaacggtatttttgccggtgggccttttgactggcttactgcattctccattttcacaggtattggtgtagttgccatgtatgccactttaggctgtggttggctcattttaaaaactgaaaaaggcttgcagcaacgtatgtatgagctgatgccaaagttaattattgcgctgctcattatctttggtgccgtcagcttatatacgccgttaacacaccccgaaattgcagatcgttggttctctttaccaaatctgttttattttagtccagtgcctattttggtcttattgtttgttggcctgattttatcggcatgtaaaaaacagcaagatcacaaaccatttatatataccttggcattggtcttccttgcctttactggttttgtaattagtttgtggccaaatatcattccaccatcagttacgatttggcaagcggcagcgcctcattccagtcaaatgtttgctttagtgggtgcgcttattctgattccaatcattattacttacaccattgtgtcttactgggtattccgtgacaaagttcgtgtaggtgatgaaggttatcattaa

SEQ ID NO: 43344 - DNA, 1446 bp, Acinetobacter baumannii
atgagcctcggtctaaccgctttagaattagcacgaatacaatttgcttttacagtatccttccatattatttttccggccacctctattggacttgcctgttttttggcagttttagaatggaaatggttaagaacgcaaaaccctatctataaagatctatttaaatactggattaagatctttgccgttgcgtttggtatgggagttgtttccggtgtcgtgatgagttaccagtttggtaccaactggagtgagttttcacgagtagcaggaagcattactggtcctttacttacctatgaagtcttgagtgccttcttcttagaagcgggtttcttaggaatcatgctatttggttggggccgtgttggtcctagagcccatttctttgcaacgcttatggttgccatcggaacatgtatttccatgttctggattttatcgtccaatagctggatgcaaacgccgcaaggttttgccatcgaaaatggtattattgtgccaaaagactggctagctattgtcttcaacccgtccttcccttaccgctttgcacatatgggtgctgctgccttcttggtttcatctttattggtagtgggaacatctgcttggcacttggtgaaaggccgtcgtgatgaattggtaaaaaaatcgttctcgatgggtttatggatggtgcttgtgacttcttgtttacaagtggtgattggcgataatcacggtttaaatactcgtgagcatcagcctgccaaacttgctgctatggaaggtcactgggaaaccaatcataacgagcctatgccgttactattatttgccataccggatatgaaagaagaacgaaatcaccttgaagtgggcgttccatatttgggtagcttaattttgactcacagtttagatgggcaagtgactggcttaaaagaattcgcacctgaagaccgtccaaactcgaccattattttctggagtttccgtgtcatggtgggtcttggtgtactcatggtcaccttatcactcattgctctttggttacgtaaaagaggaaaactctatgaaacatcatggtttcataaatttgctgtagtgatggggcctgcaggttatgtggcaatgctggctgggtggattactaccgaagtaggccgtcaaccttgggtggtctatggcattatgcgaaccaaagatggtttatcgcatactgtttcggcagatcaggtgggtctaagtctctttatttttgtggtggtttacaccatcgtttttggtagtggaatttactacaccttaaaactcattaataaaggccctgtatttatcgacacgccaaatatggaagcaggcggcgtaggacactttaaaacaccgatgcgtccacttagtgcagttgatgaaaatattgacagcaaacaaaactctggggagaaccgtcatgattga

SEQ ID NO: 43345 - DNA, 819 bp, Acinetobacter baumannii
atgtttatcacttctcaactgaacattattcataaaattattaaaaatcagtctatttccaccttggtaatagatcagttggaacagacttatgtgaaccttgaagcaaccttacttagagcgaaagtacttagggatttttctaaaactcaaaccgtgtatttaattcagtctcatattgagccacaacaaagcagtttggcttatctattctcgccatttatttttgcaaacttaaacaaagcagccatttatacaacaccggcgactccacctgcgctaaatatccttaataaatactatcaagctgacaagaaggtcgtatttaaggtagacgaagttttagaaagcctaaaaatatatctagatttagaattaatagagatgggagaagctgaatttatttatttgaatttaattaaagcattatgtcgaagtgatatctctacagtttttttaatcacccatttagagcttgatttagagacgttaaagcaacttgaacagttcttaaaaataaaaattcattgggtaaaagtcgtaaaagatgagggtctaaaagacttggatcagttggatatgcgtaaattattatttaaaaataaagatgaaacgcatgttcaattatgcgttctgtttgctcaaatgaatgcagcactggtcggcctatgcgatacctttactgtcagtcaaatgacacacttaattgatgatatgttttactcagagcatattttcgaaaaactttctgtctattcagaatatatgcaaaccttattgcaaagtcagcatagtcttcacaaaaaacaaattgcttag

SEQ ID NO: 43346 - DNA, 1296 bp, Acinetobacter baumannii
atgacaaatttaaattttgagcatcatctcggttcattaactcacgctgcactgagtcaggtttcaatcatttcgcgggtatggggtgaaggaccttctgaacggtatgatgaattggcaagtaacttcagaccgacttttgcccgtattaaagaaggggctttaatccgtgagcagcagcatattttgccgtatgagcaacttcagtggcttaaagatattggttttacacggttaagacttcctaaagctcatggtggttttgatgcaactattcctgaactatttgcattgctcattgaacttgcagaggccgactcaaatttaccgcaagctttgcgtgtgcattttggtttcactgaagatgtgttggtaagtaaagacaaaacgtttcaacagcgttggcttagccgaattgccaatggggaaacagtcggtagtgcatggtctgaaggcgggaaagagtcaatcgatcagtttgaaactcacttatatcgagacagtgacggaaaaattcgcgttaaaggcaaaaaatactacaccacagggagcctatatgcagactgggtggatgttggggtaacagatttaaaaggagagtctggctcagttgttgttcgccgtgaagatgaaggtgttgaaattgtcgatgactggaatggttttggtcagcagcttactgcaagtggtacggcatatttccacgatgtattggtcgatgaagctgaaattttacctgacgatgaccgttttaaatattcggcggcttactatcaactggtccaactggcaatcattacaggtctagggcgtgctgcaacctatgatgtttctcaagctgttgcgaaacgtacccgaaactacacgcatgcaaatgcccaatttgtaaaacaggatccgcaaattttacaagtagtaggacaaattcgtggcgcggcttatagtgcaggagcgattgttgaaaaagttgcacaaagcttacagcgtgcttacttggctgcatttcaaaataatgagcagcttgaagaagaacaaaatgcacttgccgagcttgaaagtgcgcagtctcaaacggtcattaccgatctaattttaaatgcttccacgattttatttgacgctttaggtgcttctgcaacagacaaagatttaggtctagatcgatattggcgtaatgtacgaactctagcttcacataacccgagagtatttaaaaatcgaattgtaggtgattttagtgtgaatggaacattaccaccttatcaatggcgtattggtgaagttgctaaacaataa

SEQ ID NO: 43347 - DNA, 1392 bp, Acinetobacter baumannii
atgactaagagaattagttttaacgcttttgaaatgaattgtatagcccatcaatctcctggattatggcgacatcctcaagaccgatctgttgaatataaagatttagaatattggacagatttagcacaaattcttgagcatggtttttttgatggtatttttattgcagatgtgcttggtatttatgatgtttatcatcaaagtgctgaacatgctttaacaggtgcagtacaagttccagtcaatgatccgctacagattgtgccagcgatggccgcagtcacaaagcacttgggttttggtgtcacgacttctatttcctttgaacatccttatccttttgctagacgtattagcacgctagaccatttaaccaaagggcgagttggttggaatatcgtgacgtcttatttggaaagtggttcgaaaaacttgggcctaaaaactcaggttaatcatgacaatcgttatgatattgctgatgaatacttagaagtcctttacaaactttgggaaggttcttgggaagagggttcggtactacgtgaccgtgaaagcggtatctttgctgactataaaaaagtgcatccaattcagcacgaaggtaaatactttactgtaccgggcatccatatttgtgaaccatcaccgcagcgaacgccagtactttatcaggcaggcgcgtcatcacgcggccagaagtttgccagtcaaaatgccgagtgtgtattcatcgcagcgccgtctaaaattgccactaaaaaagtggtacaaggcattcgccaaaaattggctcaagaaggccgcgatccgtactctgttaaaatttatgcgcttttgtcgattgtcactgatgaaaccgatgcaaaagcacaggctaagtttaaagaatatcaaagctatggaagctacgatggggcattaacattgctgtctggctggtcgggtgtggatttttcacaatatcaaccgaccgataaagttgaatatattcaaaccaacgcgattcaatctttattagactcttatgtaaatgcagatccagaacgtgtctggaccattgaagaaattgcaaactggaacagcttaggtggtaatgggcctgtgttagtgggttcggcagaaaccgtttcggatgctctacagcaatgggttgaagataccgatatcgatggctttaacttagcctacattttggcgcatcaaacctttgccgatgtagttgagtttattgtgccagagttgcaaaaacgtggggtatatcaaacctcatatgcacaaggaacattaagagaaaaactatttggtgctgggccatatttgcctgaaaatcaccgaggtgcaaaatatcgtaatctaaaagagttaaaacttgctgaggcgagttaa

SEQ ID NO: 43348 - DNA, 1467 bp, Acinetobacter baumannii
gtgagcacacaagaactcgatcataaccaccgttatgaaattaaatctcccgatgatgtttcacaattaatttccaaatttgcagggaagggtaaatcgaataaagttatttggttggcactgattggtgtatttattgatgcctatgatctaacaacgctctctttcggtattgagcaagtcatctcagagttttccttaagccctgtcatgaccggtgtggtagcttcagcaattgtctgcggaaccattgtgggtaacctgattggtggttggctgacagataaaatcggccgttatcgagtctttatggcggacatggtgctctttgtcattgcggcaattgttgctggttttgcaccgaatgtatgggttttgatcttagcccgatttattatgggaattagtgttggtattgatctgcctgtggcaatgtcatacttatctgagttttccaaatttaatggtagtagcaataaggcagcgcgtctagccgcatggtgcccaatgtggtatgccgcttcctcggtgtgttttggcctagttttggcgctttattttcttttaccaccagagcatagcaactggttatggcgagcatctttaattttcggagcagtgccagcgttactcattatttttattcgcggtaaatatttaactgagtcaccaatctggcttgcaaaccaaggcgatttaaaaggagccgctcaagttctacaagaatcctatgcaattcatgcagtcgctacagttgaaaaagtaaaaagaactgctgaaaagaaaaagcgcgagggttttgcagttctatttaataaaacctatttgccaagaactattgtggccattgtgattcatatttcggtggcatttcagtacacgaccattgccttctttttaccttctattttaacgcgtttctttcataccgatgtcttgacgaccattactacaacactcgggcttaatttattgtttgcatttacgggcgggctgttaggtgtagttgttgccagcagatttaaatctcgtcatgtgttgcttacaggctttttacttcagtttatagccctcattgcactggcattcattggtgaacccggtaatagctttttactctacaccgcaattggcatgctcggtttgtggctttttgccgaaggctttgggccaggtgcacaaatgatggtttatccaaccatggcttatcctgcttcgattcgtggtgttggtgttggctttaaccgtgcagtaacgggtgttgctcaagcaattgccttgtttgttttacccatctggatggcgggttacaaaaccgatgtttacctgattatttctatctttgcgtttattcctttaattgtgattgggctactgattaagtttgagcctaccgcccaagatgtcgatgtgattgatgaagataaaacagaacttcctctcaataattcaccagtaatcgattag

SEQ ID NO: 43349 - DNA, 1185 bp, Acinetobacter baumannii
ttgtttaagcattctcaaattttgacaaaaacattaattacaacgtctttgcttacattcagcctctcaagtcatgcagcgcttacctttggcaatgttgaagaaggtgaacttaaagtaagtggtactgttcgggctaaatatatttatgattttgactctgatcccactaccagtaaattttcttttaatgacgcggtcttatggctagattacaactccccgaaatggattggccgcctagattatcgggtttatgaatattacgggcatttaggagatgccaattggcttaccgatgcgtggttaggttataaaattaatgacaacagtaaaattattgctggcttaaacccagttccttttggcttgggccgcttttggggaaatacttattatttaggcattgccaatagtgctggttgggaagatgtacacaaccttggggtaaaatatgatttcaatgatggaatcaatgaagcacaactcgccttttatcctaccgatggtggcacttatagaggtaaaagcaaagactcgagtcgatttagtatcaaccctgtcaatgcagatgactcagtatcacaaggtaccagtaccaaagaaaagaactccattgttgttcgcggtgctcatacctttaagaatatcttaggccaagaaaatttctctactcaacttggcgcctccgcatggtattccaccattgaaaataagcgttcagggcaagatggcgatcgccaagtttattcggtttttagcaataccaattacaaccaatggaatttacagcttttggctggttatcaagacattgataatgccgacacccaatataaagatcatctgactttgggcggtttcgattattcatttaactcggcaaccaaaggtcagatttattcagccgaactgagctatttatttcctcagcagtttggccccattaccgctgttcgtccgtacttaaactatagttcttatcgaaaagagcaagatggctttaaagactccacccgttttattcccggcattgcctttaactatcaaaaattgacagtacaagccgagttgctgatgggtaaacacgatccatatctaggagacagtgaaggccttgcggctggcggaagcaatgataaatggaacaaaaaagcgtttgtgatttttgcttactacttctaa

SEQ ID NO: 43350 - DNA, 1041 bp, Acinetobacter baumannii
ttgaaagatcatgaaattatgagcacgaagaccaaaccgttgatcatcacggcaattgttatagtcgcaattgttgcatttatcgtatggcaaaataaaaaagacaataatacaagtgcttcagttcgtgacaacaaacctgttgtgattgcttatcaaactggggttgacccaagcaaagtggcgcaggccaatggagactatgaaaaacatagtcaacgtactattcaatggaaaaaatttgatgcgggttcagatgtagttaatgcacttgcttcaggtgatgtggtacttggtaatattggttcaagcccacttgctgccgcggcaagccgtaatttaccgattgaagtattcttaattacttcaaaacttggtgcatctgaagcactcgtggtgagtaataaatcaggcattaaaactcctcaagatttaattggcaaaaccattgctgtaccgtttgtttcgacaacccattacagccttttgtctgcacttaaacattggaacatcccagaagacaaagtaaaaattattaacttgcgtccacctgaaatttcagctgcttgggaacgtggtgatattgatgctgcctatgtttgggaacctgctttaagtaaagccaaagcatctggtacggttttaaccgactcaaaacaagtcggtgaatggggcgctccaacttatgacttatgggttgtacgtaaagattttgcagagaaaaatcctgacttcttgaaagcttttgttcaaaccacacttgagcaactcgaaaaatataaccaagacccagccgcttacgttaaagatgccgataatgtgcaaaaaattgcgcagctcacaggttctgatgcaaaagatatcccgcttttattaagtggaaatatttaccttgaccacgctcagcaaaaacaaacgttagatggtgaatttgcgcaaaatatttttgatacagcgaaattcttaaaaggtcaaggcaaagtcgatcaacttaaagccgattataaaggcaatgtgaattcttcatttttgcagccttaa

SEQ ID NO: 43351 - DNA, 795 bp, Acinetobacter baumannii
atgagtgtacttgaagccaaacatattcatctgacttttcctaaacagcaaaagccagttttacaagacattaacctaaccattgaagaaggttctttaaccgtgattttaggtgagtcgggttgtggcaaaacaactttgcttaatatcttggcagggtttcaaaagccaagttctggtgatgtgcttgtaaatcatgaagtcgtaactggaccagatgtaactcgtgctgttgtatttcaagatcacgccttacttccttggttgaatgttgcagataatgttggcttcgctttgcagttaaaaggtttaaagcgtgcagagattgagaaacaagtgagtgcaattttaaaaattgtgggtttaagtcacgttgaaaaagccaatatctgggaactttctggtggtatgaaacaacgtgttggtattgccagagctttgatcagtcacgcgccgtttattttattagatgaaccttttgccgcattagatgcttttacgcgtgaaaacatgcagcagttagtgctcgatttatggattcaacaaaataaaagcttctttttgattactcatgacattgaagaagcattattactcagcaatcagctggtactaatgacagcgcatccaggcaaaattgtagaaactctacacctcgattttgcccaacggtaccgtcagggtgaggctattcgctcaattaaatcggacccccaatttattcagctcagagaacagctatttgaaagtttaagggcacaaaaacaaagcggtaaggaggcgttacctacatga

SEQ ID NO: 43352 - DNA, 870 bp, Acinetobacter baumannii
atgaacactaaagataacgtctatgaatatgacaaagcagagcttaaacctgagttaaatgtgcaaacagaaaatgcttcatttctatcgtcattttttgagaagcatcgtactttggcggtcagcataatcagtgtgggaagtgtagttgcactctggttcctcattactgctttgcatgttgtacctgaactgtttttaccgagtccacaggcagtctggcaaaaatttatatcggtcagccaagaaggctttatgaaagcaactttgtggcaacatttggcagccagcatttctcgtgtatttttagctttgattgctgccgtggtgattggtgttccgctgggtttgtggatggggctgaacaaatgggttcgtgctgttctagatcctttggttgaattattacgtccaattccaccgttagcttatttgccgttacttgttatttggttcggtattggcgaaaccacaaaagtacttttaattttcttctcgattttggcgcctgtcattattagtagtacgcatggtgtgttaagccatcagctaaatcgtgaacgtgcggcattgtcattaggggcaagtcagtcacaagtcttttggcatgtcattttaccaacggctttgcctcatattattaccggtattcgtattggtcttggggtgggctggtcaacattagttgcatcagagttggttgcagctgaccgtggtattggttttatggtgcaatcggcagcacagttcttaattaccgatacggtgattctgggcattattgtgattgcgattgtcgcagttagttttgagctgtttttacgttggttacaaaaacagttttctccttggtatggtcagcagttgtag

SEQ ID NO: 43353 - DNA, 882 bp, Acinetobacter baumannii
atgaatacagtagtagcaaacttaaatatagaagtgatcaagcctaccattggcgcaattattcacgatattgatttgaatgcgttaaatgaacagacaacgcaacaaatccagcaggctttgcttgatcatcaggtcattttttttcgaaagcaacaattagctccgcaagcacaagcagacttggcacgtagttttggcaccttacatgtgcacccgatttatccttcaattgaagatgtaccagaagtgatggtgctcgacagttggaagcaagatttgcgtgacaatgaactttggcacacagacgtgacttttagtaaaactccacctttaggttgtgtgttgcaagctattaaaattccacctgtaggcggtgacacgttgtggtcgagtaatacagcagcttttaaagggcttccgcttgagttacagcaaaaattgcgtggcttaactgcaacgcacgatattcgtaagtcttttccgcttgagcgttttgcccataacgaagaagaacgtgaaaagcttttgcaaacctttaagcgtaacccaccagtggttcacccagtggtgcgtactcatccggttacaggtgagcctttgttatttgtaagtgagggttttaccacacacattaatgagttacccgaacaagaaagtgagcaattacttaatttcttgtttgaacatgcgacccaagagcaatttcatttacgctggaaatggcaagacggtgacgtcgcgatttgggataaccgttgcacacaacataaagcattatttgattatggcgacgcccatcgaattatgcaccgcgcaactattaatggcgatgtgccattttataaagaagaacaacagccagagttagcagaggcttaa

SEQ ID NO: 43354 - DNA, 735 bp, Acinetobacter baumannii
atgaaaattaaaattattaatcctaataccacccaaagtatgactgacaaaattgctgcatcagcaaagatagtcgcaaattctgatactcaaattattgctatgagtcctcaaatgggccctgcaacaattgaaagttattatgatgaagcactaagtgccgtaggtgtgttagaggaaatccgccaaggtgaacttctagatgtagatgcttatgttattgcctgttttggtgaccctgcgctttatgctgcccgtgaaatgacgtcagcacctgtgattgggattgccgaagcagctatgcgaactgcaagttacgttagtacaggttttagtgtagtcacaaccttacaacgcacagtgaatatgagttggcatctggctcatcgctatggggctacgccattttgcaaaaatgttcgagcttgtgacattgcagttgaagagttggagcttcctgactcagatgcttatcgaacaataagagatgagtgcaaaaaagcactcgcagaagataaaagcgatgcgattgttttgggctgtgcaggtatgagcgatttatgcctaaaactacaaaacgagttgggcgtaatagttatagacggcgttgcagcagcagttaaacaagctgaaatgttagttcagttaaatttaaaaaccagcaaagttggtgattgggcctcacctcctgtaaaaaattacacaggtatattgtcaggatttggagcacattag

SEQ ID NO: 43355 - DNA, 1470 bp, Acinetobacter baumannii
atgaataataccgaagcaataattaaatcttcttatgatgcaaaactgacaaatcaagacttagctcctttaaaaaagcaaacatggggcgcttataatatttttgccttctggatgtctgatgttcatagtgtcggcggctatgtcatggctgggagcctttttgcactagggctaaatagctggcaggtacttttatctttactcatcggcattgcaattgttcagttttttacaaatctcattgccaagtctagccaacaaacaggcacgccctatcctgtgatttgtcgtgccactttcggtgtgcttggtgcaaatatccctgccgttatccgtggtcttattgctgtcgcatggtatggcattcaaacttatttggcctccagtgcttttttattggtcattttaaagttctttccagaatggtcagtctacgccaatgtttcaacttacggctttcttggactttcctatttaggatggattggctttatgctgctttggttactgcaagcaattgttttttggtctggcatggacagcatacgtaaatttattgactgggcaggtccggctgtctacgttgtaatgtttgcgatggcagtatggctcatctggaaagctggctggcaaaatattgatttaaacttgagcggtgttcaatacgacggctttgcggttgtacctgtcatgattggtgctattgcgcttgttgtttcatatttttcagggccgatgctgaattttggcgacttctctcgttatggtaaaagctttaacgcgattaaaatggggaactttcttggcttaccaattaacttcttaggcttttctttacttactgtggtgtgtattgcggcaacacttccagtgtatggaaaacttattacagaccctgtcgagatggtcggtaaactggataacacatttgtagtcattttaggtagtttgaccttaatgattgccactatcggaattaatattgttgctaactttgtttcacctgcatttgatttttctaatgtttcaccgagcaaaattagctggcgtatggggggaatgattgcagcagtaggttcaattttcattaccccatggaatttgtttaatagccctcaagtgatccattacaccattgatattttaggtgcatttatcggtccactttttggtgtattgctcgccgatttttacctcgttaaaaaacagaaaatcgtggtagatgatttatatactttagatagcaagggtttgtattggtacaaaaatggttataaccactctgctttttatgccttaattccagcttcattaattcctattctctgcgtacttttaccacaactatcggggctagctaatttcacatggtttattgggatgggattcggttttgtcatttaccgatttcttaaccaaccgcttgcccatgctaaatcggcaatgactaaggtaaaagtacaatga

SEQ ID NO: 43356 - DNA, 738 bp, Acinetobacter baumannii
atgccatcgaatgcaccaaaaaaagccgtagaaatgagcaatgatgaaattgatgaccatatatataacgctattgtagatgctattttaaatcgacaacttgcccctggcgcacgtttagttgaagcacccttatgcgaagcatttggtgtaacgcgaggagtgttaagacgtgttttcgtcaaacttgcacatgataaggttattgaaattcagcccaatcgtggggcactcatcgcaaaacatagcacaaatgaaacaaaagaagtctttgaagcacgcagcatgctggaaatcgccactgtaaaaaaactagcacaaaaatctcatcgcctagatttgagtgagcttcgaagcttagtagatcaagagtctcatgagcgtttagctggaaattgggcagagtggattaagctatcaggtcaatttcatttaaagctgattgaagctaatcaaaatacgataatgaccagttatttgcagacacttattgcgaggacttcgttattaattggcttatatgaaattccaaaacataataattgttcggcagatgaacaccgtgcaattttagatgccattgaacaaggcgatgaaaaacgagcaacgcaattgatggaagaacatttagaacactacgcaaccacatttattgaagaaaacagtacagtatctgccgagcaaaatttattaaatttatttaaaaataagagaattgaaacacctcaaactaattaa

SEQ ID NO: 43357 - DNA, 891 bp, Acinetobacter baumannii
atggatcgattagactgtatttccacttttgtaagtgtcgtagaacatgggaattttagtagcgcagctagagcactcgatatttctcgtgatttggtagccaaacgtgtttgctaccttgaaaatgatttaaaaacaacgctattaaatcgaacaaccagacaaatgaatttgaccggttgtggggaaaaattttaccaacattgcaaggttatattgagtgaatttgaatgggcaacttacgagattagctataaccagcaatatcctgaaggcgaactcaagctcaatacgcccatgtcttttagcaacattttccttcaacatatcatttcagactttattgagaaatatcccagtattaaaattgatttgtttatgacagatcagttattagatgtgaatcaacacaaatttgatctgaccatacgcttagatggatctgcgccaagtttggcaaatagtaaaattttaaatacctatcaacgttatttatatgcaacacctgaatatttcaatcaacatggattacctacttctttagaagaacttaaagaacataagtttctaatttactatcaagatagccgacataaaaaattgatttttcaaaaagatcagaaagaagtgtcttttaattgtttccctgtgatgacgtgtaataatggtgaactattattggatatgtgtttaaaagatcacggtattgtttttcttccagagtttattgcagagccttattacaaagaaggtaagttacagaaatgtttggaagattataccagtcagccacttcacttatatgtcacatggccaaatcgtaagattttatcgaagaaagtaaaactatttattgattttttaacacatcaaatcattcccataaaataa

SEQ ID NO: 43358 - DNA, 687 bp, Acinetobacter baumannii
gtgaataaatcacttttagaacaactatcaccaaccaattgtcaggttatttttattgatcaccagccgcaaatggcttttggggtacagtcaatagatcgccaagtattaaagaataatacggtagggttagcaaaagcagctaaaacattcaatattcctgtcacgattacgacagttgaaactgaaagcttctctggtcatacctatccagaacttttagacatatttccagatgctccattactagaacgtacttcaatgaattcatgggatgaccaaaaagtacgtgattcgcttgcaaaaaataatcgtaaaaaagtgattgtttcaggtttgtggactgaggtatgcaacaacacctttgcttttggtgcgatgcttgaaggggattatgagatttacatggtcgcggatgcttcaggcggtacatcaaaagaagcacatgactacgccatgcagcgcatgattcaggcaggtgtggttccggtaacttggcaacaagtattactcgaatggcagcgtgattgggcacaccgtgatacatacgatgcagttatggcgattgtacgtgagcattctggtgcttacggtatgggtgtggactatgcctatacgatggtacataaggcacctgagcgtacaacatcaaaacatgaagtacttgcaccagttcctgcaaaataa

SEQ ID NO: 43359 - DNA, 1875 bp, Acinetobacter baumannii
atgaccgaaataaacctcatacttaaaaacggtaaaattacaacactagatcctcagaaccccgaagtacaagcaatagcgattgcagatggtaaagtggtacgtacgggtacaactgatgaggttatgaaactcgcaactccaacaagtaaagttgtagacttaaatggtcgtcgcgttataccgggtctaaatgacagtcatttgcatattattcgtggtggtctaaattacaatatggaactgcgctgggaaggtgtgccatccgttgccgatgcattacgcttactcaaagaacaagcagataatacgccagctccacaatgggttcgtgtcgtaggcggttggactgaattccagtttgccgaaaagcgtttaccgactttagaagaaattaataaagctgcgccagatactcctgtattcgttttacatctatatgccagtgctttgttgaaccgagctgcacttgatgtattaggctttaacaaagatacacctgacccacctggtggcaagattgtacgaaatgaaaaaggtgagccaacaggtctcttgcttgctacgccatcggctatgattttgtattcgaccttagggaaagcaccgaaattgccagttgaagatcaagtcaattcaactcgacatttcatgcgtgaattgaaccgattaggtattacttcagcaattgatgcaggtggtggtggtcaaaactatcctgaagattatgatgtgattaagcaattgcacgatcaaaatcaaatgacagtacgaattgcttataacctatttgctcaaaaggcaggccaagagcttgatgattatcgacgctggacagaaatgacatttccgggtgagggtgatgagttatttagaatgaatggagcaggtgagaacctgacttggtcagcgggggactttgaagacttctatgagccacgtcccgatttaccagaaaaaatggaaggtgaactcgaagccatcgtagagcacttggctgaaaagaaatggccattccgtattcatgcaacctatgatgaaagtattagtcggttactcaatgtatttgagcgcgtcaattcaaaacagccatttgcgacacgatttattattgaccatgccgaaaccgtatctgagcgtaatatcgaacgtattggtgcgttgggtggcggtatcgctattcaacaccgtatggcatatcaaggtgagattttcgtaaaacgctatggtgctgaggctgctcaggcaacgccaccagttaagaaaatgttagaactcggtgttcctgtgggtgcggggacagatgcgactcgtgttgcatcctataacccttgggtgtgtttgtattggctgactacaggtaaaacagtgggtggtttgccactctatgatgaaaaaaatctgttagatcgccaaacagcactcaaactctggaccaaaggttcggcttggttctcaggtgaaaaagatattaaaggatcactcacagcaggtgagcttgctgatctggtcgtattgtcagatgactactttaaagttgaagcagaagatatccagtggattgagtctgtactcactgttttaggcggaaaagtggtatatgcaggtgcagagtttaagcaagatgatccgccgctaccacctgcatctccaacatggtcaccagtaaaacgttttggcggtcagtggcgtttatccgaaaaccgtaatgcaccttccaatcaatcattacagtcacaaagtgcattgtgtgcatgtgctagcagctgtggtatgcatggacacagccacgcttggatacttgatgttcctgtaaatgataaggacaaaaaatctttctggggtgcactcgggtgttcttgttttgcattttaa

SEQ ID NO: 43360 - DNA, 162 bp, Acinetobacter baumannii
atgaaaatgtacttgttatctttggctgtagggttgctggttggtgtcttatattacgttttaaatgttaagtcaccagctccacctcttgttgcgttagtcggattattaggcatggtaataggagagcaactgcttccttttatcaaatcctatttttaa

SEQ ID NO: 43361 - DNA, 429 bp, Acinetobacter baumannii
atgactgagctagtgaagatttaccataaccctgcttgcgggacctcgcgcaatacattggcgcttattcgtcatgcaggaattgaacctatcgttattgaatatttgcaaacaccgccaagtaaagatgaattgattcaactcattaaggattcgaacctaactgtacgtgaagcaatccgtaaaaatgttgatccatataaagatttagagttggaacaagccgattggaccgatgagcagttaattgagtttatggttcagtacccaattttaattaatcgcccatttgtggttacaccaaaaggcacgcgactttgccgcccttctgagatggtactagacattttagattcacaaaacttaggctattttgcaaaagaagatggtgaagtgatcattgatgaacaaggccgtcgtttaaagtaa

SEQ ID NO: 43362 - DNA, 330 bp, Acinetobacter baumannii
atgatcaaccaagtcgatttctttaaatgtctatctgaccaaactcggttaaatattcttaaattagttctaaataaacaaaatatttgtgtctgtgagctaaccgaacagcttgagttgagccaacccaaaatttctagacacttagctttgttacgaactcatggcgtattactggatgaaagaaaaggacagtgggtttattacagcttaaatcctgatttacctgtttgggctttagatattttaaaggtgatagaaaatgacgagagtgggacaaaagtaaaacaacaagatcagtctttcatcacgacaacgtgttgtgattaa

SEQ ID NO: 43363 - DNA, 1035 bp, Acinetobacter baumannii
atgaccaaacaagggctttcctttttagatcgaaacctgacgctatggatttttatagcaatggctttaggtttagcgattggagttttctttcctcaggcatctgtgtctttaaatgaattaagtgtagataacgttaatattccaatcgcaatcggtttggttttaatgatgtatccgccattggcaaaagtggaatatgcggctttaccagaagtatttaaggataagaaaaccttaactttatctttgatacaaaactggattattgctccagttttaatgtttatccttgcgattgtttttttgcataactatccggagtatatgacgggccttattttgataggcttggcacgttgtattgcaatggtattggtctggaatggcttagcttgtggtgataaccaatatgttgcagctttagtcgcctttaacagtatttttcagattttattttttagtacctatgcatggttgttcttaactttcttgccgccatattttggtgtggcaggacaagtgattgatgtcaatttctggaccatcacacatgctgttttggtgtacttaggtattccattcttaatggggttcttgacgcgtttgattttagtcaagtcgaaagggttggaatggtatcaaactaaatttttaccaaagatcagcccgattagtttaattgctttactttttaccattgtggcgatgtttagtttaaaaggtggcgatgtggtgagcttacctttagatgtattacgtattgcgattccactcacgatttactttgtagtgatgttctttattagtttctttatgagtaaacggatggggaataactacccacgtaccactgctatttcatttaccgcggcaggtaataactttgagttggctttagctgtagctattgcaacttttggtttagcatcacctgtagcatttaccacagtgattggaccattggttgaagtacccgttttaatttcactcgtcaccgtttcgctttggttaaagaaaaagtattactcttaa

SEQ ID NO: 43364 - DNA, 903 bp, Acinetobacter baumannii
atgctcgatttatataagcttcatgcctttgtagtggtggttgaagaaagaaatattactcatgcagcaaaccgtttgtttattcaacagccacctttaacgcgtttacttaaaaaacttgaacaagaactcggtacacagttacttattcgtcaaccgcgcgggattgaaccgacggaagcgggtttagcattatttaaagaagcacaacttttattagaacatgcccgccatattccccaattggtccaagatgttagccaaggtaaaactggacaactcaatattggctttacaagttccgcaggtttgcatccgctcatttcactcgtattacgttcatatcgggaaatgtaccctgctgtgcaaaccaaacttgaagaagcaggcagtcaaaagcaactggactggttaatttcagaaaaacttgatattgcctttttaagagcgccgattagccgagatattggtttgaagcatcttcatatattaaacgagccaatggtggtggccttacctatcggccatccgcttacacagaagaaaaaaattagtttaagtaacttgtcagaggaaaattttgttttataccgtcgctcttcagggcaaggcttatatgacaatattttatatagctgctatcaggcaggttttagtccgcgtattattcaagaagcgccgcgccctactgcgaccctcaatttagtggctgccggtattggaattagtattgtgcccgcttcaatgcataacttttgggaccatgaaattgtctatcgcgagtttgatgactcgataaaattaaatgcgcctatttacttaattacacgagaaaatgaaaactcagctaaagtgtctaatttcattgaactcatgcaaaaactattacctacaatgacctaa

SEQ ID NO: 43365 - DNA, 561 bp, Acinetobacter baumannii
atgaaccatgttgagattgccgtgcagaaggataccgttcctacttgcacagagttatttttaggttttttaacattaggtttaattggatttggtggtgtgctgcctttagcccgtaaagttattgtagagcaaaggcattggttaagccctgaaaaattcactgagttacttggtctgtgtcaatttttaccgggcggcaatattattaatttatcggttgcgattggcatggagtttcgcggtgtccgtggagcagtgagctcactcattggtttaatcttcgcacctaccgtaattgttgtacttttacattatgtctatgagcagttccaagacaacttaatggttaaacacctttttgaaggtttaggagcagcagcagcagggcttctggttgccacaggtctgaaaatgcttaagcctttgttatgtaatccattagcaatctgtgttgtggtagcggcaattgtcagcattgcctttctaaaaattcctttacttttgactatgctgattttacttgcgttttattcagccatcatttggagacgtgtgtaa

SEQ ID NO: 43366 - DNA, 522 bp, Acinetobacter baumannii
atgggtgccgtactacttactttagcaatcatttttactcagttgtctcttattgcatttggtggtgggaatacgattttgcccgaaatgcaacgccaagtagtcgatatccatcactggatgacggcgcaagaatttagtgctctgtttgccatggcacaagctgcacctggtccaaatatgatgattgtacctttggtagggtggcatgtagcagggttgtctggtttattggtgacgtctactgctaaatttttaccgtcatctcttattactgtatttgtgatgagaggctggtcaaaattcaaagataagaaatggcgccgtgttttacagcttgctttacaacctgtcactgtgggaacggtacttgccagtgcttggattatctctgaggcagcggcaataaatactttacttatcattatggtagtcattgcaactttattatctttaattaaaaaagttcatcctttgcatgttttgattgctggggctgtatttggtgtggtcttactctag

SEQ ID NO: 43367 - DNA, 543 bp, Acinetobacter baumannii
atgcagttcaaaattatcgcagcccaagatctagataaaaatcaacgttatcagattgctgagttatgtttttctgcttttgatgaagatccttggagtcaatatgcttttatgcaaaaagctattcatgtcgtcggtatattaaacaatcaaattgtctcacatgtcttatggacggatagagtttttaccataaatggtagttccgatgtgaaaactgcttatgtagagtatgtgaccactgattacacgatgagaggtaaggggcttgcaacacaattattaaaatatttagtagagacattaactcatctggaatatgggcttgctgcattacaaccagaagatgaagcattttatgaaaaattaggatggactgtttggaaaggaaatttatctatcaaacaaaacacttgtagttatctaacggatgagtatgaaattatgctatatcctttaaatattcagatgaaagaccagctatcaaatagttcagaagaggacactatttgtgcagattggcgagaaggtgaactttggtag

SEQ ID NO: 43368 - DNA, 999 bp, Acinetobacter baumannii
atgtctactgatccacaattcccaacacccaataatttaggtatcgcagtttattcaaataatgcagaagctattggtaatacacctttagtacgaattaaccgtttgattaaaacgggcgcaaccgtattagccaaagtagaaagtcgtaacccagctttttctgtgaaatgccgtattggagcagcacttattgcagatgcggaaaaacgtggtgtgctaaaagaaggcatgcatattgttgaaccaaccagtggtaatactggtattgcattggcgttcgtagcagcggcaaaaggttattccattactttaactatgcctgcaagcatgagccttgagcgtagaaaagtgttaaaagcactcggtgctaatttagtcctaaccgaaccagcgaagggaatgaaaggtgcagttgatgaagctgtacgattagcaactgaacagccagaagtttatttcttgccacaacagtttgaaaacccagctaatccacaaattcatgttgatacgactggaccagaaatctggcaagcaacaggtgggcaagttgatatcttggtagctggtgtaggtacaggaggtacgattacgggtatttctcgttattttgaacaagttcagaataagccattgtactcagtagcagttgaacctgctgagtctccaattattactcaaacaaaaaaaggtgagaacattacaccagcaccgcataaaattcagggaattggagcaaactttattccaaagaatcttgatttagatctggttgatgaagtcttaccagtgagtagtgaagaagcaattcaatgggcgagaaattgtgccacccaagaaggtattttagtgggtatttcaagtggtgctgcattggcagcagcagctaaaattgcagaacgtcctgaaaatgcaggtaaaacaattgttgttattcttccagatagtggggaacgctatttatcttctgttttatttgaaggtttatttgacgaataa

SEQ ID NO: 43369 - DNA, 489 bp, Acinetobacter baumannii
atgacgggatgtacaagtttaggccctaatagcggttcattttcttggcgctcaagtaagctttcgtctggcttacaaaaagcttattccgttccgccaagtacagcaaatcgcctatctccaatgattattcaaagcgctgatagatataatgttccaccgcttttattggcagccgtgatcaggcaagagtctagctataatagtaatgctcgctctcccaccggggctattgggttaacacaaattattcccagttattggcaacaaacttgtgctggtaacttgtatgatgaatctaccaacatccaatgtggtgcttatattttaaatcattactatcagacagcagatagctggttcaaagcgacagcatattataatgttggtccaacaggatatgaacgaagtttctggacacgccacaaagcaaaaaaatatgctcgatctgtgaaacgtcatcagaaaactttaaaaagtgctttataa

SEQ ID NO: 43370 - DNA, 567 bp, Acinetobacter baumannii
atgaaaactgttgccattatttaccatagtcgccaaggccacacccaatttattgctcagcaaattcaaattggcgtcttgagccatcacaatattaaagcagatttactcaatgccgaggatcttatcgagcgtccagaaattcttatccaatatgatggattaatttggggatctcctacttatttaggtggtgtatcttccaagttaaaacagctcatggatgcaactggaccattatggaaaaaacaaagttttaaagggaaattagcagctgggtttaccgtttcatctcttcctgctggtgataaacaatccacactaatttcaatttttactttttgcatgcaacacggcatgttatgggtaggtaacccaattctaccagaacagcatcaaggtgttgcctatacacaagcagctaaccgactcggttcatggtcaggtttaatggctcaggctgaacatgctagtaatgcagatggttttgatgagggagatattaaaactgctcaacaatttggtgaaaattttgcattgaccttaaatgcttatcaagggacttaa

SEQ ID NO: 43371 - DNA, 189 bp, Acinetobacter baumannii
atgaatacctccactctgttcttccaagctttatgtcttggtattggtgcaaccatccttatggatatatggctgttaatactaaaaatatttaaggtcccgactctaaactttgcctttcttggacgttgggtaggttggatagttcaaggaaaactcatccatcaatctatcgctcaaagcccttaa

SEQ ID NO: 43372 - DNA, 405 bp, Acinetobacter baumannii
atggatattggtgaagtcgctaagaaggcaaaagtcacaacggctacgttacgtttttatgaagagaaaggactaattaaatctatagggcggcaaggtttgcgtcggcagtatggtaagcaggtgcttgatcaactggcacttattgctttaggacgtgctgcgggtttttctttaaatgaaattgccacaatgtttgggcaagatggtaagcctgatcttgatcggcaaaaactaaaagataaagctgaacaactagagcaaatggcaaagcgattacattttattagtcaaggattacaacatgctgctgtgtgtcctgctgaaaatcatatggaatgcccaacttttcagaactttttgaaagcagcaattgctggagaatatcagccaacaaaactttaa

SEQ ID NO: 43373 - DNA, 1260 bp, Acinetobacter baumannii
atgagcaaaaaaactttagtcgcattattatgctgtgccagtttaggattgacggcatgtaacgatgataacgatcaagatcaaacttcacctactgaaaacgttaccgaaccaactctaatttcttttgctaagttacctgtagaaacttatgctgctggaccagactcaggggcatatgtgaaaggtgcaaatggaatttatcctccgtttaaaggtcaacctgtacaaggattttctgctgcattaaaaaatgaagatggcagttatatggcaatggccgataacggttttgggactcaagataattcagcagactttttacttcgtatttataaattaaaacctgatttcaaaactaaaaccaaaggtacagggcaggttacgatacaaagctttattcaattgcgtgatccgaacaagttaattccttttaatatcgtgaatggtaacacgcctgagcgtttattaacgggtgctgattttgacccagagtcaatgcaacgtactagcgatggtacttactggattggggatgagtttggaccttatttacttcatttttcagcggatggtgtgttattagatgcaccaatcgctttaccaaatccattaaatccgactcaagaattacgttcaccacaaaatcagtttaataaagcgcaaattaattttgtagagcctttggttcaacaaagtggcggtttcgaaggaatggcgatttcaccagatggacaatatctctatccgcttatagaaaagccaattaaatcaattcgggaaacagaaagacagttgctgatttctcaatttgacctgaagaaaaaagcgtatacaggaaaatattattggttccagttagacagtaaagcaaccaatattggtgattttcaactctttaatgataaagaagggatcattattgaacgtgatgccacgcagaataatttaggtggctataaaaaattaatccgtattaaattaaatgagtcaggccagctggtcagccgcgaagacttagtcgatttaattaaaattgctaacccgaatatgttgtatggcacagctagagcaggggatattggtacgggacaggtttttgccttcccatttgaaaccattgaagatgtaattattgaaaatggtacaacactgacggttttcaatgataataacttccctgggtcgacgggacgtaatgcaaagttggccgatgataacgagattattcagattcgtttaccaaaagctctcttctaa

SEQ ID NO: 43374 - DNA, 2379 bp, Acinetobacter baumannii
atgtctaccgcttatactatgcaaactgcgccaaaagcgttgtttgattacgacaaatattgggcgtcgtgttttgaaccagcgccatttttgccgatgtcacgagaagaaatggaccaactcggctgggatgcgtgtgactttattctagtctgtggcgatgcttatattgatcatccatcatttgtatcgggtgtgattggacgtgtacttgaagcgcaaggtttccgtgtcggtattattgcacagccagactggaccaatgttgaaagtttccgtgtattgggtaagccaacgattgcttggggagtgactgcgggcaatatggattcgatgatcaaccgctatacggcagatcgtaaaatccgttcggatgatgcatattctccaaacaatgaaccaaacaaacgtcctgaccgcgcggcaacggtttattgccaacgttgtcgtgaagcattcccagatgtacctgtactattaggtggtattgagggtagtttacgtcgtattgcgcactatgattattggtcagacaaagtccgtcgttcaattttgatggattcaaaagccgatatgcttatgtatggtaatggtgaacgtgccattatcgatgtgatgcaccgtttggctaaaggtgaaaaaatccacgagattacagatgttcgtggtacagcatttattattaataaacataacaaagcggctaaagcaaaatttgttgaaattgccagtaatgatgtagatacgattgggcgtgttgacccaattattaacccatatgtcatgactgaagatattgatggttgtgaaattgagaaagataaaggcaacacactagctcaatatcaaggttttcaaaaagaaattgttgcaaatccgattgtacgtgaaggcgaccaacttgatgaaaatactcagattgttcagctaaagcctgctcagtcaaaagcgattaaacacaagttacctccgcgagaattggctgtaattcgtttaccttcttttgaagaagtggcaaatgatcaagtactttatgcacatgcaaaccgtattttacatcttgaaaccaacccgggtaatgcacgtgctttagttcaacgtcatggtgagcgtgatgtctggatcaatccacctccaattcctctaactacagaggaaatggattatgtatttgatttgccatatgcacgtttgccgcatcctgcatatggagatgcgcgtttccctgcatttgatatgatcaaattctcggtcaatattatgcgtggctgttttggtggttgtacattctgttcgattacagaacatgaaggccgtattatccaaaaccgttctgaagattcgatcttacgtgagatcgagaaaattcgtgatacagcgccgaacttcaccggtattatttcagacttaggtggtccaacagcaaacatgtaccgtttgcattgtaaagaccctgaaattgagaagaactgtcgtaaaccttcttgtgtatatccgggtgtttgtcaaaacttgcataccgatcatgcacctttagtacagctttatcgtaaagcccgtgcgattaaaggggtgaagaagattctgattggatcgggattacgttatgaccttgcagtattgaaccctgaatatgtcaaagagttagtacaacatcacgttggtggttatttaaaaatcgcaccagagcatactgaacaaggcccgttatctaagatgatgaaaccgggtattggtacgtatgatcgtttcaaacaaatgtttgatcgctttagtaaagaagcaggaaaagagcaatatttaattccttactttattgctgcccacccaggtacttctgattatgacatgatgcatcttgcgatctggctgaagaagaatggtttccgtgccgatcaggtacagacgttctacccatcaccgatggcaactgcgacaaccatgtattattcagggaaaaacccactcgcaaaagtggcgcgttacactgaaaatgtagacattgtaaaaggtgaaaaacgccgtcgtctgcacaaagcattcttacgttaccacgatccaaataactggccattactccgtgaagcacttaaagaaatgggccgcgctgatttaattggtaattcaaagcaacatttaattccaacttatcaaccgaaaggggcggaaggagaatataaatctgcacgtaagaagaactcgactgttgcgggagattcattgaagcgttcaggtcaaacagttcaaaataaaaatcagcataaacgaccgcaaaaagggcaggtactgactcaacatacggggctaccacctcgtgagacaggtgaaaagagaccatttggtggtaaaagtaaaccaaaatcaaaagctcgtggataa

SEQ ID NO: 43375 - DNA, 501 bp, Acinetobacter baumannii
atgtactatttaattacaatcttattactatttttgaccgttgttatggcggcgaaaagcctctcaagaaagcatcaacaagacagtgctttaaagcgccgtgccgtgttaagtagtcatgaacaaatgacattaactcgtttacagacagtattgcctaaatttactgtgttagctcatgtttcatttgatgcattattaacaacaaaatatgctcacactcgtcgcaaatatcaaaatatgacagctgactttgttgtgcttgatcaaaattatcaggttgttgtagtggttatgcttgaggaaagtggtttacgccgagcacatcaacaatatgagcgccgtttattacagcttgcgggctatcgtgtattaagttacagcactgtgccagattatcatgagttaagaagagacttattaacccctgaatcagagatgacaactttacatgcaacgcctcagctagaaagaatttcaaatgcttttgtaaagtcttaa

SEQ ID NO: 43376 - DNA, 354 bp, Acinetobacter baumannii
atgacggtaaaacgcttacacgtaacttcaagatattgtgaagtggcgatttcgggtaatttagtccatttagcagggcagctcgctgatgacaccagtgtagacattacggcgcaaactcaacaaactttggacaatattgatcgcttacttgctgaagccggaactgacaaaagtcatatcctgtctgtcatgatttttctaaaggatattgataaggactatgcagccatgaatacagtatgggatgcatggattagcaaagagcatccacctgctcgtacttgtgttgaatctaaactttatgcacctgatgtacttgtagaaatgaccgttgttgcggtacttccttaa

SEQ ID NO: 43377 - DNA, 1056 bp, Acinetobacter baumannii
atgcgcaaaatcattcatatcgatatggatgccttttatgcatcggtcgaattgcgagaacgtcctgatctaaggcatctcccagtagttatttcatcgcatcatccacgcgccgtaattgcagctgcttcttatcctgcccgtgagtttggtttacgctctgccatgtccatgagccaagcaaggaaactatgccctcaagttgttattattgagccgaattttgaaaaatatcgtgccatctcggctcaaattcatagtatatttcaacaatacaccactcttattgaacctttatctttagatgaagcgtatcttgatgtcactgaaaatttaaaacaaatcgcgagtgcgaccgaagtggctatgcatattcgggaagatattttcaggcaaaccggactgacagcctcggctggtgtagcacctaataaattcttggcaaaagttgcgtccgactggaataaaccgaatggcctgtttgttataaaaccttctcaagtagccagttttattcaggacttacccttaaagaaaattccaggagtaggcaaagttactcaagaaaaactccaacagcttgaattgcatacactaggcgacttacaaaaaattgaagaagctgttttagttcaccacttcggtaaatatggccaacagctttatttatacgctcaaggcatcgataaccggcccgttcaagctgaacgtgcccgacagcaaatttcaaaagaaaccacatttgatagtgactttactttagctcagtgccaaccctactggcatggtctagccgaaaaagtctggcaaagtttagagaaaaagcaactgaatgcccgaggcgtaaatattaagctcaaacttaagaatttccagactttgcaacacagtaaaagttttaaaaacccaattcattctcaacaagacctgattcaagttttattcttacttttaaatgagatgcatattcccgaaaacttccaatttcggctcattggtattggggtttatcaattacaaactaaagctgacgactttcagttgtctttatggtga

SEQ ID NO: 43378 - DNA, 759 bp, Acinetobacter baumannii
atgaccaagctggcaaaaaccttttctgcaccacgctacaataccctcattgggattgttttagcttgtgttatgggggttctcacttacttcggtctgttctaccaacaaaaagctattgctcaagattacccagttcaaggctttgatgtctctcaccatcaagaaaatattaactggaaaaaaatatcaccccaaaaatttcagttcgtctatttaaaagcgactgaaggcggtgattataaagatccaaaatttcaagaaaactggttaaaagcacgcgaacatggctttcatgtcggggcttatcatttttatcgtttatgtcgtgatggtaaaacacaagctgaaaattttattgcaactgtacccaacaaagttgatgcccttcctcccgttattgatctggaatatgacagcaactgtattaattcccataccaaagaacaattacttaaagaaataggcatcatgcatgacagcttaaagcatcattatggtaaacagcctatcttttatatttccaaaactttttaccacattgtattaataggtagtttctctaatacacctctttgggtcagagattacgaagggaaacctgagctgaaagacaagcgaaaatggctcttttggcagcatagtaatcaaggtaaaattgaaggcatgaccaagccagtagacttaaatgtttatgaaggttcagtcaaagaatggcaccaatttttacagcaacaaggcatcgtgaaagcacaataa

SEQ ID NO: 43379 - DNA, 1392 bp, Acinetobacter baumannii
atgaatgccacgccaacccatcaagccttgcaacccgaatatcgcctattggttcttttggtttccattggcttttttatgcaggcattagatacaacaattgtaaatactgccattcctgcaatggcacaccatttaaatgaagatccattacgtatgcatagcgtagtggtggcttatgttttatctgtagctgcctgcattcctttaagtggatggttagccgaccgttttggtgttagaaatacgtttttatcagcaatcattattttcacacttgcttccttaggctgtggcctttctcaaagccttaatgaacttttatttttccgtgtcattcagggtgttgggggtgcgttattactccctgttggtcgtttatcacttttaaaaattattccccgaactcaatttttggcagccatgagcctcatgagtctagcaggtttactaggccctttagctggtccaacactcggtggttggctcgttgaagttgcaacctggcattggatctttcttattaatattccaatgggagtattgggcatattaatgacattaaaggtcatgccaaatgtaaaagagcctaccgttaaaacttttgatcttattggatttgtgctcttagtcgtcgcaatgattggctggtctttgggtattgaacatcttgcctcacctgagtattccaaatggtttagtatttctttattagtggtcggggtagtcgcaaccctttggtatgcctaccattcacatacccatcaaaatgcattgttccgtagccgactctttagaaacaagatttacgcgattggtattttaggtaatttctttgcccgctttggtggtaatgccttaccttttgttttaccgctcatgttacaggtcgcttttggttttgagccattcattgcgggattaatgatgattccgttagtgttagggtcacttttctccaagccgattgttagaccgattattcagaaaatgggttatcgccgctttctgttaattaacacaactttagttggtctatgtattgcgtcttttgccattatgactgtcgacacccccacttggtttagagccttacactttttcttatttggtacattaaactcattacaatttgtgggaatgaatacacttaccttaaaagatttgcctcaacaagatgcaagtagcggtaatagtttcttatcaatgattatgatgctttcaatgagtattggtgttgcactggcaggtacactcattaatgtatttaccgattactatggtacagcacatgtgacaactgccttccatgttaccctcatttgtttaggctgtattaatatcattaccgcactgatcttttggcaaatacccaaaaatacgcctgtgtaa

SEQ ID NO: 43380 - DNA, 624 bp, Acinetobacter baumannii
atgaatagcgtattaacaatggcagtaaatgattcaccaataacatctgtaaaaacaacacaacctcttattgcattatattgtggctcacgagcaggaaataacccgatttatcgcgaaaaggcaattgaattagccagcggaattgctgaacaaggttttggtttggtgtacggcggtgccagtattggtttaatgggacaagtcgcagaaagcgtacttgcacatggtggagaagctgtaggggtcattcctgaatttatgcttgattatgaagtggcgcatgcaggactgaccgaactccatgtggtagaaaccatgcatgagcgtaaagccatgatggcagagcgcgcgagtgcttttatcgcgctacctggcggtttaggaacattcgaagaaattttggaaattgcgacttggggtcaactcaaccagcaccaaaaacccatgattttatataacgtaaatggtttttataatgcgttaattgctcagttagaccatgctgtacaagaaggcttccttcctcttcagcatcgagctaaattaattgtatgtgaagaaatcgaccaaatttataacgtcattaaaaacttaaaaatgccaaagagatttgttgtttaa

SEQ ID NO: 43381 - DNA, 1593 bp, Acinetobacter baumannii
atgatctttgaatggatgtctgatccgtctgcttgggtaggcctagcgacattaattgttcttgaaatcgtactagggatcgataacctcgtctttattgccattttggctgaaaagttgccaccagaacaacgtactaaggcacgtatagtgggtttaatactcgctttgggaatgcgtcttatcctcttagcttcaattgcttgggtcgtgacactcacccaaccacttttccatatttttagccatccattctctggccgtgatttgattttattgttcggtggtgtgttcttgctctttaaaggcaccatggaattgcatgagcggatggaaggtaaacaacttcataaagaagataatcctgttcatgctgcgttctggatggtcatcgttcagattgttgtgcttgatgccgtattctcattagacagcgtaattactgctgtaggtatggtgaaagagctgtcagtcatgatggttgctgttgtgattgccgtgggtattatgctgtgggcttcaagacccctcatggactttgtcaataaacacccaacagtagttattctatgtcttggcttcttgatgatgattggtttctctttggtggtggaaggttttggtttccatattccgaagggttatttatatgctgcgattggtttctcaattttagtcgaaatgatcaaccaaaccatgcgtcgcaaccaagagaagctagtgactactacagatttacgttatcgcacagcttctgcggttttacgtatgttaggcagtaaaaatagcggttctacttcagacgctcaaacggctgataaagaagatgtattggcaactcaagcttttgctgatgaagtctttgatgaagaaaatggcgcttaccatagtgtgcttgtacaaggtgtacttggtttatctgaacgtccagtaaagtcagtgatgacaccaagacctgagcttgaatggattgatttagacgaagaaccagaagttttaaaagaacgtttaatgtcgatgacacattcacgtttaattgttgctcgtggtgaacttgataatattgaaggtattgcgcttacacataaagttttaaatggctttattgaaacaggcgttatcgattttcaaaagcacttacgtgagccagttattgtgcatgaaaatgctcaagtgcttatggtgatggagcaattacgtcaggctcctttacaaatggcgattgttctaaatgaatatggttcaattgaaggtattgccacaccaattgatattttagaagcaattgcgggtgagttccctgatgaagacgaactagatgcagcagcagaaagtttagaagacggttcgttaatacttgagggttcaaccgatattcgtcatgtatcgcttttacttggacgtgacttagttgatgaaagtgaacaatattctactttatcgggctatttgttattccatttaggccgtttacctgaaaatggtgaaactgttgaagcggatggttatcgctttgaagttgtaaccatggaaggccataaaatcgagaaagttcatattgtttctatcgaacaggatgaatcgaaagattaa

SEQ ID NO: 43382 - DNA, 468 bp, Acinetobacter baumannii
atgacccaacaaacttgtccatgcggaaaaggcagctatgcagaatgttgtgaatctttacatttaggcacagcaaaagcactcaccgcagagcagcttatgcgttcacgttatagtgcatttgcattgcagcagattgattatattgtgcaaacgacggctttaggacagcaaactgctcttgataaagaggctattgcggaatggagcaaacaaaatcaatggttgggtttagaggtggttaacgctaaagaaaaattagataaaacccatgcacaggtggagttcaaggcccattatcatgatggtaaaagcgctcaaattcatcatgaagtttcacattttgtatttcatcagcaacaatggttcttccttgatccgacggtcgatatgcaggtcaccatgaaacaaccttgtatatgtggttcaggaaaaaaatttaaacaatgctgtgcacaattcctataa

SEQ ID NO: 43383 - DNA, 645 bp, Acinetobacter baumannii
atgttactcaccgttatttatattattgcgattactgcggaagccatgactggtgcattgtctgctgggcgacggagtatggactggttcggtgttgtactaattgcctgtgtgacggccttgggtggtggctctgtacgtgatgtactacttggacactatcctttaacgtgggtaaaacatcctgaatatttagttttaacgtgttgtgctgcatttgttaccatcgttattgctaaatggatgcgtcatttacataacattttcttggtgctcgatgcgttaggcttaatcggatttaccattattggttgtcagattgccttacagatgggacatggctttgtcgtgtcggcagtagcaggcgttttaacaggagtttcgggtggtattttacgtgacatcttatgtaacgacgttccgtttgttttccgccgtgagctgtatgcgagtatttcttttgttgcagtcatttgctattgggtctgtctagacttaggtttgagtttagaacttaccgttatttcaaccttagtatttggttttacgcttcgtttaattgccatttattttggtttggaaatgcctaaatttatttataaagatgatgatgcagagtcggcttcttcaaccgacgaacattaa

SEQ ID NO: 43384 - DNA, 1320 bp, Acinetobacter baumannii
atggatctggtttcacgtatacaaaatcttccaattggcaaatttcactacacgcttttatgggtagtgggtttaggctggatgtttgatgcgatggataccggcattatcgcttttattatgacaacccttgttaaagattggtcattaacaccagttgaaagcggttggattgtcagtattggctttgtaggcatggctataggtgcagtttgttctggtgccttggcagatcgttttggtcgtaaaactgtatttgcgatgacaatggcaatttatagtattgcgactgcgttatgtgcttttgctccagatctaaagtggctattaatttttcggtttattgttgggttggggctaggtggtcaattacctgtagcagtcacactggtcagtgaatatgtgcctgctcatgttcgtggaagatttatcgttctgcttgaaagtttttggggattaggctggctagttgctgcactcatttcttattttattattcctaaatttggttggcatattgcctttcttataggcggtcttccacttatttatattttagtgatttggaaaaaagtccctgagtcgataccgtatttgattaatcgtggccgtatcgaagaagcgcatgcactggtacaaaaactagaagccgaagcatgtgtgcaaattgttcaccatattgaagtcgtgcctgtggcgatgcgacaaaaagtttcatttaaacagctttggagtggtcaatttgctcgtagaagtttaatgctctggctaatctggtttggcattgtgtattcctattacggcatctttacgtggttgccgagtttattggtgaaacaaggctatgacattgtcaaatcatttgaatatgtattgcttatgattttggcgcagttaccgggctacttggcggctgcttggtttgtcgagcgtttaggtcgaaaaattacacttgccgcatttatcggtttttgtgctttatcggcatatttctttggacaagccgacagtgtaaatagcattatgttctggggctgtctcatgtcattctttaatttgggtgcatggggagtgttatatacctatacaccagaacaatatccagccaatattcgggctttcgggtcaggctgggcatcggcaatggggcgtatcggtggaattgtcgcgccaatggtcgtgacacatatgatggttgctaaaaacggctttaatcacgtttttatgatgtttactgtggttttacttgccgtagctttagtgattttgatattaggtgaagagactcaaggtaaaagactagagtcgattgggctatag

SEQ ID NO: 43385 - DNA, 2220 bp, Acinetobacter baumannii
atgaccagccttgcgcatcatgcgacagaaaaccgctctgtagccgaatttactgaacaggcttacttgaattatgccatgtacgtcattatggaccgtgcattgccgcatatcagtgatggcttaaagcccgtacagcgccgtattgtctatgccatgagcgagctaggcttaaaaagcagtggaaagccaaaaaaatcagcgcgtacagtgggtgatgtactgggtaaataccacccacatggtgactcggcatgttatgaagccatggtactcatggctcagccatttagttatcgttatccgctaattgaaggacaggggaactggggttcaccagatgatcctaaatcttttgctgcgatgcgttataccgaagccaaactctcggcttatagtgaattattgctgagcgaattaggtcagggcactagcgaatggcaagataactttgatggttctttaaaagaaccgatcactttacctgcacgtgtacctaatattcttcttaatggtacgacaggtattgctgtcgggatggcaactgatatcccgccacataatttgcgtgaagttgtaaaaggcacaattgctttaatccgtaatccgcaaacctcggacgaaaaattagctgaatatattccggctccggatttaccaaccaaagctgaaattattaccccgccagaagaattactcaaaatccagaccactggtcgtggtagttaccgtatgcgagcggtatataccattgagaaaaatgaaatcgtaattactgagctcccatatcaagtctctggttctaaggtaattacccaaattgctgaccaaatgcaggctaaaaagctgccattagtcgttgatgtgcgtgatgaatcggatcatgaaaacccgacacgactcgtgattgtactgcgctctaaccgtattgatgcggaagcagtaatgagtcacttatttgcgaccaccgatttagaatcaagctatcgtgtcaatttaaacatgattggcgaagatggccgtcctcaggtgaaatcaattcgtcgtattttgcttgaatggatcgagatccgtaaaaaaacggtaactcgtcgtttgcagtaccatttaaaccgtattgaaaagcgcctccatattttggcaggtcttttaattgcttatctcgatattgatacagtcattcgtattattcgtgaagaagaccagcctaagccagtcttgatggaacacttcaatattgatgagatacaggccgaagcgattttagagcttaaattacgtcatttggccaagcttgaagagatggaaattcgtcatgaacaagatgagctttccgcgaaagctgccattattcgtgaacaactcgaaaatcctgaatctttaaaaaacctgattatcagtgaattaaaagaagatgcgaaaaagttcggtgatgagcgccgttctccaattgttgcacgtgctgaagcggttcaaattaaagaacaggatttaatgccagctgaaacggtaacagtcgtgttgtctgaagcaggctgggttcgtgcggcaaaaggtgcggatgtggatgccgaaaatctgaactaccgtgctggggaccaatatttaagtcatgctgtcgggaaaaccaatcagcgagtttacttccttgatgaaacagggcgcagctatgccttgccaattagtaacttaccttcagcgagaggcttgggggatccattaagttctaaattatcaccagcaagtggcgtatcgtttattcaggtttatttagatgatgatgagtctgaattgattgctgcaagttcggcaggttatggttttaaaacgcaaaccaagcaattagataccaatgcgaaagccggtaagacattcttaacggttccggataaggcaaaggctttaccactcatttctgcccaaaacatgacgcatttggctgtactgagctcagcagggcgtttgttaattttagatttggcagagctaccaaatttaaataaaggtaaaggtaataagttgatacaacttgaaggcaaagagcaaattttatccatgacaaccctgaacttagatgaaataattcaggtggttgcaggtcaacaacatctcaaattaaaaggtgatgatctacaaaaatacatgggtaaacgtgcttcgaaaggtcagctcttaccacgtggatatcaaaaagcaaataaactgttgattcagagataa

SEQ ID NO: 43386 - DNA, 1680 bp, Acinetobacter baumannii
atggaaaagatttggtttgcagaataccaaaagacagggattccagaaacagtagcattgcctgcagaaaatacctcacttgttgatatttttgagcgtaatttccaaaaatttggttctcgtgatgcctttatctttatggataaagccatgtcatttaacgagttggagcttgcaagccgtaagttcgcgacctatttgcaaaatttggggttagcaaaaggtacgcgtgtggcagtaatgatgccaaacgtgctgcagtatcctgtagtggcattggcagtcttacgtgcaggcttggttttagtgaatgttaacccactatatactgcgcgtgaacttgagcatcagttaaatgactcaggtgcagaagtgctcgttattatcgagaactttgcaagtgtttaccaaagcattttgggtaaaactccagtgaagcatgtagttgttgcttctgtcggagatatgctaggaacactgaaaggtactttggtgaactttgttttacgtaaagtccgtaaacaaattccagcttggaatattcctgggcatgttaaatttaacagtgcattaaataaagaaaatccaagcaattataaacgcccgactttaactttaagtgatactgccgtgcttcaatataccggtggtacaacgggtgtttcaaaaggtgctgagctgactcaccgcaatttggttgccaatcttttacagtgtgatggtattttccaaagcaaattcggtgcaaacgatggtgctaaaggcgatcgtattgtttgtgcattaccgctttaccatatttttgcgttcatggtttgtgcgatgtacggtatgtacaaaggacaggcaaatatcttaattccgaacccgcgtgacttaccggctgtgattaaggaattacggaaatatcaaccttctttcttccctgcagtaaatacattatttaatgccttggtgaataatgaagagttcaagcaacttgaccatagcaacttaaaaatggcgatgggcggtggtatggcagttctgccatctacagcagaagcttggaagaaaattactggtaccaccattattgaaggttatggcttatcagaaacttcaccagttgcaactgcaaatccacctgcatctactgaatttagtggcaccattggtattccattaccgttaactgaggttgcaattttagatgatgacggaaaagaagtacctttgggtgaacaaggggagatctcaattcgtggtcctcaagtcatgaaaggctattggaaccgtccagatgagactgctaaagtcatgacagcagatggtttcttccgtaccggtgacattggcgtaatggatagccgtggatacgtcaaaattgtagaccgtaaaaaagatatgattttggtttctggctttaacgtttacccaagtgaaattgaagaagtgattgctaaacatccaaaagtattggaagttgctgcaattggtgttccagatgaaaaatcaggtgaagtgccaaaactctttattgtgaaaaaagatccaagcttaactacagaagaagttttgaactttgctaaagaaaacttaacaggctataaacgccctcgttatgttgagtttatggatgaattaccaaaatcaaatgtaggcaaaattttacgtaaagatttacgtaagcctgcgtaa

SEQ ID NO: 43387 - DNA, 384 bp, Acinetobacter baumannii
atgcaacaacctgatcaaaaagaattgttcgaggtcttagaaaagcaaaagaagaaccagcttcaggtagatcgtatattcaaaattgtattaccgatcgtcgcttttttactgagtgtaatttgtgcgaattttaattggcaatctacactgggtaccttcgtgatcttaacagtgacctttattgctgtgggtgtcaaaagacttcctttgtggcactggctcattgtgattaccatatattgtcttgtagataattacctcagttatggtcaacttgatgtaactcacttacgtctacaactcggtaccatgttagtttttgttggtatggtcggaattggtcgtccttatgtagatcgttggtttatgaaaaaccattaa

SEQ ID NO: 43388 - DNA, 399 bp, Acinetobacter baumannii
atgcacggcatcagcagcattatctatattattttagtggcatgtttgctgccatacgcatttaccgtgattgcaaaatttaccggtggttttcagcccgtcgataatcagaacccaagagactttcttgctaatacaaagggtatcgctgctcgggcaaatgcagtacaacaaaacagttttgaaagtttacctttatttttaacagctattttgatggctgaatatatggtggttcctgaatactttattttaagattgggctgggcctatattattttacgcgtgatttatggcatttgttacttaagtaattgggctactttacgctctatcgtctggtttttatcattgttatgcccaatattcttgttgatcgtgacaattaagttgacttga

SEQ ID NO: 43389 - DNA, 528 bp, Acinetobacter baumannii
atgagttacagcaatatcccagcaggtaaagatgcaccaaatgacatctatgtcatcattgaaattcctgcaaatgcagcgccaattaaatatgaaattgacaaagattctgatgcattgtttgtagaccgtttcatgggtacagcaatgttctatccagcaaactacggttatgtaccaaatactttgtctgaagatggtgacccattagacgtacttgttgtaactccacatcctgttgctgctggttctgtaattcgttgccgtccagtgggcaaattaaacatggaagatgacggtggtatcgacgcgaaattaatcgctgttccacacgaaaaattatctccactttacaaagacgttcaggaatatacagatcttcctccgttattgattagccaagttgagcatttcttcagccactataaagatttagaaccaggcaaatgggtgaaaatcagcggttgggaaggtgctgacgttgctaaagcggaagtattgaaagcaatcgaagctgctaaaaaataa

SEQ ID NO: 43390 - DNA, 1317 bp, Acinetobacter baumannii
atgctaaaagcacaaaaacttacattagcagttctcatttctgcggcaataatttcctcagctcaggcaagcgagcaaagtgaggcaaaaggatttgttgaagatgcgaacggttctattctcttccgtacaggttatctaactcgtgacaaaaaacagggcgcgaaagataccagctcagttgctcaatcagcaattgtaagtatcgaatctggctttacccctggtatcgtcggtttcggtgtaggcgttgttggtgacggatcatttaaaattggcgaaaacaaaaacgctggaaaccaaatgattccaaaacacaacgatggttcagcttacgaccactgggctcgtggtggtggcagcgttaaggcacgtttctcgaatacaacagtacgttacggtactcaagtactcgacttaccagtccttgcaagtaatacaggacgtatggttcctgaatacttcacaggtactttattaactagccatgaaatcaagaaccttgaggttgttgctggtaaatttactaaagaccaaatgtctgaccaaatcaataccgatgcggatgcttctggcagaggtcttgaccgtgcaattgtttggggtgctaaatataagtttaatgataacttaaatgcatcttattatggcttagacagcaaaaatgctcttgaacgccattatgctaatgttaactttaaacaacctttagcaaatgacagttcattaacttatgattttagtggataccatactaagtttgatgcaaatgcacacacttattcagcaactggaactgtagcaccaaattatgctgcggatggtatagctggcgaagaaaagaccaataatatttgggctatttcaggaacttatgcgactggtccacatagtgtgatgttagcatatcaacaaaacactggtaatgttggttacgactatggccaaaatgctgatggtttccaaagtatttatttgccaaactcttatatgtctgatttcatcggtaaccacgagaaatctgctcaaattcaatacaatgttgattttggcaagttaggcgtattacctggtttaaactggaccactgcatttgtatatggttgggacatcaaggttagaaatgtaactgatgatgctcaagaacgcgaattctttaaccaagtgaaatacacagttcaaagtggttttgctaaagatgcaagccttcgtattcgtaactcttactaccgtgcaagtgatgcttaccaaggcgcttacatcggtgataccaatgaatggcgtattttcttagatattcctgtgaaattattctaa

SEQ ID NO: 43391 - DNA, 813 bp, Acinetobacter baumannii
atgatgaagtttgcacttaaagcagtaacattcggcgtactcacggcaggttcaaccatggttatggctgaagatgctccatctttttacggcatcactgcaactggtagtgtggccgctactacagattatcgcttccgtggtattacgcagtcttcaaacaacccagctattcaaggtggcttcactttctctcataagtcaggtgcttatgttgcgctttgggggtcaagcgtagactttaatacacctggtgtttcaactgaaactgatatctcgttaggttataccaacaccttaaaactgtcagatacacttgcaccgacttatgatgttggtgtgatccgttatggttacattggctctgactcaaaattcactaatccatacaatggtgacactggttttgactttaccgagttttacggaaaattaacgtttgcagattctttatttaaaggtgatgcccttagtgtcggcgtgaattattctaatgattactggggccactctgacgagttctggtattttaacgtgggttattcggcaccaattgctgacaccggatttactggacttgcttcagttggttataacaagcttaaaaacaaagattctttacttgtagttgcaggtggaccaggtgaagatgatagctatattgattataaagtcggcgtaaactataacatcttgggtattgttgctgagctagatgttgtcggtacagatattagtacttctggcatgactgatgctcagaaaaaaccttatgacacaggtttagtgtttagtttaactaaaacattctaa

SEQ ID NO: 43392 - DNA, 879 bp, Acinetobacter baumannii
atgaaattaaacggcattattggctaccctgttactcccttttctgatgacaacaccatcaatcttcctgttctaaaacaaatgctggatttgcttattgaaaatggctgcgacgcgattgcacctttaggcagtacaggtgaaagcgcttatctcgaatgggatgaatggtgcttagtcgcgaaaacttcaattgaaagcattaataagcgcgtacctgtcattattgggatttcagaactcaccactgatcaagccatcaaaaaagcccaaatcgcgcaaagctatggtgcagatgcacttatggtgattcctgtatcttattggaagctaacagaccaagagatttttgaatattaccaagcaattgctcaagcaacgtctttacctattatggtgtacaacaaccctgcaaccagtggtgttgatatgtctcctgaattaatggtgcgcatgtttaacaacattgcaaatattatgatggtaaaagaaagcagcggcgatattcagcgcatgcataaaatttatgagctatcaaaaggtgaacttccgttttataacggctgtaaccctctagctttagaagctttatgcgcaggagcaagcggttggtgtacagcagcacccaatctgttaggtcaacgacctcaacagctcattgaacatgtaaaaaatggtgaattggaacaggcccagaagtcattttatcagcaacttcctctactacgctttattgtaaagggtggtctgcctaaaacgattaaagctggtttacaactaaaaggtgtcgctgcgggtacaccacgcaagccgttgaccaaagccacggatattgagcttaaccagttaaaacaactactttctgaaatagaaaactaa

SEQ ID NO: 43393 - DNA, 777 bp, Acinetobacter baumannii
atgaagactgcttctgtaaataaacacgacttgatgcaacacgcacagcaagacatgcaaaagtggattagcgacttagatttaacagaccgtcaaaagcttgcactgacttgccgtattttattcgatcatgggcatgacgctggtttagcgggtcaaattacatgccgtagtgaaaataaagaaacctttattactcaacgtttcggtttaggttttgatgaaattactgcttcaaacttgcttgaggtgaatcaggacttagaacccatcaatcaagaaggcatggcaaacccagccaaccgtttccacacatggatttataaagaacacccagaggtgaactgtattatccatacgcatcctacctatgtagcggccctgtcgatgctacagattccgcttatgatttcccaaatggacgtctgcgcactttacgaagactgctcatttgtaagccattggccgggagttcctgtaggtaatgaagaaggtattttgatttcttctgctctgggtaaaaaccgcgctgttttgttgtctcaccacggtcaactggtcacaggaaaaaccattgaggaagcatgtaacttggctcttttaattgaacgcgcagctcaactgcaacttttagccatgtctgccggacaaatccagcctatcccccacgctttggcagcagaagcccatgattgggtgtctaccgataaacgcaacaaagtgaactttgcttactacgcacgtaaagctttgaaaaaacattctgactgtatttaa

SEQ ID NO: 43394 - DNA, 1413 bp, Acinetobacter baumannii
atgctaagaccttggcaaatacatttccgcattgatgaaagagaagaaaaatcggtttttctaaaactgaccaacttgattagtcaggaaattttgagtggccgtttagtacagggcactatgctgccggggtctcgcagcctgtcaaaagaattaggaattaatcgaaaaacggtacaagcagtttatgaagaattggaggcacaaggttggcttgtgactcggcctcgaaaaggcacatttgtggcagatgttttaccggaaaaaaaaactcaaatagagccaagagctgatcgaaaagttagtgataaaccaataattcaacaagttgctcagcggccccataacgatggtgtgccagatccgaggcttattccctatgaattattctcgagggcctatcggcacgcactcattaaaattactcaaaaccagtacatgggatatggtgacccacgtggtatggctgaactaaggcaggctttaaaacaaatgttgtcgatggaacgtttcatgaatgttgcggaagatgagatttgtattgtacgtggtagccagatgggaatttttcttgcctctcgagcattacccaatcggcagggcgttattgtcgttgaagagctgtattacccatctgctgttaaagcgttccaatcaaatggctttcaagtggtttctgtcaaattagatgatcaaggtattgttattgaagatctcgaacggattttaaaagaacactcggttgcagcaatttatacaacgccacatcatcagtaccctacaaccgttaccatgacaatgagccgccgtcttcaactcttagagctttcaaaaaaatgggggttttacattattgaagatgactatgaccacgaattccactatgacagtcggcctatgccacccttagcaagtttgccccattctgagttggttattcatgtaggttcattgtctaaagtttttgcacccggtattcggttaggttacatcgtggcagctccaaccatcattcaaactattactgaagatattttattgattgatcggcagggcaataatattacagaactcgctttagcagatttaatgcaacgaggggagatcaagcgtcatattcgtaaaatgaaaaagatttatcagttacgtcgagaccatgcgttagctgagtttcaaagagtttttgctgaaagtattgagatacaaccgcctgcgggtggaatggctttgtgggtaaaatttcagaaatcatttactcaagatcagctcataaagctaaaagaactcaacattgatacagagcagaagtttaaacagaaagaatgtgctaatcattgtattcgctttggttttgcagctttatcagagaaagaaatcacctctctaattgagaccttaaatgaagctctttaa

SEQ ID NO: 43395 - DNA, 465 bp, Acinetobacter baumannii
atgaatccttgtccatgtgggtatgcatttaatcaagatagccgttgtcagtgttctccagaaagcattaagcgctatcaaaaccgcatatcggggccgttactcgaccgtatcgatttacatattgatgtaccgccattaaaagctcaagaactgcaagacccaacgcctgcagaagattctacaactgtgcgacaacgtgtgatttatgcttatgaacaacaaatgcaaagacagggttgtttgaatcaggcgctctcaccaaaacaactggaacaacatgccgttctcgatagtacttcacagcgaatgattgaaatggctcagcaacgtttaaatttatctgctcgtgcttatcatcgcgttttacgggttgctcgtactattgccgatttggctcaaagtgaggtcattcaaagtcctcatcttacagaagcactctcttatcgaggtaatcattcttaa

SEQ ID NO: 43396 - DNA, 366 bp, Acinetobacter baumannii
atgaatacatcatcagtacaatctatagataataaaatagttttagcaaaggcctttttcaatacgggtaaagaattcaattttactcaaactcaacttgccgctattttgggaatatctgagccaacaataaatagattaagaacacaacttgaaatagatcctgcatctaagcaaggtgaattagcattattatttattaatctatttatagccttacatgatttaacaggtggtgattcagattggattctgtattttcttaaatcaaaaaatagagtaactggtggagtgccaatggaacagattgaaactgttcgtggtttagtttcagttcttcaatttgttgaagctattcgacgctaa

SEQ ID NO: 43397 - DNA, 192 bp, Acinetobacter baumannii
gtgattactgctattgatacgaaagaaaatattctaacactcgactatgaagcaattcctgtaatgaccatgggctttaaagttacggacccagcattattaaattgtttaactgtaggggagaaggttaacttcgaattaaaaatagagggtgagagtcagattattgttgctgtgaaaaaaagctcataa

SEQ ID NO: 43398 - DNA, 1830 bp, Acinetobacter baumannii
atgaacagtaaaaatattgcacttattggtaacccaaattgtgggaaaacatctctctttaatactttaacaggtactcgtcaaaaagtagctaattatgctggtgttactgttgagcggaaagaaggtttctttaaactaccttctggtgaatcagttcgagttttagatttgcccggcacatacagcttaaagcctacgagtctagatgaagaggtaacaagggctgtatgcttaggtgagcttgagggtgaggttctacctgatatatatgtatgtgtggttgatgccactaatttacatttacatttaagtcttgtgcttgaaataagggcattgaatcgaccaatgcttcttgttttaaatatgatggatgaggtcaaaaagcgtggtatttcgatagatattaataagctatcagaattgttgggtatccctgttattgaggctgttgccgttaaaactaaaggcgtgcaagaactactaaatcaattagatcaaaaaaatctatttgtcactccttatcattctgatctgaatcattttgatcagattaaaaatattactaaacaggtaattttaaaaaatgataacggtgatgcaagaacagctttcttggataaaattttcttacatcctgtacttggtttactcatcctaacgcttaccatgtttgtcatgttccaagccgtttttatctgggcacaaccttttatctcattaattgaaaatgcaattgcttggttaggagatacaattggcccgcttattactcatccattacttagaagtcttattgttgatggggtaatcgctggatcaggtagtgttttggcttatatgccgcagatccttatcttattcttctttattttaattttagaagaatcaggttatttgccacgagcagcattccttttggataaattaatgtccaaagctggtttaagtggacgttcctttattccattattgtctagttttgcctgtgcaattcctggtgtcatggcaacacgaagcattagttcggaaagagatcgtctagcaaccattatgattgcgccattaatgacttgttctgcaagattacctgtttatgctttacttattgcggcattcattccaaacaaattagtttatggttggttgagtctacaaggtttagttctttttggactatatatggctggcattgtttcagcactatgtgtttctttgtttttgaaactagttagaaaagataaaacagaaagtatttttatctttgagttgcctacttaccgattaccagatattcgaaacgttgcattaggactttatgatcgagctacgatctttttaaaaagggttggcggcattatcgtagcattatctatattgctttgggtattggttacgttccctcaacctcctgagcatgccacaatgcctgctatcaactatagtttagctggacaacttggacacattattcagcctatatttgcacctattggctttacttgggaaatctgtattgcattaattcctgctatggctgcaagggaagttgtcattgctgctttaggtgtaatttatgccatgtctggagatgaagatactgtaactcaaacattgttgagtcaaatctctggtcctgatggttggggactagctacagggatgtcattattagtttggtacattttcgcaccacattgtcttgcaacattagcgaccattcgtcgtgaaactggtagctggaaacagcctgttattatggcgacttacttatttgggcttgcatatttctttgccttcattacatatcagcttattagtagactttaa

SEQ ID NO: 43399 - DNA, 261 bp, Acinetobacter baumannii
atgaatttattccaagttaaaccaaacgaatttgtcaaaattgttgacctaaaaaaaggtaaccaatatttagataaaaatgatccagttctagaacgacttgaattgttaggtttcagaattggtgaaactttacaagttctagctaagggacttttcggtggtgatccagtattggttcaaattgaaacttctcgatttgcgttaagaaagaatgaagctgaacgaatttttgtagagattgtttcaaatgaacagtaa

SEQ ID NO: 43400 - DNA, 1317 bp, Acinetobacter baumannii
atgactatgggcacatcaatgagtggttgcggttttaataaagaaagttcttgtgaagacactaagcaaaatcaaaatgaatcagaagcaaattctggtaacagtaaagatttaactactgaagaaagtaaaagttcttgttgtggtaatgaagaagtaccacaacaatctaagccagatgaaaaagattcttgtgctagtactcagccatgttctacgcagtcaaactcatgttgcggcccaaattcgataagttcacctgagacagttaatgataatgagggtgtagcgactttcatcagtgactataacatccctaaaatggattgttccgcagaggaacaaatggttcggatgactttatcttctttggtaaatgttaagaggctagtttttgatttgccgaatcgaaacctaaaagttatacataatggtgaaagcaatgaaatcactgcaaaacttgaagctcttgggtttggagcaaaattaaataaaactgaagcctatgtaaataaagagcatgcaaaagaaatcagtacgtttctgattcctaaaatggattgctctgctgaggagcaaatggttcgtatggcattgtctccagtgagtgaggtcaaaggactaacatttgatttacctaatcggaaattaaaagtttttcataatgatggtcttaatgaaattactagcaaacttgaagcacttggttttggagccaaacttgagagtaccgctgcctctgtgggtgaaatgcctgaaaaagcagatacgtctgaacaagcaaaagttttaaaaattcttttagcgattaatgctgcacttttcgttattgaatttattagtggcctaattgctgcatctacagggttaatcgcagactctcttgatatgtttgcagatgctgctgtttatgggattgcactttatgctgtaggtaaagctgcaaagtatcaagttaaagccgcgcattttgcgggttggattcaattatttctcgcaataactgtaattgtcgatgtaattagacgttttatattaggtagtgagcctgaatctttattaatgattgtaatcggcttttttgcactaattgcgaatgttgcctgtctttatctaatttctggacataaagatggtggagcacatatgaaagcaagttggattttctccgctaatgatgtgattgtgaatctaggtgtaattattgctggcttccttgtggctttgacaggttccgcatatccagatcttgttataggaataattgtttcacttttcgtacttaacggtgctcgaaaaattttggcattgaaataa

SEQ ID NO: 43401 - DNA, 393 bp, Acinetobacter baumannii
atgtttatgaagataggagaactctctgaaaaaacgtcgtgctcagtactgacaatacggttttatgaaaaagaaggtttaatcccgcaacctgatcgaactcaaggtaactatagactatatactgaagattacattgatcggttgaaattcattgtgaactgtcgttctttgaatatgaatttaactgaaatcaaaaaattattaaattataaggatctacctaatctaaattgttctgatgtgaatgagcttatcgattcacatattaacgatgtagaggaaaatatacgaaaccagcaaaaactcatacagcagctattagaaataagaaagacttgcgatgggttatgtacagtagataagtgtggtgtgttgaaaaaattagcttga

SEQ ID NO: 43402 - DNA, 126 bp, Acinetobacter baumannii
atggctaaacgctttagtcctgaatttaaacagcaaacaatagattatgcgctttcaaattcacatgagtctgtagctgcaatcgccccaaaattagaggtgggttggctattcaacattagataa

SEQ ID NO: 43403 - DNA, 1380 bp, Acinetobacter baumannii
atgatgaattcaatgctttatagaaacctaaaaggaattgagctatatgattattactcccctttaacgaagaaagtccaatatttccatattgaatcagttccttactttttttaccccaataataagccttgttttgaagctaattgttatataattaataaaattagtcgatcttcgggaaaaattaatcatgaaactctcaagatttacagtaatcacatcagccatcttatccgctacatatatataaacaatattcaatcatttacagatttaaataacgaaagtttttcaaactttattaaatttttgcaatttgaaaaaaataattccaataagactttcttaagaactaataatcaagttatttctattggaaggcaatgtttagattttcttcagtttgtaggtgagttatataatcttgaaaacttcattggcgaatctgaagcatatagtattttagtaaaaataaagaagcacttaagaaaaaatagattttcatgttcactttcacattcttcttttccactcccatctaataagcaaaaaagatatccaatctcaaacgatgtagcatctaaaatttataaacatgttacacagaatccaaatataggtttacgaatcagaaatacatgcttgattgactctttagaacaaactggtgctcgaagacaagaaatcttacttattagagttgaagatgttcgattggcccttcaaagcgagttaatctgtccaatgttacagctaaggactctaaaaactagaaaagaattgtttcgtgttattcctgtacctaaaacctatcttcaaaatttaagtctctatataagaagaataagaaaaaaaataattgagaaaacaatcggattaaataatgatcatggttatgttttcatctctcactctacaggaaaaccattaagcccagatacgttcactacttatatgcataaatgggcgagcgaaataaatcttaatggacaagcttttgctcacttatatagacatagatttatcactgaaaaatttaagtgcttgattttagagcatcaaataaacaatcccgatacatttcgtcaactactaataaatactcataaatttcagcaaattatacaacaatggacaggccatacttcacttgaatctctaaatgtctacattaacttggcttattcagatctttcaaatattgatcagacaattgaaaatgttatatcgaaagtagatcttgctttaattactgaaaaaattaatattcttactgaatttataaatagctcagatttatcaagtgaagaaaaagtatttgaaattactttctctctacaagcattagcatcagatttgaagcatataaaaaaatag

SEQ ID NO: 43404 - DNA, 504 bp, Acinetobacter baumannii
atgaaaagtaaatttatcaaatatgaaacttcaatttacgctgaaatagacttgttgaaagatatcatcgccaacactcaaaattacatttcaaaccaacaagttatcaaagctctagaaactcaaaactctttttccagatatgaaaatatcgatttaaaaattatttctatgtcattaaatactcataaattctattgtaatacttttttattaaatggatataattcattaaatgaattaagaataaaatgcttagattcacttaatgaaattttaaaaaattcaactgccaattcaagtacaaataaaattgataaattagaatctagaatagatgagctgatgaaacataacttactgctcactagaattatctatgatatgaaatattcacttgaaggcttaagtctaaaatctaacgatccaaaattcaaagctgaaattaaattcaaactttctaattatgaaaaaatattatctttttcgagagaaaatatatga

SEQ ID NO: 43405 - DNA, 2310 bp, Acinetobacter baumannii
atgcaaaaactagatacaatagacaacttaattgatcagattcttaaagaagaaaaagatattaattctatgaatttagaagagctgaaaaatttaaggaacttagtaaaaagcgaagataaaattataaattgtatagtggaaaaggccttagtgcctttaactaatatgaattcgagtccccttaatgaaccttattggtttgttaatcatacaaaatttgaggataatacttggtatataaaactaggtaaaaatactaagattatagatttctctaaaataatgttatcagataatatctttctcactgaagacaatgaattacttaacacgtttaaaacttggatactgattcagggatgtcctaagtacaataaaggtttaaacctaaccaatataacaatatctcaatcagttaataaagttctcttactaatagacaatattataactaattcagaaaagatcaatttaatcgaaaggaaggcatatgctttagattcagatttcttcaaggacattctgataaatatttgtcgaaatggtgcaataaatgccacttataattcaatagttaattttgaaaaatttctcagcgagagaataaaagatataaaaaacgaagaattagaagattttgaatcaaattttccattagttacagaaaactacgatataaataatttaaaatttagtttagatcaaattagaaaagccagatactggttgtttaaaaataatgcatatacatcaaagaataattattcaatacttccaatttttgattttaacaaactagataacaaaacttatctccatgcaaaaaatatctatataaaaaaaatgacggaattaagtcttttttctggtacaactgatacagagtaccctttaataccttgtagaaataattcagaaatatctagcacttctaaaaccattttttcatatgtcgatgtaattaaaaagctcatatatgtcaatgctttcgatttctgttccccagtgaattccaagtcactagcagagttatcaggcaactcaatctccaaccagattaatttacttgaaattggtcggtataagtctatcccttcgaaagttatattgaattctattaaaaatggatttgatttcatttttaagtatatggatattatccttgaaagtatattttctgcatcttgcatcggaagtcggccctatcaacatggcctaaaatacaataactggaaaatcttaaaagagagtaaatggaaatcccaaatatcccccgatttactcaaattgggcataaaatactggaatattaaagattctgaaaaagattgtttcaaacttagaagaaaaaacttaggattttgcgatctctacaatgtcctaatgggttctatacaaatcgttattggtgccatcacagctcgtcggcagagtgagcttatggaacttcatccgaccaattgtttagtgcctgcaaacattgacccctcgaaaaataagcacattgaatttgaactgatcttcgataataggaaaagtggtgtcggtggtcttgtgtctatacgagaatctcttagtagaccaattccaaattcgattgctacaattatttataaattacaaaaaatcaatgaacgaatactcagtcttaataatatgggaatctcggatttatcattgattaacaactatagcagccaccaaaataaatttttaaaaattacagctaaatcgtataacatgcaccttaatgcattttgtgactacttcgaaacccctacacttccttctaattctaacattactaagcgttactatataaggcaacatcagttaagacgtttttttgcattactatttttctggtcaaaaagttatgatggattagatactctacgacacttcttaggtcacacaaatcctgaacacctttataattatataactgaaagtacaactggcgaagtattgtctggtgtaaaggctcaagcattagttgaacaaattagtggatcgagtcaagcaaaagaattcacccaaaatattgagtatctatccccaattttagaaaaatattttggtgtaagagaatttgaggttctatctgaaagtgatattttcaaactatatggctcagatgaaatttcaagccatctcaaaaactattcagtagttgaacaacaaattttatatcttattgacaaccatatcattgacttagagcctgaatttttttcagtcagaaattatgatggcgaaatagttagggactttaatttaatccttcgaattaaggatgaaatataa

SEQ ID NO: 43406 - DNA, 2310 bp, Acinetobacter baumannii
atgagattctctaagctaaaaaactatgagcttgatgaaattttaagttcaagttttcaacaacattggaaaaatactatcgaaaaagagaagtttttgagattcgatgtagtattcaatatttatagatctttcattgatataactgagcatgaaaaaaataaaccttttgatttaaaagatattgaatgcattgattctcacttcaaaatgcttattggttttatgtattgtgagtttgatggtaaatatgaaacaaaatataaatatgcaaaaatatttttaaaactttttattgaaattttcaaagaaaaatttacgctacacaattcaaaatttagttcaatatgtgaatctaaaaatgtagaggactatattaaacattatttacattcaagaaaaaatttagagaaaatcgaatactataaaggatggtatgtaaattgttctgaaggccatacactttatattaatttaaccaatatatataaaagctacggcaaaatatacacatcatcgctcctagatgttctaaaaataataacttctaaaagatcaaagccctcatccaatgtaattataataaacatcctaaaattatataaatattttattgaattatatccaaatctagaggatctaaatagaagcttaaattctttcaatgcatacgataccatgttaaaaatttacaatttaagcctaatagataccaagataaaagaagaatcattttatagttttcatgaaaggtggagaggtctaattttcatttactatgaaatggtcgatttatttttctttgaaaagccagttaataaaatacaaactccaatattcaaatctaatgataatttaccaaaaacaaatttaaggaaatcaaaaaatcaagacttagtaagcattaaactaattactgacataccaatatcatattcagactctcaagcaaaagaacttatttttgaaaaaatattaattgacataacctatatagttaattgttctaaaaagttatgtgaagaaaatttaaatagattcaataattacattgaaaactcaaaaaaaggggaaataatattaacacatgaaggaaataaaacgccaagtggaccaaataacattttaaatgtttgtgcgacatataataaattcccttttatacaccctgatattaaaatttatatatcctttttagggtattcaaagaatacaagaaaaattgagaaaataattcctctttccaactgtgaaagcttatatccatttctgatattactcattaatgaacacccatgtattactccatcggcacttattaattggaaattatattccaaagggaaaaatacaggcttatataaagttggagacatatgggttacaactatgttcaaaaaaagaaagggggctgatctagcagaacaaacaataattttgaatgataaatcaaaaaaaataattgaagatattataaaaatgacaagtattgcacgctcctatttaaaatcaataaatgataataattacgaatatatgttacttaaatcatcttcactatttactaaaccagaaaaatttaatgatatttcaaacctaaatgaagactatctatttgaaaaacttaaatatcactttctaaatgaacaattactgtcggaaaaaattaattttaatgaagcagagaaattagtaaaaacttttacattaacaaaattcagagctagttgtggtgtaagagtctacttaaacacaacctcggttgaaagaatgagtgaagctctaggtcatgaaaaatttgaacccagattaatggttaggtatttgcctaccccattatggacatactttactaatagatggataaggatatttcagaatgcattaatctttgaagcaatgaaggattccaaatatttgtatcaggcaattgatcttacacctgctcaactagatctgtttcttactaatcattctttaggcgaaattcctaaattcttagaaaaaaatattaatcttgacaatcctcaaaatgattatgtaggagttttcccaatttcagtagctttactacaatggcttatagcgattgtgaattttgtagatttctctagtggcattgataaggtgaataaaattgcattcaagtggtatcaagctgcgctattggttctttcctacttggaagtttgtaactcagaaaatcaccatctacatataaatcaagatgttttggaaatgtatgaaattgcaaagaaaaatcctctagattttaaaattattgcgaggactctcgaatgcaaaaactag

SEQ ID NO: 43407 - DNA, 924 bp, Acinetobacter baumannii
atgtctttttctaaaatttatactcggggacttttaggattacatgcgcctctcattgaggttgaggtgcatgtgagtcaaggattaccctctctaactattgtaggcttagcggaagcagcagttagggaaagtaaggatagggttcgctcagctattattaacagtggatttcaatttccaactaagcggctgaccattaaccttgctcctgcagatttgcccaaagatggttcacggctagatttaccaattgctttaggcatcttaattgcctctggtcaacttccggaaaactgcacagaagactttgaatttattggagagttagctctagacggtcatgtaagacctgtgtcaggcgccttaactttagcaatggcatgccagcaagctcagcataaaatcgttttacccgtcgataatagccaagatattagccatttacctaatcttgagtgttatccggttaatcatttaaaagaggtgtgcgagcactttttaggcacacaaaagctagctcatgcgcagccaagtgcccattcaaatgaaatgccctataaatttgatcttgcagatgttaaaggtcagctacgcccacggcgtgcactagaaattgctgccgctgggggacattccctgctctttaaaggaccaccaggcacaggtaaaactttattggcctcacgcctgccttccattttaccgccactttctactcaagaaactcttgaagttgcaagtatttattctatttcaaatacaccacatacttttgggcagcgtccatttcgcgcgccccaccatacagcatcagcaattgcactggttgggggcggttcacaccctaaaccaggtgaaattactttatctcatttaggtgttctatttttagatgaactggagttttccctaactctataa

SEQ ID NO: 43408 - DNA, 228 bp, Acinetobacter baumannii
atgctagaaactctcttacaggccatcttggaacaaattgacgagcctaaaaaagatttagaaaaaaacttacgtgcattattaaatgaaactgtcgagaaattagatcttgtctctaaacaagaaatcgaaagacaaaaaacagcccttcatttagccaatcaacgtttagaagcgctacaaaaacaagtcagtctattagaagaagctttaaagaataaaaaataa

SEQ ID NO: 43409 - DNA, 339 bp, Acinetobacter baumannii
atgaagcttgtaactgcaattgtaaaaccgtttaaattggatgatgtgcgtgaagcactctctgacattggtgtacaagggattaccgtaactgaagttaaaggttttggtcgtcaaaaaggacatacagaactttaccgcggcgctgagtatgtggttgatttcttacctaaagtaaaaatcgaaattgcgattagtgatgaaatggtcgacgcggtaattgagtcaattacacgtgtggcaagcactggaaaaatcggcgacggtaagatttttgtgactaatctggaacaagtcatccgtatccgtacaggtgaaacaggaccagatgctgtctaa

SEQ ID NO: 43410 - DNA, 1398 bp, Acinetobacter baumannii
atgaaaaaaatgcttatggcgctgagtttaactggcgcacttttgggtggtactgccgcttgggcagaagagactgtaacaacaccaacatctgaggttacagcaacatcaacgtctgaagctcctgcaacaattgcagcggcaccagcagctgaggaaactccggccgctccgacaccgactgcaaaactcgataccggtgatacatcttggattttaatttcaacagctttggttctgttgatgacaattccaggcttggcgttattttacggtggtatggtccgtaagaaaaatgtcttaagcactatgatgtttagcctttctgctgcaattttagtaagtttgctctgggtgattgcaggttattcaatcgcgttctctggcacaggtgcatactttggtgatttgtctaaagcaatgctcaatggtgtcgcttttgatgcactaagtggaacaattcctgaaagcctctttgttattttccaaatgactttcgccatcattactgtcgcaattttgagtggctcgattgctgaccgtatgaaatattcagctttcatggcattcattgcaatttgggtacttgtggtttatgcgccaattactcactgggtgtgggcggcagatggctggttatttaaagcaggtgcattagatttcgctggcggtacggttgtacatattaactccggtgttgcaggcctagttgctgcttatatgcttggtaaacgtattggtcttggccgtgaatctatggcgccacataacttaactttaactgtaatcggtgcaagtttactttgggtgggttggttcggctttaacggtggtagtgctttaggtgctggtgcccgtgcaagtatggcaattttagtgactcaagttgctgccgctgctgctgcgttctcttggttggtagtagaacgtatgatccgtggtaaagcttctgtattgggcggtgcgtctggagctgttgctggtttagttgtgattacgcctgcagctggttttgttggtgtaggcggagctttagtaatgggccttattggtggcgtagtctgcttctggggtattacggcacttaaacgcttacttaaagccgatgatgctttggatgcgtttggtttacacgctgtaggtggtattgtcggtgcgattttaactggcgtattttatagtgatgaaatcattaaggcagccaacgtagcattagcaccaacattcgctggtcagttgtgggtacaagtcgaaggtgtgcttgcgacaatggtttacagtggtatcgcaactttcattattcttaaagtgattgaccttattattggacttcgtgttaattccgatgatgaacgtatgggactggacttaagccaacatggcgaacgtattgaataa

SEQ ID NO: 43411 - DNA, 459 bp, Acinetobacter baumannii
atgcattgtccattttgcaacgccgcagatagtaaagtcatcgattcgcgtctagccgcagaaggctgtcagattcgtcgacgtcgtgagtgtgtaagttgcggtgaacgttttaccacttttgaaagctatgaagtggtgatgccccgtgtgatcaaatcgaatggaaaaaatgaaccgttcgatgaggcgaagctacgtcgttcgcttatgcatgccttacaaaaacgtccagtgacacaagagcagatcgagacggttctaagcgatattcagttgcaaattcgccgtttgggtgagcgtgatgtgaaatccagaacgattggtgagattgtcatgcaatctttatttgcacttgaccacgttgcctatgttcgttttgcttcggtttatcaagactttcaggatgttgaagcgtttcgccgccaaattgagcaaatgcaacaacgtgagcactaa

SEQ ID NO: 43412 - DNA, 1086 bp, Acinetobacter baumannii
atgtctgagttaaaacaagatcaatactggatgcagcaagccattgaacttgccaaacgaggactctattcgaccaagcctaatccaaatgttggttgtgtcatcgtcaaagataatcaggtgattggtgaaggttttcaccctaaagctggtcagccccatgcggaagtttttgcattacgtcaggcaggcgaacaggcacaaggcgcaactgcttatgtgacgcttgagccgtgtgctcattatgggcgaacccctccgtgtgctgaggcgctggttaaggcgcaagttaaaaaagtggtagtggcatgtcctgatccaaacccgcttgttgcaggtaaaggtgttcagatattaaaaaatgccggtattgaagtagaaatcggtatttgtgaagatttggcagctcaacttaatcaaggctttttaaaagcgatgtctacaggcatgccatatgtacgactaaaagttgcttctagtcttgatgggcgtactgcaatggcatcaggtgagtcgaagtggattacaggttctgcggcccgtcaagatgtccaacattggcgtgccatttcaggcgccgtgattacaggcattgatactgtaattgccgatgactgccaacttaatgtacgttcacttcataatattgatatcgagacggttgttcagccaaaacgagtaattctagatcggagaggacgtttaccgctcaccgctaaaattttagaaaatcctgaaactgtcatggtgatggggccatatcgtcaggaactcgctgacttaggcgtgatacaattagaaattcagcctttaaaaacactattacagaccttatctaagcaataccaaatttatgatgtgctgatcgaggctggcgcgacattatcaagtgcctttttgcaagaaggcttgattgatgaaatgatcagttatgtggctccaactttattggggcaacgtgcaagagccatgttcaatgcagattttgaatatatggcacagcaacttcgttttaaacttcttgatgtaacacaacttgatcaagatatacgcttaaggttaatccctacgcaagagaaagtatga

SEQ ID NO: 43413 - DNA, 1293 bp, Acinetobacter baumannii
atgaattcagagccttcggtataccacaaacgtcgtcatgcagcccgcacgacagacgaatatcttttccatcagcttgtcccgtatttgggcaacaagcgccgattgctccacttaattttagaagctctggaaatcacagggacgctgaatagcaagaaaaagaaccccccgatttttgccgatttctttgccggcagtggtgtcgtgtctcgtttagcgcgtcaaaatggttaccgtgtgattgcaaatgactgggaaccttatagccatgcgttaaatcatgcaattttagcgtgtgtcgatgcacctgcttttaaagagttgggtggctatcagaaagcgattgattatttaaaccgcttacccgaggttaaaggctgggtaacacacaatctttgccctcgtaatgatgatgtctatgatccatctcgtgaccgtttattctttaaacgtcgcaatggtatgcgcatcgatgcgattcgccagcaaattgcaacatggcaagcgcagggtgcaattaatgatgtagaaatgagtgctttgcttgcgccattactctattcagcaagttttgtgagtaataccagtggtgtatttaaaagcttccaccaagggtggggcggacgtacacaaacagcgttagagcggattgaatcactactttggttaacaccgagccgtttctgtgagattggcgaccgtaaacgccccgctgctgaaatgtggtgtgtagatgctcagcatctagcaaatcaaatgagcggttttgaagtagatgtagcctatcttgacccaccttataatcagcatgcttacagtagtaactatcacgttttaaatgcattgacgttatgggatcaagtcgacctacctccacccgacactaagggttataagagtggtattgaccgtgcatggcgtaaagagcgtccaagcccatacaactcttctaaacatgcaaaagatgcgtatgaaaaattactttcaaccatcaatgcacgttatattctgaccagttattcgaccgatggtaacattgagccgaaagatttactgatggccaatctagaacgtggaaaagtgactttacttactcaagatgttccacgttatcgcgtaagtaaacaacgtcagtcagagcgtgcacgtgtgcttgagtttattgtgattacagatactcatgccaaaccagggccaccgttacgtcaattgttaggccagctttaccacttcgccgagctaggtggtgtagatacatcaggtaatagtacacagctcgcactttggtaa

SEQ ID NO: 43414 - DNA, 660 bp, Acinetobacter baumannii
atgtttacaggcattattgaaagtttaggtaaagtagaaagcctgcaaagtgtaggtggcgatgtgcgtttgcgtattcaaaccgatttggatatgtctgacgtacatttgggtgactcaattgcaactaacgggatctgcctcacagtgattgagtggggtgataactggtatgcggctgatgtatctcgtgaaagtttaaaccgcacgactttgggtaactggaaagttggtcaacgtgtcaatgtggaaaaagccatgttaccgactacccgctttggtggacacattgtaagtggtcacgttgatggtgtaggtgaaattaccctagtacgtgaagatgctcgctcaatttattttgaagtgactgcgcctgtagaacttgccaaatatttggcagagaagggttcagtaactgtagatggtattagcttaacgattaatcatttacgcggtaatattttaagtttaaacctaatcccgcacacagcagagcgtactaatattggaacgtggcaagtgggtagcaaggtcaaccttgaagttgatgttttagcacgttatatcgaacgcttattactaggtgataaagctgctgaacagaaaaccgaatcaaatattagtatggctttcttagctgaaaatggttttttaaaataa

SEQ ID NO: 43415 - DNA, 267 bp, Acinetobacter baumannii
atgcgtcattatcagcgagaactagcagaaaatggtttaacccaaagtatgtctcgtaaaggaaattgcttagataatgcatcaatggagagtttctttggaatacttaaatcagaatgtttctacggtgaaaaatttaattctgttgaggaattagagaaaactgtgaaagaatacattcattattacaaccatgaaagaatcaaggttaaattaaaaggactaagccctgtacaatacagaactcagtccttagaagctgcttaa

SEQ ID NO: 43416 - DNA, 219 bp, Acinetobacter baumannii
atggacattccgcatcagatttcaacgcaaattgagcaacttaatcaaggcgagcaatggaccttctcagcacaagaactttatatgagtcataacgactttaattcgctttcaatcttactcacacgagcatcggaaaaaggcgaattttcaattactcgcactcagcataataaaccttgggtcggcacacactcagttactctcaccaagcattaa

SEQ ID NO: 43417 - DNA, 636 bp, Acinetobacter baumannii
gtggcattaaatgtcgggcaagattttaaaaaaagatggttaaatgcgcctgaagctgtccgtcatgcttatcaacaggatttggctcgtatttgtgatttattagagcctcagacccctattcaactgtgggttttaaatgacgaaaaagcgcagttagaatcacaacaaaatattgaaaaggcatatgctgacttaaaggcagagttaatcgagcaagcgcgaattcgtcgccagcttgctttagaaaaagctcttgcagataagcgcgcaaaagaagcagcttatgctgctgaattacaagctgacgaagttcgtaaatttagtgaacaaacggaagctttgcaggctttacgcagtcatttagaacaagaatttgctgaacatactgcacgttatcagaaaaaccctgaaacgccagcaattgattattcttctggtacaaaacttagcattactgacgatcaaatcttatctgagcttgaaagtgtacgtgttcgcctagaacttgaagctgaaagcttaattgaacaggcagtaacagttttccgtgccaaactgcatgctgcggctcaagaagaaattgaatatattttaaagaattctaacttttctgatgaaaaaatagaaaagtaa

SEQ ID NO: 43418 - DNA, 408 bp, Acinetobacter baumannii
atggctaaagttagcttttatctgtttgaaaccagtgaagaacggcaagtcgatagtgcttgccgtttatgtcgaaaaattttactgaagcattcacaaatctggtggtattgcccagatgtgcagttacaacaaacacttgatgaaaaattgtggagctttgatccgaccagctttattgcccatggcgttgatcaggtagatgcagcagtatgtatttcggctaaacaaccttctgaacaaggttggctggtatttaattttaacaatcatgcacttgaacaagtgaatcattttagccacattatagaaattgttgaaaataatgaagcagccaagcaaattggccgagaaaaatttaaaatgtatcgtcgtttaggtatagaacctcgaacctttaaattataa

SEQ ID NO: 43419 - DNA, 1449 bp, Acinetobacter baumannii
atgaaatttacaacttatacaacttttcctgaacaaacatctaatgaatctttgtggattttagttgattcagaacagctacaaagcaatctcaatacatatcaaatcaataatctagaaagtattcttacagcaactcaatttaaagccaacttcaatgaaacgttgccattatttggtcaacttagcactcagccccatagccaattacttggtttaggaaaagcagctgaacttcaagcagctaagttagcaaaattggcgcaaaccattatcaagtcggcgcaaaataaatttaagcatatcgcaattgatattgctgcgttacctgtcgaataccattatttatttgcattaagcttaactcaagcagcttatggttatgatgagtttaaatcgaaaaaaaatgaatttgtgttacaacaagttgatttaattagctcacaaaccagccttgacgaaaatcaactcgctttagtacatgccgtacaatctggtcagtcttatgctcgtgacttaggaaaccgaccaggtaatatctgtttccctgaatatctggcagaacaggcgttagctttagctgcagaattcccagacttacttaaagtcactgtcttaaatgagcaacaaatggctgatttaggcatgtatgcatttcttgcagtcagcaaagggtctgagcgtccgggccgtattgtgactcttgaataccaagcacagcttgaacaagctcctgtcgtacttgttggtaaaggcgtaacttttgatacaggcggtatttctttaaaaccagggcttggcatggatgaaatgaagtttgatatgtgtggtgcagcttctgtactcggcacaatccgtgctttatgtgaggcacgtcttccaatccatgttgtgggtgcgattgcagctgcggaaaatatgccttcaggtaaagcaactcgcccaggcgacattgtaacaaccatgagtgggcagaccgttgaaattttaaacactgacgctgaaggccgtttggtcctttgcgacaccttaacgtatatcaaacgtttcaatccggcagttgtgattgatatcgcaacattaactggtgcttgcgtagttgcgttaggtaaagtactgagtggtttattttctccggacgatactttggcagctgaactccaacaagctggtgagcaatcatttgaccgtgtatggcgcatgccagtgattgatgattatcaggaattactggactctccttttgcagacatcgctaacattggtggaccacacggcggcgcaattacagcagcctgtttccttgagcgttttactcgtgactatcgctgggctcatttggatgttgctggaacagcatggttatcaggctcagcaaaaggcgcaactggtcgtccagtaccgttacttatgcaattcttggctaaccgtgtaagtacgaatggctaa

SEQ ID NO: 43420 - DNA, 1101 bp, Acinetobacter baumannii
ttgattattcggcgttatctcgtcaagcaagttgtctctacctcattggtggtcattgcattattgaccttaatcatgatgggtggtcgtctgatcaaatactttggtgtggcggcacaggggcgactagatgccagtatcttgtttagcatcattggatatcgtttacctgaatttctaaccctcattttaccacttgggttttttattggtttaatgttggtgtttggtcgtttatatgttgaccatgaaatggccgtattgaatggtagtggggtaagtcgtcatcagttagcgcgcttacttattccaatgacactggtttacatggtgtgtcagtccgtacttatgctttggatgacgccgtggggacttcgtgaattcgaaaaattaactacaacccaagcagtgcgtacagggtttgacttggtgcgaccaagagagtttatttcttctggaccttatacgatttatgcgggttcattgtcggaagatcgaaaaaaccttaaagatattttcttttatcagcgtgcagccaaagaaggcaagccagatgtcatgattttggcaaaagaggcgactcgtgtagaagttgcaaatgacaccgccaatgtcgttgatctcgttcaaggtcgtcgctatgaaatattcccgggacaaccaaaatatacacaagcagagttccagtcttatcgtctacgtttagaaaatgacaaagatgttaagtttgagagtggcgatgtagaagcactttccacatcaaaactattttctaaagcaaatgatccggtcgtaagaagtgagttgggctggcgcttatttggtccgtttaccattattattgccttgatgctatctgtggcattgtcggaagtaagcccacgacaaggtcgttattatcgtcttattccatctatctttattttcgcgagtttgatcgtactcatgattgcaattaaaactcgtataagtaaaggagaactggatatttgggcttatccagtggctttattggtttatgcaatcgcagctgccttattttcacgtaagcagaaattagggccgaaaatcaagaaacagattaagcgagtgaaattataa

SEQ ID NO: 43421 - DNA, 1071 bp, Acinetobacter baumannii
atgttagcacgtcgaatagtcgccaaatatgtgacgaaaaccactgcgctcgcaatgtttggtaccaccattgttttgtctgttttgcaaatcctgtttacttatctgggtgaattaggtgagctaaaacctgactataatgcatggcaagcttttatctatgtgttatggggtgcccctcgctatctatatgaaattttacctatctcggccttaattggcgctgtgattgggttaggcgctttagcatccaatagtgagctgatcgtgatgcgttcagtcgggattagcttatggcgtattgtaggttgggttatgcgctcagctttgctacttattgttttatcttttgctctaagtgagtgggttgttccctatacaaatgagaaagcgcaaagtgtcaaaagtcatcgatcagttgctgctttaggtgaagtgaaaggctattggtcacgagaagggcaacgttttatttatattgattatgcgaactcacaaggaaatttaagagatattcaggtcgtagactttaacaaagactaccatttacagtctttaatcaatgcagagcaaggaaagtttatccaagatggtcaatggactttacaaaaagccagccagatggacattcttacagatggtaattcgatactaaataatcatgatcagcagtctttaggtttggctctccagcctaaatatgtacacatggtgactttagaccctgaggacttgtctccaagtcagctgattagttttatgcgctatatggacgaatatagccaagtaccgaaaacttaccaattagctttttggcaaaaagtcgcttctccattttcactcattactcttgtattagtggcttgttcttttatttttggtccactacgtcaacagtcgatgggtttccgtttggtgatcgcactcttcattggtttaggcttttattatttacaagacttcttgggctacgcaagtttggtatacgcgccttcaccagcttggtttgtactcatgcctattattttaatgtttggtgccggaagttatttgctttatcgggcccgttaa

SEQ ID NO: 43422 - DNA, 1548 bp, Acinetobacter baumannii
atgacggatgcaactgctggcaagatccctcacgttctggtcattatggatggtgttggacaccgtgaagcgattgaagataatgcttttcttgcagcaaaaaccccgaatttaactgcaatgaaagcaaagcatccaaatagtctcatttctggttctggtgaagatgttggtttacctgatggacaaatgggtaactctgaagttggtcacatgaaccttggcgctggccgagtgttataccaagacttcacacgtattactaaagatattcgtactggtgctttttttgagcacgaagtattggttgatgccgtagaaaaagcaaaagcagcgggtggtgcagttcatattatggggctactttcagaaggtggcgtccattcacatgaagatcatattgtggcgatgtgtgagcttgcattaaaacgcggtgcgaaagtttacttacatgcattccttgatggtcgtgatactcctccacgtagtgctcaaccttcattagaaaaattagacgctttattcgctcaatatgaaggcaagggccgtattgcaaccatgattggtcgctattttgcaatggatcgtgataaccgttggggtcgtgttgagcaggcttaccgtttattaacggaaggtgaagctgttcgtactgcaaatactgcggttgaaggcttagagcttgcatatgctgcaaatgaaaatgatgagtttgtaaaagcaacccgtattggtgagatcgctaaagttcaagatggcgatagtgttgtatttatgaatttccgtgctgaccgtgcccgtgaaattacgcgtgcgtttgttgaaaaagatttcgcaggttttgagcgtaaagttgtaccgaacctttctaaatttgtcatgttgacgcgttatcaggcaagtattgatgcacctgtggcatatatgcctgaagagttaaagaactcgcttggtgaatatttatcttctttaggtaaaacgcaattacgtattgctgaaactgagaaatatgcccatgtgactttcttctttagtggtggtcgtgaagacgaatatccaggtgaaaagcgtattttaattccatcaccaaacgttgcgacatatgacttaaagcctgaaatgagtgcttatgaagtaactgatgaactagtcaaagcaattaactcgggtgagtacgacttacttgttgtgaactatgccaatggtgatatggtcggtcatacaggcgtatttgatgctgcagttaaggccgttgaagcagttgatacatgtttaggccgtgtatacgaagctgtaatggcgaaaaaaggccatatgcttattacggctgaccacggtaatgttgaacaaatgcaagattatgaaagtggtcaggttcatactcagcatacaacagagcttgtgccttttatttatgtgggtccaacccaagcaacgattgcagaaggtggcgtgcttgctgatgttgcaccgaccattctgaacttaatgcagattcctgtgcctgctgaaatgcaaggccgtaatctcattacattgtctgcttaa

SEQ ID NO: 43423 - DNA, 1185 bp, Acinetobacter baumannii
atgctgcaacacaatatatataaagctttttttgttagcgtattgatgtgttgcagccagcttgctttttcagctcctgttgtaaaagaaaaattatcgcctctgcatcctgattccccagaatcagaagaaagttatgcagaagtgcctattgagtctattcaacagtttgtacaaatatatgggatcgtccgtgataactatgtcgatgaaaaatcggacgatgctttatttttacaggcaattaaaggtttagttagtggtctagaccgttactcccgctatttatcagctgaagaataccgtcaactcattcaatatactgaaggggatcttgcttcagttgattttgtactaagccccgaatcacatgttcataaatggatgattcgtgaccttaagacgggttctgactcatataaactaggcttaagaaatggccaaactattttaaagattgataatcaggaacttaaaaatctgacacatgatcaggtgctaggtttgctttatggatcgataggctcgacgcttcaagtacaaacagaagagtcaaatagtccaattagtttagtccgtaataaaaagattgaaaccgatattgagcctgtgatgttgcacaatcaggtgttggtattaaaaattagagtatttcagcaagataccgccaatgagattaagcgtttaattgaagaaaatagttcttcgcgtttaaaagcggtgttaattgatttaagaaataacccaggtggtttgttatctgctgctgttgagtcagccgatttatttttaaatcatggcattattgtctcgacaaaaagtcgttcagaaggcaatcagcaatttcaggctttgccaggtaacgattttcaaaatataaaagttggtattttaattaatcaccgatctgcctcggcagcagaagtttttactgctgcaatgaaagagcatcaacgtgcttgggtcatgggtgaaaaaagttatggaaagggtgttgtgcaaaagcttttccctctaccaagtggggcagcgctacaaatgacagtctcacattactacacaccaaatggtaatatgattgaggggcaaggtattcagcctaaccagacttatcccttacccccagaaatgaaagaagaagtttatctagatcgtgttgccgatctccttctaaaaagaaagtaa

SEQ ID NO: 43424 - DNA, 1422 bp, Acinetobacter baumannii
atggcagaacagcaaccactggttttgcttgtagacgatgaagaagatttgtgcctattgatgcaaatgacacttgcacgaatggggattaaaacacatcttgcttatcgggttgaacaggccaaacaactcttcacacagtttcattacgatgcatgtttaaccgatctaaacttacccgatgggagtgggttagacttagtcaaacatgtctctcaaaattatactaatactcccattgcagttttaactgcatacggcaatatggatattgcaattgcagcattaaaagcaggcgcttttgattttgtaagcaaaccggtcaaccaagtacatctagatcaattattacaaaaagccttgaatcggcaaaaaatagagcatgatgctaccgagaatgcgttagaaaataaattattaatcggccgttctctacccatccagcagctacgtattgcaattaaaaaaattgcgcgctcacaagcacctgtatttgttaccggtgagtctggaacaggtaaagaagtagttgccaatctggttcatcggctgagtaaccgtagtgaaggcccttttattgcgattaactgcggtgctattccaaccgaactgatggaaagtgagttgtttgggcataaaaaagggagctttaccggagcaactcaagataagcaaggcctcattttatcggcacacggtggcagtttatttttagatgaaattgccgaattacctttaagtatgcaggtcaaactgctccgtgcagtacaggaaaaaaagatccgacctgtcggttcagatcaggaaatcgatgttgatttccgtgtgattagtgcaagtcatcaagatttagatttattggttagacagggcaaattccgtcaagatttatttttccgtattcacgttatggacctcatattgccgcctctacgtgaacgtggcgaagatgtccttttgcttgctaatcactttattcagaaaatttgtatggagtgggaaacgccacctaaacaattaacagaagcagccgaaatttatctgctacagcaacactttccgggtaatgttcgcgaattaagaaatatgattgagcgcgcaattaccttaagtgaagatgccaccatagatatatctcatttacatcctgctccactaagagcgaatatttctaatccttttgcttccgctgctcaaagcatacaaaccactgtggcggctcctcaagtcgtaaaaaaattaccaagtgaaggtctagaacgttatttagaaaatattgaaaaagatattttactcaatgcactcaatatgactcattggaatcgtaccttagcagctaaaaaattaggaatgactttccgctctttacgctatcgtctgaaaaaatttggattagatacggagacagaacaggaagtataa

SEQ ID NO: 43425 - DNA, 1569 bp, Acinetobacter baumannii
atgcaatttcccttaaattcatccttgtcccatacgatttttcgtttgggcacttggtatggcttataccgtcttattattgcggttagcctgaatattattttggttttaaccgatgcgcaaactgataacagtttgcagcaacctgccttatattcctacacactactcggctattcgctcttaagtcttgttcagctgttatgctttaaatttattgccactcaaaccacgcgacagcttattttattttttattgttgatattatttgtttgagtttactgactttttctgtgggtgaaccaaatttacaactcagcttactctatgtaattgccatctttacctcggcgattttactcagcgcaagaatgtctttgctgattacattgcttgcggttatcgctgttatttaccaacgatttgtaggtagtctatttgactataacaatctaaatactattagtaatagcgctctcttagctttcttattttttgtggttcacagaattggccaaattgcagtgcagcgctttaaattacttgaagcactcacctttcaccagtcaattgaactctatcaactccaaaatattaaccgttatatcttagaacaaattgaagaaggctatttagttttagatgagaattacgacatcgttgtcagtaatcctgcggcctgttcactcttgggtattccccctcaatttgccaatgaaaaatatcctttagcaaagtggcatgccgatttatttgaaattttaaagtttggtgacttaaaagaaggtgaccgcttcatttttgagtctcggttatcggcatactccatcaacattaaagtgcaacaccttttggtcccacaacaaacgttaaccctgctcattttacaagatgcccaacaaattaatcagcaagctcagcagcttaagcttgctgcgctagggcaactctcagcaagtattgcacatgagatccgcaatcctctcgctgcaatcgtacaagcaaatgagttactgaaagatagcgatccagaacaacaaaatactttgcgtcatatgattggcaaacaaaccaaacgcattgatagtattgttcaagatactttagggcttgctcgtagcgaaagaacacatcctatccagatcgatgtaaaacacttcatagatacattgctcgaagaagatttatttgacgttaaacattcaattcaacttaaaatttcggatagttctttaaaatttttatttgatgaaaaacaattaagacaagtcatgattaatctggtgagaaatgctttacggcataatgcccccgactcaccgtacattacgatcaacattcattcacagacaaataaaatttatattgatgtgatcgattacggtgaaggtgtttcaaaacgtgatatatctcaattatttaaaccattttttagtaccgaaattaatggaactggtttaggattatatttgtctcatagtttttgtgaggcgaaccatgcaaagctcacctatgtagagcaaaaacaaggggcatgcttcagaatagaatgcccaataatatattga

SEQ ID NO: 43426 - DNA, 636 bp, Acinetobacter baumannii
ttgattacagttttagttgtcgatgaccatgaactggtacgtacgggtatttgccgtatgttagaagatcatgccgatgttgaggtaattggacaagccgaatcgggcgaagaagcaattgctatcgttcgccaacaacatccgcaagtcgtactgctggatgtcaacatgccaggcatcggtggcgtagaaacaacccgtcgtttattacagacggctccagagacgaaagtcattgctgtaagcggccttgccgaagagccttacccatctttattattaaaagccggtgcaaaaggctatatcactaaaggcgcgccaattgccgaaatggttcgtgcaattaataaggtcatgcaaggcggtaaatattttagtgcagatattgccgaacaactcgcgagctcatatttatccgacactcaacaatccccttttgattcgttatcggaacgggaaatgcaagttgcaatgatggtcgtcaactgtattagtgcccaagaaattgccgataaactttttgtaagtgtgaaaactgtaaatacttaccgttatcgtatttttgaaaagttaggaattgatagtgatgtaaaactaacacatcttgcgattcgttacggtttgatcaagccataa

SEQ ID NO: 43427 - DNA, 1008 bp, Acinetobacter baumannii
atgtctattttgcttagtttgagttcaacaagctttgcagaactcgtcaataacccgtcttcagggagtactggtactgcaagtttaaattggtctgcagcggatgctagtcaacttttaaatgatgaagatgatgaaccgactccgcaaggttcaacttctgtaaccacaactttgcgtggcagtaatgcgccaagagttattacttctgcccctaaagttgctccaatccgtgatactgtgggttataacgcccagccaagtgtcagtgcacgtgctgcacttgtaatggatgcgcaaacaggtgaggtactttatagtaaaaataccaacgcatcagtgccgatcgcttctattaccaaattgatgacggcagttgtaacggcagatgcccgtttaaacatgtctgaagaaattacacttgagcaaattgattttgctggggctggcgggaaaaactcaagctcaacacttcgtgttggcgataaaatgaaccgcgcagaagttcttctgtttgctctgatgaagtcagaaaatccggcagcagcagctctagcgcgtacttatccgggtggccgtgctgcattcgtggcggcaatgaatgctaaagcgcgtgctttaggtatgaatgcaactcattattatgagtcaactggtttagatccgcgtaatgtatcttctgcgcgtgacttaggaattttggcgagtacagcatctcaatatggtttgattcgtcagttctcaaccacaccgacctatgactttaatttaggttatcgtgttcttaaatcaaataatacaaatgctttagtccgtaatggtggttggaatatcaacttatctaagactggttatattaatgaagcaggccgttgtgtggttatgcatactactgtgaactcacgtccagcagtgattgtattattgggtgaaccaagtacacaggcacgtaataatgatgcaactaacttgcttggttggttgagcaatttgccaaaacgtatttaa

SEQ ID NO: 43428 - DNA, 1140 bp, Acinetobacter baumannii
atgtctaatgccaatcgttatactggtcttgtagatcgttatcgtgaccgtttgccagtttcggcaactactcgtgctatctctttgggtgaaggcaacacccctctcattaaacttgagaatattccacgtattattggcaaagacgttgaaatttatgtgaaatacgagggtttaaacccgactggttcatttaaagaccgtggtatgaccatggctgtaaccaaagcggttgaagaagcctctaaagcaattatctgtgcatctacaggtaacacttctgctgctgctgctgcctatgctgcacgcgcaggtatcaaagcgtttgttttgattccagaaggcaaaattgcgatgggtaaaatggcgcaagccatgatgtatggtgcgatcactatgcaaatccgtggtaacttcgatgatggtatgcgtcttgtaaaagaagtggctgatcaagcacctgtaacgattgtaaactcaatcaacccttaccgtttgcaaggtcaaaaaactattgcttatgaaatcgttgaagctttaggccgtgcacctgattaccactgcttaccagttggtaacgcaggtaatattacagctcactggatgggttataccgaagcagtagctaaccaacctgctgaccaatttgaacaagttgtttatgacgctgcgactgatcaattcaccggtccaaaaccagaaggcttaccaacaatggtaggttatcaagcttctggcgcagctcctttcttacgtggtgctccagtagaaaaaccggaaacagttgcaactgcaattcgtattggtaacccacaaagctggaaccatgcaaaagctgtagtacgcgactctaaaggttggtttgatgaacttcaagacagcgaaattttagaagctcaacgcttactttctatgtatgaaggtgtatttgttgagccagcatctgctgcttctattggcggtgcgatccgtgatattaaagcgggtaaaattgctgaaggttctgtcattgtatgtacagtaacgggtaatggcttgaaagaccctgatacagcaattaaacaatgtgctgatgcagtgatgttgtcaattgatgcaacaatggaccaagtaaaagattcgattttatctaatatgtaa

SEQ ID NO: 43429 - DNA, 1302 bp, Acinetobacter baumannii
gtgaaaccagttcgcctggcaatactcggtctaggtaccgtaggtggaggagcccttaaactactacaagaaaatgccgctgaaattaaacgtcgcaccggtcgagaaattcaaattacccacgttggaacacgtcgtcctcgtccagatctcgaattggaagggattaaacaaagcgcagacttacttgatatcgttcgtcaacccgatgtggatgtggttgtagaagttatgggtggtattcatcctgcttacgaaatcattatggaagcgatcaaacacggcaaacaagtcgtgactgcaaacaaagcattactcgctgaacatggtaatgaactatttaaagcagcagaagataatgctgtacaaattgcttatgaagcagctgttgcgggtggcatcccaattattaaagtaatccgtgaaggccttgcggcaaaccatatcgaatggcttgcaggcattattaatggcacaggtaactttattttgactgaaatgcgtgaaaaaggccgcgcatttgatgatgtattaaaagaagctcaagaactcggttatgcagaagcggacccaacttttgacgttgaaggtattgacgctgcacacaagcttacaattttagcgtcttgtgcgtttggtattcctttgcaattcgataaagtctataccgaaggtatcagcaaaattactgcacaagatgtgaagtatgctgaggagcttggtttccgtattaaacatctaggcattgcccgccgtgctgaaaagggtattgaactacgtgttcacccaacacttattccagatgagcagcttattgcgaatgtaaacggcgttaaaaatgctgttttagttcaagccaacgcagtaggtccaacgctttattacggtgctggtgctggtgcaggcccaacagcttctgcggttgttgccgatgtaattgatatcgttcgtgatatttcttatacagaagatggcgcaggcacaattcctcaactggcttttgaagcattaacaaatatgccaattttaagccgtgaagaaatgaccacaggttattacatccgcttaaatgctgaagatcagactggtgtacttgcagatgtgacgaccatcttaagccgtgccggaatcagtattgatgccatcatgcaacaatctcgcttaaaagacctcattccaattgtgattttgaccgatccaatcgttgaatccaaaatggatgacgctcttgcgcaaattcaagcattacctgcaattcgtggcgaaatcgtaagaattcgtttagaatcgctcgatagttaa

SEQ ID NO: 43430 - DNA, 816 bp, Acinetobacter baumannii
atgtcctttacccgatctcaaatttttcttgcctgtgctttggcttctagcctgttgttcagtgcttgttctaaagaaaacaaaccacaaaaagaagatgcgctcacagcgaccgcacctgctacaggggaagcttcaaccattattgaacgcaatgctaaacagcgtttaattgaaactttgcaaaaacaatttaagaatgcaaatatcaacgtcaagattttagatattaagcctaccgaagttcctaatttatattgggttaaccttgaaggaatgacgtcggtttatacaacaagtgatggtaaatacctgattcaaggcgatgtcatccgtttaggcggtaaagaacttcataatatcggcgatagccttcaagcctcagaaaacaaaaagcatcttgctgctttaaaaaatgaagacttaattgtttatccagctaaaggcggtaaagctaaacatgtgatttatgtgtttaccgatgcaagctgtccttactgccataaattacatgagcatttagctgagattaatgagaaaggcattgaggttcgttacattgcatggccacgcggcgaacagtttatgccaactatggaagcggtttggtgtagtgcagaccgtaaaggtgcatttgaccaagctgtacagggcattagtattccacctgctcaatgtaaaaaccctgttcgcgaacaataccaacttggtctaaacatgggcgtaaatggtacaccagctatttataatgttgatggtgagtacttgggtggctacttaacaccagatgaattgattaaacgattggataaataa

SEQ ID NO: 43431 - DNA, 921 bp, Acinetobacter baumannii
atgataaataaaaaaccgcgtattccgagccctgttcaaattcctgaacatttaagctttttacaaggttttcgcgactatctggttgcacaaacagtcagtccgcatacgcgcaatgcctatttatccgacctgatccaatgtagtgaacttcataaaaaaaatagattgccagattggacgagcgatgacatttctgatgtcctcattgaacttaccaaagtagggaaaagcccacgctcaattgcccgttgcttatctgccctacgtcagttttataaatttctacgtgaacagaaattacgaagtgataatcctgtagctactcaccattcaccaaaaattggccgagctttacctaaagacttgtctgaagaagatgtagaagcgctcattcaggcgccagatattacaacggcgttgggcttacgtgaccgagcaatgtttgaagtcctttacgcttgtggtttacgtgtctctgaattactaaatttacgcctcgaacttattaatttaaaacaaggttacctgcgtattacgggtaaaggtaacaaagaacgtttagtgcctttaggccaatatgcctgcgattgggtggaacgctatttaaacgaggcacgtccacaactttataaaagttcaactgactatttatttttaacccagcacggtggaattatgagccgtcagaacttttggtatgccataaagcgttatgcgctacaggccaatattcaagctgaactttcacctcacaccttacgtcacgcctttgcaacacacttgctcaatcacggggcggacttacgcgtagtacaaatgttattgggtcatagtgatttatcaaccacgcaaatctatacgcatgtagcacaagtcagaatgcaacaattgcatgaaaaacatcaccctaggggttaa

SEQ ID NO: 43432 - DNA, 300 bp, Acinetobacter baumannii
atgtatactagtaaaaaaggtttaggatcggatgcggtgcgtttatcagcgttgaaagtgaagcaagcggcgaccatcaccaaagtgaatcggatagaagtagagtccgagcagcaagatttggtcgcaattcgtttggaaagtctgggttttgtaccaggcacgcgagtggaagtgattaccaagggtgtttttggtggtgatccgatcttaatccaaattggctttactcgtttcgctttacgtaaagcagaagcggaaaaaatcgaaattcaggtagaagaaggagtacccgcatga

SEQ ID NO: 43433 - DNA, 1854 bp, Acinetobacter baumannii
atgagtgatgcgttacgtattgcccttgtgggaaaccctaactgtggtaaaacctctctttttaaccatttaactggaactagacaaaaagtcgccaactatgccggtgtaacggtcgagcgtaaagttggtcattttcagttaccttcaggccgttcagttcgagtgctcgatttgccgggtacatacagtcttaatgcgaccagtccggatgaagcaattactcgtgatgtctgtttaggaaaaatagcggaagaggggcaacaagacgcttttttatgtgtggttgatgccactaacttaaaattgcatttaggccttgtactcgaaatgatcgagttgggtcgcccaattttactagtactgaatatgatggatgaagcgcgtcgtcgtggcatccagattaatactcaaaagttatctcaacgtttgggcgtaccagtcgttgaaacagtagctgtccgtaatgcgggtattgaaaatttattacatgctcttgatcaagaaaaatacagtgtgccacaaactgaactgagtggcttaactgggacccatcatcaaaaaatcgatatgatttttaaagatgttgttcattatgttgatcaggaagacaagcgtactgattttctcgatcgaattttcttacatccagtcttaggtctacttagtcttgccatcatgatgtttattgtgttccaagcagtttttgcatgggcagcaccttttatggatggtattgaaggcttcttcggctggctgggtgaagtagtcggttctgtgattacacagccactactgcatagtctggtggttgacggaattatcgcgggtgcaggtggcgtagttgttttcttgccacaaattctaattttgttcttcttcattttagtattagaagaatcgggctatttaccgcgtgcagcatttttacttgataaattaatgtttcaagccggtttaagtggtcgtgctttcattccgttactttcaagctttgcttgtgcagtaccgggaattatggcaacgcgtagtattagtgaccctcgtgaccgttttacaacgattatggttgcgccactaatgacttgttcggcacgtttacccgtatatgccttgctaattgctgcatttattccagagaaaatggtctggggtattttcaacctacaaggactggtgctgttcggtctgtatatggctgggattgtgagtgcactgtgtgtttcattcttcatgaaatttttccaaaaagataagtctcaacacgctttactgctagagctgccgagttatcgtttccctgatttaaaaagtgtgggaatcggtttgttagatcgtgcgaagattttcttgaagcgtgtcggcggcattatttttgcgctttctattttgctctggttcttgtgtactttcccacaaccaccagaaggggcgacattgcctgctatagattacagcttcgcaggtatgcttggacaccttatccagcctttattcgctccagttggttttaactggcaaatctgtattgccttaatcccggctatggcagctcgtgaagttgtagtggctgcattaggtaccgtatatgccttgtcggcaactgatgaagatgcggtagcacaaggtttgtctcatttgattagtgcagatggtacagggtggtcgttggcaacaggtttatcgcttttagtgtggttcatttatgcgccgcattgtttggcaacattggcaacagtacgtcgtgaaacaggttcatggaaacatgttgcagctatgactgcatatctgtttggtttagcttattttgcatcgtttgttacctatcaaattgcttcccactactggggttag

SEQ ID NO: 43434 - DNA, 252 bp, Acinetobacter baumannii
atgcttcaatatctgattattgcggttttagtgatttggagtgctgttgttgtttttaagaaagtatttccaaaaacagcaaactcggccttttcagcactatccgttttttgtgaaaagcagggttgggcaactttagcaaaatggctgaaaccaaaaatgacttttggttgtgcaggtggctgtggctgctcaagtgaagataaaccaactaatacagttcaagaaattaaaccagttaaatggcaataa

SEQ ID NO: 43435 - DNA, 1347 bp, Acinetobacter baumannii
atgttaatacaacgtggtggattaaaagttgtagcaggcttgggaatatcaggcgtttctgctgtaaatttcctgcatgaacaaggctaccaagttgctgtaacggattcccgccccacacctcccggacacgatcagattccggctggcgttaaaaccagttttggtcagcttgatcaagaattattattacaagcagaagagattattttaagcccaggccttgcaccgcaattaccggaaattcaggcagctattgctaagggtatttctgtggtgggcgatatccagttattgcgccgtgccactgatgtgccgattgtagcgattacaggttccaatgcaaaaagtactgtaacaactttaattggcttaatggctaaggatgcaggaaagaaagttgcagtaggcggcaatcttggtcgaccagcgttagatttacttaaagatcaaccagagttactggtccttgagttatcaagctttcagttagaaaccacctctcacttaaacgctgaggtagctgtggttctcaatatgagtgaagaccatttagaccgtcatggaaatatgctggggtatcaccaagcaaaacatcgtattttccaaggcgctaaaaaagttgtatttaaccgagacgatgctttaagccgcccacttgttcctgatacgacaccaatgcaaagctttggtttaaacgcaccggatttaaatcaatatggcgttttaagagatgccgacggtacgctttggcttgctcgtggtttacagcggttaattaaaagctcagatttatatattcaaggtatgcacaacgtagccaatgctttagcgtgtttagcattgggggaggcaattggtttacctatggagtcaatgcttgaaactttaaaacaatttaaaggattagagcaccgctgtgagtacgttaaaaccgtgcatgatgtccgttattataatgactctaaaggtaccaatgttggtgctacacttgcagctattgatggcttaggcgctgccattgaagtgaaaaaaggtaaggttgcacttattttaggtggacagggcaaaggacaagattttggtccattacgttcttctatcgaaaaatatgccaaagttgtggtattgattggtgaagatgcgcctgccatcgaacaagccattcaaggcgcaactaaaattttacatgcagcaacgcttaaagaagctgtcgagctgtgtcaacgtgaaacacaagctgaagatgtggtattgctatcaccagcatgtgcaagttttgatatgtttaaaagttataatgaccgtggtcagcagtttgttgcctgcgtcaattcgttggtttaa

SEQ ID NO: 43436 - DNA, 1197 bp, Acinetobacter baumannii
atggcaggcttagctcagaccacaatccagaaaatcaatcattggtatgaacggatattgccgaaatggccagcggaagtgacgccacgtaatgtcttgattttctgtgtggttgcattgttatgtatcggttcggtgatggtcgcatctgcttccatgccttatgctgaatatatgcatgaaaacccatttcactatgtgattcgtcatgggatctcaatcgttgctgctggcgtggtggcttatttaacctatcgaatatcactcaatacatggtttaaaaatacctttccactgtggttattaactatggttttgttacttgcggctttggctgtaggttcggaagttaacggttccacacgttggattaaaattggtggttttaccttgcagccaacagaggttgccaaggttatgatggccatctttaccgcagattacgtagtacgccgtgccaaagaagtccgtacccactggaaaggcttacttcgtttaagtggcgttatggcaattacggtaggtttaattattgccgagcctgacttgggtgcgacggttgttattgtcatgatgatggtcggagtgttctttttagcgggtgcgcctccaacacaattcttaatcatgcttggtgcaattgtcacgggtattgtgtttttaattttatttgaaccttaccgtttccaacgtttgatttcgtttactgacccttgggcggacccattaggggtaggttatcagttatcaaatgcgttaatggcttttggtcgtggtgagtggtttggtacaggcttggggcatagtgttcaaaagctttcctatttaccagaagcgcatactgactttatgttggctgtgttaggtgaagaatttggtttctttggtatttcgattgtcattggcttatctttcttgatgctggcatgttgtatcaaaatcggccaccgtgccttgaaacatcattatcttcgcgcaggctatttggcttacggtattagtattattttcttactccagattttggtaaatgcgggtatgaacatgggcttaatgccaaccaaaggtttaactctgccatttattagttatggtggtacgtctttaatgatgtgtgcagctatgattagcttgatcttaaagattgatgcttcaactcaagaagtgaaccctgagagggaagaatcaaacttctaa

SEQ ID NO: 43437 - DNA, 933 bp, Acinetobacter baumannii
gtgacggttaagaattctccggccgagcttagttcggctcttgcgaatcagcgaaacgatgttccactgattcgctactcaggtcggtttgcgccctcgccaaccggccctttacatttcggatcactcattactgctgttgccagttactgcgatgccagagcccatcaaggtcgatggttagtgcgtgttgaagacaccgatatcccccgcatctaccccggtagtgaagaccatatactcgcatcacttgaagcttttcagttcgatccggatgccgagatcatttttcaaaaagaccgcctagatatttacgaaagtgtattagaccaacttaaaaaagagggtctggtttacgcctgtcaatgtacccgtaaaatgctcggttcaaacgctatctatgcaggcacatgccgagatttgcagctcgacttccaacatcaagccattcgggtaaaagttcaagatcagccaatctgtttcgatgaccgcctacaagggcttcattgttctaatctagagcatgaccttggtgattttgtccttaaacgccgtgatggaattattaactaccagcttgctgtcgtcgtagatgattacctacaagacattactcacgttgtgcgaggcgcagacctgttagataacactgagcgtcaaatctggcttggtcagctcctcggctaccctaagctgagttacatgcatcttccgctcgccatgaacgaccaagggcaaaaactttcaaagcaaaaccttgcccatgcacttgatttaactaaagctcctgaattactacaacaagccatacaagccttaggtcaaccaaatgttgatttagatcgccccgaagtgatgctcaagcaggcggtaacccagtggaatgtagatttgattcctcatgggcaacagctttgcggaacatatctataa

SEQ ID NO: 43438 - DNA, 537 bp, Acinetobacter baumannii
atggcgaatgacaaccacaaccaagttttggatgaacatacagaagttgtagtagaaggtgataaagcttctgcaaaacgtgcacgtaaagtgaaacctaaaacttctgacgtaggctcaactgcaagtttatttggtattgcaccttatcaacctaagaaaaatgaagagtacatgtcggaaggacagctcgagcatttccgacaaattctgcaagcatggaaagctgaattaatgtctgaagttgatcgtactttaaatacgatgcaagatgaatcaactgcattgccagacgtaaatgaccgtgctacccaagaagaagaatttgcaattgaattacgtacacgtgaccgtgaacgtaaattaattcgtaaaatcgaacaatctcttgaagcgattaaaaacgaagactacggtttctgtgaaacttgtggtatcgaaatcggcttacgtcgtttagaagcacgtccaactgcaacgttatgtattgactgcaaaactttggcagaaattaaagagaagcaaaataacggttaa

SEQ ID NO: 43439 - DNA, 813 bp, Acinetobacter baumannii
gtgacttttcaagtctcaacactttcacaaaaaaatcatgtcatcatacaaattaccgatacacatttattggagtatccacagctagaatttgtggggatgaatcctgaagaaagtttccacgccattattcaacagatactaaaacaacatcccgaagctgatgcgattattcataccggtgacctcgcacaagccccaacacctattacctacaaacgttatatcaattttatgcaaaccttgggtctgccttttttccagaccctcggcaatcatgacaatgtcgaccactttcctctacataacgaaaaccatcaacaacctgtagttgtcggtttaggaaactggcgtgtgattatgctaaatagcgcggtaaagggaaaagtagatggtcatctgtcttcggaacaattagaaaatttagcgaatttgcttgaacaatttgcagatcatcctgttttgctggcttgtcatcaccatccatttgccatgaagtcaaaatggattgaccaccataagcttcaaaactcaaatgcacttttagataccttaagtccatttcaaaatgtgaaggccctagtctgcggacatgttcatcaagattcccttaatatctggcaaggtatcgagtttttttctacgccttccacaagtgtacagtttaagccgtttagtaatgattttgcactcgaccaaaatgcaccgggttatcgttacattcgtctgaacaacgatggtagttttgaaacaaaagtgtttcgccttgaaaatttcaaaacccgtataaacactgatatttcaggttattag

SEQ ID NO: 43440 - DNA, 627 bp, Acinetobacter baumannii
atgagtattgtcgagcgcccaagttatacatctaaagatgtcgaagtaacatcacgtgaacctctgttcagtggttttattcaagttgaaaaagtcagccttcgacatcgtctatttaatcaatctgaatatactcctgtattgcagcgcgaacttgtgcatcggcctgaagcggctggcgttctactctacaatgatcaaaaacaacagtttgccctgattgaacagtttcgtgttggtgctttagatgactcccattcgccatggcaactcgaaattatcgcaggtgtattagatggcaatgaatcaccagaaagttgcattcgacgcgagagccttgaagaatcaggttgcgaagttcaggatttagaacatctatttagtttttacccatcagctggcgcctgttcagagttatttcatctgtatgttgccgaaaccaatttacctgctgtaggcggtgtttttggggtagataatgagggtgaaaatattcagctgcatttgtttagttatagtgaaattcaaacactactcaacagcggacgtttaagaaatgcccctgttattatggcattacaatggctggctcaacacagcaaaacgataataaatccgaagaggtag

SEQ ID NO: 43441 - DNA, 1878 bp, Acinetobacter baumannii
atgaaccaattaacgaatctctcttctgctgaaatttcagcacaacatgaacaagatgcaaaagacttaacccgcatcttacccgcttctaaaaaagtttatattgaaggctctcgccctgatattcaggttccaatgcgagaaatttctttaaccgataccccaactggccttggtggtgagcacaacccacctattatggtatatgacacttcaggtgtttatactgacccgaatgttcaaattgatttaaataaaggtttaccttcagttcgtcaaaaatggattgaagagcgtaacgatactgacgttctttctggcctaacttcaaagtttggacaggagcgtttaaaagatattcgtactgctgatattcgctttgcacatattcaaaacccacgccgtgctaaagcaggcaaaaatgtcactcaaatgcactatgccaagcaaggtattatcacgcctgaaatggaatatattgcaattcgtgaaaatcagcgtcaacgcgaagctgtagatatgcgtcagcacccaggtcaaaactttggtgcgaaaaacttaaaagaaattacacctgagtttgttcgccaagaagttgccgaaggccgcgctattattcctgccaacattaaccacccagaacttgaaccaatgattattggccgtaacttcttggttaagattaatgccaatattggtaactcggcgcttggttcttcaattgatgaagaagttgcgaaaatgacatgggcaacccgttggggcgctgacaccattatggacttgtctacaggtaagaacattcatgaaacacgtgaatggattattcgtaactcaccagttccaatcggtaccgtaccaatttatcaagcacttgaaaaagttgatggtgttgccgagaacttgacttgggaaatctttaaagacacgcttattgaacaagctgaacaaggtgttgactacttcactattcacgcaggtgttctacttcgttatgtgccacttacagcaaaccgtttaacaggtattgtgtctcgtggtggttcaatcatggcgcagtggtgtctcgctcatcatgaagagaacttcttatacacacacttcgatgaaatctgtgaaatcatgaaagcctatgacgtgtcatttagcttaggcgatggcttacgtccgggttgtattcaagatgcaaatgacgaagcgcagttcagtgaacttaaaacactgggtgagctgactcaccgtgcatgggaacatgatgttcaggtcatgatcgaaggtccgggtcacgtaccaatgcacatgattaaagagaacatggacttgcagttagaagtgtgtaaagaagctccattctatacgcttggacctttaaccacagatatcgctccgggttatgaccacattacttctgctattggtgcagccatgattgggtggtatggcacagcaatgctttgctatgtgacacctaaagaacatttaggtttgccaaacaagaaagatgtgaaagacggaattattacctacaagattgcagcacacgcagccgatcttgccaaaggtcatccgggtgcacaggttcgtgataatgccttgtctaaagcacgtttcgaattccgttgggacgaccagttcaacctaagcctagaccccgatacagcacgcagcatgcatgacgagactttaccaaaagaagcgcataaatctgctcacttttgctcaatgtgtggtccaaaattctgttcgatgaaaatcacccagaatgttcgtgactatgccaacaatctcaccaatagcgattcagaggttgaagaaggcctcaaagcgatgaaagaggtttatcaagagcaaggacaaaaactgtatcataaagtgtaa

SEQ ID NO: 43442 - DNA, 1065 bp, Acinetobacter baumannii
atgatgagtatgtgcggcgcactacttttaactggctgtaataaaacatcacagcaagatcaaactgtatctaaagagcaaaaatcaactgcgcaaaaggccaccgaacagcgagacagtagctgcttacaaattatggtagccatgcacacgattaatcagaacagtaaaatagaagacttaaatcaaattaatgaaaagcttaaaacctgtgttccttcgttaaaaaatgaggaacagcttaagctaattgaagcttcaactgccatgtatcagcgttttctaaaacaagcctacactgataaaacagctagagcttttgaagcatttggctatgctgttttagaacagaaacaagaccttaaaaaggtgattcaaagtcagaaaaagctcttcgcccaactgagcccgcgtgatcaatatttacttcaacatgaaggccaagcctatattgacctactctatcaaggtgaaggtatgtttacttatcgccgccagccaaactacttagttgatgttttttctaaggctttacctgctgaccagaaagaatttttatctcgtatggcaaaagacaatcaagacattttctataatgatggtgcattggctgtttcatggaaagagctcactgaacgtgctttattttgggaaaagtttattcaaaaatatccaaagagttattttattaatgatgccaaattactctttaatgaatatcgatacttcattttctttggtctagataacacacctgtgtcaaatgaatatgccccgaacacatggtttgaccctgatgcacttcagcaaatccgctttttatcaactcagagccaatcaagtttagcgaaacctgcccaacaatttcttaaatttattgccacccctgtcgatgagcgtaataagcaatttaaaatagatttaactgatgaaaatgggcaaaagaaatctacctatcagattgtgcatgaacaacttgaacagttattaaaatttgattcgccatggaacacggaagtctatcgtgactgccatatagatgcggtttgtatagatacaaattga

SEQ ID NO: 43443 - DNA, 582 bp, Acinetobacter baumannii
atgaatgataaaacagcaagacagaaaattctcgatgcagcggcaacactgttttataacgatggcattactgcaacaggaattaatacggttacggctaaagcagatgtagctaaaatgtcgctttacaataatttttcttcaaaaggtgaacttgttgatgcctatattgctgcacggcatcaagagtggttagacctttatcaaaagcgtttagaaaaaacaaaaacagcgaaagaagctattttggccgtatttgatgcctatcaagatcatgccgagtttgcttatgaaaagggttttagaggatgtgggctattaaatgctgcggcagagttcccagcgaatagttcaggacgaaatgctgtaagacagcataaagaacaagttgaggcgattgttgccgagcatttaaatcacttattaaaagattcacagcgtgttagctatatcgcctcacaactttcttttttattagaagggtcgatggcaagagctggtttagagggtagtagccgtcaacttcaattagcgagacaaatggcagaagatattttagatcgagaatgccaacatgattag

SEQ ID NO: 43444 - DNA, 906 bp, Acinetobacter baumannii
atgattagccttattaaaaatagtagttatggtggcactattgcaattttagtggcctctttcttatggggaaccacgggcacagccgcagcatttgccccaacactcggaccacttgcaattggcgcggttgctatggggggaggtgggcttttacaggcattgattgcatctcaggccattcgggaacacagacaatttattgggcgaaatatttctattattcttttaggtgttgtggcagttgggatatatcccctagctttttattcttccatgcattatgccggaattacgattggtacggtggtttcaattggttcggctccactcattgcagcagttttagagcgattctttgaccgtaaagttttatctaaaacatggttcctaagttttgtgttgggtgttgtaggggtaagtttgttatctatgggcgaaagccacgcagcacaagagagtacaaatgaatggaataaaatttttggtatttttcttgggctggtagcgggtgcaacctattcactttattcatgggctgcaaaaagattaatagaccgaggtattgcagctaaagctgcaatgggcatgattatgggaggtggggcggtcatcttgcttccaactttattaattacaggtggtgggctactgcaaagttcaacaaatttacttgttgctggctatatgatgcttatccctatgtttttgggttatttgctttttggtttcgggttaaaaactgtaaatgcgagtaaagccaccactttaactttatttgaacctcttgttgcagcgatttttgccattgttttggttggcgaaagtgtctcatggattgggtgggtaggtatgtttttgattttcatttgtattttgatgttatcaaagcctgaaaatacataa

SEQ ID NO: 43445 - DNA, 1347 bp, Acinetobacter baumannii
atgaaaataaaattaatgcttgttgcgggtttatggagttttacatcgtcgagttttgctctagatttagttgaaacttatgagctcgcaaaactaaatgatccgacgtggcaagcgaatcaacaacagtttgaagcagatcagcttaatttaggcttagcaacaggcgctttactaccaacagttacattgtctggaaatattacccgtaatcgacaaacggtaaagcgttcaaattttcccggtgttgatcaggaaggactttccgatgctttggtaagtaatacatcaactaccaaacaggcaactttaactgcccgtcagcctctttttcgtatggatgcatgggaaggttataaacaggttaaaacttctgttgctcttagtgaagttactttaagactgcaaaaacaagatcatgttttgaatgtagctgaagcctattttaatgtactgcgtcagcaggcacttaccgctgcatatttacaagaagaaaaagctttgcttgaacagctcaatatgatgaacgccaagcttaaagaagggttggtagcacgtagtgatgtgagtgaagcaaatgcccagtatcaaaatgccagagccaaccgtattgctaccaatgtgcagcttctattggctcaagagcaactatctgaatatattggtccttatcaagataagcttgctgtattgagaaatgattttatctttcaaaaaccttatccggcacagctcgatgagtggttaggattagcccaacaacaaaatttaaagattcaacaagcacgtttacaaaagcgatatgctgaagatcaacgtcgtgtggaaaaagctgcactttatccacagatagatgcagtggcgagttatggttataccaaacaaacgccagaaacgctgatttcgactgatgggaagtttgatcaggtcggggtagaaatgaactggaacttatttaatggaggccgaacccgaacttctattaaaaaagccagtgtggagttaaataaagcgcaagcccaacttgatgcggccattcgccgtgccaatgttgatgtgaaaagtgcttttatgcaggtagataccgaccgagcaaagcttgaagcaagaaaggcggcaatggactcttcagcacttgtttctcaagcttcaaaagcaagttataacgaaggcttaaaaagtatggtcgatgttttattggcgcagcgtaatgctttttcagcaaaacaggattatcttaatgctcagtatgactatttattaaatgtattacgtttaaaagcggctgtaggtcagctaggagaaaaagatctagttgaattaaatagctggttaacgtatcaataa

SEQ ID NO: 43446 - DNA, 768 bp, Acinetobacter baumannii
atgctcaatcattttatccctgcgccatcatgttggaggcttcctttgagtccgagtaatccggtgttaagccatcatatttcttctcaatttaatgaagatttgcaagatgtgaacacaaagtttatgaccatgggtggcttggtcgaacaacaggttgccaatgcaattcattctttacttgatacagatgcgaacttagcaattgatgttcaatttaaagataatgcagtcaatcaatacgaacgtgatattgatgaagggctgacgctgattttggcacgtcgtcatccggcagcaattgacttgcgtatggtaattgccatgagtaaagccaatactgacctagagcgtattggggatgaagctgcaaaaattgcccgtattgcacaaaatctatgtgaagagggcggttctcctcgtggctacatggaaacacgtcatattggtaaccaagtacgggtcatgattcatgacgcacttgatgcttttgcacgtttagatgcagatcaagcattacgtgtacttttagccgatgctgacattgaccgtgaatatcagtcggcaacgcgtactttaatgacttatatgattgaagacccgcgtcatattgctcgtgtgattaatgtcatgtgggttttacgttctttagagcgtatcggtgatcacgctcgtaatattgctgaacaagtcatttacatggcaaaaggctttgatgcacgtcataccaaaattgaagaaattgaagcaaaagtacacgaaaagtaa

SEQ ID NO: 43447 - DNA, 270 bp, Acinetobacter baumannii
atgagtcgacaagtattttgccgtaaataccaaaaggaaatggaaggattggactttgctccatttccaggtgccaaaggccaagaattttttgaaaatgtttctaagcaagcatggcaagaatggttacagcaccaaactacgctaattaatgaaaagcgtttaaacgtgtttgaaccagaagcgaaaaaattccttgaagagcaacgtgagaagttcttcaataatgatgagagcgttgaaaaagcggaaggctggaaaccagaataa

SEQ ID NO: 43448 - DNA, 1380 bp, Acinetobacter baumannii
atgtggggtggtcgtttttctgaagcgacggatgcttttgtagccgaatttaccgcctctgttcaatttgaccagcgtttttataagcaagacatcgctggttctattgcgcatgctaccatgcttgcgaaagttggcgtactgacagaagcagaacgagacgacattattgaaggtttaagcaccattcgtgcagaaattgaagctggaacttttgaatggcgtatcgatcttgaagatgttcacatgaacattgaatcacgtttgactcaacgtatcggtattacaggtaaaaaacttcacactggccgtagccgtaacgaccaagttgcaactgatatccgtctttatctccgcgatgaaattgacgacattttaggcttattagagcgtttacaaaaaggtttgttgggcttggctgccaaaaatgtaaatactattatgcctggctttacacacttacaaacagctcaaccggtaactttcggccatcacttgttggcatggtttgaaatgttagttcgtgatactgaacgtcttcaagactgccgtaagcgtgttaaccgtatgccacttggttctgcggctctcgctggtacaacttacccgattgatcgtgcttatacagcagagttactaggctttgaagctgtatctgaaaactctcttgatgctgtatctgatcgtgattttgctatcgaatttaatgcagcagcatctttaatcatgatgcatttatcgcgtatgtctgaagaacttattctttggacttctgcacagtttaaattcgtaaatattcctgatcgcttctgtactggttcttcaatcatgccgcagaagaaaaaccctgatgttccagaactcatccgtggtaaatctggccgcgtatttggtgacttaattagcttacttacgcttatgaaaggtcaaccactggcttacaacaaagacaaccaagaagataaagaacctttatttgatgccattgataccgttcgtggttcactcatggcgtttgctgacatgatccctgcattggttccaaatgttgaaatcatgcgtgaagctgctcttcgcggattctctacagcaactgaccttgctgactatttagtgaaaaaaggcgttgcgttccgtgatgcacatgaaattgtaggtaaagctgttgcattaggtgttgctgaagaaaaagatttatctgagttaacacttgagcaattacaacaattctctgacctaattacagcagatgtatttgataaagctttgacactagaagcttcggtaaatgcacgtgatcatattggcggaacttcaccaaaacaggttgaagctgcgattgcacgtgcccataaacgtctagaacagttatacgcttaa

SEQ ID NO: 43449 - DNA, 1140 bp, Acinetobacter baumannii
atgtggtcatggtggctcagtaaaataaaaaagagtatatcacttgccgaagctcaacaaacaaagttgttttctacagcatatcgaaatcaaaattcctcctatttttttacgaaaattgatcgttggcaacatttattagaattaattatcgcaagtaatgttttagctctggttttagctttggctgaagcacagtcttggcatgcattaaacggctcacgtcttttacaatacatcgtttttattaactgggtgattttgtctttttttgccttggttgaacattttcaggatttttttagtcagctacagcaaaaatatgctttagtaattggctttgttatgctgcaagcgatagttgtggtaaccaccataataagcaatttttttcagttcggagttttgaaaaaaacatctgttatagcgcaggactggagcatttattttaccaatgtccctttatatttaagttatggaatattattaggggccttttgtctgcgttatttatatgtacgagaacaatggttacaccaacaatatgcagaattaaatgcccgtattcaggcaatgcaggctcgcatccatcctcattttttatttaatagtttaaataatgtggtgagtttaataacgatagatccagataaagcagaaagtatgttaattagcctgtcacgactgtttagggcgagttttcaagaattaaaattagtgagcttgcatgaagaaattgagcttagtaaacaatatttaatgattgagcaaatacgtttgggcgagcgtttaaaagtcgaatggaaagtggaaattgaacctttgcaattaaaacaggtcactattcctttattgacattacaacctttattagagaatagtatttttcatggggtagagccaatgatgggtaaagcaaccattggggtattggttgaaatattgcaaaatcaggtcagtatagtcattaccaacccttatacacacgatacaataaattcacggaaagggcatggaatcgctcttgaaaatgttaaacagcgcttaaaagcgtattatgggaattcagtgagattccaggtatataagggtgaggctttatataccactattatgagctatcaataccaatcaaaataa

SEQ ID NO: 43450 - DNA, 741 bp, Acinetobacter baumannii
atgaaggtgctaatttgtgatgacgaaccacttgcagtggaacgattgtcacgtttagtttcaaagatgggacatgaggttgtcgcaacagctcatcatggccaagatgccttggaacaggcacggcttcatcacccagatgtgattttacttgatatccagatgccgggtatgaatggtctcgtctgtgcggagcaattaagccaacttaatcctcgacctgccatagtgttttgcacagcttatgatcagcatgcattggaggcatttaagtcacaagcacaagcttatcttcttaagcccattgatcctcaagagctggagcagacatttaagcaattaacccagctaacgcaagcgcagctcagcgctttgcctaaacctgagcttttacaggatttaaaaacacaacgtcatcaaattgctgctaaaacctatcgtggggttgagctaattcctgttgaaaatatctattactttttagcagatcagaaatatgtcacggtacgtcataaaaatggcagcgtattgattgacgaaacacttaaagaacttgaaactgagttcgcagatcagttcatccgtattcaccgtaatgcattggtctcgattgcttatttagatggtttagagctagtaagttcgggccaatatcaggttcgcttacgtggcttagatgaaagactttccgtaagccgccgtcatttatctacccttagagaacggatacaccaactttaa

SEQ ID NO: 43451 - DNA, 930 bp, Acinetobacter baumannii
atgcttgaatttatgaaaaccttgaaaattgctacacgacaaagcccacttgctctttggcaggcagaacatattcgtgcccgtttacaggagcttcacccagatttaacggtggagttggttaagtttgtcacgcaaggcgataaaattttagatacacctttagcaaaaattggtggcaaagggttgttcgttaaagaattggaagcagcacttttagatggtcgtgcggaccttgctgtacattcaatgaaagatgttccgatggcattaccagaaggtttaactttggccgtaatttgcgaacgtgaagatccgttagatgcttttgtttcgaatcaatttgaaaaatttgctgatttgccgcaaggagcaaaagttggcacctcaagtttacgtcgtaaatcacaaattttaaaacaacgtccagatctacaaattattgatttacgtggtaatgtcggtacccgcttagcgaagctagacgatggtcaatatgatgctattatcttggcgagtgctggtttaaaacgtttaggattggcagaacgcattcgccactgtatcgagccaagtgtaagtttgcctgcggtgggacagggcgctcttggtttggaatgccgtgcagatgaccaagaagtgttggctttaattcagccacttctacacccagagacagatgtatgtgtacgtgctgagcgagcattcaatgcttatcttgaaggtggttgtcaggtgccgattgcaggttatgcaacattacaagatggaaaaattcatattgaaggccgtgtaggtagtgttgatgggcaaacattattacgggctgagcttacagatgaagcgaataatgctcagcaattaggtgaaaaccttgctcggaacttacttgatcaaggcgctggtgatttattaaaggccctttactaa

SEQ ID NO: 43452 - DNA, 768 bp, Acinetobacter baumannii
atgttgtttattaatacccgacctgactcgcgtgcggctgaattaactcatgctttgcagaagaaggggtttcaggtcgagtctttacctcttttagaactggttgctcaacctttttcagaatcactctctcaactctatcagcagttaactggtgcacaagcgattgtagtggttagtcctactgctgttgatgtggggatgcagtatttagcacaaagtggtttaaaaatagatgagctaaaacatattcaatggattgcggtgggacaggcgacggctaatcgtcttcacgactatgggattgaagcgcatgttcctgaggttgaaacttccgaggggatgcttaacttacctctccttcattgtatgaaaaaatcaggtagtgtggctttttggagaggtgaaggcggccgtcaatttatgatggaaactttgcaacagcaaggaattcagattttaaattttgttctatatcgccggcagtgcccgcaagcttcatattcgacattcaaacatctgacacagaattcaaattataatttagataaatggctcgtcttaattaccagtgaggcgagctggaaatactggttagagctttgtttaaaaaataaggcacaacctgattgcgtatatttagttttaggaccacgcctttttcaacttgttaaagactatcgcgatcagcaacaagctcattttcacattattcaacttgaaaatttatcgccttcggggatgattcatcacattcaggcattataa

SEQ ID NO: 43453 - DNA, 840 bp, Acinetobacter baumannii
atgagaaaacttgtttctatcatcattttgctgggcatcgcttgggtggctaagctcagctacgatatgtggcaaatttctcgtaccgtccctgaacttcagcaaaacttgctgcaatctgaacagcaatatgccaatttgaatgatcaattggttgctttgcaaagacaaattcaaaatcaaccaagtcataattctaaaacaacgcctttagcaacgactgaaattgttcaaaccggaattgcaccgaccgtattaattaaacaaaaattagagttaatccaatttgcaattgaccaacagcaatttatttatgctgtagatcatctaacccaactacagcaaaccctaccacaatatggaattgctcctgcattacaacacagcttaaatcaggctcttgagcaagataagcaggctattcaacagtttgtacttgctcaaaatcagcgacatcaactcattgatgatttactccagaatattgataaaaatattcagcaagccttaaaacagcctaaatttgagatggaccaatccgaggctgtgtcatggtggaaaaaatggttccgtattgagaaagtagaaacgccgtctattaatttaatgaaccgaagtgtagtgcttaaagaagtgcaattaaggctgttaattgctgagcaagctttaaaccaaggaaaaatggctgaataccaaaatgagttgcagacagtaatgcaaaaactaaatgaattatctgatgcgactagccaacaactcaaaacccgtattgctaaagtggcacatttatctgtagtgcctgttcctaaattatcgacacttggtctaatcggctcataa

SEQ ID NO: 43454 - DNA, 1071 bp, Acinetobacter baumannii
atgaagcatctcctgtgggtttactttttaattagcttagtccttttcgcagccttggctttattcagttatggctatggtatgggttatgtctatatttactggcggcaattgcaattgcaaacaaatgtatggggattagtctttacgtttattgtgatgagctttattgctcaggtgatatggctctggattaagcgttattcttctcgggaacaaagaaagagagagaatatttttcagtttaaaaatcttcatccgtatgaacaattaggtattgtctggttattagaggctgctgaagatcaacgggtatttatcgaacgtgtttttactcaatcaggccttctaaaaaatattattgatgccaaatttctagttttaagtggagattaccaaaaagctttagaggctttggatcaatccccaccaatggcttttgagttagcagaattacagcgtattgaaatattcttggcacaaaacgaagctgaacgtgccttaacccatcttgagtttttatatcagcatcagttatcgccatggcttgaagagattgagacagcatatcaacaacgtttaacagcgctttggggccagcttgctttacaacaaccatgggtatacttgcgttctatgaaatatggtttgttggacgctgaacatcgtgatttatggctacaacaacttcttcaacagtttgatcaagcttcaatagatgatttacaagcattgcaacagcgctatctggatttagagtcagaaattcaaaccagaccttatagcagtaaattgttatggttaaaacttttggcccgtatgccagaaatgagtattcagcatgaagcattaaccttgcatttactcaaagagcaattcgatccggacgtattttacttatggtttcagcaacaattgcttaagcaggttcctgactatgccgatgtcgaagaaaagattaatcaatttgaatctcaatatatgaatttgccagttttaacatttgcaaaatggcatgtttacatggcaacaggtcgtcaagctgaagcagaaatattattaagtttataa

SEQ ID NO: 43455 - DNA, 441 bp, Acinetobacter baumannii
atgaaagaactgtctgtctaccctgtaatatacgaacagaaagtagcatggggagatatggatgcttttggtcatgtcaataatgtgcaatattatagatatattgaaagctcacgtattttatatatggaaaatgtaaatatattgactccaaatatatatactgttgttgcttcaagtcagtgcaaatatttaaaacctgtgttttatccagatgtattgaaagtaggggttcgtgtagaagagctacgtaagagcgcgttccgtatggcttatatattatggagtgaatctcagcagcaaatcgttgctacaggtgaagcagttatggtttgtgtgaataaaatgacaggattaaaatgtgaaataccaagtgaagtaaaaagtaaaattattgaattagaaaaatcagttgggcatgatttaatacatttagcttaa

SEQ ID NO: 43456 - DNA, 327 bp, Acinetobacter baumannii
atgaaaccggatattagtgaattatctgttgaagagttaaaacgcttacaagaagaagcagaagctttaattgcaagcaaaaaagatcaagcaatcgaagatgcttataatcaaattatcgaaattgctgaaaatgtaggttttagtgttgaacagcttctagaatttggcgctcaaaaacgtaagaaaacaacacgtaaatctgtagaaccacgttaccgtaacaaaaacaatgctgaagagacttggactggtcgcggtaaacaaccacgttggttagttgctgaaattgaaaaaggtgcaaaacttgaagatttcttaatctaa

SEQ ID NO: 43457 - DNA, 744 bp, Acinetobacter baumannii
atgaagaaaaagtctaagcaatggaagtggtggttttttgccctcattgcatttttaatttttattattttacagattccggcgacttggcttatctctaaattttcaaagaataatcaaactgtccataatgtaagtggcaatatctggcaggggcaggcagactggcaccgtggagcgttacgaggcactatccactggaaaacgagaccgctagacttacttttattacgctttgctgcagatgttgatattcatagtggtaatacgcaattaacggggattatggcgtatggttttggaaaaaaagttattgtaagggatatgaatggccagattgctccagaaacactgaagcaaattgtaaattggcaatggcctgtaaacagtattcaacttaaagatatccagtttaattataaaaaagagcaaggctttgcggcagttgatgggcaattgcattggggtggtggggcgctcatttataatattggtgatcgtcaagatcgtatgaatatgccttctttaagtgggcaattaactgaccagaacggacagctacaagtggacatccgtgatcagcgtaatcaaaaaatggccaatcttttactagatgccaatatgatgctggatgttcagctcacacagcgtttattactcaatgttccatcatatgacggaaaagctggtttggatacttttgtcattagttctcgccaaccattattacaaggtggtaactaa

SEQ ID NO: 43458 - DNA, 837 bp, Acinetobacter baumannii
atgaaagtatggattgataaattacagcaattgcaatggcaaaaattagatcgactgagtgtagtggtccttgccattttaattttatggttatgctggaaactcgcttcatttttttggttggtgattgcgcctcctcaactgatgcaatttgatcgggtagaactcggttctcaacaaccacaaataccaaatattagtactttttcactttttaacgaaccttctgccaatgcggctcaagaaagcgtgaatttagaattgcagggtgtaatggtcggctacccaaaccggttttcctctgctgttattaaaattgataatactgctgagcgttatcgagttggtgaaaccattggttcaacttcttaccaattggcagaggtgtattgggatcatgttgtgttgattcaaggaaatggcagtactcgtgaacttcagttcaaaggtttgccaaatggtttatatcaaccgatgactccggatgcttcacaacaaagtgttacaccgtctcaacctacagagcctatgaatacggcccaacaggcattgggacaagcgatccagcagatgcaaggtaaccgagagcagtatctccgagatatgggggtaagtggtaactcaggtgaaggctatgaagttacagaacgtacaccgactgcacttagaaataagttaggtttaagacctggcgatcgaattgtctctttgaatggtcaaacggttgggcaagggcaaacggatgtgcaattacttgagcaggctcgtcgagcagggcaagtaaaaatagaaataaaacgtggtgatcaagtgatgaccatacaacaaaatttttag

SEQ ID NO: 43459 - DNA, 2271 bp, Acinetobacter baumannii
atggctttattgaatcatcaacgtccactttgggcattacttgcagcagccccattgattgcgacagtaagtagcagtgcctatgcccaaacatggaagatcaatttacgtgatgctgacttaactgcctttattaatgaagttgcagacattacaggaaagaacttcgctgtagatccgagagtacgtggtaatgtcacggttatttctaataagccattaaataaagatgaagtttatgacctatttcttggggtcttaaatgtaaacggggtcgttgcaattccgtctggtaataccattaagcttgtaccggatagcaatgttaaaaactcgggaattccttatgattctagaaatagggttcgtggtgatcaaatcgttacacgtgtgatttggctggaaaatactaatccaaatgacttaattccagcactccgtcccttaatgccgcaatttgcccatatggcagcaattgcaggaaccaatgcacttattgtttctgatagagcggcgaatatttatcaacttgaaaatattattcgtaacttggatggaactgggcaaaatgatattgaagccatcacgcttcagtcgagccaagcagaagaaattattacccagcttgaagcgatgagcgcaacaggcgcatctaaagattttagtggtgcccgtattcgtattattgctgataatcggacaaaccgtattttaataaaaggtgatccgcaaacacgtaaacgtattcgtcatatgattgagatgctggatgtaccttcggcagatcgtttaggtggcttaaaagttttccgtttgaagtatgccagtgctaaaaacttgtctgaaattttgcaaggcttagtcacaggacaggcagtatcttcatcgaataatagtaataattcatctaactcatcgaatccgattaatagtttaattggtaataaccagaattctggttcaaatacatcgggttcaaatggtacctcaatttcaactcctgcaattaacctaaatggtaattcgaacagtagtaatcagaacaatatcaccagctttaatcaaaacggtgtgagtattattgcagataatgctcagaactcattggtagttaaagctgatccccaattaatgcgtgaaattgagtctgcgattcagcaacttgacgttcgccgtcaacaagtactcatcgaagctgcaattattgaagtctctggtaaagatgcggatcagttaggggtgcaatgggctcttggtgatattaatagtggtataggcttgattaactttacaaatgcgggttcaagtttagcttcgctggcagctggctatttaacaggaggagctgctggtttgggaagcgcaattggtgctggtagctcaatcgcattaggaaaatataaagaaggtgcagatggttctcgtcaactttatggagccctaatccaagctttaaaagagaatacagcttctaatttattgtctactccctctattgtgactatggataatgaggaggcttatattgttgtaggtcaaaatgttccatttgtaacaggttcggtcactaccaatagtacaggtattaatccctatacaactgtggagcgtaaagatgtcggtgtaacattaaaagtcattcctcatattggtgagaatggtacagttcgccttgaaattgaacaggaagtttcaaatgttcaagcaagtaaaggacaagctgcggacttaattactaataaacgtgctattaaaacggctgtattagccgaacatggccaaacagtagttttaggtggtttggtttcagatgacgttgagtttaaccgtcagggcattcctggtttaagtagtattccttatttaggacgtttattccgctcagatactcgaagcaatactaaacgtaaccttctcgtttttattcacccaacaattgtaggcgatgcaaatgatgtacgccatttatctcagcagcgctataatcaactttatagcttgcaattggctatggataaaaatggcaactttgcaaaattacctgagcaagttgatgatatttataatcaaaaaatgaccccaccgagtattgcctctaagccaaaaaattaccaacaggttccatcaggtggtaaaagttcgaccataactacgccggtagctgtagaacctaccgtccaaaagcaaacactacagttgcctgatcccgaaattaatcgtactaaaaatacagtaacaacaacgacactgcgtccaagcacagcgccgtag

SEQ ID NO: 43460 - DNA, 630 bp, Acinetobacter baumannii
atgacttggaaattacaagcaattactggtgaatttactggccaagaaattaatgttgatcgtgatatgttggtgggacgtcatcaagatgccgatttattactacaggctgctgaaatttcacgacgccatgcagcattgctattaaaagatcaagcgctatgggtgcaagaccttaattcatcgaatggtacgtttgtaaacgatattcgtattgagcaagaaaaacagctgcatgatggcgatattgttcaattcgcaagtttaaaattttcagttttcgcccctgcacaagaaaatactgatttacctgaaattgaggtggagccagtacaaactgcaccgacacaagatttaagcgatcaaggtatgccaagtattgcggagcgtgcagcggaaactgaagtgagtcgtgatggaatgcctcagcgagtttctgtgccaaaaccagcaccgattcctgaaggggtggatattcatgctcagccagaacaaactcctgttgctattgaggagccagtttctcgagttgctgaagagaaagagcagcagaagaatgcatctattggtctagtgaccattattattttagtgattttagctgtattggcgtggttattctttaaataa

SEQ ID NO: 43461 - DNA, 669 bp, Acinetobacter baumannii
atgtctgttgcacaactaagtaagcgcgatttaattttatttgacctagatggaacgttggttgattccgctgccgatttatatcggtctatgaacttaagtctgcaatcactcagttggccattggtaacagaagcacaaatacgggaatgggtaggtaaaggggcttcaaaactttgtgaaagtgttctgcttcatatatttggaaaattagatgttgaacaacataaagttttattacagaaatttgtagaggtatatggtgcggagctgtgtgtgaatactcaaatttacccaggtgtacctgagtttttaaaacattgccaaactttaaatatcaaaatggcatgtgtgactaataagcctgtcaaacttgctcaagggttactggatgcgctagagctttcttcttatttccaagttgtacttggaggagatagcttacctgaaagaaagccgcacccactaccattattgcattgcatggaaagcctaaaaatatctgcttcacaatcattaatgattggcgactcaagtaatgatattgaagccgcacgccgtgctggaattgattgtattgtggttagctatggctataatcatggagagaatatctatgattgccaacctcagcaagttgttgatagtcttgctgagttaattgtctaa

SEQ ID NO: 43462 - DNA, 1494 bp, Acinetobacter baumannii
atgacaacattagcgcaattcgagcaacttaaggctgctggttacaataccattcctgtttatcgtcaacgtttagcggatacagaaaccccattatctgtttttgctcgttttaaggatcaaacacaggcttacttatttgagtctgttgaagggggcgaaaactgggcgcgctactctatgattggtttaggcgaatcaacagttttttcctgtaacgctggcgttttatctatacaacatgctgacggatcagtaacacagcaaaattgtttagacccattccaatatatccgtgaattccaaaaacaatttaaagttcccgcggctaaactcttaccggacttaccaagctttacgggcggtttggtgggttatttgggctacgatgctgtccgctatatcgagccacgtttaaagaatgtacctacggctgatccgattgcgctaccagatttatggttgatgctctcaaagacagtcattgtttttgacaatcttaaagatacgctatttttaattgtgcatgcggatacagagcagagtaatgcttatgaagacgctcagcaaaaattagatcaattagaacagttgttggcgactccagttagtttgcaagcgcgaccacatacgcctccgcattttgaatcaattactggtaaagcaaagttcttagagacggtagagaaggttaaagaatatatccgtgcaggcgatgtgatgcaggttgtacctgggcagcgtatggtttctgattttgatggagaagctttacaggtttaccgtgcattacgtcatttaaatccatcaccttatctattcttggttcaaggacaaacgattactgataaaaaaccatttcatattgttggctcgtcaccggaaattttatctcgtttagaaaacggtattgctacagttcgacctttggcaggaactagaccgcgcggtaaaactaaagaagaagatatagcattagaaaaagatttgctgtctgatgaaaaagagattgctgaacatttaatgctgattgatcttgggcgaaacgatgtagggcgcgtatcgaaaataggtaaagtccaagtcacggatcaaatggtgattgagcgctattcacatgtcatgcatattgtttcaaatgtacaaggtgaagtgcgtgatgatattgatgcacttgatgtatttaaagccacctttccggcaggaacgttatcaggtgccccaaaaattcgtgcaatggaaattattgatgaagtagagcctgtgaaaaggggagtttttggcggggctgttggttatttgggatggcatggtgaaatggatatgtcgattgcaatccgtacttgtgttatccgtgacaaaaaggtgtatgtacaggctggtgcagggctagttgctgactcaaatccagaatctgagtggaatgaaactcaaataaaagctcgcgcagtgatcaaagcggttgaattatcatcaaacggattgattttatga

SEQ ID NO: 43463 - DNA, 381 bp, Acinetobacter baumannii
atgaaaatgacggctaaaattgcattattcagtgcagcaattgtaactatgggtagtttggctgcttgtcaatcaacaactcaaccacctaagccagaacatggcatgatgcaagatggcccacgtgatggtcaccaccatcgtatgaaacaccgtgaatttacgcctgaacaaaaagcagcatgggaacaacaccgtgcagagcgtaaagctcgttttgagcaaattcaaaaagcatgtgaaggtaaagctgttggacaaactgtcaatattcaagttggagataaaacacttgaaggtacatgtaacctccgctttgagccaaaacgtcctcaaccaccagtcaatgcccctgctccagtagcgactcaagcaaaataa

SEQ ID NO: 43464 - DNA, 1803 bp, Acinetobacter baumannii
atgccacaatacaaagcgcccttacgtgatatgcaattcgttttgcatgaattattaaatgctgaagaacactatgcaaaattacctgactttcaaggtaacgtaagccgtgaattggttgatcaatatttagaagctgcggcagacttctgtgaaaatgaactttctcctttaaaccaagttggcgaccgtgaaggttgtacttggaatgatggtgttgtaactacaccaacaggctttaaagaagcttatcaaaaatacatcgaacttggcttcccgtctttatcagcagaagaacaatacggtggtcaaggtttacctaactctttaggtatcgcaatttcagaaatggtaggtagctctaactgggcatggggtatgtaccctggtttgtctcacggtgcagtacgtacattagaacatcacggttctgaagagcaaaaaaatacttacttaccaaaccttgtttcaggtgtttggacaggtacgatgtgtttaactgaatctcatgcaggttcagacttaggtattatccgtactaaagcagaaccaaatgcagatggtagctatgcaatctctggcgagaaaatctttatctctgctggtgaacacgacatggctgaaaacattatccatatcgttcttgctcgtctaccaggcgcaccaaaagggactaaagggatttcgttatttatcgttcctaagttcaacgtcaatgcagacggaactctaggcgaacgtaatgccgtacgttgtggttcaattgaacacaaaatgggtattcacggtaacgcgacttgtgtcattaactttgaccaagcaaaaggttatttaattggccctgaaaaccgtggtttgaactgtatgttcacctttatgaacacagcacgtattggtactgcggttcaaggtttatctgcatcagagtcttctttccaaggtgctttaacttacgcgaaagaacgtttagctatgcgttcactttctggtcctaaagctccagaaaaagaagcagatccaattatcgttcaccctgccgttcgtaacatgcttttaactcaaaaagcatttgctgaaggtggtcgtgcacttgtttacttacttgctcaatatgcagatatcgttgaaaaaggcgaaactgaagaagagcgtaagtttgctgacaacatcttgtctttattgactccaattgcaaaagcattcttaactgaaacaggttctgaatctgctaagcacggtgttcaagtgttcggtggtcatggcttcatttctgagcatggcatggagcaaatcgtacgtgatacacgtattgcttgtttgtatgaaggtacaactgaaattcaggcacttgatttgttaggccgtaaagttttacaaactcaaggtgcaatgcttcgtgatttcactaagattgttcacaagtttgtagaagcaaataaagacaatgctgccatgaaagaatttgttgagccacttgctgcgctgaacaaagaatggggcgacctcactatgcaaatcggtatgcgtgcaatgcaaaatccggatgaagtgggtgcagcggctgtagattacctctacttctctggttacgttactttagcttatctatgggctcgtatggcgcttgtagcacaagagaaattagctgcgggtacaaccgatgttgatttctacaatgcgaaagtaactactgctcgcttctacttcaagaaaattttaccgcgtgtacgctctcatgtagacgttatcgcaggtggtttagacccattgatggcattagatgctgaacatttcgctttctaa

SEQ ID NO: 43465 - DNA, 1782 bp, Acinetobacter baumannii
atgccaatttacaatgctcctttagctgatatgaaattcatcttaaatgatgtatttaaagcagaacaattttggcaggctaatgagaaactcgctcatgtagatgctgcaacagctgaagcaattttagaagaaatggctaaatttgctcagaacgtgactcatccattaaaccgtactggtgatgaagaaggcgctcgctacgaaaacggcgaagtctttactcctgctggctttaaagatgcatttcgtcaatatgcagaaggtggttggattggcttaggtgcagatgaagaatggggcggtcaaggcatgccaaaaatgcttaccgttcttgccgatgaaatgttattcgcgacaaatccatctttcatgctttacccgcttctttcagtgggtgcaggtatggctttaagcagctacgcatctcaagaacaaaaagaaacgtatttacctaagatttattcaggtgaatggtcaggtaccatgtgtttgactgaaccacatgccggtactgacttaggtattatcaaaactaaagccgagcgcaatgaagatggtacttataacattacaggtactaaaatcttcatcactggcggtgacaacgatttagcagaaaacatcattcacttggtacttgctaaaactccagatgctcctgctggttcacgtggtatctcgctatttattgtaccgaaataccttgtaaatgaagacggttctttaggtgaccgtaaccatgttggtccaggctctattgaacataagatggggatcaaagcatctgcaacttgtgtgatgaactttgacggtgcgaaaggttacctcgttggtaaagaaaacgaaggccttgctgccatgttcgtgatgatgaactacgaacgtttatcaatgggtattcaaggtttaggtgcttctgaatttgcttatcaaaatgctgctcaatacgcgactgaccgtttacaaggtcgtagtgcagctggtgttcagtcaccaagcaaacccgctgatagcattttagtccacggcgatgtacgtcgtatgttgttaaatgtacgtgcaaacaacgaagcttctcgtgcatttgcagtttatgtaggtcagcagctagatatcactaaattctcaactgatgcagaagccgtgaaaaaagccaatgaccgtgttgcgcttttaacaccaattgcaaaagcttacctcacagatacagcattccaagcaactttagatgctcaaatggtatttggtggtcacggttatattcgtgaatggggtatggaacaatgtatccgtgatcttcgtattgctcaaatctacgaaggaactaacggcgttcagtctcaagatttaattggtcgtaaaaccattaaatgtggcggtgcattcattgctgaatacatcactgaaattcgtgactttgcaaatgacttagacactgatttgaacttcattaaagatgcaactttagatgctgcaactgaaatcgaagcaatcactcagtttattattgagcaagctgcagagaacgtagagttcccgaactctgctgctgttgattacttacatgcagtgggtctactcagcttctcttatatgtttgcaaaaattgctgccgctgctaaagataaatctggtgatttctaccaaaacaaacttgcattggctcaatactttgttgaacgtatcttgccggatattgatgcacgtattgctaaaatcaaagcaggttcagacttaattatgggctttagtgaagattactttacaaatcaagcttaa

SEQ ID NO: 43466 - DNA, 483 bp, Acinetobacter baumannii
atgcctgatcccaaaaagtttgaaagaacccttgatcggtttggacattatgctgttgaggcttttcattatttagccttatttatcataggctgtatgattgcttggtctgctgctcataccgtttttgaaattctgaccgtcaaaaaatatgcatcaatcgatgacatcttattgttatttatttacctagaacttggggcaatggttggaatttactttaaaactaatcatatgcctgtacgttttcttatttatgtcgctattacagccctaacacgtttactgatttctgatatccaacatgatcataaagctgaccttgatcaagtcattattactggctcaattcttattttagccttatctattttagttgtccgttttgcttcttggcactacccatctgttatgaaagaaaaacattcaaaaacatctacttcgttaaaaacaccccaaccccaagatgacgagttggcataa

SEQ ID NO: 43467 - DNA, 384 bp, Acinetobacter baumannii
atgaaaaaacctattgttctcgtactttcaacattaatgttgggtatgtcggcaagtgcgatggccgattcaaatcatcgttgggataactatcacggtaaagaccataatcgctatgaacagcgtcatgattatcgttatgaccaccgcaatgatcatagagctcctgtttggtcacattctgagcgtggcaaccataatggccgatatgtagcctttaagcgcggtgatcgtattcctgtggaataccgtaatagccgttattatgtctcagactggcgtgcacatcgcttatatgcaccaccacgtggataccactgggtgaagactcctaaccaatacttattggttgactcgaaacatcacatttatcgagttcgttaa

SEQ ID NO: 43468 - DNA, 447 bp, Acinetobacter baumannii
gtgtctgaaatcagttttgaacgtcttcatcaatttttctgcaaagttccaagtgtacaagaagcccgtatcatggctcatggagcagatggcgaacacgcttggtggtttaagttcagtattgatgtacaacaccctctcgcatggcaaaccgttcaagaattaggtcatgttttaaattacctgtcgacgaatgaacgtttacctactttattctttcccgtgtctccaccaccttacatgaatggtgaagcaaaagattttttatcatgggttattcagtgtaatcaccctgagttttctccagatgtggtttgtgattggcttgaagcgcgtttgccgaatcctgtagttgatgagtcgcagtggaaaattaagacggatttgagtgaaatagaaaagttagatgataaagcgttggatcagttgattccgccagcgccttaa

SEQ ID NO: 43469 - DNA, 1464 bp, Acinetobacter baumannii
atgcgtatttttcagcgaattcatcaaaagttaaattggtcaggacgtcgttatatggcggtcatactttgcgttgttgctattgcatatcttgcatcgacaatttatcacacagtaaaaccattaccacaagggattaactttagtggcaagcttagacatgccgaagtcaaatttttagctgataaaacgtatattgatgcgaaagggcaacagcaggttgatcagcacatctttgatgaaatcttgaaaatgattgatgaggcaaaaaccacgattgtggtagatatgttcttgtttaattcagaagtgggtgactcaaaactcaagcaaagaccattgatgcaagagctcactgatgcactaattagtaaaaaaagacaaaaccgccaaattcaggttgttatgattaccgacccgattaattcggtatatggtggtctaagccctgaacactaccgtcaattacgccaagctggtgttgatgtcatcgaaacgaatctggcacctttacgtgcttctaacccattctggtcggggttttggtacatctgttgccaaaatattggcaataatccagagaaaggctggttacccaacccatttggcgatgaaaaaattacgctacgtagttatttgaacttatttaactttaaagcaaaccatcgtaaaactattgtcgttgataccgatgcgggttggaagtcattggtgacctcagcaaatccgcatgatggtagttcgcgccattctaatgtggcattggtggtaaatggagccacagctgctgatgtactccaaaccgaagctgctgttgcgcaaatgtcaggaagtagttcaccatcacttatattaggcgattttgaaaaagacgttagcaagcctcaagttcaactgctaactgaaggggcaatctatgaagctgtattaaaattaattaatacggctaaacctaaagaacatcttgatttaagtatgttctatttgtctgaacgtaagattattaaagctctaaaaagtgcccaagaacgtggcgttattgttcgtgttttactcgatccaaataaagatgcttttggccgacaaaagaatggtattccaaaccgtcaggtagcttcagagttacatgctgccggcattccaattcgttggtgtgatactcatggtgagcagaaccatagcaaaatgatcttaaaatataatgctcaacaagctgagttaattgtaggatctgccaattttacagcccgtaatttaaaaaattataaccttgaaacggatatgttggttgtaggcaaagttcaagatcaagtctttaaagacgctcagaattacttcaatacctcttggtcaaacctacaaggtagacagatgagcgtggactatgcgaagtatgccgatgagtctaaagtgaagtattggatttatcgttttatggaatggtcaggtttatcgactttttaa

SEQ ID NO: 43470 - DNA, 2082 bp, Acinetobacter baumannii
atgttgttctataaaaatattttgaccttatccattttggctgccatatctatacctgtatttgcagcagaaaatgaaaatgttgagaagttagaaactatccgcatcaaggcgcacccccttgagcaaacttcaaaagattttgcagtcgctgatactgtagttgaccaaaagcatttgactgaaggggccgccactattggggatgcgctcaatagtgaggtggggatttatgcgaatcagtttggggctggttcaagtcgtccggtgattcgtggccaagatggaccacgtgttaaagttcttcaaaattcatctgaaaatgtggatgtctcaactttgtctcctgatcatgctgtaacagtagatccagttctcgcaaaacaagttgaagtgattcgtggaccctctactttattgtttggtgcgggaactgttggtggtttagtcaacgttattgataacaagatccctacacaaatgcctgaaaatggttatgaaggacaagttggcttacgttacaacactggaagtgatgaaaagctggcgagtgctggggtaactgtagggttgggaagccaagttgcattacgtgttgaagggttaacacgtgatgcgaataactatattgcaccaaactatattcatgaaggtgaaaaagagcgccgtgtagacaatacttttgcgcagggtgactcggttaatgttggtttgtcttggatttatgaccgtggttatacgggtatttcttatagtaatcgtcgagaccagtatggcttacccgggcatagccatgagtacgaaagttgtagcgctcatctaggtggaagaccgcatttgcattgtgatccacatgaacatgagcacgaagatggagaagaagctcacgatcatgagcatgaagaacatgagcatgaacatggcggtccatggattgacttaaagtctgagcgttatgattttaaaaccgagttaaacgatccatttgcaggcttccaaaagttacgtgcccaagcgagctatacagattatcagcatgatgagattgaagaaggggcaatcgcaactcgattccaaaacaaaggttatgatgggcgtattgagttagtccataaccctattgctgattgggaaggggtaattggtacccagttaggccaacaaaaactaaatttaactggtgaagaagcatttatggcaccaactactaccaaaaagtggagtgtttttgctttagaacataaacaatggaaagatgttcattttgaactttctgctcgtgcagatcagcaagaaatcgatgtagatgataactctaaacaagattttgacggttctgctttttcctatgcaggtgctgccaactgggagtttgcgccaaattataagctttcatttgtagcatcacaccaagagcgtctgcctcttgctcaagagttatatgcaaatggtgcccattttgcgaccaatacttatgagttaggaaatgatcaactcagtaaggaaaaatcaaataatgttgagttaggtttgcattttgataatgacaaacttgattatcatcttcatgtttaccataactggtttgatgactacatctatgcgcaaacccttgaccgttataaagactttcgcttagttcaatatactcaagataaagcacgtttctatggtgctgagggtgaaattggttatcaaattactccaatgtacaagatcagtgcttttggtgactatgtacgcggtaaaattgatgccgagggtaacgccccacgtattccagcgggacgtttaggtactaaagttgatgcagactttggctatggatttagtggttctgccgagtactaccatgtctttaatcaagataagatcgcagcttatgaaaccgaaacagaaggctacaacatgctcaatttaggggtagcatactctggacaatatggtgcaaaaacagattatcgtgtttatatgaaagcaaataacttgttagatgacacggtttatcaacatgcgtcgttcttatcaaatatcccgcaagttggacgtaactttaccgtcggtgtagattttagtttctaa

SEQ ID NO: 43471 - DNA, 765 bp, Acinetobacter baumannii
atgccttttacaatctcccatgcagttatcgcccctccacttgctaaattgagccgaaatacgttacccattgccgccttagcaattggcagtatgacgcccgatctttaccgcttatttacaatgcaatcaggtatgctgactcatcaatggaaggggcttttctaccctaatcttgcattagggttattattctgtgtcatttggtacttactttaccgacctgtggtttaccgtttttttggtatccaacacgatttaaaactagattcttttagacatttttttagcttttttattggaatcataattgctctactcattggtatagcaacacatctcatttgggatggccttacccactcagactttagaacttttatatttcaagactttttatcgcaaactgttcacttgtttggccgcccttatccattgcatcgccttcttcaactcggttcttctgctctggcattaccttttttaggctggatgagtattcattactatcagcgccataaacagcattggaaagtaaattataaaattaaaatttttgcttggtgtttatttactttatctacacttttaggcttattttcattttgggactatgcccgttatattccccatgaggtttggcattctgatacctattattttactggccgctctattaatgagtttatgcaaggttggttaagtacttttagtttgggatgtctattattcttatttttagatcgacaacaaagaatgggctaa

SEQ ID NO: 43472 - DNA, 1779 bp, Acinetobacter baumannii
atgatgcgaactcattactgtggctctttaactgaagcccaaatcgaccagaccgttacattatgcggttgggtacatcgtcgccgtgaccatggcggtgttattttccttgatatgcgtgaccgtgatggtctcgttcaagtggttattgacccagatactccagaagcatttgcaactgcagataaagcacgttctgaatatgtattaaaagttacaggtcgtgttcgtcgccgttatgaaggtactgaaaacccaaatatggtgagtggtcaaatcgaagttttaggcaaagaaatcgaagttcttgctgcatctgaaactccaccattcccattaaatgatgacactattaacgtgtcagaagaacaccgtttaaaatatcgtttcttggacatccgtcgtccagaaatgttagatcgcttacgtttccgttctaaagtaaccaacttgattcgtaactatttagacgatcatggtttcttagacgttgaaactccgattttaactcgtgcaacccctgaaggtgcgcgtgactatttagtaccaagccgtgtacaaaatggtagcttctatgcacttccacaatcaccacaattgttcaaacaattgttgatggttggtggtattgatcgctactaccaaatcgcgaaatgtttccgtgatgaagacttacgtgctgaccgtcagcctgaattcactcaaatcgacattgaaacatcgttcttaaacgacgatgatattatggatttgatggaaggcatgactattaaattatttaacgacttgcttggcgtaaaatttgaaaaattccgccgtatgccatacagcgaagcaatgcgtgattatgcatctgacaaaccagacttgcgtattccgttaaaactcgttgatgttgcagacttaatgcaagaagttgagttcaaagtatttgcaggtccagctaaagaccctaaaggccgtattgcagcacttcgtgtaccgggcgcaggttcattaacacgtagtcagattgacgaatacactaaatttgttggtatctacggtgcaaaaggcttagcgtacattaaagtcaatgaaatcgaaaaaggaattgaaggtcttcaatctcctatcgttaaattcatcgaaccaatcgtaatgcaattgcttgaacgtgttggcgctgaaaatggcgatatcgtattctttggtgcggacaaagctaaaattgtaaatgatgcaatgggcgcccttcgtgtcaaaatcggtcatgacttgaaccttgcgacttgtgagtgggctccactttgggttgttgacttcccaatgtttgaagaaactgacgatggcaaatggacttctgttcaccatccattcacattacctaaatctagcgtagaagatgtgaagagcaatccaggcgaagcactttctgttgcttacgacatggtattgaacggtactgaagttggtggtggttcacttcgtatttacacattagaaatgcaaaaagcgatttttgaagcgcttggtatttccgatgaagaagcagaagaaaaattcagcttcttactcaatgcgcttcgttacggtgcacctcctcacggtggtttggcatttggtcttgaccgtttagtaatgcttatgactggcgcgacttcaattcgtgatgttattgcgttccctaaaacgaaaactgctgaatgtccacttactcaagcaccggctcctgttgaagcaaaccagcttcgtgacttgggcatccgcttacgtgaacaacaaaagaaagaagcttaa

SEQ ID NO: 43473 - DNA, 219 bp, Acinetobacter baumannii
atggctatgcgcccagatgtacgtcgacatgctttagtcgtgattgtattctccctcgcacaatggtttttcatgcgctacatccttgcgaatgaattatttaacctcacgacgaaccaacgtattctttatttctgtgtaagcagtttagtcggtgcattacttatctttgttgcactgatttatatggtgctcaaaggtaatgcggataaaaagtaa

SEQ ID NO: 43474 - DNA, 939 bp, Acinetobacter baumannii
atgcaaaagaaactgctcatcattggtaaacgcagcggtattttgcagtggtacgaaaatattcttgctgctgcccatcaaagccctgattatgaaatccaaggctttgccttaaatcataacaataccaccgatcggtttctgaaaaagctattaccaaacaaagatatatatacggcaaatttactcaaaaagaaactgcaaacgtttcagccagatttgattctcattgccgatcttttttattttaatgatcatttactgcaagttttggcagactttccatgcaaaaaagcacattggattggtgacttttttgatgaacgcttattaaaatctaaagacgtcattgatttatattgctttaccgattctagctttatcgaagatgcgagagcaatgggactaaatcatgccatttatctgcctcttgcttataatccaaatgtcttcttttctagcaatgaacaaaaagatgatcgtcttttatttgtaggcgcatggtcgcctgatcgacaagagctcattgaacagattccccttcccctcactgtctatgggaaaggatgggataaactcagcaaatcaaacagtattgttcaccctcacaatattcctttgactgaagttgccgaactctacagaacgcatcgttacatcttgaatgtcattaacaagaaaaatattcgtcaaggtatgaatatgcgttgtttcgaagctccggcttgtggttgtattttggtaagcgagtatgttgaagatctaaactatgcttttgatatcaaaaatgaaattatttcatttgagaatccgcaagaattgcaattgaagttaaaagatccaataatcagcgctgaagcagccatgtataaagttcaacagagtcatacttataaaaataggatagagaccgtcgttgacttattgcttcaagcttaa

SEQ ID NO: 43475 - DNA, 1020 bp, Acinetobacter baumannii
gtgtttgttagtgttattgttccaagttataaccatgaccaatatttagaagacagaattgagagcattcttaaccaaagctattcgcaatttgaagtgattcttttagatgatctatcacccgatcatagtgccgaaattttagcgaaatacaaaagccatccgaaagtttcacattgcatcatcaatgaacaaaattcaggctcaacattttgccaatggaacaaaggcatgcatctagcaaaaggcgatctgatctggattgcagagtctgatgatgttgccgacttacaatttttggaaaaattagtccctcattttgaaaaaaatcctaagcttgttcttgcctacagccaatctcatcgaatgaatgcacaaggtgaagtcacgggttcatggaaagattttactgatcaagttgattcaaaattatttgaaaatgattttgaaatgaatggtctcgaatatatcgaaagatttttaaatgctcaaaacaccattccaaatgccagtggtgtcatttttaaaaaacagacttatttcgatgtaggtggagctaatccaagtctacgctttattggtgattgggaaatttgggcaaaaatcgtatcgcaaggtgacatcttctttacgcatgagtgtttaaattatttccgctaccatgacaccagtgttattgcccaagccaaaaagaaaaaagatcattttgaagtaagacggcaagtgattttgctccgccaaagcatgtctcaattcttaaaagactattccaagacacatccagaagccaaaaaggcttactgtattaaccagcagagcttatctaaagaattgagaaaaaatgcttctttggcaattcgtcgtcgctattatgatcgaattattccaacgagtatcactgcactacagactctacctttttatgttgtccctttttacatactcaaattacttattcagttcattttatcaacctgtttagtcgcaccatataaaataatattgaaacagcctcgataa

SEQ ID NO: 43476 - DNA, 552 bp, Acinetobacter baumannii
atgcaggttgaaacgactaaaatagaagggcttttgattctacatccaaatgtatttggtgatgatcgcggctggtttatggaaagctttaatcagcaacgttttgcacaagcacttgaacaattaaacttgcctgttccaacttttgtacaagataaccattcattgtctcaaaagagtgtgttacgtgggttgcattatcaaaatgcaccttatgcgcaaggaaaactggtacgtgttgtacaaggtcgtgtttgggatgttgcggtagatattcgacctgactcaaaaacttatggtgaatgggttggtgttgaactgagtgcagaaaataaaaccatgttttggataccggaaggttttgctcatggctttatcgcacttgaagacaatacccagtttttgtacaaaaccaccaattactacaataaagaaagtgaaggcgctattatttggaatgatccaacactagcgattaactggcctcttgatgaggttggtgaggtgttggtgagtgataaagatcagattgcagatgcatttaaagcataa

SEQ ID NO: 43477 - DNA, 891 bp, Acinetobacter baumannii
atgagtctcaaacgtaaaggtattattttagcgggtggttcaggtacacgcttacatccaattaccaaaggtgtatcgaaacagcttttgccaatttacgataaaccaatggtttactatccattgtctgtattgatgcttgccggtattcgtgaagtcttattgatttcgacaccagaagatttaccccaatatgaaaaactgctcggtgatggttctcaatttggtattgaacttacttataaagtacaaccttctccagatggtttggcacaggcatttttaattggtgaagagtttattggtcaagataatgtttgtttgatcttgggtgacaatatttactatggtcaaagttttggcaaacaattagaagctgcgagtaatcgagagcatggtgcaacagtatttggttaccatgtgacagacccagagcgttttggtgttgtcgagtttgacccaactggaaaagttctcagcattgaagaaaaaccattaaagccaaaatcaccttatgccgtgacgggtttgtacttctatgacaatcgtgttgtagagtttgctaaacaagtgaagccatctgcacgtggcgaacttgaaattactgatatcaataatgcatatctgaaagatggttcattgaatgtggagcttttagggcgagggtttgcatggttggatacgggcacgcatgaatcgcttttagaagcaggtcactttatctatactgtagaaaagcgtcagtcattaaaagtcgcatgtttagaggaaattggtttcaatcaaggttggattagcaaagagaaacttttagaaagtgctgaagctttgaaaaaaacagaatatggtcaatatttgaaaaaaatctgggaagagtcaaatgcaggttga

SEQ ID NO: 43478 - DNA, 894 bp, Acinetobacter baumannii
atgaagatcttattgcttggaaaaaatggacaagttgggtgggagctacagcgagcgcttgctcctttgggcgaggtagttgcattagaccgtcatggtttaaatggtctatctggcgatatgactcaaccatcggcaatttttgacacgattgtggcgctaaaacccgatgtagtcgttaatgcttctgcttatacagctgttgatttggctgaaactgagcaggattcggctgatcttgtgaatcatcaaactgtaaaagctatagccgatgcatgtttgcaaattaaagctttatttgtgcattactctaccgattatgtttttgacggggcaggtgaaacagcttttgttgaaacagatgcaattgcaccattaaatgtctatggtaaaaccaaggcattaggcgaacaggcaattgttgagagtggctgtcagcatctaattttcagaacatcatgggtctatgcaagtaaaggaaaaaacttcttgaaaacgatgttgaacttggctcagcaacgtgaagagttgtcgattattgatgatcagattggtgctccaacttctgctgagctaattgctgatattaccgcacatgctattcctcaagtcgtagccgatgtgagtaaagctggtgtctatcatttggtggcgagtggtgaaacatcatggtttggctacgcaagttatgtatttgagcaagcacggtcattaggacaggcgctgattgtacaaaaggttaatccaattccaacaaaggcttacccaacaccagcaaccagaccacacaattcaagattgaacaaccaaaaaatacagcatgtttttaaactctgtctacctaactggcaagatggtgtaaagcgaaccatagtggagctattaaataaatga

SEQ ID NO: 43479 - DNA, 1068 bp, Acinetobacter baumannii
atgaagttcttggttactggtggtgcaggttttattggttcggcggtggttcgtcatattgttcaaaatactgaacatgaagtattaaatgtcgataagctcacttatgcgggaaatctagagtctttaagctctgttgccgatcacccacgttatcagttttctcagaccgatatttgtgaccgtacagctttagatgaattatttaaaagttttcaacctgatgtagtgatgcatcttgctgctgaatcgcacgtagatcgttcaatttcaggaccttatgcttttattgagaccaacattattggtacataccaaatgttggaagcaagccgtacttattggttaacccttgatggttcaaaaaaggaaacattccgcttccatcatatttcaaccgatgaagtctatggtgatttagaaggtacaaccgacctatttaccgaaacaacatcgtattcaccaagttcaccatattctgcaagcaaagccagctcagaccatttagtccgtgcatggaaccgtacttatggtttaccggtgttggtgaccaactgttcaaataactatgggccatttcatttcccggaaaaattgattccgcttatgattttaaatgctttgcaagccaagccactccctgtatatggcaatggtcagcaaattcgtgactggttatttgtagaagaccatgcacgagcactctttactgttgcaacgcaaggtgtggttggggaaacttataatattggcggtcacaatgaaaaagccaatatcgaagttgttcatgcgatttgcacattacttgaagaattggcaccgaataagccggaaggtgtagcacagtacaaagatttaattacctatgtcaaagatcgcccaggtcacgatgtgcgctatgcaattgatgcgacaaaaattaaaaatgacttaggctgggttccgcaagaatcgtttgagacgggcctgcgtaaaaccgttgaatggtatttaagtaatactgaatgggttgcacacgttcaaagtggcgaatatcagtcttggttaaacaagcaatatcaaggataa

SEQ ID NO: 43480 - DNA, 1044 bp, Acinetobacter baumannii
atgacacaacaaaaacctttcatcctagcgttgaccgatggtaaagcaggccatgaaactcaaacacaaggaatagttcagctactgaatcaacaacaagattatcaggtggaatgggttcaattaaatctacctaaaaaatggttgtatcgtgttctcaagttattgatcaagttttcaataaatacagagtggttacgttattttcttgactcccaaaccctaagtgcattagagcagaaacaggttgcttatattgtatcggcagggggaaacactctacttgccaatctactgctcaaacaacatttgctcaaagatcagcctgtaaaaaatctggtcgcaagttcattacgggggattcgtgctgacttgtttgatgtggtatttaccattcatgagcaacaagccgtattgcctcattatttttattatccaattgcaccgaataaaatgagtgctttacctctaacacgtgagcgggcgcgggaacatttgggtattcaaaatgctgagcaaacgattgcaattttgattggtgctgacactaaaacagtaaaaattggtgaagcggcacaatgggcaactgttttacagcaggttcgaaagcaatatcctacagcgagattgctactgacaacatcacgaagaacaccgattacttttgaaaaagaattacagcagcttgctgagcagtacggcatttttcagcctcatgaccagttaacatgggtagcacaaggccaaaactgtgatatcaaagattatattaaagcagctgactggattctaacgagtccggactcgacttcgatggtggcagaagtggtcatgtcaggaagtaagttgctggtactttatgatgagcagtccatgcaggatgaacagattaagcaccaattaaagtttttagcacagcaacattggctatatttattaactgtttcagattcttatcaaatctctcaggttgttcaagagttagagatgcaagatcataccagcgaaataactcggaagttaaatcgggttttggacaaataa

SEQ ID NO: 43481 - DNA, 984 bp, Acinetobacter baumannii
atgaaaattacgcttgtgatggcaagtgatgaggaaggtggcttagaaaagcatgtacttgagctggctgctggtttatcacaagcacatgaagtttctttaattgcacatcagaaatatcaaagtcaggtggaaagttcggtaaactttgttgcttttgatatgagtggcagtcgttataacccgtggacgaagtatctgctaaaaaaaacaatattggggacagaaccacaagtgctacatgctcatgcttctaaaacggccaaactgttgcaaggcatgattgcaggttttgatttcccttgtgtggtgactatccatggtgcaaagaaaaagattgattcttacttagcatttgatcatatcatttgtgtgagtaagcgactcgcgcagattgtggggcagccggaaaaactcagtgtggtctataatggtatttctttgaatatgcctgctcaatcatttgtaaaaaatagaaaatttattgccattggacgtttaaatgaagtgaaaggtttcgatcttttactggctgcttggcggaacatttcacaccaattaactattgttggtgatggtgaagaacgagaaaagttagagcaattgattcaagagtaccaattagctgatcgggttcacttgtatgggtatagcgacaatattcacccattgattacagaccatgaggctttgattgtgtcttccttgcgtgaaggggggccgtatacacttgctgaaagtttattgcttcaacgtcctgtgttaggaactgatgtcggaatgatggctgagtttattcctgttgagtttctatgtgaaccaaataatattgaagcattgcaacaagtgattcaaaactatttggatgtggtagcccctgaagcaagttttaaacaggcttatgccttggcacaagaacaattgacttttacaaaaatgatcgataatacggtcaaagtctatcaatcattgctttcagcatag

SEQ ID NO: 43482 - DNA, 810 bp, Acinetobacter baumannii
gtgttttatatcctgattttactggtcttgcttattgtgttatttagctataagtatgcgtggtggaagccagcagtggattggaatcgaccacgtgtattgatgtatcacatggtacgagaccatattaatggtgccaaatttaataagcttcgggtcaagcccgctgagtttgaaaagcaagttgcctggatgaaagcgcaaggcttccattttgtaacgatgcacgaattgcaagagaactggggaaagcacccagccaaaacagttgccattacctttgatgatggttatttagacaacttacaaaatgcttatcccattttagaaaaatatcaggccaaggcaaccatatatgtggtggttgatcgtcatgatcgtgattggtcaacctataaaaaagaacatcataatagtggtgaactcatgcgtgaggctaagttgaatgatgctcaagtcaagcaactggcagatagcgaactgattgaaattggttcacatacgttaacgcatgctaatttaaacaaactggatgatacggattgtttaaaagaactatcagattcaaagcagtggcttgaacaactgatagaaaaaccagtaaccagttttgcttatccatttggtatttactcagaccgagatgttaaactggcaaaacagtcagggtatagcaatgcagtgaccacaatggaaggcattgatgatgaacagccggactttatgcaactacaacgtattaagatcagcggaaaagattcattattcgccgtcaagcttcgtttaaaacttggtacgcgtgagggctaa

SEQ ID NO: 43483 - DNA, 888 bp, Acinetobacter baumannii
atgcatattgtctatgtctctgatggtaaagcagggcatcgctcacaagctttaggcttgtttcaggcgatgcaaagacagcaggcaaatgcaacttttgaagaagtctctattaatgacttgcctattctttctctaatcaaaacgcttttttcttcaaaaaaatctctatttcaacaggcacccgattttatatttggtgttggaagtcatacacattttcgtgtctggttgctcggtaaaattttcaaaaaggctaagaccattattttaatgaagccaaatttaccgacggtttggtttaattatgctgtgattccagagcacgacggtattcctgcgaataatcgagtggttgttacgcgtggggcattaaatcccattcgtaatgaaaaacgccatcaagcttctagaattttaattgcattaggtggttcgtcaaaacggcatcaatggaaccaagaaaaagtattattaagcgtgcaaaagattgttgagaataatccggatgctgaaatcattctaacgacttcacgtcgaaccccagcagagtttattgatattttaagacaacaaagttttgcccagcatttacaaatatttccggttgagcaaacacctcaaggctggatttttgaagagatgcaaaaagcagaagctgtatgggtaacagaagatagcgtttctatggtttttgaagcacttactgcgggttgtcgcgtaggggtcatagcaatcgatcggttgaaagacgatagaattacgcactcgattgatcaaatgatagaatcacaactaatttcacagaatacttgtgtcgtacagttgccacaaccttatgcttttaaagaagcagaccgtgtggcaacatatcttttagcgaaataa

SEQ ID NO: 43484 - DNA, 927 bp, Acinetobacter baumannii
atgaatttggctgatcgtgatggttttatttggcaagatggacaattaattgattggcgtgatgcaaagattcacgttttaacccatactttacactacagtatgggcgtatttgagggtgttcgtgcttatgaaactcctaaaggtactgcaattttccgtcttcaagaccacacaaaacgtttgttaaattcagcaaaaatttatcaaatgaaagtgccgtatgatcaagcagcgcttgaacaagcacaaatcgatgttgttcgtgaaaataaattagcttcttgctatttacgtccactgatctggatcggttcagagaaacttggtattgcagcaacaaataacaccattcatgccgctgttgcagcatgggcatggggtgcatatcttggtgatgaagcaatggcgaaaggtattcgcgttaaaacttcatcatttactcaccaccatccaaacgtgaccatgtgtaaagcaaaagcatctggtaactacacgttgtcaattcttgctcaccaagaagttgcacattctggttacgatgaagcaatgcttatggatccacaaggttatgtgtgccaaggttctggtgaaaacgtattcttgattaaagatggcgttttacacactccagatattgcgggtggtgcacttgacggtattacacgccaaaccgtgatgacgattgctaaagatcttggttatgaagttgttgagcgtcgtattacgcgtgacgaattctatattgccgatgaagcattcttcacaggtactgctgctgaagtaacaccaattcgtgaatacgatgaccgtcaaatcggtgcgggttgccgtggcccaattaccactgaaatccaaaagactttctttgatgcagttcaaggtaaaaatccaaaatatgaacactggttaacttacgtaaaataa

SEQ ID NO: 43485 - DNA, 2751 bp, Acinetobacter baumannii
atgaatgcggagcagttacaaaaaacattgcgtgccagccaatatgctgaacaagttttaggattacatcaggctgttttagaacaagattatcaaatagatcaatttgctgcaccactctcaacagaacaaatttaccaacttgtagacatcacgcttgatggaattggcgatgaaataacttggatgcgtgcgcttcgtatactgcgcagtcgtttaatgtttcgctggatctggcaagatgccaatcaactgacggatgtcgttacacttactcgtgaactttcagactttgccgatgcaagtatttgtgccgcaaaggcttttgctcgtgttgcattggttgctaaacacggcgaaccattaagttattcaggcaaagttcaagatttgattgtggttgccatgggtaagcttggggcacaggaattaaatctatcaagtgatatcgacctgatttttgcctttgatgagcaaggcgaaaccaacggtcgtaaatgtattgatgtacagcagttctgtattttgtggggacaaaaacttatttatttacttgaacatatcaccgcagatggttttgtgtttcgagtagacatgcgcttacggccttggggagatggctctgcattggcgattagtcatgcagctttagaaaaatatttaagtcagcatggccgtgaatgggaacgttacgcatggattaaggcacgtgtagtcactgggggtaaagaagggcaagacttattagaaatgacacgtccttttgtattccgtcgttatgtcgattacaccgcttttgctgccatgcgcgatatgaaagcgatgattgagcgcgaagtattacgtcggcatattgaagatgacattaagctcggggcaggcggtatacgcgaaattgagtttattgttcaggtgttccagcttatttacggcggttctaaacgtgagctacaagatcgtcaatgtttggtcagtcttgagcatattggtgaggcaggcttgttagaaaaacaggccgtactagagcttgaagatgcttacctattcttacgccgtgttgaacatgcaattcaagccttgaatgatcaacaaacgcaactattaccagaagaagcagatttacgacaacgcattatagataccttgggttttacgagttggaatgaatttattgatgttcttaacgagaaacgccaaaaagtaaaagttcagtttaagcagctcattgaagacacaagttccaatgcagctaccgagaactttggacagttagagcagcagctagatgaagtgttagatgataatgcaaaaaatttaattcatgagttctggcatggtcatgcacttaaaaaacttccttccaatgccgtgcagcgtttaaaaacgttttggccccatttaattgaagccattttacagtctgaacaaccacaaactgcattattacgtttaatgccactgattgaatcagtcatgcgtcgaaccgtctatttggtaatgctgattgaaagtaaaggggcattacaacgcttagtaaaaatggcgacagtgagcccgtggatttgtgaagagttaacgcaatatccggtattgctggatgagttcttgtcgatggactttgaattaccaaaacgtaaggacttggaagactcattacgtcagcaattacttcgtatcgaaattgatcaggtcgaagatcaaatgcgggtacttcgcctgtttaaaaagagtaatgtgttaacggtcgctgcaagtgatgtgttagctgaaagccctcttatgaaggtctctgatgctttgacagatattgcagaagtcagtgtcaatgcgacccttaatttagcttatcagaccgtagcaaaacgtcatggttacccaaaagatgtcgagggaaaacgttgttcactcgattataaagcctttgccgttattggttatggcaaggtgggtggcattgaactgggctatggttcggacttagatctggtctttattcactatctagatgaacaagccgacacggatggtactaagtcaataacaggttttgagtttgccatgcgtgtcgctcaaaagtttatgtctttaatgaccactcaaacgcttgatggccgcgtttatgaaattgatacacgtttaagaccttcaggtgaggctggtttattggtgacaagcctgaaagcctatgagcattatcagttgaaaagtgcatggctttgggagcatcaggcattagttcgtgcacgttctattgcaggtgatgaagcgctttgccaaaaatttgaaatatttcgccgcgagatattgactcaatctagagatgaggcttatgttcgtgaggaagtgctgaaaatgcgtcagaaaatgaaagaccacttaggttcatcttctgaacaaaaaaaacatggtatttttcatttaaaacaggacgcaggtggtatcgtagatatcgaatttatggcacagtatgctgtacttgcatggagcgggacgaaacccgatctcgcccattattctgataatgtaagaatattagaagatgctgctaaagcagactgcttatccagtgaagatgccacagcattaattcgagcctatcttagtgaacgtgccgaaagccaccgcttagcccttgcgaatcaatccatgcaagtaagcgcagcggactggcgtagtacccgtgcggtcgtttgcaatttatggcaaagattaatagacccaaccgcctcggttgagttggatagtgaatga

SEQ ID NO: 43486 - DNA, 1269 bp, Acinetobacter baumannii
atgacacagcgattagaactacatcaggtagagcagttaacagcttgtaaaatatcactattacttggattaaatgccgagcagaattatattgagcaatttttccggtttagtcttcgcctgttgaagtgtcaaaaagctttgcttacttttaatcaggaaccttatttttggcatcattgcccggatggcatgactgcaatttcttttaaaccttcaagacacctaaaacaatgttttgctaaacaacaggtgattcatcacaatcatccttcttatcaaaatttaatcaactatttaaaagagctaaatattgaatgtgggcgtgccttagctgtccatttggtgcagcctgaccagacctctatgggatttgcagttttcttcgatgatgatgaaaattgttttgacgatgatcaaattcagttgcttctcgattactgttctagctttatgcaacaagtcgagttgaagtttaattatgaagaattaaatgaactctatgagcagcaagtcgcactgaactcgagtaaaacaaagttcttttctattatttcgcatgacttgcgggcgccgtttcatggcttattaggtttctctgaagtgttagctaaagaacgtgaaacactggatgagtcgagtattcaaaacattgctgactatttatacgacacttctcaatcgacctataacttacttgaaagtttgctgacatgggcaatggccgaaggtggtcgctttgtttatcacccaattaattttaagcttagacaagtgagcaatattgtttgtgatgtgctgcatactttggctttaaagaaaaatattgaattggtaaatgcggtttccgaagatttaaaaaactatgccgatatcaatatgatgacttccgtgatccaaaacttggtgtcaaatgcattgaaatttaccgatgttgacggctctggaaaagtgttcattgaagcaaagcaggtgggtacaaatgtcgaaatcactgtgcgtgatacagggcttggcatgactgaacagcaaatggcaaatttattccatccgcgtattacagcaagctttaaaggcaccgctggggaaaaaggtgcgggtttaggtttgagcttatgtaagcgttttgtcgagattaatcaggggaaaattagtgtaacttcccaaaaaggagtgggaacgacatttaaagttttattaccttctgctcaagaagttcctgaacatcatgtagaacaacaaaatacatctgaagcaaaattggtttaa

SEQ ID NO: 43487 - DNA, 834 bp, Acinetobacter baumannii
gtgttgaaaagtaagattgtgaaaatgaacttttacgaaattttgcacgtatcacaagatgcaccagtagagataattaaactagcctataaaggactagctcaaaagtatcaccccgatcggtatgatggttcggatgccgaagacaagatggtgaagatcagagaggcttatgaaacgttagttgatccaataaggcgtgaaaaatatgatcgtttattggctgatgagcttaggaagagcaatttaagctcaacgtcaaatgctaatttctcatcatcagagtctcaaagttttcgatttaatgtatctctagatgttcctgcaaacttttctttgcttaagccgttaaagacgctttggtctttagttcaaggtttctttttatggctgctgtctaaaaggggcattttctttcgtctatgtggtggcatcattggagtagtgctattttttgccgtacttgaagctattttctcaaattcaaccaaggaggatgagggtattatagctaatcagcaatctggaatagaacagacatctggatatgagagcgatgccattcagtctccatacagtccgttaagctcacttgctcttgattcggtggatcagggtacacctgtcagagaaatgacgtatgaccaaccatctcaatcgacatcaagcttgatggagagacagccaacaaagtcaatgtatgttccacagaatgtggatgatagttcgcttgaggtggaaaaggatgctttacaagccgaacaggcagcgataagccctgaacaagaagctgcaataatggctcttgataggattgagttgttggaagagtag

SEQ ID NO: 43488 - DNA, 4923 bp, Acinetobacter baumannii
atgtcgtcttttttcgacctaattaacacctatagaacaacagccaaaacagaacgagaaaaaggcacttatttcgagtcattgtgcattcggtattttcagcatgagccgttctacaaagacttgtttgcccaagtgcaaacttataccgactgggccaaagaacagggattaaccggcaaagataccggtattgatttggttgccaccaccaaagacggtgagttccatgcgattcaatgcaagctgtatgatgcagagcgtaaagtatccaaagcggaaatcgacagcttcctgtcagcggcatctaaaacctactttgcgcgccgtatcattgtcagcacgacacacgcatggtcggacaacgctttagcgaccttagagaaccaagacccgccggttacgaagatcgatttagaaaccctagaacaaagcgcgattgactggtcactgtttgcggaaaagaaagaagttgtttttaagcctaaaaagcaactacgtgaccaccaaaaagccgccctgaccaatgtccaaattggcctatatcagcagaatttagagcgcggtaagctgattatggcttgcggtacaggcaagacctttaccagccttaaaattgccgaggaatgcgcaggcaagggtaagcgtgtcttgttccttgtcccgagtctgtccctgctttctcagaccctcacggaatggacacaggaatcgaccacgccgttgcatagttatgcggtctgttcagacaatgaggtcggtaaaaagaaagataaaacggcgatagatgccgtgaccaccctgtcgcatgaattgcagtatccggccaccacagacgcgaaaaagttagcggagaacgtcgagaagcatcacgacgctgatcacatgaccgtcgtattctcgacctatcattcgatcaatacggtgagtgacgcacaaaataacgaaggcatggccgaatttgacctgatcatttgtgatgaagcccaccgtaccaccggctcaacccacgacagcgaagacgattccaactttgtcaaaatccacgatgccggattcattctcggcaagaaacgcctttacatgacggcgacccctcgcatcttctccgatgaagtgaaaagcaacgcatcggattacaccctgttttcgatggatgacgaaaagctgtttggtgaaaccctttacaccatcaacttttccgaagcggtaaagcgcggcttgttggttgattacaaggtcattgtcctgacggtagattccgacaccatcattgacaagatcggcaagaccattacggaaaacagcgagattgtggtcgatgatgcggcacgtattgtcggatgctggaaggctttatccaagcaaggcattcatgccgacgtaggcgaagatagcgccccgatgcagcgtgctttagctttctgtcaggtgattgaccagtcagcaaaggcacgtaagcaccaagtcagttctactcgtattgccagcatcttccaagaagtggttgaagcctaccaagaggccgaagacaaggaaggcaacgaaatttcacatcgcctgatctgtgaagccgaccatgtagacggcggtatgggggcggataaaaaagaacaaaagctaaactggctcaaagcaacaccggaacagcccttagacagtgaaggcaagccacgtcctgtatgccgtatcctcagcaacgtgcgttgcttatccgaaggcgtggatgtgcctgcccttgatgctgtgctattcctgacgccgcgtaattcacaggtggacgtggtgcagtcggttggccgtgtcatgcgtcttgcaccgaacaaaacacgcggttatgtgattctgccggtggtgattccacctggcattgacccaaacaaagccctagatgacaatctgacctataaagtggtctggcaagtgctaaatgccttacgttcgcatgatgaccgctttgacgccatgatcaacaaaatggacttaaccggcatcgacaagtccaaaatggaagtgatcgccattagcgacaaagtggcagcaaaggcgaagaaaaaaggcgctggcaaaggtggcaccaccatcggcacggtagggaaaaagccaaagaaagacgaggcagaaaataaccagcaatcctttagcttcgaatcgggtgaaattgaacgcgcgattgtggcaaaggtggtgcagaaggtcggcaaccgtcaccactgggaagactgggcgaatgacattgccaagattgcgcagacccatatcaagctgatcagcgacattcttagccgtcctgaatgcgaaaaagaacgcgccgtttttaacgagtttgtcgaagaattgcgcgatgacctcaacaacgccgtgaccgaagaagaagtcatcgaaatgctggcacagcatctcatcaccaagccggtctttgatgcactgtttgatgagtacagctttgccgcgcataacccaatggcactcgccatgcagaaggttttagatgtactgaaccagcaccaactcgacagtgaaacccaagccttacaacgcttctatgacagtgtaaaactacgcgcatcgggtattgatagcgccgaaggcaaacaaaagatcattgtggagttatacgacaagttcttccgtaacgcctttccacgtatgaccgagcgtctaggcatcgtctatacgcctgtggaagtggtcgattttattctgtacagtgtcaacgacatcttgaaacaggagtttggcaaaagtattgccgatgaaggcgtgcatgttcttgacccattcacgggtacgggaaccttcattacccgcctattgcaaagcggcctgattccatcaaataaactgagctataaatacaaaaatgaaattcacgccaatgagctggttttactcgcttattacattgccgcgattaacattgaagcagtctatcacagcgaaattattgatgaatacacgccgtttgagggtatctgcttaacggataccttccaaatgtacgagaaagatgacctgatcgaccaagtattagtagataacagcgcacggcgtaagcgtcagaagaaactggatatacaggtcattgtcggtaatccgccatattcagcagggcaaaaatccgagaatgatgataaccaaaatcttgcatatccttttttagataagcgtatagctgaaacgtatgcgcagaactcaactgcaactttaaaaaataaattatacgattcttatattcgtgcgattcgttgggcgagtgaccgtatagaaacacaaggggtgattggctttgtcactaatgcgggctttgtggatgccaataccgcggacggcttgcgtaaatgtttagtcgaggaatttagctcactttatattttccatttgcgtggcaatgcacgtacttcaggcgagcaacgccgtaaagaaaaagataacgtgtttggacaaggtacgcgcacccccatcgccatttcgcttttagtgaagaatccaaaagcagaacagcaagggcaaatctattttcacgatattggcgactacctgagccgtgaagaaaagttagaaaaggttgccgagtttaagagcttgcaaggcattgcagtagctaacggctggacaaagattacccctgacgaacatggagactggctaaatcaacgcgacaacagtttcgaaaaattcattcaaatgggaaataaaaaagaaaattcagcacaattatttaatgggtattctttaggcgtagctacgaatcgagattcatgggtattcaatcactctcaacaaaaattaaggaataatgtcaaaaaattaatcgacacatattcaaaaaatttgaaagaagtattgaatgaaaatatttctatggaaaatgtaaataaattcttgatacaagatttgtcatgtataagctggactgagtccattaaaaaggacttgataaataagaaagaaatttcttttattgaagacaacttagccgttggaatgtatcgaccattcaccaagcagaatctatattttaattcaagtttaatacatagaaggtatcaagttcccaaaatattcccaaatggcagacttaaaaatctagcaataatgattaaagggaattggaaggataatggccaatttgcgtttattgttaataacatccctacaagtcaacccgatggtggcgcacaatgcttccctctctacctctatgaagcagtcacggaagaaaaaaatgtcggtgcaagtgacttgtttgataactcactcgatttaactgtcagtgaaaccaaatacgagcgtaccgatggtatcagcgatgaaggtttacagcacttccaaacagcatatccaacggaaactatcactaaagaagatattttctactatgtttacggcttactacataacaaggaataccgtgaactctatgcggacaacctgagcaaagagttacctcgcattccatgcgtaaagaaagccgaagatttttgggcattctctaaagcaggacgtgaccttgcccactggcatcttaactatgaaaccgtagagccatacaaggccactctagacaccggtagcacgccgtatagccaactgagcgatgaagacttctatgtcgaaaaaatgaagtttgccaagaaaggcgaaaaaggcacggtagtctataacaagcgcatcaccatcaaggacattccggtagaggcttacgattacgtggtgaatggcaagcctgcccttgagtgggtgatggaacgtcagggcgtaacaacgcataaggacagcggcattgtgaacgatgcaaacgactgggcaattgaaacaatgggcaatgcagcttatccgcttgaattgttcttacgcgtgatcacagtgagccttgaaaccatgaagattgtgaaggcgttgccgaagttagatatttaa

SEQ ID NO: 43489 - DNA, 1230 bp, Acinetobacter baumannii
atgacatacaatattcagttcgatcaacattttgaggcatattacgatgccctcataatggatgacatgctaagtgtagataaagaagcggacgcattgttcgacttactttacctagagtcaaaagcaaaattacaagctgaggcattctccgctacaccttgccccacgcaagacattgagacgcgattagatgcttatcaggctcgcccgagcatgattgcaaatgctgaggcggccgaaatcattgaggctgaaatctatagcgacatcaacacctacgaatttgccaaacacctagagtttaaaagtgagcttttgcgacaaagcaaattcacgatccactacactcctatccaaatcaaggcagtgatcgattggcttgaccttaaattcgaggtagaccccaaggtatgcgcgttcgtccacagacctgatgctcgaagccatatcaaaaattttatgacccgccaaaccggtataaggcattttgttcaaaatgatgactgtgacatcaccaaagatggcacggcgtttacgatcaggctacacgacatcggcagtctaaaagacttgcggcaaattaccgaccttttggcgaaacaatacggcgcggaatacaggaaaatgactatcgtggggattgagcttgcactagacttttacaatgttccaagcaacggattgttaggtgcattacacaagtcgattcgatacagtggagcatccgacaactttagaatctataaggatgtcgtatatagagatgagaaaggaaagccctcacttccacttgcaccttttgtcttgttacagcatttaaatgatgattggtgtatgggcgtcaatcgtaaaggttcgccgttatgttatcgcttgtaccccaagacaaccgatcacaacaaacaacctttgcgattggcagagtatcggttgagggcggaagtgacactcatgggtgaagcattgtatggtattgatgaccacatcgaaaacctatccagcatcatcaaacatgggtttaagcaccttgcttttaccaagctcagcaagaatgcgaccgcgaaagacaaagaagactaccgccaatccatcaagccgtttgggatgcaacaaaatgtgatcagtaaaaaccggaataaacggaagctacccgatgcagttgcaacgcatggagaattaaatgcgctggtaaaaaaggcggttgataatcttgtgcgtaaattctaa

SEQ ID NO: 43490 - DNA, 261 bp, Acinetobacter baumannii
atgatcatggacgtcatgacagcaaataacaccatcaccgaagcggcaacggtcatggatgaaatcatcgccgatgttgttgtaaccatcatcaacgaaaacgatggcagttttgacctgacaacaaaagcaggcatcgacgaggcggttgaacatgcagcttatttttataagcaggcaggcatcaccctcaacacatcggatgtaagacatgctttacatcggaaattgagttcgatcaaaaagtttgagttggcgtaa

SEQ ID NO: 43491 - DNA, 240 bp, Acinetobacter baumannii
atgaagcttctaaatcaatggcatgcagccgaattaattgcacagcaccttaatggtgaagtccgtagttggtatggatacctgacacgtaatattaggaattgggataaacaacatggctacaagatcacggcccatgttgaaaatggaaagcttgcttacagtcgtgaggcattgcttgagtttgtgcgaatcatgaaaactccgcataaggatacgcggaaaggagataaaaaatga

SEQ ID NO: 43492 - DNA, 210 bp, Acinetobacter baumannii
atggaaaatattcagcctttacgcctgtccatgaataaagtgtgcagtatgttggatattactagagaaggtttgaggaaattgatgatcaatgatccaaaatttccgagggccctgaaaagtggcccatcgaggcaggcggcggtgtatttcgactaccaagacctcctaaattggtacgaaagccaaaaaaatcaaaattatagttga

SEQ ID NO: 43493 - DNA, 1422 bp, Acinetobacter baumannii
atggcaaaaatcgtcaaacctctcaccgatacaaaatgcgctgctgcaaagcctaaagtaaattcacaaggaaaatccgttgttaacaagttggcggatggcaatgggctttatctgatcgttagaccgacaggtactaaaacttggcagttcatctatgggcgaaaacaatacttgaacacgaaaggtcgacctactgatggagtcattacgataggtgactattctaaggcgggtgttaaaggggtgattgtctctttggatgaagcccgtgaaaaaagaagatttttcctgtctcaaattgaaaatggtatagacccgattgatgctttaaaactcgaagaagaaaagcttaatgatcggtttgactttgagagtatcactcggcagtggcatgttgcttatgcacagtcatctggatgccaagaatctacgattgctaaatctttaagaaacttcgaaatgtatgtatttccactgatcggggagcgtttagtagattcgattaagccgcgtgatttgagcaaggtattggaacatattgagaaaataggctttagtgaggtctacgacaaaattaagcgtaggcttggggctatctttgcctatgccgtaagcaaagggtatatccatgagagtccggctctgcatttgaaaggagcgctcacgagaaagaaggaagaaaggcattatccaaaattgcctttggagagactgcctgaattttttcagcggttgaaaaatgacacgggtaatccactcacaaaactttatacagagtttgcactgcatacttttacacgttcaagtgagatgatgtttgcacgttggtctgagttcgatttagaaaaaagtatttggacgatccctcctacgcgtaccccagtagagggatgtaaaaactcgcatcgaggcgcaaaaatgcgcagggaacatattgttcctctatcccgacaagtaaaagagcttcttcaagaaattaaaatgtatagcggtatgagtgctcacgtttttccagcggagaacgatgctagtaaattcattagtgaaaacaccgttaataagaccttaactcggatgaaatatgacactaaaaccgatgtttgtttacatggctttagaggcatggcgaggggtgcattggcgctcagtggactgtttgatcgtgacgcaattgaaaggcaaatgagtcataagagtgacaacgaggtagagtgggcttacacgcatcatgttgagtatcttgaggagcgcaagattatgatgcaatggtggagtgactatctcgaccaaaacaaatcgaagtttatatctccgcaagattttcgggatcagttgcttatgggggctaagaatggagttcatagctttaagtatggcaagttgatcaagtttcagatggcaatgttgaacgcaagttga

SEQ ID NO: 43494 - DNA, 1038 bp, Acinetobacter baumannii
atgcaactgtctgacttttcctttgaactacccgatgaacttattgcccgttacccactcgaaacacgtagtgcttcgcgtttattgcatttagatgctaagggccaatatcacgatcatatgttcacagatattattgatctgttcgaagaaggtgatttattggtactcaacgataccaaagtcatgaaagctcgacttaaagggaaacgtgctacaggtggtgctattgaaattttggttgagcgtatgctgaaccacaccacagcgtattgccatattaaagcgagcaattcacctaaagcaggggctgagctttttgttggtgcgggcaatattcccgtgattgtgcgtggccgtcacgaaaacttatttgttgttgagttttcacaaccaattttgccagtacttgagcaatatggtcagttacctatcccgccttacttcaatcgtgaagcagaagcaattgacactgaacgctatcaaacggttttccataatccagaaaaaattgccagtgtggctgccccaacagcaagcttgcattttgatgaagagttgttagcaaagttagaccaaaaaggcgttaagaaaacctttgtgactcttcacgtcggagcaggtacttttatgcctgtacgcactgatgacattacaaatcatgttatgcacagtgaatggtgtgatgttcctcaagaaactattgatttaattttggcaactaaagcacgcggtaataaagtgattgctgtcggcacaactgcaacacgtgctttagaaagtgcagctcaagcgcatggcggaaaaatcgcagcatggactggtgatacgcaaatctttatttatccgggttatgagttctgcatcgtagaccgtttaattactaacttccatttacctgagtctaccctgctcatgttagtttcagcattgtcaaatagagaaaatattttggctgcttatgaacatgccgttaaagatcgctatcgcttctttagttatggagatgcaatgctgattgataaattagaagtttaa

SEQ ID NO: 43495 - DNA, 1029 bp, Acinetobacter baumannii
atgccgattgataccatacaacaagcacttcatataagacgtaaaaaaaacacacaagtctttcgtaatattgcccgactttgggatgctggacaaaagtcacaaacagatcaagaactcttaaacgcgttacatccatggggtgaagatcataaccttcgttttgtgaataccctgtcgtatttattaagtatttgcagtattacgacgctattatttggatatttttttcatcctcatattcaatatatttggagtctattatgggcatttttaactggtttcctcgcctatttgctctatgaaccgcaaaaacctttaactgaagttattcattatttagaacagcgtatgactgctttacgttatggcctaaagtttcagcagttaccagtttatcttccaatacaagcccaacccattttagtcttaagcaaattaaaacaacactttccactttttaatcgaggcaatgaagcgaatgaaattaccgagtttgcttcagtgacatggaatgatggcattaccgatcatcaagtcctgctatttaaatatcactatgtaaataacttacctattcttcaagatcaaaacagcgataaaaaaatagtaaaagagattcataaagatttatggggcgcttttatttttcaaataccagccttaggtattgctgtaagtaatcaacgttctcgcttttttgaaccatacttatgcgaatggcaaagtactgacattttgattaaccaagagctcaatatcttcggtactgaccagcaccagttagctaaagaaattagtccaagtttaactttaaaacttcatgatttttttcaacattttaccggtgatttaatttatcatcatgaagagcaaatattatgttatctcggtgagcaagatctttttcaaaccaccagcaaacgtagtgaaattcatgatattccagcattacgtggacatttacgtaccatgaccatgccgcaatatgagaaatttcaacaattcatgcttaatttaattaaataa

SEQ ID NO: 43496 - DNA, 570 bp, Acinetobacter baumannii
atgaaaggcttattcattttcttggggattttcgtcgtactgattgcgtggggcatccacattcgtaacaacattgtacgttattttaacgcgaccaaacgtgcttgggcagaggttgcaaatttcgaacgccaaaaagtaaaaacacttgaagcattagaaactactctcaatcaatatactcagtttgaaaaatcgactttagaaaaggtgactgctttacgtcagcaaattctcagtttaaatatcgatcatactgatattgctcaattacagcagattgaaaaaatgagcaaagagctgatccgtagcctaaatgtcgtagttgaaaactatcctgaactaaaagcagatacgctttatagcaaaatgatggacgatattcaggaacaaaacgaaaatgttggcgcggcaatcagcatttttaaccgcaatgtcgaagtatttaacaaccagattgaagtgttcccaaacaacctgatcaatacaatgacgttatctaaaaaagcaattcgtccttttcgcgataatttggctacagacaattttgactataaacctaacttttag

SEQ ID NO: 43497 - DNA, 1134 bp, Acinetobacter baumannii
atgaagtttgaaaaattaggtcagtcgggtcgtgcccgtcgtggtcgtttaactttagaacacggtgttgttgaaacacctgtttttatgccagtggggacttacggtacggtcaaaggcatgttgccgcgtgatatcgaagatattcaggcgcaaattattttaggtaataccttccatttatatttgcgtccaggccttgaagtaatcaagcaacacggcggattgcacgactttattaaatggaataagccaattttgactgactctggcggcttccaagtatttagtcttggcgctatgcgtaaaattaaggaagaaggtgttactttccgctctccgatcgatggttcaaaagtgtttttatcgcctgaaatttcaatggaaattcagcatgtattgaactctgatatcgtcatgatttttgatgaatgtacgccttatcctgctacacacgaagaagcacaaaaatcattacagctttctttacgctgggcaaagcgttgtaaaacgcatcactatgatgagcttaaaaataaaaatgccttattcggcattattcaaggcggcatgtatgaagacttacgtgacgagtctttaaatggcttacttgaagttggtttcgatggttatgcaattggtggtttatctgtaggtgaaccaaaagaagagatgatcaaagttttagattatcttccaaacaaaatgccacaagacaaaccacgttacttaatgggcgtaggtaaacctgaagatatcgttgaagctgtgcgccgtggtgtcgatatgtttgactgcgtaatgccgactcgtaatgcacgtaatggtcattattttgtcactgatggtctggtacgtattcgtaatagtaaatatcgccatgaccaaggtcctcttgacccacactgcgattgctacacatgtaagaactttacccgtgcttatctgttccatcttgaaaaatgtggagagatgttagcatctatgcttggtaccattcataacttacgttattaccaacgtttaactgaaggtatgcgtgatgcattagacaatggcacttttgatgaatttgttcaggacttttatgcccgccgcggattagaagttccaccatgccctgtcgatgaataa

SEQ ID NO: 43498 - DNA, 330 bp, Acinetobacter baumannii
atgagcttgttcatttctactgcacatgcagctccagcagcagcccaaagccctggccttttaccaaacattttgatgattgttgtattcgttgcaatcttctatttcttaatttggcgtcctcaagcaaaacgtgcaaaagaacaccgttctttaatcgaaagcttgggtgttggtagcgaagttgtctttgctggcggtttaatgggcaaagtaactaaacttgaaggtgactatgcggttgttgaacttaaccgtggtgtagaagtaaaaattcagcgtgccagcgtaatttctgtattaccagaaggcactctaaataacctttaa

SEQ ID NO: 43499 - DNA, 1902 bp, Acinetobacter baumannii
atgcgttaccctgcatggaaatatttactgattctggttgttctggtagtcagtacattatacgcactgcctagtctatatccggatgagcccgccgttcaaatttccggtgccaaagctggtacccaaattgatcaaagtgtggtgcaaaaagcagagcaaattttaaaaacagcaaatattgcaagccacgataatacttttacaaataatgctgctctcttgcgtgtcagctcttctgaagcgcaattgaaagcaaaagaagtattacgccgtgacttaggtgatcaatatgttgtagccctaaaccttgcaccaacaactccagaatggttgcaaaaaattggggcgaaaccaatgaaacttggtttggacttacgtggtggtgtccacttcttgcttgaagtagatatggacaaagccatttcccaacgtatggaaacctctgccactgatttgcgtcgtcagttccgtgaaaacaaaattaaatttaacaatcttgcgttaaataataatgtgatcactgttcagtttgctgacaatgcggatcgtgatgcagcaatggattttttacgccgtaatggtaatgaatatacccaacaggcattagcgagcacgacaggttcaatcctaaagctcacttatactgatgtacgtcgtcaagaaattcaggcttatgcagttaatcagaacttaacaacactacgtaaccgtattaacgaacttggtgttgcagaagctttagtacaaagtcagggtagcaaccgtattgtcgttgaattaccgggtgttcaagatacagcagaagctaaacgtgttttaggccgtactgctaacctcgaattccgtttggtatctgacttaaatgatcaatatattgatccatatacgggtaaatataatggtcaaccgttacctccgggtacggaagtttttgcttatcagtctttagatagtggtcgccaactgttgttgcaacgtaaccgtatcttgactggtgaacgcgttcaaaatgcaagttctggctttagccaagactctggtggtgccgaagtaaatattacgctcgacagtgctggcggtaagctgatgtcagatgcaacccgtaatgcagttggaaaacgcatggcggtattgttcatcgaaaataaacaaaagattagctacgttacagatccaaaaactggtgctcaaacagaagttcgtacaccatataccgagtctgtcgtgattaatgccgcaaccgttcaagccgttttaggttcaactttccgtattactggtttaagttcacctcaagaagcatctgaacttgcgttaatgcttcgtgccggtgctttagctgcgccaatgtacttcgttgaagagcgtgttgttggtccaagccttggtcaagaaaacattgataaaggtgtactatcaacgcaaatcggtttcttgcttgttgcaatctggatggtcgtattcttccgtctatttggtttaatcgcgaactttgcacttgtatttaacttggcaatgattttaaccattatgtcttggataggtgcttccctcaccttaccgggtattgcgggtatcgtcattaccattggtatggccgtcgacgccaacgtactgatatgtgaacgtattcgagaagaaatgctctggggggcctcacctaaacaggccattgtggcgggttatgatcgagcctataacaccattttcgactcgaacttaacaacgttccttgttgcattcattctgtttgcaattggtacaggcccgattaaaggtttcgccgtaacattaatgatcggtattatttgctcaatgtttactgccattacagtaacgcgtgcgattgtacaaatcatttatggtaaacgccgtaacttgaaaaagttgagcatttaa

SEQ ID NO: 43500 - DNA, 963 bp, Acinetobacter baumannii
atgactaaagtgactcaacagccttcaaaacaatatggtcgtccggatgatgcaaaaatcatcccgttcatgaagattgctaaacctgcagcaatcttctcgatccttattactttagcgagcattttctttattgcgaccaaaggtcttaacttaggtttggattttacaggtggtgtttcagctgagcttaactatgctcagccagcaaatcaggcagaagttattcaggctctcgataaagctggttttaaagatgctgtagtacaaactttaggtagtaataaagacttacttgtccgtatgccagtacaagatattaaggttgaagatcttaataacgcgattaccaaagctgtgcaattaccaaacaatgcagcagaagttcataaagtggactctgtaggcggtcaggttggtaacgagctttatgttcgttcggctggtgctgttgcacttgcgctgattttaatgttgatctatgtcaccattcgctttgagttcaaactcgcaatgggtgccgtgatgtctttattccatgacatcatcatcattattggtgcatttgctttattccaatggccatttgacctgacagttttagctgcggtactggcggtgattggtttctcgcttaacgataacatcgttgtttcagaccgtatccgtgaaaatttccgtaaaattcgcggtgcaactccacgtgaaatcgttgatattgcattaactgagactttacgccgtaccatccatacctcaatgaccttattgctcgtagtacttgcaatgatgttcttaggtggtgatggcttacactggttctctgttgcaatgtttgtcggtgtctttgttggtacttactcttcgatttatatcggtacagcatttgccttatggcgtggtcttaaccgtcaagacttcattgttcaggtcaaacctgaatttgaagatgaaatcccttga

SEQ ID NO: 43501 - DNA, 1311 bp, Acinetobacter baumannii
atgttaaagaaaaatattttactgtttgtgatagtaatctatcttattacagcactattgggatatcgaattggctggtctgtctttcaatatgatgaacttcgtttattgcagtttcctttagcgttatgtgctttattaatattaatctccgcaaaaaaactaaaatactcaatttatagtcaaattaatttttttattattggggtatttatattaattcaacacataaattggggaatttttgagtttcaagagttttggtctgcgatagcattactttttatattttctgccttaacatatgagttaaggaatataaaaaatatagagcatggtattgcactaattgtagttacagcaattattccatgtttatttattttgatttctatttttaattttattatccatcaacaatggtttgattggcagtttaactctggcacgattcggatttatgatagtgttattgttcccttgtttttcttcctgatttatctaaaaaataagaaatatccttatatctcttatttttaccctatagtaattttcttttttgctttagcatggttttttgatggagctaggtctgctttacttgcggtaatgacaggattgttagttctctttatatattctaaagaaaatcgaaagcttattttgcaaagctgtatttatatttttttagctttttttatttataaaatcactatttttttagctgaaaaaaatacaatgactgtaatacgaacgggaacatcgctgcgcgcagaaatgtggaagtttgtatttgaacaatggaaacagcacccatttactggggttggtggtggatacttgtctaaaatacagtatgcgtatggacatcatatacataatctatatttaagacttatttttgaatggggcattataggtctcatattctgtatatggatgttgacccaattaattggtttatttaaagataaaactgtttcactaattttgaaagttggtgtgatcgccgttttagttgatgcaatgttctcaggtagtatggtgtacccagcgtcacaaattgcctgtgtattatttatagcttttactttttctcatagagagttaacttctagttcccaatattcttctaggtcgacaaaaatactgattgctttatggggagttttattcttatacatcacaataatgtatttagggcaagatttaacttgttggagttgcggaagctatggaggacgaatggctccaaacttttggttttatggtggtgcggagcacttagtaccagcttcaaaaattccttaa

SEQ ID NO: 43502 - DNA, 1629 bp, Acinetobacter baumannii
atgcaagtattctttctgttcctcgcagcaattttgttgggttttgcgtggttatcaccatttcactataacccttgggtaatgttttctagtgaaatgagtacttttgcggcaggtttaagtgtcttagctgcacttttttatcaaaatattaaaattccgcgtgcacaattattgctattgccatttattttaattccagtggtgcagtgggcttttggtctagtttttgattttagtacagctttgttaagttcactttacttattaggcttctggtttatggttgtggcgggttataacttgtcactagatcaacaaaagcgagatcaaatttttacaggctttagtttattactgattattgtatcaattgcgaccagttttattgcgatatgccaatggttaaatattgaatctcattttgtgcatatgttgcatttaattggtaaccgtccttacggcaactttggtcaacctaacaatatggcaacctttctgattatggggctattaggttgtctatttttatatgaaaagaataaagcaacagtttggttacttttcccttcagcacttattatcttgtttacaatcgctttaagccaatcaagaacttcttgggtggtttttccatttttacttatctattggatagttaaactatttggaaaacaaaaaagatttggttttattcaagggttcttgtggtgtgctggtttttttgtaatagccggcgtaattctgccatttgctactagtttaattgaagcatggtcgagcgctgatgtagcccaagcaagtagtttagttgaaagagcaagctctggatatctacgttttaatatctggacccaaatgctacttgctgtacagcaacatccttggttgggttatggttggaaccaaaccagtgtagcgcaaatgtcagcctatgctctttttccaacaactgagtggacgaccagtgcccataatattttattagatctcatcatctggaacggtatcccaataggtatagtcattattgcttactttgcatgttggttcctttggctaaatcagcaggctaaagaaactatctcaattattgcaattatgatggtgtgtaccgtactcattcatgccatgttagagtttcctcaacgctacgcttacttcttacttacttgtggattcttattaggcataattcaggcacagacacctgtactcaaaggtattgtgctcaacaagcaggttcttcgtttaatttggggagtcagtttaatacttctgctagcaatttggcgtgactataatgtctatgtcacaaatagtaatttgttgtttaagaataaacagccaaatgctgaggttttgggaagtaatcagatttttgttttaacgcagtttgagcagcgtctaaaatggattgagatgaagcctgaaactactttatctgatgctgatttagcagtgtggggtaattttgtgaagaataaagcgacgccttataacttgcgtaaatatgcccagctacttgcctataatggaaaagtagaacaggccgagcaacaaatatttattttgcagcatctttatcgacagcaaataactttggcagagttgttaaaagataaataa

SEQ ID NO: 43503 - DNA, 465 bp, Acinetobacter baumannii
atgaaaggcaatcgtgatgtcattaatcagctcaaccaagtgctgtatcatcatttaactgcaattaatcaatactttttacactctcgtatgtttaatgattggggaattgaacaactcggttctgccgaatataaagaatcaattcgccaaatgaagcatgctgacaaaattattgagcgtatcttatttttagaaggtctccctaatcttcaacacttaggtaaattgtatatcggtcaacatacagaagaagttctgcaatgcgacatccgtaaagtaaaagaaaatattgaagcaattcaaaaagcggtcgctttagccgaaacagaacaagactatgtaacgcgtgatttggtacaagaaatcttagaaaaagaggaagaatattgggattggttagatactcaaattgatcttattggcagtgttggtatcgaaaattatattcaaagccaaatgtaa

SEQ ID NO: 43504 - DNA, 195 bp, Acinetobacter baumannii
atgtacgtttgcttgtgtcgtgggattaccgatcaggatattaaagacgctattgaaaatggcgctgaaagctatcgtgaaattcgcgatttgcttgatcttggtacttgctgtggacgctgtgcaccagaagcacgtgctattattagtgaagaattagcagaaattgctgctcgcatttctgtagctgcataa

SEQ ID NO: 43505 - DNA, 384 bp, Acinetobacter baumannii
atgtcccgtcaagtcattcatactgaaaatgcccctgctgccatcggcacatattctcaagccattttagtaggtaacacactatatttatcagggcaaattggtttagatccttacagtatggaacttgtagacggtattgaagctcaaatccgccgtgtttttgataaccttaaagcagtatgtgaagctgcaggcggcacacttgcagatattgcaaagctcaatatttttcttactgatttatctaatttccaactcgttaaccaaattatgggcgaatattttgctcaaccataccctgctcgtgctgcacttggtgtagcaagcctgcctaaaggggctttagttgaaatggatggaattgttattattaatcagtaa

SEQ ID NO: 43506 - DNA, 2106 bp, Acinetobacter baumannii
atgccaggcgaagaggtcagccaagccaagcaacagctcaaattaattatcgacccttacttatcggtaagtgaagtcgaaaaagtgcttgctgcctgcgattttggagatctggcacacactggtattacccgtaaaagtggtgaaccttatattctgcatcctatcgcggttagctgtattttagcgaatatgcgcctggatcctgaaacattaatggctgcacttttacatgatgtcattgaagacactcaatatacaaaagacgatattattgagcgatttggacaaacagttgcagagcttgttgatggcgtaaccaaactaagccagtcgagcgataaagaatataataaagctgcttcttttagaaaaattctacaagctactttgcaagatccacgcgtcattattattaaattagctgatcgctaccacaatatgaccacattgggcgccttacgtcccgataaacgtgctcgtattgctcaagaaacctttgatattttcgtaccgatggcaagattagtcggcatgaatgaaatggccgataaccttgaaaatttatgttatcaaaatctcgatttagatatgtttgataacgttcaaaatgcgttgcttcaaaccaagccagagcgatgtaaataccaaagtatctgggaacaaaatcttgcggagcttctccacaattatcatattcaaggtcgaattaaaaagaaaaataataatattgagctcttacgccatttcgtaaaaaatgaaatggatttacaagaacttactcatagccatgcctttgaaatcgttttgcagtctattgcagactgcgatcgtttagtagcagccttaaaagaaaattttcaggtcatccaatatcaagatcatatccgccgcccgttaccaggtggcaatcagtcattaatgatcaagcttaagggtgaaaaaactaccttatcgctcactattcaaactgagttgatgcgtaaagctgcacgtttcggtgtagtactcggcgaaaatgctccacaaacttgccgctctgccattcaagcttccatgcagaacctaaatacactcattgatggtgaatgtgctaaaacgacttttaatgacttacttgattatttgcatcaagaaaaaatttgggtttacacaccacacggccagttacatgagttaccacaaggtgccacagtagttgattttgcctattcagctagtcttttcttaggcaaccatgcggtaggtgcgaaagttgatggtgaaattaagccactttctacaccattagttagtgggcaggttattgagattattactgacgttttagcaacgccaaatccagattggctgagcttcattaacactcaaaaagctcgccgtgctttacagcacgtactcaaagaccaagatattgaagaacaacgtttagttggtgcccaagcactttcacgagctttgaaactctttaatcgttctattaacgacctttcagatgcagattggttagatctcttacaatggcgtcatattgataataaagatgcattatttgagcaaattgctgttggagatttacttcctcaacttgtagctaaccatttgtttgcaaatgacaagcatcctcgagcagaaaattcagatcgactaattcaaggaactgaaggcattgatgttaaatatgcccactgttgtaatcctattttaggcgatccaattcaaggccatttaacacgacgtggtttaattgtgcaccgtattcgttgtcataatttgcttcatgaacaacatttacacccagaaaacattatgccgcttcaatggaaagcagatgacgtagatgatgtacgttttactgcttaccttgcgatttatatggcaatgaatgatgaacaggtatcagacctcatctaccaatgtcgtaaaaataatgctggggtagaaatggtacattccaacgaacagcgtactttcgtcaatattgtagtaaacaaccgtaaacatattgcaaaagtcattcgtgatttacgaatgcactatggcttcccacgtattgagcgtctagacgcccctgctccacaaatggaaatttccaaagtcagctaa

SEQ ID NO: 43507 - DNA, 279 bp, Acinetobacter baumannii
atggcacgcgtcaccgttgaagattgtttagatcatgtagacaaccgttttgagcttgtgctcgttgcaagtaaacgtgctcgtcaattggcacgtcaaggcatggagccaactgtagaatgggataacgacaaaccaacagttgttgctttacgtgaaatcgctgtaggtcacgtaacgaaagaaattcttaaacaacgtgagcaagattaccaaacttctagtcttgatcttgccctttctacaaacagcttaaatttagaaggtttttctttctaa

SEQ ID NO: 43508 - DNA, 630 bp, Acinetobacter baumannii
atgtcgggtctattgtttgtcgtttctgctgcatcaggaacgggcaaaacatctttggtgaaagccctacttgaccgtgtgagcaatttacatgtttcagtttcgcatactacccgaggtcaacgaccaggtgagttagatggtgttcactatcacttcacaacaaaagatgaatttttagaccaagtgaaccaaggtggatttatcgaatatgctgaagtatttggtaattactatggcacttcgcaagcaaccgtaaaacaacagttagctcaaggacatgatgtcttgcttgaaattgactggcaaggtgcagagcaagtacgcaagctgtttcctgaatctaaacagatctttattttaccacctactcaattcgatttacgtcagcgtttatctaaccgtggtacagactctgttgaagttattgaacaccgcttaagttgtgctgttgaagacatgcagcattatgtaaatttcgactatatcatcattaatgatgactttaataaagccctacatgagcttgaagccgtcattacagcaaatcgtttagtcttatctcaacaggcaaaaagacatcaaaatctaattcaagacttgattactccacaaccaaaacaggaataa

SEQ ID NO: 43509 - DNA, 951 bp, Acinetobacter baumannii
atggaaattgtgttagctaatccgcgtggtttttgtgccggtgttgatcgagccatagcaatcgtcaatcgggctttggaatgttttaatcctcctatctatgtacgtcatgaagttgtacacaataaatttgtggtagatgacttacgccaaagaggggcagttttcgttgatgagctcgatcaagtgccagatgattctattgtaattttcagtgcgcacggtgtttcaaaagcagttcagcaagaagcagagcgtcgaggcttaaaagtttttgatgcaacttgtccattggtgactaaagtacatattgaagtaactaaatatgctcgcgaagggacagaagctattttaattggtcatgaagggcacccagaagttgaaggtacgatgggacaatatgacaaattaaaaggtggcgatatttatctggttgaagatgaggctgatgtggcagcactcgaggttagacatccggaaaaattagcatttgttacgcaaacgaccttatctattgatgatacagcaaaagtgattgatgctttgcgtgcaaaattcccgaatattcaaggtccgcgtaaagatgacatctgttatgcaactcaaaatagacaagatgcagtacgtgacctagctgaaaaatgtgatgttgtgctggttgttggctcacctaactcgtcaaattcgaatcgtttacgtgagcttgctgagcgtatggggaaagctgcttatctagtagataatgcagatcaacttgaacaatcatggttcaatgatacttgtaaaattggtgttacagcaggagcttctgctccagaaattttaattaagcaagtgattcaacgtttacaagattggggagctcaggcgcctaaagaattagaaggacgtgaggaaaatattacttttagtcttcctaaagaattacgtatacatgtgacccaagcataa

SEQ ID NO: 43510 - DNA, 474 bp, Acinetobacter baumannii
atgaggggaattattccacaagaagggttcaccttggtcgagctaatggtgacgattgcggtcatggctattattgcattgatggctgcgccatcaatgtcaaatttattagaaagtaaacgtttagatgctaatcaaagagacttaatcaacactttatcagaagcgaaaagtcaggcaattttaggccgtcagaatgtttctgttaacttgaactcaacagcttcaaatacacccacttcattaaattggcagacagcttctaataatactcttgagctaaaaaatatagccgctgatggtacgcaaagttctttaacgactaccactttagcttttaatgcaaatggagtagtggcaaatataactcaagatacgcttttatctatttgtaattctagaataaataaaaagaaagtcattattttgaccaagcttggcactttagtttttaaggccgaggagacttgttaa

SEQ ID NO: 43511 - DNA, 555 bp, Acinetobacter baumannii
atgcatcactataagcaaaaagcccaagctggggtgggcttactcgaagttttggttaccttaattttacttgctattggagttttaggttatgttgccttgcagctaagagctatggatgcctcttcagaagcattaagtaaatctcaagccattctagtgatgaggggattagcagaaaatatccgtacaaatagtactcaagctagccagtatcctacatttgtgcgtagttatagcaactatacatctgatactcctgcacccacgtcatgttttaactctctatgtactgcctcccaacttgctcaatttgatgcctatcaagcagctagaaatgctaatcaactgggtatgagaattacgatgtcaaattgccctggcgttacaaatacaatggtgcaacaacgccagtgcctatttgtcttttggggtaaaactgcgccagtgattactacaaatggaacaaatactagtgtggatgtttcaagttgtatgagtaataacggtgtttacgtgaataattcaacttgcttaatgatggaggcatattaa

SEQ ID NO: 43512 - DNA, 1002 bp, Acinetobacter baumannii
atggctcaatcatttatttctaataaagaacaaggttttaccttgattgaacttatagtcgccttagctttaggcctaatattagtggctgctgcaacacagctatttattggagggcttttatcgagccgattgcaaaaggccaatgctgaaatccaggacagcggtatttttggtttggaatatatggcacgtgatatacggcttctaaattatggaaatgttgtaaatccacaattaacagatacaacgccttggggaggtattgtattaacaggttcaacagcaacaaatgccaacaatattaattttattccaaaagttgatacaaatacttatattccggaagcgttattaagccgtggtgcaggtgatacggtaagtacagtgaataaccactggaaaggtctttcaaatatacagaatagttcaaatgctgaagtacaaagcgatcaactgactattcaattcattgccccgaccaatatgactaattgtgaaggtgtgaatgtgttagcaggggacctaatagttcaacggtattttttacgtgttgataataatggtagctctcaacaggattatgcacttgcatgtgatgcgaatacccctgcggttagtgctacagcgcaacctgatatcgttaatggattaggagatgcagggcaaattatactgcctcgtattgaccattttcatgtcttattaggtgcgaaaaacgcagctggtaattttgcttattacacaattcctcagtatcgggtggctgcgcaagctgctcgagatgcgagtccagctgtggctgctccaagaattctgtcaatacaaatatcggtattagcccgttctacaaataatgctcaaaataaggcaatagaccctaatcagtcttttcttatgctagatcagaatgtgcatgctgctgataacagaactcgctttttgcgacgcgtatatagcgtgacaattgctttacgcaatgcaatgggagaaacaatatga

SEQ ID NO: 43513 - DNA, 819 bp, Acinetobacter baumannii
atgacccatttaaattataaaaatattaaaggtcgatctaaggaaacgggtgccacacttattgttgtacttattattttattgattgttatttctgtcggggttttggcaataagagtagcgattgtttctctaaaagttgcaactaatagccaagttggccaattaaactttcaatcttcagatactccgttagagcttattgtacagatgaacccaaccacattgacaaatattaccaatgtgattggagcagcactgaaagcacatgaaagtaaccctggtgcggaatataacttttgctataaaccaacttctacatctgtaagttttgctcaaactcggggggcaagtttgcttcgagctggcagcgccaataatgctgtggttgaagatggtggagtagcaggtttctgcgatttaacaagtgactatgggagtaatcgtcaagcggtagttactcaagttgctgtcagtatcccaaccgatgccatggctgatattccgggttcaaatctacctcgggacataaatctttccgaaggaacccaacttcctaaaagcatgctatctacgcaacgtattagggttattacaacagcgtttttacctgcttatgcctcgacttctttagaagctctgcaatctgattgcttaagtacgagttccgcaaaaattagtgacaactttgatagtgcattaacggataagcaaaccctagctgattgtttggcaaaccataacgtaccttttagtactcaagttcaagaatttaactataccaataagctgactgaaatcacggcaccaggttcataa

SEQ ID NO: 43514 - DNA, 3867 bp, Acinetobacter baumannii
atggggaatatcatgaaactaaaattgaagaattttaagccaaataatttatggtatgccgtctgttcaagctcaatgatattcacatggctgatgacaagctctgtggtgcaggcaagtgatttacaaatttatgcctcacctacagcaggtaaaaaaacaattgtgatgatgttggatacatcaggaagtatgaccaacaatagttatggtgaaaaccgcttagccatgcttaaaaatggtatgaatgcttttttggctagcaataaccctgtcttaaatgatacgcgagtaggtttaggaaatttctcggcaaatggcgacagccgaagtggacaaatcttggtggctgctgctcctttaggagatgcgagtactttaaatacggtaggctcacaacgttataaattaaaacaagctgttgctaatttaactgcaggaggctcaacaccttcagcccacgcttatgctgaagcggctgcttatttgatgggaacaaccacatattcagagacgaattatgctattcgtaaagatagttatatcaaacgtgtaagaagatctgataatagaactgaatattcatattgtactaattaccgtgattcgcaaattgatacagccaacctatggcaaccttgtcgttcaaatagttattggagtagctggtcaacaaataatccaggtgtggataatgctactgcttatgatacttcatctgactggacttattactatacttattactacaccacttttaattatgctgtagcaaatgcagatagcggtattccaaaatctaaatcaaatgatacagctagcaatccgaatattgttgtagaccgaaatgctactaactccaatgcagtgtatcagtcacctttacctgcagtagcgaatcgccagagttgtgatggacaaggtatttacttcttatcggatggcgaaccgaacaatacaacaaatacacgttcggcaagtgtcatgtcgactgctttaggtagtacttttggagctgattttaattgttctggaggtttatctaacactacggcagactctggttgggcttgtatgggggagtttgcaaaaagattatttgataaaacaaagaaccctgccggagtttctattcaaacagcatttgtcggttttggtagtgacttttctagtttgaattcttctgatgtaaaaaatgcctgccgtttaagttcgagaacccagtctgaccgaaaaggagatgatgcgtgttcaccgaatcaatctacaaatgcggtagctgcaccaggttatgggaatggtggttttttccctactcagagttcacaaggcgtaacagacagcgttatcgcatttattaataatttagataaagttcctttagaacccttaaccacaggtgctatctcagttccatatgatgcattgaatcccaaaaatttacaggaatatggttatttacgagcttttgagccaaatccagctaacacgtacttaacatggcgtggaaatttaaagaaatatcatgttgttttatctggagcgaatgcaggtgcttttgaggccaattctggcggattagtctacaatgcaagtggggcttttaggactggaacaaaggattattggaatagctctacttatactgacggaggcaaagtctttttaggtggttcatatgcgaatgtgcctttacccattgctggacaacctgaaacacgtgatgcagaagggaatatcacaaaatattattacgcagtacaaagtaaaatccgcaacttatttactgatgtttccgccgttgcagcagatggtagcttaacgaaaatttcaacttctggaactaatttgctaaaaattccagctgctccaccagaaggaactaatccttttgatacggtggctaatacagcaagttatgttttaggtaaatttgatccatcaactggacaaaatattttaaaagcttttcctataagcttgaaattaaaaatattaaattatttaggttattcaacagatattaatgcaacaactctgccttcatctttggttacatcgaatgaaccttatttatcgatggggggaagtattcactctttaccggttcaactaacctacaatggaacactagatgataatggaaatttaacatctgcgcgagaacaatccatcctctatggaactatggaaggcggattacatattgtggatgcttcatctggtattgagcaaatggtctttgttcctgcagatattttaaatgattcagttgcttccaaagctttagttgttggtcaaagtgatgcttcagctcccgctcatggtatggacggagcttgggtatctgatccagcctataatattactacagtgggaagtggtagctcggcagtatcaaaagtaactgcaaagcaaatgaatatttatggcggcatgcgtatgggaggaagtagctactacggactagatgtattaagccctacttcaccgaaactgctttttagaataggggcagaccagaatgactatagccgtatgggtcaaagctggtctaaacccgtactcgcgaacatccgttataacggttctattagacgcgtcctgattgttggcggtggttatgatcagtgttatgaaaaaccaaatattacgttgactgacgcttgctttaccaatggaaaagcaaaaggaaatgctgtctatattattgacgcaaaaactggtcagcgtttgtggtggacaagtgatacaggttctaatactgataacgccaatatgaagcatagtattgttagccgtattagtactttagaccgtgatgctgatggcttagtcgaccatctatattttggagatttaggcggacaaatttttcgcgtggaccttaataataatcagacaaaaaccaattcgacctatagcagttttggtgtcagagttgtgcgtttagcgaatttagcaacaaatgattcaacttatgatggcacaaatgattatacaggtgggaatgctcctcgtttttatgagcctccaacagtaacgatccacgattatggaattcacacttttattacagtaggtattgcatcaggagaccgtagtacacctttagacgtttacccactcacaggtcgtgaaggtatgctgcctgcaagtgcattaagtggacgtcctgtaaataatgtatatggaattattgatagagactttgttaaaaagaacttaatgtctttaactgataatcagcttgaaacaaaagatattacacggacaggcttaagaaaaaatccacaaattctaagaacaggtgaaacaagagtagctcaaattttcttccccactacaggagtaggtaaaggtggttggtatcgctcgctttctagtacgagcgatggtacagaaaaagctaataatagttttcgtattaaaggaggactcaaagcttttgaggaaccaatggcaattacgggtaatttaattattccagtttatgaccctcaaggaacgggaattgttgcggcagatccttgcctacctcgtgttgtgggagaaacagaccgacaaacttattgtttaccatttggtgcttgtcttaatccggatggaaccattaattcaaataaagaaaacccgagcgggtttcaaacaaaaactggtagtaactgtccagctggagtctctgaatgtaatacaaatgtcattggtgcaggtattcgtaatatcacatttgttccaaaaagagatgaacctcctgtgactaatagttgtggcaaattacagctgtctggaaacgagaacggaacaggtgagtggcagtgtacaagtcatttacttcctgtgcgctggtatgagcgctatcgctag

SEQ ID NO: 43515 - DNA, 483 bp, Acinetobacter baumannii
atgaataaatactctattctacggttcaatcagggggttaccttgattgagcttatggtcgtgattgttatcgttgctatttttgcttcaattgctatcccttcatatcaaagttatagccgtagagctactgcatctgcggctaaaagtgaaattttgaaattagctgaacaattagaacagcataaatcaagaaattttacttataggggttttaccacaacctctataaccctacctcgcgggggatatacgattcagattactgatgatacgaccacaggtaatttattaacaaattctgctgcaaatgggcaaacatgggtaattagagcaaccacaacagattcgagaaattttaattttattgctaaaaattcaggtatacgttgtcaaagtttaacagttacagctgttgataatgattgtggtggtacgactacttgtaatacatgtgaagcgaacagtgaggtttggcagtga

SEQ ID NO: 43516 - DNA, 426 bp, Acinetobacter baumannii
gtgaagaatggtttttctttaattgaaattatggtcgtggtagcaatagttgcaattttagcggctatagccaccccttcatatttacaatatttgcgtaaaggacatcgtactgctgttcaatccgaaatgatgaatattgcgcagaccttagaatctcaaaaaatagtaaataaccgttatccttcggatgcgaccatacagtcaatttatggttctaatgtgagtcctatacaaggtcaggctctatataagttagcttttgcaactctaaatgattcaacttgggtacttactgcaacacctatttctactagctcacaagcaggtgatggaattatttgtttaaatgaccaagggcaaaaattttgggcaaaaggtgccacagtttgtgccctatctgcttcatcgagttggaccgagtaa

SEQ ID NO: 43517 - DNA, 252 bp, Acinetobacter baumannii
atggttgttattcgtttagcacgtggcggcgcaaaaaaacgtccattctatcaaatcgttgtgactgatagccgcaatgcacgtgatggtcgtttcatcgagcgtatcggtttctttaacccaactgcacaaggtcaagcagaaaaacttcgtttagacgcagaccgttttgctcactgggtttctcaaggtgctcaaccttctgaacgtgttgcttctttggctgctcaagctaaaaaagctactgcataa

SEQ ID NO: 43518 - DNA, 549 bp, Acinetobacter baumannii
atgacaccaacacagaatgttcccgaagatcgtattcagattggacagttacgttcagcttatggattaaatgggtggctctgggtgtattccaatacagaacccatgagcaatatgtttgactacttgccttggtacatcgagaccaaggccggttggcaaatcgttgatgtaaaacgttggaaaccacatggcaaaggcctggttgttgctctaaaaggtgtgagtgatcgcacaggagcagaaagcttggttggcgctaatatctggattgctaaatctcaactgccgaaagcagatgtagatgagtactactggtcagatttgaaaggcttaacagtgttaggtcttaatgatgacgaacaggaagtgaacttggggcaaattcatgagttgtttgaaactggagccaatgatgtgatggttgtacgcgctacactagacagcattgattcagaagaacgcatgatcccgtggcataaagatgtggtgcaacgcgttgatcttgaagctggtcgcatttacgtcaattggggcgtagattattaa

SEQ ID NO: 43519 - DNA, 741 bp, Acinetobacter baumannii
gtgttttttgcagtcattacgctttttcctgaaatgtttgaagcgattacagcctacgggattagcgggcgtgcagcaaaacgtgacatagtacaagtcacttgtattaatccacgtgattttgctgaagggaattaccgaagagtggatgaacgtccatttggtggtggccctggtatggtgatgatggcggagcctttggcaaaagcaattaaccatgccaaacaacttgcttcgcaagcaggatgtgttcatgtacctgtggtgtatatgtctccacaaggcaaaactttaaatgaacaggcagtacagcagtttgtcgattatgatggcttaattgtattgtgtgggcgttatgaaggcgtcgatgagcgtttgatccagcattatgttgatcaggaatggtcaattggagattatgtcttatctggtggtgaactacctgccatggtattgcttgatagtattattcgccgtttgccgaatgtaatgtcagatgagcaatcagcgatacaggattcttttgtagatggtcttttggattgtccgcaatacactaagccagaccagtttgaggggttagatgttcctgaaattttaaagtcgggacatcatgccaatattgagaaatggcgttttttgcagcgttatcaacgaactttagagcgtcgacctgagttgattgaaaaggttacgttgactaagcagcaaaaaaaatggctgtcagatgaacaagggtaa

SEQ ID NO: 43520 - DNA, 369 bp, Acinetobacter baumannii
atgagtggtaaacatcctttagttcaagctattgaaaattcacagttaaaaactgaccttcctgaatttgctcctggtgacacagtagttgttcaagttaaagtaaaagaaggtgaccgtgaacgtcttcaggcatttgaaggtgttgtaatcgctaagaaaaaccgtggtttgaactctgcgttcacagtacgtaaaatttctagcggtgttggtgttgagcgtgtattccaaactcactcaccagttgttgctaaaatcgaagtgaaacgtcgtggtgacgttcgtcgtgctaaactttactacctccgtgacttgtctggtaaagctgcacgtattcgtgaaaaattaccagctcgtaaagcgtaa

SEQ ID NO: 43521 - DNA, 975 bp, Acinetobacter baumannii
atgaaaaggaacttaatatttttctgtgctgcaatactctcaggactgagtgtttcagcaacccatgccacaaatgcagagcaagtcaaaagctcattcgtctattcgacttatgcacaaaccaaatatccattggtttttaaccatggtatggcgggttttaatcgagttggaacagatacgcttggtctggactactggtatcagattcttcctgatcttgcacgtaacggaggaaatgtctgggcaacaagagtttctccgtttaactcaactgaagttcgtggagaacaacttgcccaacaagtagaagaaattattgccatcaccggaaagcctaaagtcaacttgatcggacatagccacgggggaccaacaattcgctatgtcgctgggatcatgcctgaaaaagtcgcttcgcttactactattggtgcacctcacaaaggatcgccaatggcagatgtcatcctgaatgttgagggtactcctctatccggactggcaacattagtaaactggttttccgcagcaattacttgggcaggaggtctagacccaaatagttatccgcatgactccctagcaggtgcccacagtttatcgactcaaggctctgcacagtttaatgcccagtttccaatgggtgttcctaccacgtcttgtggtgagggtgcttatcaggagaaaggcatttatatgtattcattctctggtaataaagcgctgacaaacccattagatccatctgatatagcattgacaggaagtagtctagtggttgacccatttggggataatgatgggctggtttctcgatgcagtgcccaatttggtaaaactattcgtgacgactataactggaatcatttagatgaagtcaatcagatcatgggaatacgttctatttttgcagcagaccctgtctcggtttaccgtcaacatgctaaccgtttaaaacttcaaggattataa

SEQ ID NO: 43522 - DNA, 1035 bp, Acinetobacter baumannii
atgcaaaggatgcagaaaaagatatggtggtgtgtgctcggattttttattttgagcctcatcgcatgtgtgtattggctaagcccagactcggaaaatacttcacctcagccaaatcaggatgaagctaaaagtttggtagctacttcgcaatctactttaaattcaccattaaacgaaaatacttatttgagtaaaagtcagcaagatactcaagttaactgccaattaaaaattgatagttcacagcatttagttgtgaatagccaaacccgtgactgctttgaatattttattacgcagtatggcgagagcaatttacaacaagttaaaactcattttgagaaatttatacaagatcaatatttagagccagcccgctcacagattattgatttgtggacgcgttatttaaaataccgtgagcagcttgcacaaattcaaccgcctcaatctaaacaacaagatcaaaattattttcaaaagatcttcagttcaattcaagatataagaaaacgtttcttctctgcctctgaaattgaagggttattttcaacagaagacatttatcagaactacacattagatcgcatgaagattttagaagattcatctttaagcgaaattgaaaaagctaaaaaactcaaagagcgctttgaacaattaccagaagactggcaagaaaacctacaagaactctcaaagcttgatgatttacacacactgaccaaacaaattaaagctcgcaatggttcagcagaggaacttcggcaaatgcgtacagcacttgttggagccgaggcaactcaacgattagaaactttagatatacagcgtaatgcgtggcaacagcgagtgactggctacttaaatcaacgtgatgaagtcctgcatagcaatatgagtgacagcgctaaaaaacaagctattcaacaactacgccaacaacaatttagctcatcgcaagaacagcttcgtcttagaacttttgaaacagtccatgaccaaggaggtgaactaccctttaactactag

SEQ ID NO: 43523 - DNA, 906 bp, Acinetobacter baumannii
atgacgacaaaaaatcaaaaaatttctcgtcgccatatcagtggtgtatttcttttaaataaaccattagggctaagttctaacgctgctttgcaaaaagtgcgttggctttaccgtgcccaaaaggcgggtcatactggtgcattagatccattagcaactggtttacttcctatttgtttaggagaggccactaaattctcacattatttgctggactcgataaagcgttatcaaactactgttcgattaggccaaactacaacaacaggcgatgttgaaggcgatatattacaagaacgtcctatcccggttcttagcgaagagcttattgagcaaactttagaaaagtttaggggtgatattcaacaagttccaccgatgtactcggcattaaaaaaagaaggtaagccgttatatgagctggctagaaagggtatagagattgagcgtgaggcacgcccggttacgatttatgccttagaactcattgaatttactgaaaatagtatcactttagatgtaacttgttctaaaggaacatatattcgtgtgttaggtgaagatattggtgaggcacttggttgtggtggtcatttaaccatgcttcaccgtattcaaactggacattttgaactcatcccaagttataccattgaatatttggaaagcttaacggaagagcaaagagaagctttgctactgcccgtatatgctccaattgaccatttcttaaaaattcaggttcccgaaggacgggaaaaatatttttgtaacggtctagaaagcaatattgatcattctgcagaagcagaagtgttggttttttcgggtgaacgctgtctaggtttagctgaaattaccgataaaaaacggttggtacctaaacgtatcttaaatttgtag

SEQ ID NO: 43524 - DNA, 777 bp, Acinetobacter baumannii
atgggcatggaatgggatgttatccttagtttgatcttttttgcgtttactgcgggagcaattgatgctgctgttggtggcggcggactcatccagattcccgggatcatgagcacttttcctaacatgtcgactgctacggtgattggtaccaataaagtctcatccatttttggtacggcatcggcagcgtatacatttgctaaaaaagtaaagttgcaatggaagcttttagccgttattgccatttgtgctttgattagttctttcgcaggtgcggcttgtttgtcgcttatccctcaatcggtattgcgtcctttcgttttcgtgatgttgattgtgattgcgatttataccctagttaaaaagaacttcggacaggttcataccgagcaaaaaattactacgaaaatgctcgttttagctggtatcggtagtctggcgattggcttttatgacggtattttcggaccgggtactggtagtttctttatctttttcttcattcgttttttacaagtcgattttttacatgcttcggcgttgtcaaaaatcggtaattttatgactaacttagctgcgctgagtttcctcattccaactgggcacgctattttacatattggtttaatgatggcagcggctaacgtgctaggttctattgttggggtgcgtaccgcgcttaaatacggtagtggttttgtacgtattatctttttaattttggtgagtatcctgatttgccgtttgggatatcaaatgtttgttacaggttaa

SEQ ID NO: 43525 - DNA, 444 bp, Acinetobacter baumannii
atgaatattttcgaagcattaagagaaagccacgaaaatcaacgcaacctttctgaacaattaatccagacacatggtttaaccgaagaacgaaaagaattatttgatgcattaaaaaacgaactttatgctcactcagttgccgaagaccgttatttatatatccctttaatgtttgatgatgtcggtttggatattacgagacatgctttatctgaacaccatgaaatggatgagttggtcgagcaacttgaaaaaacggatatgagtagcccaagttggttggcaaccgctaaacagttgagcgaaaaagtccatcaccacttaaaagaagaagagcataaattttttcaacaagctggtaaaattcttaaagatagtgaaaaagaaacgctaggcaataaatatttaaaggaatataaaaagtataaaaaacagcaataa

SEQ ID NO: 43526 - DNA, 861 bp, Acinetobacter baumannii
atgcaaaatcttccaattattgctgtgctctatatgattttgtcgatggtttcgtatcaaatcagcgcttcatttgccaagcaacttattgcggctttagatccgcttaccgttactattttaagattatgtttcgcagcagtgattgttgccgttatgttccgttcttggaaaatctggtctcgtttaccttatttaaaatggcgtgatttattaatgtattgcgcatctttagggttaatgaatatcttattttacacctctcttggaaaattgccccaagggattgcggtaggtctagaatttattggtccattaggcctagccctagtttctatcaaacaaaagagcgaatatatctgggtagcttttgccatgctgggtattgcactcatggtaccttggcaagatccaactcaacaccacttttcttacgtaggtgcagcctgtgctttaggcgcagggctttgttgggcgttctatatttattttggccaaaaagttgtaactcaaaatataggaatgcatgccttaaccatagggattaccgtatctgccctcgccttattaccaattggtatttggtataatggcccagcattacttgatacacagtactggggtaaagccttacttattgcagttttagcgactgctattccctatgcactcgacctaatggcactcaaacaacttaataaattaacttatggcaccctaacaagtttagcgccagcattggcagcattaacaggtttcttattacttcacgaagaaatcagcatgctgcaatgggtggctttagcttgcgtaatgctagcgtcaattggggttactttaagaagcaaaacagcatcatag

SEQ ID NO: 43527 - DNA, 885 bp, Acinetobacter baumannii
atgtccagtccaagccagaaatcccagcttcatgctttgggctttcttattcttgccatgttaagtgtccaaagtagcgcatccttagctaaagtcctgttccagaactttcctgtactgactgtttctgcaatgcgtttatgtattggggcatttattttggctttcatttttcagatctggaaaattaattttagtcaggtccgatggaaagctattttgagctatggctttgctcttgctggcatgaatgctcttttctatttatcgcttgaacgtttacccattggtattgcggttgcatttgaatttattggtccactcagtgtggccctttaccatgctaaacaaaaatatgattttgtctgggtcactttcgcaattattggtctcattttattatttccttttaaccaagcacatagtttggactggatcggagtcttatttgcgatgagtgcgggtgcttgttgggccctatatattattgcagggcaaaagccttctggtatctcaggtaaccataccgtttgtttgggcatgactgtaggtgcttgtatacttttacccattacttttttctcaggctcgattgggcaagttatagaactaccataccttttttattttattggtctcgccgttttagccagcgcacttccattctctttagaaatgttagctctacgcaatttaacacctttaagttttggaacattgatgagcctagagccagctgttgctgcactttccggttttatcttcttaggtgaatacctgttatggaatcaatggttggcactcgccaccattattgctgcttctgtgggttgtaccataaccacccaaagagcccgacaacaacgtgaaaaaacagtaagttaa

SEQ ID NO: 43528 - DNA, 1233 bp, Acinetobacter baumannii
atgagccaacatctttcactacctaaagataaaatccgtttccttttgttagaaggcgttcaccaaaacgcagtcgatactttaaacgctgcgggttataccaacattgactatcgcaaaactgctcttgaaggcgaagcgcttaaagaagcaattaaagatgctcactttattggtattcgttcgcgtacccaattgactgaagaagttttcgaagctgcaaataaattgatcgcagtaggttgtttctgtatcggaacaaaccaagtagatcttaaagcagcgatggcacgtggtattcctgtatttaacgcaccgtattcaaatacgcgttcggttgcagagctcgtacttgctgaaactattcttcttcttcgccgtgttcctgaaaagtcagcggcttgtcatcgtggtggttgggacaaatctgctgtgggttcttttgaaactcgtggcaaaactttaggtattgtgggttacggttccatcggttctcaactttcagttcttgctgaaagtatgggtatgcatgtcatttattatgatgcagtaactaaattaccaatgggtaatgctcgccaagttggttctttagatgaacttttggcaactgctgatgttgtgactttgcatgtaccggatgttccgtctacacgtaacttcttcactaaagaacaatttgcaaaaatgaaagaaggcgcgatcttcttaaatgctgcacgtggtacatgcgtagtaatcgaagatttagctgatgcaatcaaatctggtcaccttgcaggtgcggcagttgacgtattcccgaaagaaccaaaagcaaatggtgaagaattccagtctccacttcgtggtttagacaacgtgatcttgactcctcacgttggtggttcaacgatggaagctcaagcaaacatcggtttagaagtagcagagaaatttgttgcttactctgataagggtatgacactttctgcggtaaacttcccagaaatcgcgttgccattgacagcgggtcaacaccgtttactacatatccacaaaaacgtaccgggtgtattgtctaaaatcaacaacttgtttgctgaacaaggcattaacatttctggtcagtcacttatgactaaaggcgacatcggttaccttgtaatggacgtagatgcttctgcttctcaagaagctttagatatgttgcatgaagttgagggcacaattcgcgtacgcgtattgttctaa

SEQ ID NO: 43529 - DNA, 1410 bp, Acinetobacter baumannii
atgaatgctccagtcgctttaacacctgagttactcacccaattaacagcaatcgtcggtgaaaaccgtattaaaaccgatgctgatagtctcgaaaactggggtaaagatcataccaagcattttaatccgaacccatcggtcatcgtttttccatcaacgactgaacaagttcaggaagttgtgaagcttgcaaaccagtttaatatcgcaattacaccgtcaggtggacgtacaggactttctgctggtgctgtagcaaccaatggtgaaattgtcattagcatggacaaaatgaaccagattcttgagttcttcccggcagaccgtatggttcgtgtacaagctggtgttgtgactgagcaattgcaaaattatgcagaagagcagggtatgtattatccggttgactttgcgtcagcgggttctagtcagattggcggtaatatcggtaccaacgctggtggtattaaagtcattaaatatggcatgacgcgtaactgggtactcggtttaactgtagtgacgggtaagggcgacattttacgtttaaacaaaggcatgattaaaaatgcaactggatatgcattacagcatttgtttattggtggtgaaggtacattaggtttagtgactgaagcagaaattaaacttgagcgtcaaccacaaaacctacaagttttagttttaggtgttcctgattttgatgcagtaatgcctgtgttacatgctttccaaaaagatatcgacttaactgcatttgagttctttggtgagcttgcaatgcaaaaagtactcgaccgtgggcatgttcaacgtccatttgaaactcaatgtccattctatgtattgcttgagtttgaagcgccatacgaaccgattatcgacaaagcaatggagattttcgagcactgtatggaacaaggttgggtacttgatggtgtaatgagccagagccttgaccaagtagagagcttgtggcgtttacgcgaagatatttctgaatcaatcgcgccgtttattccatacaaaaacgatatttcagtattaattactcacgtacctgcatttattcgtgagattgatgcaattgttcaagaaaactatcctgactttgaaatttgctggttcggccatatcggcgacggtaacttacacttaaatattttaaaacctgaaaacttaaccaaagatgagttctttgcgaagtgtcaggtcgtgaataaatatgtgtttgatactgttaaaaaatacgatggttcaatctctgccgagcatggcgtaggtatgacgaaaaagccatatttggaatattcacgctcagctgaagaaatcgaatatatgaaagctttgaaaaaagtatttgacccgaaaggtattatgaatccgggtaaattattcgatctttaa

SEQ ID NO: 43530 - DNA, 369 bp, Acinetobacter baumannii
atgcaacgtttatttttaatttctgcactctgtgctggacttatgacgggttgtgcaaccacaagtaaattaattccttttgtgggctcagaaaccccaatgcaacaagtacttaaaacgcaacccgagattgtaaaagagcataacaatacttcagttcagcaggtatttaaccgagtagaatctccaacagtttctcgcattactgttatacaaaccggtttaatggatgactctgtctcagcaattcggacggaatatttatttaaattggttgatgaaaagtggcaattgcaaaataagcaaaagagctaccaatgtgcaagaggaaaaggttctaaaggtttccagacgcagctttgttcttaa

SEQ ID NO: 43531 - DNA, 315 bp, Acinetobacter baumannii
atgcttactattatcgcggaaattcgtactcaatcgggtggacagcaccgccaaaacgtattgaatgcatttcaaaaaatcattccaactgttttagcagaagatggttgccatggttatgaacctttagttgaccacatttcaaatgcgagcttccagaacaaagaccctgacattattgtgatgttagaaaaatgggaaagtgtagctcatcttgaagcacacttagctacacctcatatgcaagcgcatcatgaagcagtcaaagatgatgtagttgacgtcaaaattaaaattttagaaagtggcgtataa

SEQ ID NO: 43532 - DNA, 588 bp, Acinetobacter baumannii
atgagcaatattttagttattaatggtgccaaaaaatttgcccactcaaatggtgaattaaatgacacactcacgacattagcgacgaatcacctcactgaactcggccacgaagttcaagtcactcgtgcagatagcgactacaatgctgaagccgaagtagaaaagtatttatgggcagatgtcgtaatttatcaaatgccgggctggtggatgggtgcaccgtggaccgtaaaaaaatatattgacgatgtatttacgacaggtcatggttctctttatgcaaacgatggtcgtagccgctctgatgcctcaaaaaaatatggttcaggtggtttaattcatgacaaaaaatatatgttgtcgcttacttggaatgcgccaatggaagcatttgacgatgcggatcagtttttccatggcgtgggtgtagatggtgtttatttaccatttcataaagcaaatcagttcttaggtatgagcaccctaccaacatttattgtaaatgatgtaattaaaatgcctgatgtagatagttatgtggaagcatacaaagcacatttgaacacactatttgcagcagcctaa

SEQ ID NO: 43533 - DNA, 366 bp, Acinetobacter baumannii
atgaaaaagattggtttactcatgatgtgtaatttgttgattctgagtgcttgtacaccaaatacaaatccacctacacctcaagcgaacagtccgatacaagctgttttactcgatcaacctaatcttttaaataatgccagtaatttaagtatttcacagcaaatgaatgctttagaagatccttctaatgctcaagtcactattttgcagacagagccgagtgaagatgctgtttcgaaaacacgtactgagtatttattaaaaaaagatcagactgtttggaaaatcgtgaataaaaaacaaagttatcaatgtacaaaaggcgaggaaacagcagactttcaagttaatccttgtccttaa

SEQ ID NO: 43534 - DNA, 1230 bp, Acinetobacter baumannii
atgaaaaatattcaaacgacagcgttgaaccgtacaacgttgatgtttcctttagctttagtgctatttgaatttgcggtttatattggtaatgacctgattcagccagccatgttggcaattactgaagatttcggtgtaagtgcaacttgggcgccgtcttcaatgtcattttatttattaggtggtgcatctgttgcatggttactaggacctttatcagatcgattaggccgtaaaaaagtacttttgtctggtgttttattttttgccttgtgctgttttttaattttattaacgcgacaaattgaacactttctgacattacgttttttacaaggtattgggttaagtgtaatttcagcagtgggatatgcagcaattcaggaaaattttgccgagcgtgatgcgattaaagtcatggcacttatggcaaatatctcattgcttgcgcctttgctaggacctgtacttggagctttcttaattgattatgtttcatggcactggggtttcgtggcaattgctttacttgcactgctgagttgggttggcttaaagaaacaaatgcctagtcataaggtgagtgtaaccaaacagccttttagttatctttttgatgactttaaaaaggtatttagcaatcggcagttccttgggttaacgttggccttaccgcttgtaggtatgccgcttatgctctggattgcactatcaccaattattttggtcgatgaactgaagctaacgagcgtgcaatatggtttagcacagttcccggtatttttaggtttaattgttggtaacattgttttaattaaaattattgaccgtttagctttaggtaaaactgtcttaattggcttaccgattatgctcactggtacgctaattttaatattaggcgttgtctggcaaacctatttaattccttgcttgttaataggtatgacactcatttgttttggtgaaggaattagcttctcagtgttgtaccgttttgcgctcatgtcatctgaagtgtcaaaaggaactgtagctgctgctgtttcaatgctattgatgacgagcttttttgcaatgattgagcttgtacgttacctctacacccaatttcatttatgggcttttgtcttatctgcttttgcatttattgccttgtggtttactcaaccacgtttagctttaaaacgagaaatgcaggaaagagttgcacaagacttacattaa

SEQ ID NO: 43535 - DNA, 2151 bp, Acinetobacter baumannii
gtgaataacctaactcaactattcaatcgttttaaaacgaattcaattttaatttattgcctgcaaattttaattgtactcacaggcacaactttaggtttactttggttaggtcataatgagctgatcgttcctgtgactttaggtgcgattgctgctgcacttactgattttgatgatcgcttaagtcttcgtttacgcaacctgctctatgtctgcctactcttttttactgtcagcactattcttggttttttagcaccttataaatttttatttattttatatctttcaatttccagtgcttgtttcattttattgggagctttagggcaacgctacgctaccatttcttttggtacgattttactctcaatttatagcatgtttggtttaggagaatatgcacactggtaccaacagcctacttattttgtctatggtgcgttgtggtacggcctaacttctattttattttttattcttaaaccaacacttcctttacaagataaactttcacaaatttttgaagaaatttcagccttacttcaagctaaagcacggttgtttgacccagataataaagaaaatgttgaacagcttttatttgagttatcactacaaaatacacaagttgcgcaaagtcttaaccaaatacgcagctctctgctaactcgccttaaggcatcacgagtcagtaataaaagtatttactggttaaacctatacttttttgcgcgagatatacacgagcaggcaacttctaattatttacactacgagcatatccaacaaaattttagccgtagtgatctcatttttcgttttcagaaaaacctacgcttacaggcacaagcttgccatgatttagcccaatgcattttgcataatcaacaatatcagtcttctcaagaaagccaaattggcctaaaccatttggaaagctctttgaaagactggatacaacagcatccacaaaattttgaagttaaaaatttaaagctgatttttaataatttaaaaggaatgcatgaacaatttgaacagcttcaatatgctcaaccgcttaatgaaacgctaagtcagaacaagcaagaacatctcaatttactagatgatgatattcaaggattttcagaccttgttttaaaaattcggcagcaactgacgccacaatcggccctatttagacatgcagtacgaattgcggttgtatttgccgcaggttatgccatttccctcttaccttttgcccaacatggttactggattttgctcaccagtttatttgtttgccaaattacttactttgcaaccaaaagtcgtttaaagcttagaacgattgggactttactcggcgttttattgggtattcccattttatattttgttcctagtattgaaggtcaactcattcttaccattatttgtggagttagctttttctacttacgccagaaaaaatatgctctggcaacactgatggcaaccttaatggtattgctcattttcaacttaaaaggtgcaggttacagcattattttacctcgcctaatcgacaccttattaggctgctttattgcttggcttgctgttaattttatttggccagactggaacttccgtaatattccaaacaatattaagaaaagtagccaagcaactttcgattactttaatgtgattgttgagcaatatcagcacgggaaaaatcaagacattgaatatcgtagaattcgccgagctgcacataacgctcaaattgaactgtcgaatatgatttcaagcttaagtgccgagcccaacccaaatccagagctgattcattatgcctttcgttatttggtttatagccacagccagctgagttatgtcgcagcattaggcagccaaagacaaaaaattgatgatcaacaggtattacaactcttactggattgtcagcaaattcttaaacaaagtttatttgaacaagcgtcggttaactttagttttcttgaacagactttaaagcaaattcaaagcttaataactcacgaacatttttcagaaaactacacacttgtcttaaaacagatgagtttattattagaaaccttgcctgaactcttaagcttaaaaggcaaacttttagagcatgaaattaaatag

SEQ ID NO: 43536 - DNA, 576 bp, Acinetobacter baumannii
atgccagtatttaataaaattggtgcagtatgtgcactgacagctttattaacggtcggttgtagcacggtaagtaagactgtatctaatacagcccatgcacttaccacaatgcatactaaaaaagtggtggatgttaatgaagtgacagccaatggtataggtaaaaaacttggtacgattagctttcaagatagtgataagggcttaatcattacccctgctttagcagatttaccaagtggtactcgcggtttccacattcatgaaaatccatcttgtgcccctgctgttaaagatggaaaaccaggcgctgctttagctgctggtagccactataaccctaaccaagcccctcatcatggtacgccaactaccgggcatttaggcgatttaccagcattagtcgttgacaatactggtgtagctacaactgctgttattgcaccacgtttaaaacttgctgacattcaaggtcgcgctatcatgatccatgctggtggtgataactattcagattctcctctgcctctaggtggtggcggagcgcgaatcgcatgtggtgtaatcaaataa

SEQ ID NO: 43537 - DNA, 1119 bp, Acinetobacter baumannii
gtgcatccatacgctcctactttacagcgcgttttattgtttgggctgttttttatcctgatctttttaggatttaacatcctgaagtactttattgtacctgtactttgggctgccattattgcctacatgacttggccgatttatttaagaattcagcatttttttggtgaaagccgaaataatttaaatgctacagttatgattagcttagtcattttaattgttggcgtgccatttacatgtgctatttttattctacaacatgaaggccgaaacctttattttgatttacagcgtcaagtcttttcaggtcatttaagcgttcccgattttattcgtaatcttccatttattggtaaagaaatatctcgcacactcaacgaaattaacacagaccctaatagtactattcaaaatattgcagcttgggtacaaagccatttaagttatgggcgtgtgttattaaatgaaattagtaaaaatatcgtcaaactttgttttgcgattttaagtcttttcttcttttatcgtgatggccacacgatcttaacccaagtgagtaaagccttggaaatggtgattgggccacgtattcatcattatctcgacacaatttcagaaaccacacgtgccgttgtgtatggtgtgggtttaactgcaattgctcaagctgtactggctggattaagttatttcgtcgctggtgtacctaacccaatggttctcaccattgcaacgttcttattagcgctaattccgtttggtactcctgtttcctatttaggtgttggtctatggttgttctctcaaggtcaaaccatggaagctattggcgtcatcttatggggtgtgctgattgtaagtagttcagacaatgtgatccgcccacttgtaatctctggtgcgactcaaattccgtttttattgattatgttcggtgtattgggtggtattgcaagttttggtttagttggtctatttattggccctgttattttagctgttttattagcaatttggcgtgaatggcttcatgagacgattgaccctgaacccatgccaaaaacaaccatgatttatgattcagatgatgatttaccgccatctaaaaactaa

SEQ ID NO: 43538 - DNA, 597 bp, Acinetobacter baumannii
atgacagccattacgttggcaacagctttggcacaaaaaggatataaagtagcattggcagattctgacaaccagaaatcttccttacaatggttaaagcaacgtccagaaaacgtagctgtaattcaaagcctcgactggcgtcaagaaaaatcaattggtgatgcacctaaaaatttagactatttaattattgatgcaccgggtgccctttcaggtgatcatgctgaacaattagtcagcgaagcccatgcgattattactccacttcagccttcatttttcgatatcgacagtacacgacgttttctcaagcatttgcaggatattaagcgtattcgtaaaggtaaagtacaaattttactacttgcaaaccgagttaaaccgaacagcgccagttcaaaagatattcagcaattttttggaaaaatcgaacatgaacctattgcatggattgccgagcgtagtgcttatggcagtttagcaatgcaaggtttaagtgtatttgataaaccacaaaagaactttattgcaattcaaagccagtggcagcctcttttaaataaactgattgaagataaatctgagtggttctaa

SEQ ID NO: 43539 - DNA, 468 bp, Acinetobacter baumannii
atgtccgtatggctggccatgcttattggtgctggtattggtattattatcacgacgcttattttatcaaatacccgtaatggccgaatcaaggctgaatacgagcaatatattgccgagttggagcttgagcatcaacaagcccttgcccaagcacaaaagagaagtgtaaatacgagccgcgccgtattaaaaggaaaaatggcagaacaatttgcgccagtcttgccggaatttcagtatttgccaagtgatgccaagtttatgggcgacccagttgattatattatttttgatggctataccgattttcgagatggagacggaactgccgatgatattcaaattattttgctggatgtcaaaagtggaggggcacgtttaacaaaagggcagcaagcaattgctcaggcaattaaggaagggaaagttcgttttgaaactttaagaatagattttgaagattaa

SEQ ID NO: 43540 - DNA, 564 bp, Acinetobacter baumannii
atgaaaaaacaacgtttgatgatagctttgctggcgactttaggcatgggttcagcacttgcatcaacctcgagtgaatacaatattgccaatggcttgcttccagttgaaaaagatcaatcaatttctgtattacaaccatttcagggaaattttaggattttaggttcaaaaatttatcacaatgatgagcaagccaaattttcaccgattgattatgcggtaagttggggtttatttgctcaacctgaaatcgcgcgacatatttcagtgaaacaatatgaccgctatttaaactggaaaatagcaaaacttcctgtaccagctgagcaagcaatgcagatggtatcgaatatgcacattattcctgcaaaccctgaaatcgcccaacaaattaagcaagttaagcgtggtgatttggtttatttaaaaggtgatctggttgaaatcaaagataaagatttggtttggaagtcatctttgaccccaactgataccggcgatggtgcatgtgaactcttccgtgttcaatccattcactgggttgaaaaacaaaatatttaa

SEQ ID NO: 43541 - DNA, 534 bp, Acinetobacter baumannii
atgttaaaaaaaacgcctcatatcatcttaatgtctttgctcagctctagcctattattgacggcttgtaaaaaagcagatgagccagcaaagactgaacaatctcatacaagttcatctaccgatcaggtcttagaaaaactcaatgaaagaccagtgaagaaattcccagctactgcggatgacgctcatgatattgcactactagaagattacgatcaccgctttactgaaatgagtgatgaaatggaaactgagctagaaaaaatgcatgaggcaggtacgctcaccacagaatttgaacaaaaacgtacgcttgataatgtgcgctcagcattgaccatgctaaaagacctcgatttaaaaactgaacaaggtcgttatattcagggcttactctatcaatattgggaaaaccaagaaaagaactttagtgataagcaggcaagtaaagatgagcaggtcaaacagcttgctgactatttacaagcacaaaatcagttaaagtactggaaagcctcacagcagcattaa

SEQ ID NO: 43542 - DNA, 795 bp, Acinetobacter baumannii
atgacacaatccttacatcctgccgctcaaaaaggcttcagctctgctgctgagctttatcagcaagttagaccaaattatcccgtagaaatagtaagttggctacaagatcggctccaaatccatgaaaattctactgttatcgatcttggatcgggtactggcaaattcttaccttacttaaaacagacacatgccaatattactgcagtagagccaattggcgagatgttacaacagcttcagcaagcctatcctgatattaaaactttacaagcctttagccacaatattccggtaaatgaccaacagattgatgctgtcatttgtgcccaatcttttcattggtttgacaacatagaaacattgaccgaaatccatcgggtattaaaacctcaaggacatttaggacttgtttggaaccagcgcgatgaaggtacagactgggtaaaagctttagcggattttctactaccgcttgaaggtgatacacctcgttaccatagtgaaaggtggaaaaaggtttttgaagagcaaaatttatttacttttgacaatttaaatactttttcgcaatcgcagcatggtactgtcgaacaagtggtgagtaagcggttactttcaacaagttttattgcagcaatgactgaaaaagatcaactacagctcaaagctcagtttgaaaaaattgtttatgattttactgggttaggcccacaagatcagattgattttccatatgtcacatatgcatatcattttcaaaaaagtacgtcgtcaaatcatagagaatag

SEQ ID NO: 43543 - DNA, 1278 bp, Acinetobacter baumannii
atggataagcaaattatttttgaagacgaacacattagagccatttttttacaaggcgattctaatacattagttctctcttttggcgatttgattacccgggcgagtggcttatctatcaatgctgaaaagtctctaataaagtaccaatacaatgttattggggtgatgccaaaacaaaaatcatggttcccaaaggccagtatggttgagctggcaaaagtcattttgcctattattcagtgttttaaaaatattgtaggctatggcggctcaatgggtggctatgcagcaattaaatattcgaatttattaaatatgaatcgaatcattgcatttgtacctcagtattcaattgaccctgaacaagttgaagaccgacgctatgctgagttcttcgatgctgtcgcgaataaagacatgcaaattcagccgcaagatgtgaatgcaagtcgtgaatacattattgtttatgacccttacttttcaattgatcgcgaacattacttaaaaataaaagagatcttgccaagtttacatacaattcatttgccttttacaggacatgaagctttatctgtattggcaagctcaagccttttacatgattttattgagcatgaatttgatgaaacgtatttctatcaacaagttcgcaaaatcaaaaaacaaagcaagttctattatcgtaatgttcttgcaaatgtgctgacataccatgacagcatgttattgaaaatattgcgtcaaaatgactttcagttagatgaacgttatttagacaatccacttaagcaagcggtcacacgtagtcttattaaaacaaagcaagctacagaacaagattttcagaagcttggaattaaaattcagtatagccagcaagctaaaaaccctaaaaaaggttttaaaaatcaatttgaggcaatactagtatttaatttgattaatctaaagcttgaaacctacgctgtagatgtaatgttggcaaacccatcatatttgatcccaattatggcagaacacactggggttgttcagattgaattaaataatgaactttatttgttagggatgaatgaccgaaaaattattaaattgtttaaacagggtgatacactcacttcggatatgagtccgtttgttattaaacaatattctgatttctttgcgttaagctacaagcaattaaatttaaattgtgatgaacaaggtgtatgtgattacgttgaaggttctgttcagccatctcaacagtttgtattgaccagctattaa

SEQ ID NO: 43544 - DNA, 1434 bp, Acinetobacter baumannii
atgcaatcattaaattatcggaataatgatgcatcgcaacatggaagttctgcacctttgaaacgagcaatgagtactcgacatttggtgatgatctcccttggcggtgccataggtacaggtctttttcttgggtctggcgacgtaatctctcaagcaggtccaattggcgcaattatctcttatttcttgggcggtttaattgcctataccgttatgctgtgtctcggtgagctagcggttcatgtccctgagtctggctcttttggtgaatacgcacggcgttatatcggtccaggtacggggtatatgattacttggctatattggctgacttggactgcaactttggggactgagtttaccgctgcggccctgttggttcaggagtggtttccatctacctcggtatgggcttggactcttttctttggtgccttggttttctttcttaatgtaagttccacccgcttatttgcagagtctgaattttggctggcgcttgtaaaagtaatcaccattatctgttttattggtttggggctgcttgcaattttcggctttattccttatcaggggcatgaaacagcaccattgttcagtaatttaactgctcatggttggttccccaatggtcttttcccaatttttgccactatgcttatcgttaactttgcattttctggcacagaattaattggggtggcggctggcgaagctgagaatccagcaaaaacagttcctaaagcaattaatgcggctatttggcgcttattgattttctttgttggtacgattgtagtgattagctcactattgccataccacctagcaggtcttagtgcaaatgatgtgagcagtagtccatttgtaactgtatttaattacattggtattccgtatgcagaggatattatccgttttgtaattattacagctttactatcagctgctaactcgggtttatttgctgcatcacgtatgatgtggtcgctttcagcaaaaaatcaattacctaaaatttttgcgaaactcacgccgtctagaacacctattattgccattattgtcaccatgtttggtgctattccaggattgctttcagaacaatttgcaccagaaacaatttttaaaaatttgttgggtgttgctgcttttacaatggttgtcgtttggattgcaatttgtatttcgcaatttaacttccgtagacagtggtataagtcaggaaaaacagtaaaagatctacgtttcgctgcaccactttttcctcttactccaattgtaggtgggctattctgtatagttacttgtatcagtatggtatttgatccttctatgcaagtgggctttatctgctgcattatttttatcttgctatgctatgtcagctatttcatcttttatcgtaaaaaagatatagctcaaaactaa

SEQ ID NO: 43545 - DNA, 1272 bp, Acinetobacter baumannii
atgtcagatctttcatacgtaaacgaacatagcgatgcatggcaaacttacttggctcaaattgaccgtgtagcgccatacttagaacatttagctgattatatcgatacattaaaacgtcctaagcgtgcgcttattgtggacgtgccaattgtaatggacgacggttcaatccagcactttgaaggctaccgtgtacaacacaacttgtctcgtggtcctggtaaaggtggtgttcgttaccatccaaatgttgacttaaatgaagtgatggcattgtctgcatggatgacaattaaaactgctgttttgaacttgccatttggtggtgcaaaaggtggtatccgtgttgacccacgtaaattatcaaatcgtgaattagagcgtttaactcgccgttatacgactgaaattggtcacattatcggacctcaaaaagatattcctgctccagacgttggtacaaatgccaatattatgggttggatgatggatacttattctactagccaaggtcacacagtgacgggtgttgtaactggtaaaccagttcacttaggcggttctttaggtcgtgtgaaagcaactggtcgcggtgtattcgttactggtcgtgaagttgctgcaaaaatcaacttaccaattgaaggcgcgaaagttgctgttcaaggttttggtaacgtaggtagcgaagctgctttcttatttgttgaatcaaaagcaaaaatcactcacgttcaagaccacactggcacaattttcaatgctgatggtattgatcttgttgcgttacgtgatcacgtaaatgcaaaccaaggtgttggtggttttgctggtgcacaagcaattgcagatgaagatttctggactgcagaagtagacatcattattcctgctgcattagaaggccaaattacagttgagcgtgctgaaaaacttaaagctaagttgattttagaaggcgcgaacggcccgacttatcctaaagctgaagatgtattggttgagcgtggcattgttgtagttcctgacgttgtatgtaacgccggcggtgtaactgtaagttacttcgaatgggttcaagacatggcgagctatttctggagcgaagaagaaatcaacgagcgtttagacaagttgatggttcaagcaatggatgacgtttggaatacagctaacaagaatgcttgtactttacgtacagcagcttacatcttggcatgtgagcgtatcttaaaagctcgtaaagaacgcggtattttcccaggctaa

SEQ ID NO: 43546 - DNA, 312 bp, Acinetobacter baumannii
gtgaaaattaattctttctctcccatacctgaagatgatgaagaactctctcttccagaactgatttattgggcatctttaggtgatctagagcaagtaaaacaattattaatagatggagaagaccctaatcagactgatgatgaagggtatagtgctttgcaagcagcggctgagaatgatcatttagagatagtgaagctattagttgaaaaaggggtgcatgtcccttataaaagcgaatatacagcactacagcttgcagaaatggcgggtaatactgacatagtgaattatttaaaaagtttataa

SEQ ID NO: 43547 - DNA, 543 bp, Acinetobacter baumannii
atgctggtctatattatcgtcggaagtgttcgcgaagggcgcacagctattaaaattgccaattggttagaaacaacaatacccacatttaatctaaaagattttcaaacagaagtaattgatttaaaagaatggaatctacccttattttcaggttctcacccacctgctacaggtatttatgatcaacctaaacaacaagaatgggctgataaaattgcccaagctgatgcatttatctttattagcccagaatataaccacggttatagcccagctttaaaaaatgcactggactatgttggtaaggaatggagcggcaaaccagccgcatttataggttatggctcaacaaatggttctcgttctattagccaaatacgccaagtcacttcaagtttaagtattgttgacccaaatgctgtgatcgaaatacgagatatcttcaaacgcaataaagatgaaaagtttgaagccaatgaatttgaagtaaaaggacttcaatcaattgttgagaaactacagaaatatcatttgtcttaa

SEQ ID NO: 43548 - DNA, 483 bp, Acinetobacter baumannii
atgaccgaaattattcaacctaatgaagaaattcgtattactgacggttctaaagttgacctacacttttctgttgctatcgaaaatggtgtagaaattgataatacacgtagccgtgaagagcctgttagcttgactattggcgacggtaacttgttaccaggttttgagaaagcgcttcttggcttacgtgcaggcgatcgacgtacagtacatctaccaccagaagatgcttttggtccgtggaatcctgaaaatatacaaacttttgatacagttaaattcgaacaacgacctattcctggtcacatgatcgagtttgaagataaagcaaaagcaactttatttggtgttgtgaagtcagtaaatgatgatattactgaaattgatttcaaccatcctctagccggcaaaaatattacttttgaagtagagatatttaaagtgactccagctggtcagcaaggcattaagatcatgtaa

SEQ ID NO: 43549 - DNA, 531 bp, Acinetobacter baumannii
atgcctaattcacaagctaaaaaaggcttattccagttttatcctcacaacctcatttggcttggactttctgtccttgccattgtgttggatcaatggacaaaatggattgcaagtacacatctgaactacgcagatcctgtacctgtgcttccatttttaaactggacactattacataactatggtgcagcttttagctttttatctgatgctggaggatggcaacgctatttcttcacatctttggcaggcttagtttcaatactttttgtattttggttgctacgtatgcctaaaaaaatggtggtgctacctgtagctatcgctttaattttaggtggagcacttggtaatctaattgaccgtattactttagggtatgtagtcgattttattcatgtttattaccaaaatcatcactttccagcttttaatattgcggacagtgccattactctaggtaccattttgctactcatcgatacattcttccttgagaagcaaagacctaaaaattcggatgcataa

SEQ ID NO: 43550 - DNA, 2838 bp, Acinetobacter baumannii
atgagcgataagcaaactactgaaaatgcagtggactacaaagccacgctaaacctgccggatactcaatttgcaatgaaagcaaatttggcagtacgtgaagtgaaatggttagaagagtggtataccgacaacatttatcagcagattcgtgcatcgcgtattggcaagaaaaaatatattttgcatgatggccctccatatgcgaacggtacaattcacttgggccatgcggttaacaaagtacttaaggacattatcgtaaaaagccgtactttggcaggtttcgatgcgccatatgtaccaggttgggactgtcacggtttgccaatcgaactaaaagttgaagaaaaagtaggcaaagtgggcgaaaaagttgacgcagccactttccgtaaacactgccgtgaatatgcgctaaagcaaattgatttacagcgtactgactttaaacgtcttggtattttaggtgactgggataatccttacctcaccatgaactacaagcaagaagccgatatcgttcgtgctttaggtttaatccaaaaaaatggccatatccagccgggcttaaagccagtgaactggtgtatggactgtggctcagcacttgctgaagctgaagttgaatacgaagataaaaaatcagacgcaattgacgttggttttggtgttgtagatttaaaagacttaagtgctcgtgtaaatgtagatgttcaagatccaactgatatcgtgatctggaccactacaccttggacgttaccagcgaaccaagcagttgcattgcatgccgaaattgaatatcaattggtacaagtgactactgaacgtggtaagcaaaactttattcttgctaaagacttagttgcttctgcaattgagcgttacaagcttgaaaacccagttgttttagctgactttactggttcagctcttgagaaccttaccctacaacatcctttactaaccgatcgtcaagttccggttattttaggtgaacacgttatcgcaacaagcggtacaggtgctgtacacactgctcctggccacggtgcagatgactataaagtaggtcttcaatacaaccttaaagttgaaaacccagtgggtggtaacggtgtttacttaccaaccgcaccaatctttgctggcgagcacatctataaagccaatccaaagattattgaagctttaggtgctgtaggtcgcttatgggctcatcaaccgattaaacacagctacccacactgctggcgtcataagactccgattattttccgtgctacaccacaatggtttatcagcatggatcaaaaaggtttacgtgacggtgcgcttaatgccattgaaaacgatatcgagtttgtaccgaactggggtaaaaaccgtattgaatcaatgatcgaaggccgtccggactggtgtatctcacgtcaacgtacttggggtgtaccaattcctttcttcgttcataaagatacgaacgaattgcaccctcgtacgcctgagctcatcgaagaagttgccaaacttatcgagaaagaaggtattgatgcatggtttaaccgtgatgcgaaagacttcattggtgaagatgctgaacagtacaatgctgttcgcgatacgcttgatgtatggtttgactctggtacaacgcattacgctgtacttgagcaacgcgacgaattagaaagtcctgctgacttatatttagaaggttcagaccaacaccgtggttggttccaatcttctttattaacgtctatggcaattcacaatcgtgcgccatataaagccttgttaactcatggttttacagttgatgagaatggccgtaaattatcaaaatctttaggcaactatattccgcttgaagaaatcatcaaacaacttggtgccgatggtttacgtttatatgtagcatctagcgactatcgctatgaaattgcagcatcgaaagaaatctttagccgtgtaagtgatagctaccgtcgtattcgtaatacgctacgcttcttacttgcaaacttaaatggtttcaaaccaagtacggatgctctggcagtagatgatcttattgctcttgatcaatacatcttgcaacgtgctaatgaagtacaacagactattatcgcggcctatgaagaaatgaacttccacgtcgtgtgtagtgcgttaacaagcttctgcattaatgacttaggtggtttctatctagacatcatcaaagaccgtcaatacaccactaaggctgactcacaagcacgtcgttccgcacaaacagcgctttaccatatcgtacaagcatttgttcgctggatgagccctattctaagcttcacagctcaagaagcgtggccacttatcccagaacaaactgacaagtatgtatttacagctgaatggtatgacctacctgtttcatcaaaagcaaacttactttctgaagcagattggcaaacattgattagcgtaaaatctgcagtaaataaacagattgaatcagctcgtaacgctaaacttgtcggtagtaatctttcagccaaagttgaactttgggcaaatgaatcattacaaacagttttaaaccaactggctgatgagctccgttttgttcttattacttcgcaagtagtagtacatccatttgctgaacaaggtgaagcaactgaaatggaaggcttacgtgtacaagtatctgcagctgaaggtgaaaaatgtgcacgttgctggcatgtccttccggatgtaaatacacatgccgatcatcctggtttatgtggtcgttgtattgtgaacgtcactggtcgtggcgaagtgagaaaatatgcctaa

SEQ ID NO: 43551 - DNA, 1002 bp, Acinetobacter baumannii
atgaaactgcttcgtcttaatgcgttatcgcccaatttccagttaccacaaacagcggtaactattggtaattttgatggtgtccatttaggtcaccaagcgatgattgctcaactcaaaaaaattgctgcagcacaaggcttaaaaacattggtcatgatttttgagccccaaccgcttgagttctttaaaggctacgatgccccacctcgtattaattcattacgggaaaaagttgaatatctagctgaacttggggtggattacattgcggttgccaagtttgaccagcatttccgtagcatgagtgcttctgagtttgcagatttattaaaagacaaattaaatgctcaagctttggttttaggagatgacttccatttcggcaaagaccgacaaggcaatagcgaatttttaaagaattacggctttcaagtcacaaatttacatacgattgaactcgaaggtgaacgcgtcagttcaactcgtattcgccaagtgcttcaagtgggtaatctcgctttagcagctaaattattaggccgtccgtacagtattaccggtcgtgttcaatatggcgaccaaattggacgaactttaaatttcccaacgattaatgttcgtctcaaccgccataagccttgtttaaatggtatttatggcgttgaagtcatttgcgaaacaacttcgctaactcaaaaagtgcttcaggataatcctgaaaagccaggaattgccggataccatgaaaacagcctctatggtgcaggtcatgtcggtacacgtccagccattcagcaagaacatccagagtggagattagaagtacatttccctgatgtttctgctaatctgtatggcttatttatgcgggtgacttttcttcactatcttcatggtgaattgaactacccttcgcttgaagcacttaaggcaggaattgataatgacgtgcagcaattacgacaatatcgtaacgacacgacacaatttcctttttaa

SEQ ID NO: 43552 - DNA, 1134 bp, Acinetobacter baumannii
atgaaaagacccttttaccaattaaatcaaagtaaagatgttatacggcattttaccccaaattggtttacagcaactatgggtactggcgtggtcagtatgattttaattcagcttccatttgccaaatcatttttatttatgctggctacgctgttatggcaatttaatattgttctatttagtgttttttcagttctctatttattgcggtggtttcttttccctcatgaagcgaagcaaatatttaatcatccaaatatgagcttgtttttaggtgctataccgatggggcttgcaaccatactaaatggctttttaagcttcggaatcgggctttacggcgaagtggcagttcatatcgcccaagctttatggtatatcgacgtctttttagcactggctattgcgtggatcgtaccattttgtatgtttagccgtcagaatcatcaactacataccatgactgcaatttggcttttaccggtggttgcatgtgaagtcgcagcaagttctgcgggcatgttggttgcacatttaccagcagatgtgcatagctttcatttattgttagcgggttacgtactttggggaatctctgttttacctgcatttgccattttaacgattttaatattgcgtatggctttgcatcagttaccagaaaaagaagtcgcgatttctagctggctttctttaggtccgattgggacaggtgctttaggtctattgttgctaggtgagcaggcacaaagagtatttgtaaatgttggctttcctgagttggcccatgtatttcaagccttgggcgttgtgggtagtctggtacttttaggctttgggttatggtggcttggccttgcgattttaacaacacttcgtcatgcaaagacaggtattccgtttaacttgggttggtggggtttaaccttcccatttggtgtgtttattttggctttatttaatttaggtcatcagattgaagttgtatttttacaatacgtcgctgtggcattcagtattttattattagtgatgtggagcgtggtaatgaagaaaaccttagccggagcatacagtggcaagctattcttctctccatgtttagtggctttacaacaaagaatgcagtaa

SEQ ID NO: 43553 - DNA, 567 bp, Acinetobacter baumannii
atgaacacagataccgctttaattatggcacttcccaacgagtctaaaggtttattcgagcaagcaggtatcgaagtccattacagtggtattggtaagatcaatgctgcttttaaagcgtttgaagttattcaaaaaacaggctgtaaaactttaattaacttaggtacagcaggaagttcatcttttaatcggcacgatttagtagaaataaaaacttttgtacaacgtgatatggacgtttcacctttaggatttgaagttggggtaacgccgttagatgaccacttggcggctgaaattcatctccaaacgcattttgcggatttaccaaaaggaatttgtgggacaggggactcatttgaaacgggtcagccgaaggtcgcttgtgatgtggtcgatatggaaggctatgcgttagcaaaagtttgccacaagttaggtgtacgtttaatttcggtgaaatatattactgatggagcagatgatacggcccatttggattgggaagaaaacttattattgggtgcacaaaagcttttagcactttatcaaaatcatttctaa

SEQ ID NO: 43554 - DNA, 621 bp, Acinetobacter baumannii
atgcagcaaatggaacaaaagaagagtacccaaaagcgcaatcagcttcttgctgccgcccttgatgtgttttcactatatgggttcagtggcgcaagtctggatgaaattgcccaactcgctgacatgcataagtcgaatattttctattactatgaaaataaagagtctttatatgtggaagtgctgaccacagttttacaaaaatggctagctcccttacaaaccttagaagctgagttagaaccagccgaagccttgtctcactatttaattcaaaaaatcgaactttctcgtagccaaccaaaagcttcgcgactatttgctttagaaattattcaaggggcaccacatattttgcctatactgaaagggcccttgaaaaagctatttaagcgcaaagctaaggttattcaaacttggcaagagcaaggaaaaatttcaccagatatcgacccggaacttttaattctcaatatttggggtcttacgcaaaattatgctgattttgcgactcaaatggaaatggtaaccgggaaaacgcttcgtaaccgcagtatgttccagcgctcgattgagcatacggtacatatgatgctatacggcgtattacctcgctaa

SEQ ID NO: 43555 - DNA, 801 bp, Acinetobacter baumannii
atgacaaatctgaatttaaatattaatcagaatgacgtagtgctcattccagaaaaccatccagagtcacaagaacctgtggtaggcgcagagattctgattgaacagctttataagttttatggtgaagttaaagttcttgaagatcttaaccttcatattcaaccgggcgaatttttagctattgttggtcgtagtggctgcggtaaaagtactttattgcgcttaattgcccaacttgaaaaagccagttttggagaaataaaatttaaatctgcccgacatttgcgtgaaggtattactaacgatgacatacgggttatgtttcaagacccacggttactgccttggagaaatattcttcagaacgttcaacttgggttaccaaaatcgcaacatgctttggcagaagaattattagagaaagtaggtttaaaagaaaaagcgggacaatggccttcacagctctctggtggacaacgacaacgtaccgccctagcccgtgcgttatctcatactccccgtattttattgttagatgaacctttgggtgcattagacgcgttaactcgtcttgagatgcaaagtttgattgaacgtttatggaaagagcaaggttttactgccattttagttacacacgatgtaagtgaagcagtgcaactggctgaccgcattatattgttagataaaggtcagattgctcaaagttttcaagttaatttgccgcgtccacggaaaaagagcattacttttgctcagcttgaacaacaagtactcgatgccgttttagccacttaa

SEQ ID NO: 43556 - DNA, 798 bp, Acinetobacter baumannii
atgagcaaagatataaatattgtttcacgtggaacgaaacaagtcgggcagcgtctgctgccttggatttttccgattgttctattagttgtctggcaaattgcatcgagttcagggcttttagaaaatcgtattctgccggctcctacggctgtcgtttctgctttttggcatctactcattagcggcgagctttggcaacacgttaaagtcagtgcaggacgagccttactcggactatttattggtggtggtttaggtttgctattgggtctgctcaatgggtcttcacgtttcgcctctaccctgctcgatacaaccttgcaaatgattcgtaacatcccagcattagcacttattccactggttatcttgtggttcggtattgatgaaacagccaaattatttttggtggcggtcggagtcttcttccctatttatatcaacacctatcacggtatccgttcagtcgatccacaattaattgagatgggtaaaagctatggtctttcacgttggcagctttacaaagaaattattctaccgggtgcgatgccctctattttagttggtttacgttttgctttaggtctggtttgggtgttgctcattgtagctgagactatttcagcacaagcaggtattggctatatgactatgaatgcacgagagtttttgcaaactgatgtggttctggtcggtattcttctttatgccctattaggcaaattagccgatgttttagcgcaacttttggaacgttatttactacgctggcatgccggttatcaaaaataa

SEQ ID NO: 43557 - DNA, 1176 bp, Acinetobacter baumannii
atgaaaattttctggtttattcctacccacggtgatagtcgctatttaggtacaagtaaaggcgctcgtcaggttgaccatgcctatatgaagcaaattgctgtggcagtagataacttgggttacgaaggagtacttattccaacaggtcgttcatgtgaagatccttggattacggcggctagcctaatcgatgcaactcaacaccttaagtttttagttgcattacgtccaggggtaacaacaccagcgttggcagctcgtatggctgcaacatttgaccgcttgtcgaatggtcgtgttctactcaacttagtgactggtggtgatgaaacagaactacgtggggatggtttatatgaagatcactcaacgcgttatcaaacagccaatgaatacgtaaaaatctggcgtgaaattttgacgcgttcacatacgggtgaagcttttacattccacggtgaacgcttacaagtagatgatgcaaagctactttacccacctgtacaaaagccttatccacctctttggttcggtggttcttcagatgtagctgttgaactcgcggctgagcaagtcgacacctacctgacttggggtgaaccacctgcagccgtgaaagaaaagatcgaacatgttcgtgctaaagcggaggctaagggccgtaaattaacttatggcattcgtttgcatgtcattgttcgtgaaaccaatgaacaagcatgggcagcagcgaacgagcttattcagtatctggatgatgcaactattgctgcagcacagaaaaaatttgcacaaatggactccgtgggtcagcaacgtatggctgctctacacggcggtaatcgagataaacttgaagtatctccaaatctttgggcaggtatcggtctagtccgcggtggtgcaggtacagcacttgtcggtgatcctgaaaccgttgctgcacgtattcaggaatatgcggatttaggtatcgatacctttattttctcaggctatccacaccttgaagagtcaatccgttttgcagagttagtattcccattattaccaatcgagacccgagctaaacttgctcagccaaacttaactggtccattcggtgaaatcattgccaacaactatgttccagacgagaagaaacaaaatagttccgtcaaggagcctgcatga

SEQ ID NO: 43558 - DNA, 984 bp, Acinetobacter baumannii
atgcaacatcagtcattatttaataagagtcagtggactcagttagttaaacactttagcgcggtcgctgtattaggtttaacaatcgcagcacctgcttgggcaattgacccaacagtgaaagaacttcgtattggttttcaaaaaagttcgattaacttcgcgattgccaaacagcaaaaactatttgaacaagaatttccaaatgccaaaatcacttggaatgagttccccgctggccctcaaattttagaagccttagctgttggctcactcgatgttggcgttactggagacacgcccccggtctacgctcaagccgcaggcaagcctttatattacattgcttatgaagcagccaaaccattggcctcagcaattttagttcccaaaaactcacaactaaaacagcttaaggacctaaaaggcaaacgtattgcgctacagaaaggttctagctcacattacctacttgtacaggccgtacgtaaagcaggcttaaaatggagcgacattaccccaatttggctcacacctgccgatgctcgcgctgcattccaaaagggtgctgttgatgcatgggcaatatgggatccgtactacgcttcagcacaactagaagaccaagctcgtgttcttgcatctggtaaaggcctaagcccgaactataccttttacttagccgctccaaattttgttaagcaatatccaaaagctgttccaggactcatcaagcagatcaatcaagctgacaaatgggtccaaagccatcaagcagaaactgcaagtgcgattggccaaagtacaggcctaaaacctgcgaccagtgacttatttattaaacgccgtccacgtccatcatcggcagctccacttaacagcaaagtcattgctgaacaacagcagcttgcagacatctttactcaacaaggcatcatccctaaaccaatcagcattaaacaagctgtttggggtgccaagtaa

SEQ ID NO: 43559 - DNA, 969 bp, Acinetobacter baumannii
atggcactttttaattccacttcatgggcaaaatattcagtcattgctgccagccttgcgggagtgatgatgctaggtggttgtgccaaaaaagaggagcacaccacgacaactttaaatatcggctatcagaaatatggcatccttcctattctaaaagcacgtggtgacttggaaaaagcactaaaagaccaaggtgtacaagtgaaatgggttgagtttcctgcgggacctcaattacttgaaggtctaaatgtcggaagcgtttcattaggtgaagcaggcgaagcacctcctatttttgctcaagcggccaatccaaatttagtctatgttgcaaaccaaccggctgcaccaaaagcagaagcattattggtacaaaaggactctcctattcactctattcaggatctaaaaggtaaacgtgtcgcactgaataaaggttcgaatgttcactatcttttattaaaagttttagaagcaaatcacttgaacttaagtgatattcaacctgtttatttacctccatcagatgcacgtgctgcctttgaaaaaggcgctgtcgatgcgtgggtcatttgggacccgttctttgcagcagctgaacatcaaattcaagctcgtgttttagcgactggtgaaaatttggtgagcaatcatcagttctacttagctgatcgtaaatttgcagaaaataatccaaaagttctgaacacggttgtacaaacgctaaaccagacaacccaatgggtcagcacacaccaagatgacgctgccaagttactcgaaaaacctacggcacttgagtttgatgtactcaaaacatccatttcacgtatgggttttggagttcagccaatatctgacaaggtagctcaagaacaacaatatgtagctgatgccttctacgcgcaaaagctcattcccaacaagctcaccattcaagaagccattttaaaactgaaataa

SEQ ID NO: 43560 - DNA, 1356 bp, Acinetobacter baumannii
atgccaactaagtctttagagaaatcacataataatacccagcattatgtacattggttccgacattcagcaccctacatcaatgcgcatcgtgataaaacttttgttttaatgtttggcggtgaagcagtccgcgatcctaatttcgaacatattattcacgatattgccttattacattctcttggcatccgtttaatcttagtgcatggcgcacgtccacaaattaatcacaaccttaaagaaaaagggattgaaacccctttttatgataactgccgtattactacacgcgaatctttaagctgtgtcatgagtgctgtagggtctattcggttagaaatcgaagcattgttatctatgggtttagctaactctccaatgtatggcgctcgaatagatgtcgtatcaggtaattttgtaaccgctaaaccttatggtattcgtgaaggaatggattttcagcttacaggcgaagttcgttcaatagatacagacgcgattgaacgtcatcttgataacaataatattgttttacttggcccaacgggctattcaaccacaggtgaagtatttaatttaagagctgaagaagttgcaaccaaaactgcgacttatttaaaggcagataaattaatctttttaggtgagcaacaaggtttacctaacgaagatgggcaattactgcgtgaattaagcccacaccagcttgattactatattcaacaataccaaaccacacacccaaccctaaccctacatttgcaagaagcaaaaaaagcatctttatcgggtgtacatcgtgtccatctaatttcttattcttatgatggcgcgcttattgaagaactctttacgcgtgatggtgtgggtaccatgattaccgatgcgcattatgaagaagttcgtatggcacatattcaagatgtcggcgggttaatgaacctcttacgcccattagaagaagaaggcattttggtgtatcgctcacgtgagcgtttagaacaagaaattaaccagttcgctgtcattgaacgagacggtatgattttggcctgcgctgccctttatccaattccgactgagtttaatgaaacacgttcagcagaaattgcttgtgtggcagtacacccaagttatcgtaaatcaaaccgtggcagccaaattctgcaatttctcgaagaaaaggccaaacaacaaggcattcgtcaattgttcgttttaaccacccgtaccgcgcactggttcttagagcacggtttccatcaggtgagtgtggatgacttaccaaatgcccgtcaggcactttataactatcaaagaaattctttagtctttaaaaaactgcttccttag

SEQ ID NO: 43561 - DNA, 321 bp, Acinetobacter baumannii
atgaaaaagataacaacagcaattgttctttcaatgagtggtttaatcgcaacaacagcaatggctgcgcctcacgaccattatcaccaccaaggatatgagacaaaaaccgttaaagtcattcataaagatgaccatgcgaatatctggcgtgcaggccaagtcgtaccgcaacaataccaacatccacgttatgtcattgactaccgttcacaccagaaattgtctaagccaggtcgttatcaaaaatggtataaggtgaacggaaattatgtactcgtaaatgagcaaagccataaaattattaaagtaattcgttaa

SEQ ID NO: 43562 - DNA, 411 bp, Acinetobacter baumannii
atgaaaaagttgttcaccatcttagccctttgcatcactgtactgaccaccagtatggcaagctttgctgatcctccttttgaccgaggacatggcccgaaaggtcctaaaggcggacctcgtggtgaatggaatgatcgtgggcataaatttgaccgtgacgataatggtgatcgtgttcgcgatgaacgccgtatgcgtgaggaacgtggctttgagcgtctgaaacaacatcgttggcagccaggttatgtgatgccacagcactatcgtggtaatggttataaagtcgactataaagacaataacttacctaaacccgatcgtaaccagcagtggtataaaattaacaatgactatattttagtcgacacggactctaacagtattgtgagtattcgcggtttctaa

SEQ ID NO: 43563 - DNA, 747 bp, Acinetobacter baumannii
atgaaatattcagaatatcaacctcgtccggatctactcaaagatcgaattattttaatcactggtgctggtgatggaattgggcgagctgcggccctcagttatgctttacatggtgcaactgtagtcttgcatggtagaaccttaaataaacttgaagtaatttatgatgaaattgaaggattaggcgcacctcagcctgctattttacccctccagctttcgagtgcttccgatcgcgattatgatttcttagtaagtacgctagaaaaacaatttggtcgtctggatggcattttgcataatgcaggtattttgggtgagcgagtagaacttgcacattatccagcagaagtatgggatgatgtgatggccgtcaatttacgtgcaccttttgctttaacccaagctttattaccgctattacaaaagtcagaaaacgcttctgttgtatttaccagctcaggtgtaggccgtgaggcacgcgcgctctggggggcatattctgtctcgaaagtcgcgatagaagcggtgagcaagatttttgcagctgagcatacttatccaaatattcgctttaattgtattaacccaggagctacacgtactgccatgcgtgctaaagcttatcctgaagaagatccgaaaacattaccaacacctgagtccatcatgccggcttatctttatttaatgggtgaagatagcttaacgctcaatggacaaagtattgatgcacaggattaa

SEQ ID NO: 43564 - DNA, 699 bp, Acinetobacter baumannii
atgaaggctgttttatttgatttagacggcacgctcatcgatacggctgccgactttattcgtattattcaacaaatgtgccgtgatgcaagacgccctgttgtagaagccgatcttattcgtacacaagtgtctgaaggtgcccgtgcgatggtcaaattggtctacccagagctggatgtgaccaatccaattttcttggcacatcgacaaaattttttagatttgtatggcaataatattgttgtcgatactgacctatttgaagggatgtatccacttttagaagagttagaagctcagcaaattccgtggggtattgtcaccaataaaccacgtggtttaagtgaatctcttctagaaaagttaaacctgacagaacgctgtgcggttttggtatgtcctgaagatgtcagtaaaactaaaccagacccggaaccaatgtatttggctgcaaagcagttaaatatcccggcaaatgagatcatctatgtgggggatcacccacgtgatatcgatgctggtcgcaatgctgatatgtataccatcttggcagcttatggctatttacctatcgaacatcgggatgatttaaacgcttggcaagccgattcgattgtaaatacggtgacagaattacacgagttgttacgtcaaaagcttcctgctctacaggaaaatcagcgtatgataagttaa

SEQ ID NO: 43565 - DNA, 714 bp, Acinetobacter baumannii
atgtcgcaattgaatgttgatttacaagaaatcgcaaaatttgaagcacttgctgccaaatggtgggatcaacattctgaatttcgcccacttcatcaaatcaatcctttacgcttaaactggattgatgaacgtgcaggtggccttgccggtaaaaaagtacttgatgtcggctgtggcggcgggattttggctgaaagcatggcacgtcgtggagcagatgtactgggcattgatatgggtgaagcgcctttagctgtaggccgtttgcatgctcaacaagaaaatgttcaaaatattgaatatcgtcaaattccagttgaagaattggcgcaagaacaagcaggccaatatgatgtggtcacttgcatggaaatgatggaacacgttccagacccggcatccattgtaaaagcatgtcagactttggttaaacccggtggccatgtgttcttctcgaccatcaaccgtaacccgaaatcttatttattcgccattattggtgctgaatatgtgctgcgcatgctgccaaaaggtacgcatgattatcacaagtttattcgcccatctgaaatggcacatgatattcgtaatgcaggcttaacgttaaaagaaatgacgggcttacactacaacccaattacgaagcgttattggttagcgccaaatgttgatgttaactatatggttcatacagtaaagacaggtgcatga

SEQ ID NO: 43566 - DNA, 618 bp, Acinetobacter baumannii
atgaaaaaattggttttgggtggtttgagtgcagcaattatggccgtatcgggtagtgcaatggcagcagattttgttgctggtaaagactacaccgtaatcgccaatccaggcaaagtggaagtaccggggaaaatcgaagttcgtgagttcttttggtatggctgtccgcactgttttaaacttgaaccacatatgcaaacgtggttaaaacaaattccgagtgatgtacgttttgtgcgtacgccagcagccatgaacaaagtatgggaacaaggggcacgtacttactatacatctgaggcattaggtgtacgtaagcgcacgcatttaccattattccatgcaattcaggtgaatggtcagcagatttttgaccaagcttctgcggctaaattctttactcgttacggtgtgcctgaacaaaaatttaatagcacttacaactcatttgctgtaactgcaaaagttgccgagtcaaataaacttgctcaacagtaccaattaacaggtgttcctgctgtagtggtaaatggtaaatatgtggtgcagggtgaagatggtaaagttactcaagtccttaattacttaattgaaaaagaacgtaaggcaaaataa

SEQ ID NO: 43567 - DNA, 648 bp, Acinetobacter baumannii
atgaatcttgatcgtcatacacagtttttgatgcgcaaagaaaaaattctaagcgttgcagaaaaattgttactagaaaacaatcaggaaattactctagatgaattagtggccgagctagatattgcaaaaggtacgctttataagcactttagaagtaaaaatgaacttctgcttgaattgattattcaaaatgaaaaacaaattttagaaatttctcaaaaatataatactgattttaaagagtatgcaccacgatacatgctccaccatttgctcacaccgggaaaaacgattttattgcatcaacttgaagaaaatctgacgatgacagagtctaagttgaagcatctttttgaagagctttatgaagttcgtcaacaacgtattctagcgattaaagacattacagaaagttatttaaaatcattaaattatgatatgtcgattcgtgactatttatcttatatctggtcactcacttacggtgcatcgttgcttttaaactcaacttattatcagcgttcgattggttctcgccaaaaattaattaatttatatattaatcaagcattatcactacctacccaaaccaccaattttgatgcgctcaattttcagattgaagacgagaattctcaaaattaa

SEQ ID NO: 43568 - DNA, 639 bp, Acinetobacter baumannii
atgtcgatacgggatgaacgaaaacagcaaagtcgtcaggcacttcttgatgcagccttgcatctgagcacgtctgggcgttcgttcagtagtatcagtttgcgtgaagttgcacgtgaagtgggtttagtgccaacagcgttctatcgtcattttcaagacatggatgaactcgggaaagagttggttgaccaagttgccctacatttaaaaagtgttttacatcaacttggacaaagttacttacagcacaagtctgcaaaaacccaaaccagtattgagctatttgtgcaggcagtgaatcatagccctaaacagtggcaatttatgattgctgaacgttggggtggttcagaaacggtccgtgcagccattgctagagaaattgaatttttgattgaagatctcacaacagatctgactaaactcgaaaattttaaacatattcaaaatcctcaagacttaaatgtcttatctaccattttgaccaatatgtcatttacatgggcaatgacgtggctcaacctcgccaaacaatatcaaggtgagcaacttaaacagcaacaaactgcatttattgaaaatgcgtctacacaagttcgcttactgtttagaggtattgctaactgggaacggtaa

SEQ ID NO: 43569 - DNA, 1026 bp, Acinetobacter baumannii
atgaacgcaacacttaactatcaaccacattgggttcgagaagatttcgttgattttgttttgcagaaaattaacgcgacttgggcttggaaaagggtacttgcagaagttaccgctgttcagtcgcttcataccgatatggtactgatcaagcttaaaccaaatcgtaattttaatttcgatcaggttcgagcgggacaaagcattctattgacgttgcttatcgatggcgtttaccaacaacgtagctattcgattattgaagtaaccactcaaggtgaaatcgctttaggtattaaagtacaaggcttggtgtctcgtgcagctcaactattacatgtgggcgagtgtgttgaaatttcacagccacaaggtgatttcactttgcatcaaggccagcagcctgcgattttaatcgcctcaggaagtggcgttactgcaatttattcactcttgcagcaagctttgaaacagcagcttgaacaaatccatgtcatttattttaatcgtgcggaaatttttcatgctgaattaaaagctttggcagaacagcacccacagcttcaatatcacttttttaataccacctcgcaaaagcagcatttaactgaaagcttactgcaaaagctggttcctgattatgcgcagacagcaacttatgtttgtggtcatcacggcatgatgcagcaggcgaatgaaatttatgcacaaaaaggtgctcagtcgcagcttcatcaagaatatttccaaccacttcaagtgagtggtacacatgcagcgcagccagttattttccgccgtgctcaacacgagtttttagctgaaacaaatttactgagcagtgcagagcaagccggtttacgcccacaacatggttgccgtatgggtgtctgcaataaatgcagctgtaccaaagtaagtggtgttactcaaaacctgttaaccggtgaaattgaagaccaacctaaccgtccaattaaactatgcgtgagccaggcattaagcccagtcacgattgatctataa

SEQ ID NO: 43570 - DNA, 1149 bp, Acinetobacter baumannii
atgaatatggcattagaattttctactgtttctaaatctgctcatttaacccctgagcaaattgaagaatttggccgccgtgttgaacagattcgtcaagatgttatgcaaagccttggtgagcaagatgcaaaatatatctataaagtccgtaacttcgttcgctataccgaaatcgtatcacgtggcatgttgatgtttggtggctggattcctcctgtctggttattgggtacaggtttactgggtatttctaaaattgtagaaaacatggaacttggtcataacgttatgcacggtcagtttgactggttaaatgaaccaagtctgaatggtaatacctatgattgggataccattgcctctggtgatgactggcgtgaaacacacaactatgtacatcacacctataccaatattgtcggtaaagatcatgatgtcggatatggtattttgcgagtaagcgatcaacagaagtgggaacctcgtcacctatttaatattcctttggctctacagttaatgtttttctttgaatggtatgtaggtgtacaaaatctacatcttgaagatgcattagtttataaaaccaaaagctggaaacaggtgtggaaagatgcggctaaggtccgtaaaaaagcaacgcgccaagttttaaaagattatgtgtttttccctgtgatctctggtcctatgtttttaccagtttttgcaggcaatgtagttgcgaatattattcgtaacttgtggtcatctgctgtgatttttaatggtcactttactgaagatgcagaaacgtttgagccggataataccgacactgaaactaaggcagagtggtatttacgtcagattcgtggttcaagtaattttagtggtacagaatggcttcattttatgagtggtaatttaagccatcaaatcgaacaccatttattcccagatatgcctgccaaccgctataaagaagtagcaccgaaaattaaggcactctgtgcagaatacggcattaactacaatgaagctaatttcatgcgtcagttctggagtgtatgggtgcgtttagcaaaatgctcattaccaaaccacaccactgcaaaagtgatgcagacattagaaaaattaaaagcaaaattcaaatttgcctaa

SEQ ID NO: 43571 - DNA, 717 bp, Acinetobacter baumannii
atgcgtattgaccaacgtgcattagaccaattacgtgaagtgaaaattacacgaaactacacccgttatgctgaaggttctgtgctggtcgaatttggtcacaccaaagtcctttgtactgcaagcattgataactcagtgccacgctttttaaaaggccaaggtcaaggctgggtaacagcagaatatggcatgttaccgcgctcaacacactcacgttgtgatcgtgaagctgctcgtggcaaacaaactggtcgtactcaagaaatccaacgtctgattggccgtagcctacgtgcgatggttgatttgaaaaagcttggtgaaaacacgattacgatcgactgcgatgtcattcaggctgatggtggtacacgtactgcttcaatcactggtgctgctgtagcattggttgatgcgatgaatgttttacttgcacagaaaaaaattaagcaagatccgcttaaaggcttagttgctgcaatttctgtaggtatgtatcaagatgaagtattacttgatctttgttatgaagaagactcgaattgtcaaactgacttaaatgtcgtgatgacacaagcaggcgagtttattgaaattcaaggtacagctgaagataaaccatttacccgtgctcaaagcaatgccatgttagaaatggctgaaaaaggaattgccgagctcattaaaaagcaacaagaagctttaggctggtaa

SEQ ID NO: 43572 - DNA, 2169 bp, Acinetobacter baumannii
atgaatcgtcgcgaatttcttttaaattctacaaaaacaatgtttgggaccgctgctctagcgagtttcccgctgagtattcaaaaagcgttagcaattgacgccaaagttgaaagtggaacaattcaagatgttaaacacattgtgattttgactcaggaaaaccgttcatttgataattattttggaacactaaaaggtgtacgtggtttcggcgaccgttttaccattcctatgacagaaggtcgaaaggtttgggaacaatatgacgccaacaaaaagaaagtattgccataccacttagatagtcgtttaggaaatgctcagcgtgttactggtacaaatcattcatggtcagatggtcaaggtgcttgggataatgggcgtatgagtgattgggtagcgcataaacaaccgcagtcgatgggctactacaaaaaacaagaagttgaatatcaatttgccttagcgaatgcttttacgatttgtgatgcctaccactgtgccatgcacgcgggaactaacccgaaccgtaaatttatctggacgggaaccaatggtcctacaggcgcaggtgttgcgagtgtggtcaacgaatttgatggaattggaccatcaacagaaggttatgaatggacgacgtatcctgagcgtttacagcaggctggcgtgacatggaaagtttatcaaaacatgccggataactttactgataaccctttagctggtttcaagcaatatcgccgtgcaaatgagcaatctggtcaacctgtcagtaacgacacactaacgtgtccagcctatgatgaaaagattgatgcgactcaaccactttacaaaggtattgccaataccatgccggacggtggttttctaggagcttttaaagctgatattgcgcaaggtaaattaccgcaagtgagttggttagttgctcctgcaacttacagtgaacatccggggccatctagtcctgtacaaggcgcttggtatattcaggaagtattaaatgcattaactgaaaactctcaagtgtggagccaaaccgttttattggtgaacttcgatgaaaatgacggtttctttgaccatgttccttcaccaagcgcaccttctaaagatataaacggtgttgtatatggaaaaaccactttaacggaccaacaagtatcttatgaatactttaaccatccagcagtggcggcttcaaaatctcaacccgaaacagacggacgggtgtatggcccaggtgtacgcgttccaatgtatgtgatttcgccgtggagccgtggaggatgggtaaattctcaagtctttgatcatacttctattttacaattcttagaaaaacgttttggtgtgcaagaacctaacattagcccataccgccgtgctgtatgtggtgatttaacaacggcatttaattttaaaacaccgaatcttttgcctgttgctgaactagatgggaagaaaacaaaagccgaagccgatgcgattcgtgtcgctcaagctttattgccccaagttcctgttccgagccagcaacaatttcctcagcaggaaatgggaattcgaccatcgcgtgctttaccttatattttgcacactagtgccaaagtcgatgtcactcaaaaaacggttaagctgatgttctccaatacgggtaaacaggcagccgttttccatgtctataaccgattagatcttacggcaattccacgccgctatatggttgaggcgggcaaacagcttgatgacgtgtggaatactatcaatggacagtatgatttatgggtacttggaccaaatggttttcaccgtgcgtttaaaggtaatttaagtcaagctaatcagactcaagcattaccggaaattagagtatgtgtagaagaatgtgatgcgaatttatatttaaaagtgcgtcatgatggtaataagtcagtcaagctcaacgtcaaagctaatgcttatctaccaaacaagacatggatgatagaaactaatagttctgaaaaagaactggtttgggatatgtctgaatttggtggctggtatgattttacggtgacattagctgatgatgctactttcagccgtcgttttgcaggacgtatagaaactcaagaagattcaatttctgatccatatatggggtatttagagtcttag

SEQ ID NO: 43573 - DNA, 168 bp, Acinetobacter baumannii
atgctacaaggttttattgtattattagcagtagttacttttgttttaatggctgccgatccacgggatagtggggcacaaacgactcagtcagcatggcaaaaaacacaagcggcagacatgaccaagtcgcaaaaaaataccaataatgatgctgattttatttag

SEQ ID NO: 43574 - DNA, 846 bp, Acinetobacter baumannii
atgagcatacctcagtctttgcttgaacagtcaattcaaatcaatattcaacaagcattacaagaagatattggggacggtgacattaccgccatgctcacacctgaagatgaacaggctaccgcaactatcattagccgtgaagatatggttttagctggacagccttgggtgaatgcgctcatctcagcgtatgacaacactgtacaggtgacttggttaaaacaagaaggtgaccgtgttgctgcaaatgaagcctttttaaagcttgctggttctgcacgtagcttactgactgtagagcgccctgctttaaactttattcaaacattatcagctgttgcaacaaaaactgctgaatatgttcagcatcttgaaggtttaaataccaaacttctcgatacacgtaaaactttaccgggcttacgtattgcacaaaaatatgccgtaaccgtcggcggcggaaaaaatcaccgcctcggtttatttgatgcattcttaattaaagaaaatcatattatggcagcgggcggtattgcccaagcgatagcaaaagcacatcaaattgcgccgggtaaacctgttgaagtcgaagttgaaacttgggatgagctaaaccaagcgcttgaagcaggtgcagacattgtcatgctcgacaactttagccaacaacaaatgattgatgctgtaaaacacgtggcgggacgctgtaaactcgaagcttcgggcaatatcactattgaaaacttacgcgaagtagcgactactggtgtcgactatatttctatgggcgtgttgactaaagatgtcaaagccgttgatttatcaatgcgttttaatgcctaa

SEQ ID NO: 43575 - DNA, 570 bp, Acinetobacter baumannii
atgaagcaaatcacaccgtatgaagttataaatggacaattaaaaggggcgagacaagtaccttctccaaattttaaccagcgtcccgctggtaccgaaatacaaatgattgtggttcataatattagcttgccgccttctcagtttgggggaggctatattgaacagtttttccagaataaattagattggtccgttcatccctattttcagactattgaaggtatgcaagtctctacacacctgttaattttacgaacaggtgaagtcctacagtttgttaactttaatgatcgtgcatggcatgcagggcgttcaagctacttagccaaagttgaatgtaatgattattcaattggtattgagcttgaaggaagtgatgacctgccttttgaagaagtacaatatgaagtgctaactgacgttgttactgctattcgtcaggcctatcctgaaattaaaagccatattgcagggcattcagacattgcaccgggccgaaaaaccgatccgggaccttattttaaatggcagcactttaggcagttgttagcacagaaaaaaacttga

SEQ ID NO: 43576 - DNA, 1542 bp, Acinetobacter baumannii
atggcattatggcgatcgacttttattgtcagtgcgatgacgatgttgtcacgggtattgggcttagtacgagatgtcgtattgctcaacgtgtttggtgcgggtaaagatttcgataccttcgttgtggcttttcgtattcctaacttctttcgacggttgtttgccgaaggggctttttcacaggcttttattccggtattgaccgaatataaaacaggtcgtgcgcatgcagaagttcaaatcctgattagtcgggtatttggatgtttgctgacagtcatgaccttactcactttcgtggctatggttttagctccagcaattatctatatgtatgcgccgggttttcataatgaccctgaaaagtttgatttagcggtcagtatgttccgtctgaccattccctatttaatgtttatgtcgcttacggcttttgccagtagcatcttaaacagttatggctcgtttgcctcgccagctttttcacctgttttactgaacgtagcaatgattgcaggggcttggtggcttacaccgtatatggctgagccaatcaaagctttaggttggtcagttgttgcggctggtattttacagttagcgatacaaattcctgagttatggcgtaaaaacttactgatcccaccgaaagttgattttaaacatgaaggtgtagaacgtattttaaaattaatgcttccagcattatttggtgtctctgtgactcagattaacctattgctaaatacgatttgggcatctttcatgcaagatggttcagtgtcttggctctacagtgccgaacgtatgaccgagttacctttaggattaatcggtgttgcgattggtacagtgattttaccttcactgtcagcacgtcatgctgaacaagaccaagcgaagtttcgtagcatgatcgattgggcagcaaaagtgattgtattggtggggttaccagcaagtattgctttatttatgctttctacaccgattattcaggcattgttccaacgtggtgagtttgatttacgcgatacacaaatgacagcactcgcattgcagtgtatgagcgctggtgtaatttcctttatgttaattaaagtatttgcaccaggtttctatgcgcagcaagatacaaaaacaccagtgcgtgtgggtttaatgtcggttgcagctaatgcgattttaaacgttgtattcattggattctttaaactaatcaattggcatgcagagcatatggcgcttgcattagcctcctctggttcagctttagtaaatgcaggtttgctctatttttatctgcataagcgtaatattttccgatttggtgcacattggaaaaaactggcacttcaatatggcttggccaaccttgcgatgattgcagcactttggttcgggttaaattggtataacggcgagctctctcaatggattcgtgttgcagaggtagtaggtttatgcgttgtaggtgtgatcgcttacttaattggcttattactgacaggctttaggccaagagatttaaaacattaa

SEQ ID NO: 43577 - DNA, 696 bp, Acinetobacter baumannii
atgaaaaaaatcagtttggttattgcagcgtcaacaatgagtttatctgtttttgctgctgcaccgataacaaataaaagcccggcaaaagatcagtttagttatagttatggttatttaatgggccgtaataatactgatgcattaacagatttaaatcttgatattttttaccaaggtttacaagaaggtgctcaaaataagacagcacgcctaactgatgaagaaatggcgaaagcaattaatgattataaaaaaactttagaagctaaacagctagtcgaatttcaaaaacaaggtcaacaaaacgctcaggctggtgcagcttttctggcagaaaatgctaaaaaatctggtgtgattacgactaaatcaggtctgcaatatcaggtattaaaagaaggcactggtaaaacacctaaagccacctctcgtgtaaaagtaaactatgaaggacgtttactcgacgggactgtatttgatagctcaattgcacgtaatcatcctgttgattttcagttaagtcaagtgattgccggctggaccgaaggcttacaaaccatgaaagaaggcggtaaaacccgtttcttcattccagccaaacttgcttatggtgaagttggcgctggggatagtatcggtccaaatagcactttaatttttgatattgaattgctacaagttttgccaaaataa

SEQ ID NO: 43578 - DNA, 723 bp, Acinetobacter baumannii
atgagtaaagccttacccattgctgtcgctgtagttttaggcggtgctgcacttgtacctgtatattatgcaactcaacatccggccacagaagtcggacgtaaagcagacaaaaatgcttctccaattcaaaaaatcagttatgttcttgggtatgaagttgctcaacaaactcctcctgaactggatacgaaagcatttgttcaagggatccatgatgcgcgcaataagcagcctagtgcttatactcaagaagatttaaaagctgccgttgctgcttatgaaaaagagttacaacaaaaaatgcagcatcaagacaaacctgagcaagcgggtacagctactgactctgcagatgcacagttccttgcagaaaacaaaacgaaagctggcgtaaaaaccactgcatcaggtttgcaatatatcattactaaagaaggtactggtaaacagccaactgctcagtctgttgtcaaagcacattatgaaggtcgcttaattaatggacaggttttcgatagttcttataagcgtggtcaaccagtagaatttccgcttaatcaggtcattccgggttggactgaaggtcttcaactcatgaaagaaggtggaaaagcgactttcttcataccatcaaatcttgcgtatggcccacaagagcttcctggaattccagcaaacagtacactgatttttgatgtagaactcatttcagtgaaataa

SEQ ID NO: 43579 - DNA, 2187 bp, Acinetobacter baumannii
atgaaccaacagaatactaataccgaagatacaattgacttaaaagaactgtttttttcattgattgctcagtggaaactcattgctctatgcgttattttaagcgttgtatgtgccctactctatttacgtgtaacgccagatacctattcggtagatgctttggttcaggttgaagacagtaaaggggcttctgctgcacttttaggtgatctatcacaaatgattgagcaaaaatcaccagctcaggcagaaatagaaattttaaaatcacgtctggttttaggttctgttattaaagatttacatctgaatatacaggtctctagcactgaaaatacgcttacccatcgcttattgagcgataccgattataaaactgaatacactaaaaaatcggttttatttaaagatggtttaaaaagttttgatatacgtcagtttgagattccagcttattatctagataagaacttacttcttgactttgataaacagtctttacgtttaacagacccagatactgaagaagtcatcttaactgttccattaaaccaagctaacagcgttacaggaccgtatggtttatggaaagttgctatatttacaaaagaccaatttgactcaacttataatattaagaaattatcacttcctttagctataaaatctatcagttccgactattctgtagaagaaaaaggtaaactcacaggtatattaggacttagctatcaaggccaagatcaagaacatattactaaagtcttaaatgctattttagcgacttatagtgcacaaaatattgagcgccgttcggcagaatctgctcagaccttaaaatttttagatgaacagctaccggacctgaaaaaacagctagatgatgctgagcgtcaatttaataaattccgtcagcaatataatacagttgatgtgactaaagaatctgagctttatttaacccaaagtattactttggaaactaaaaaagcagagcttgagcagaaacaagctgaaatggcagcaaaatatacagctgaacatccagcaatgagagaaattaatggccagctcgctgcgattaataagcaaattggtgagctcaatagtactttaaaacaattacccgatgttcaacgccagtatttacagctttatcgtgaagttgaagttaaaacacagctttacacagctcttttaaattcatatcaacaacttcgtattgccaaagctggtgaaattggtaatgtacgtattgtcgacactgctattgaacctgttcagcctattaaaccaaagaaactattagtccttattttatctgtatttgtgggcggttttattggaacattgattgccttattacgtaatatgttacggacaggtattaaagattctggccaaattgaaaatgaattggatttaccagtttatgcaactgtacctcgttctccaattcaagaaagccgtatcaagattttaaagaagaagaagagtattcctattcttgcggttaaaaacagtgatgatattgcgattgaaagcttacgtagtatccgtacagctattcactttgctttagcaaatgcaaaaaataatattattatgattgctggtccttctcctgaagtgggtaaatcctttatttcaactaacttggcgaccatttttgcccaaggcgataaacgagtactattgatcgatgccgatatgcgtcgtggttatatgcataaatatttcgatgttgatgtgaaaccaggtctatcagaacttttaagtggacaagctgatttacaaaaagtattacacaaaactcagataacgaatctagatgtgattactcgtggtaagagcccaacaaatccttcagagattttaagctcaaaccagtttaaagaattacttgagcagctacaaagccaatatgaccacatcattatcgatactccaccagtgcttgcagtaaccgatggtattattatttcgcaatatactggtgtgaacttaattgttgcacgctacgccaagtcacaaatgaaagagcttgaactaactgttaatcgttttgaacaggcgggtgttaaagtcaacggctttattctcaatgatattcaacgtgctagcgctggctatggttatggctataactatgcttatgcctataaggcacaaaaagaagactaa

SEQ ID NO: 43580 - DNA, 429 bp, Acinetobacter baumannii
atgcaaattaaaaatattttggtggtttgtattggaaatatttgccgtagccccatggcagaatattttttaaaacagcaatatcctcaacttaatattgagtctgccggtatttcaggactcattggacatcaggctgacgaaaaagctcggctctgtatggaacgtttaggtattgatatgcaacctcatattgcaaaaaaactcaatgctgagctcattaaaaaagctgatcttattttagtgatgagcaccaaccaacagaaacatattgaacaaacctggccctttgcgaaaggtaaaacctatcgcttaggccattggcaaaataaaaatgtgcccgatccttaccagcatgagcaagctgtctttgatgaaatttgccagctcattcagcaatgcgtagctgactgggaaccttatatttaa

SEQ ID NO: 43581 - DNA, 1101 bp, Acinetobacter baumannii
gtgaagtattgccagtttttctctgttcttgccttaagtttaagtgctgccagctgtgcggttacttccggtttacaaacttatgatattccgagtgagggagtttataaaacggacctcggaactacggttaatgtagttaaaatttctcaagaaacattacctgcaattcagcctgctcaaatcgattatcaacgggactacgcatcattatttaaaaatcaacaaactatttatcgtttaagtccaggtgatgttctctctattcagctgtgggcttatccggaaattactcctcctgtaagcaatattagtaatgaacaatctgttcaagcgaatggttacccaatcgatcagagtggttatattcagtttccgttggttggacgctacaaagcagctggtaaaacacttgctcaagtcaaccgtgagctacataaccaactggctcgctttttaaaaaatccggatgtggtagtgcgcgtagtgtcttatgaaggacaacgtttctctgttcaaggtagtgttactaaaggtggtcaattttatttaaacgaccaacctgtcagtatttatactgccttgggtatggcaggtggtgtaactacaacgggtgataacacttatattcaactgattcggaatggccgaacttataacctaaatacgattgatttagaaaaagcaggctattcactgcacaaacttttggttcagccgaacgataccatttatgtcagtacacgtgagaaccaaaaaatttatgtgatgggtgaatcaggtaaaaatcaagcactacctatgcgtgatcaaggcatgacattgactgatgccctaggtgaaagtttaggaataaatcccttatctggaagtgctagccgtatctatgtagtacggactaacccaaatgatcgtacaaccgaaatttaccatttaaatttaatgagtattggtgattttggtttagcgaatcaatttagactacgtagtaatgatgtcgtttatgttgatgcaactggcttaactcgttggcaacgtattgtcaatcaaatcattcctttctcaaatgctttatataacatagaccgtttgggacaataa

SEQ ID NO: 43582 - DNA, 1275 bp, Acinetobacter baumannii
atgcaaattgccaaattaaaaatagcaattattgggttaggctatgttggcttgccgttggcagttgagtttgggaaaaaggtaccggttgtcggctttgatatttatcaaaaacgtatagatgagcttaagaatggtcaagatcataccttagaagtttcacctgaagaattaaagcaagctgttcacctcaaatatactgctcatttagatgatttacaggactctaattttttcatagtcacagtacctacaccaattgatgactttaagcagcctgatttaacccctttaattaaagcctcgacgagtattgggcaggttttaaaaaaaggtgatgtagtggtatatgagtccaccgtatatccaggtgcaacagaagaagtatgtattcctgttttggaaaaagtttcaggtttaaaatttaatcaagacttttttgcaggttatagccctgagcgaattaatcccggtgataagcagcaccgcgtaactaatattttaaaaatcacatcgggttccacacctgaggtggctgattatattgatgaagtttataatttaattattgaggcgggcactcataaggcgccgaatataaaagtagcagaagcagctaaagtaatcgaaaacacacaacgtgatgtcaatatcgctctgattaatgaattggcacttatttttaataaactagatattgataccgaagatgtactcaaggctgctggcacgaaatggaactttttaccattccgacctggattggttggggggcattgtataggtgtagatccctattaccttacacataaagcccagtctatcggcttgcatcccgaaattattttagcagctcggcgcttaaatgatcgtatgggtgagcatgtggcgactcagctcattaaagagatggttaaacagcgaattcaggtcgttggtgcccgtattttagtaatgggtcttagttttaaagaaaattgccctgatattcgtaatacaaaaattgttgattttattaaagcgttgaaagagtacgatttagatttagatatctatgacccgtgggtagatgatacagaagtacaacacgaatatggtttagcgccaattaaagaattacaacaaggcttgtatgatgcgatcgttattgccgttgcccataatcagtttaaatcaatgagtgcacatgagtttcatgccttaggtaaagaaaagcatgtactttatgatttgaagtatgttttagataaatcagagaccgatatcagactttga

SEQ ID NO: 43583 - DNA, 999 bp, Acinetobacter baumannii
atgttacaaggctcaacaatattagtaactggtggaacaggttcttttggtaatacatttgttccaatgacattggaaaaatataatcctaaaaaaataattattttttctcgcgatgaaatgaaacaatgggaaatggcgaagaaatttaaagatgataaacgtgttcgctttttcattggtgatgtgcgtgataaagagcgcttatatcgtgctttagatggggttgattatgttgtgcatgctgcagcaaccaaaattgtaccaactgctgaatacaacccttttgaatgtatcaagactaatattaatggtgcaatgaacctgattgatgcatgtattgataaaaaagtaaaaggtgttgttgctctttcaactgataaagcaagtagtccaattaatttgtatggtgcaacaaaacttgcatctgacaaattatttgtttctggtaatgcatactctggtgaacatggtacaaaattctctgttgtgcgttacggtaatgtaatgggatctcgtgggtcagttattcctttctttatgtcaattaaagataaaggcgtgctgcctattacagatgaccgtatgactcgctttatgatctcgttagaacaaggtgtagagcttgtttggcatgcatttgaagatatggttggtggtgaaatttatgtgaaaaaaattccatcaatgaaagtcaccgatcttgctgcagtggttgctcctgaagctaaacaagaagttataggtattcgtccaggcgaaaaattacatgagcaaatgatcagtgtcgaagacgcttattatacttatgaatacccagaacattataaaatcttgcctgtaattaatgattgggcggaaacacaagaacgtattaaagacggtaaacgagttccagaaggtttccactattctagtgataataatactgaatggatgagtccagaagatttacaaaaatggttaattgaaaacgctgagaaagtaggaaatatctaa

SEQ ID NO: 43584 - DNA, 1161 bp, Acinetobacter baumannii
atgtttatcccatatggcaaacaaaatataaatcaggctgatgttgatgcagtggttcaagttctccaatctgactttttaacacaaggtcctcaagttcctttatttgaaaaatcagtagcagaattggttggggcaaaatatgcctttgctatgaatagtgcaacatcagctttacatgtagcttgtttggcattgggattgaaaaaaggagatgtcctttggacatctccgattacttttgttgcatcggctaattgtgcattgtactgtgaagcagatgttgatttcgtcgatattgacccaaatacctataatctttcggttaatgctctaaaagccaaattagaaattgcaaagcaaaataataaattaccaaaaattgtagtgcctgtgcatttatgtggtcagccatgcgatatggaaaaaatccatgcactttcgaaagaatatggctttagtgttattgaagatgcatctcatgcaattgggggtaaatataaagaaagttatattggttctaaccagtattctgatattacaatttttagttttcatccagtcaaaattattacaacagctgaaggtggaatggcgcttaccaataatgaagatttagctaagaaaatcgatttattacgtagtcatggcgttacaagaaacccggaatttatgaccaaaccatcagaaggcccttggtactaccaacaggttgagttgggatataactatcgcatgaccgaattacaagctgcgttaggggttacacagttgactcgcttagaaacatttgtggctaaacgacatgagattgctaaaaaatataatgagctcttaaaagatttaccgttaattaccccataccaattaccggaaacatattctggtttgcatttatatgttattcgcttaaagctagatgaattgagtaaagggcgtaaagaaatttttgagatattgagagaaaagggtattggagtaaatgtacattatattccagtacatacccaaccttattatcaacaattaggcttcaaacaaggcgatttccctgaagcagaagcttattatgaagctgctattagcttaccaatgttccctgatttgactgatgagcaaattcagtacatttaccagacactaaaagaggtgttggtataa

SEQ ID NO: 43585 - DNA, 693 bp, Acinetobacter baumannii
atgcaactggcggttattcctgcgcgaggtggaagcaaaagaattcctcgtaaaaacattaaagacttctacggtaagcccatgattgcgtggtctatagaagcagcactgaaaagtgaatgttttgacgaagtctgggtctcgactgatgatcaagaaattgcagatattgcagtagagtttggagcgaaagttccatttctgcgaccagctcatttgtctgatgattatgcaactacagcagatgtcatgcagcatgcgatacaagcttttgcgcaattacggggacaatcgccagactttgtttgttgtttatatgccactgcgccgtttgtacaggtcgatgatctgaaaactggattacagctattacaatctcatccgctagattatgcttttagtgcaacgacttttgctttcccgattcaaagagctattaaattgaatgaggatggtaatgttgaaatgttccagccagaaaactttaataagcgttctcaggacttagaagaagcatggcacgacgcggggcagttctactggggaacggcaaaggcatggctagagaaatctgtgattttttcaaatagatcacggattgtagagcttcctagaacacgagttcaggatattgatactcctgaagattggcatcgtgcagagttgatggcacagctactattagatgtataa

SEQ ID NO: 43586 - DNA, 1098 bp, Acinetobacter baumannii
atgaagtttggttttagagcggatgcatctttatatataggctcgggacatgtaatccgctgtttaacgattgctgatgctttagtcaagcatggacatgagagctattttatttgtcgtccgcatcaaggcaatttaatcgagtttataaggcaacgtggctacgtagttcatgtcctttcagagccattatttaatacctcttcagagttgtccgaatatcaacgttggttaggtgtaacagagcaacaagatgctcaagagacgctaacaattttaacagagcagccagtagactggatcgttgttgatcactatggtttgtcagtaatatggcagcaaataattcgcccagaggttagtcgtattgttgctattgatgatttggcagatcgtcaacatgatgcagatatcattttagattgtggcttagcgaataccccctcagattatgcaaaattaaatcagcgagtgggccattatttaatggggccacgctatgctttacttcgtccggaatttcgtacaaaacgattatggttagagcaacatccaaaaacatataatcaggaaaagctacgaattttggttaatcttggtggggtagataaagataatttaacagggactgtgctagaaactctatcaaatagcccacagcaacagcgtttatctgttactgtagttatgggagttaacgctccttggaaagaatctgttctgcaacaagcaaagaaacttccctttagcatcaatatacttattaatgtcaataatatggcagatttaatggctgagcatgatttggcgattggtgcggctggtagtacagcttgggaaagatgttgtttaggactgcccacgattatgatttgcatggcggacaatcaaaaaatgattgcaaaatatttgcatgatttaggtgttgccatctccttggatcaaacagagattcatgaaaagttattatgggcattacaacagtttaatcagggacaattgcaatttatgcatcaaaaagctttatccattaccgatggtataggtgtagatttgctcttgcaaaccattttttctgaggaatttaaggaatgttag

SEQ ID NO: 43587 - DNA, 516 bp, Acinetobacter baumannii
atgttagatcaaaagaatgctcagcttagactccttaatcatgatgatctagaaatggtactgcaatggcgcaaccatgatgacattcgtaaatggatggttaactcggatattattactttaagtgaccatttcgcttggtttgagcggaacaagaatagaactgatcgattattttatatttttgaatatcagcagcaaccacaggggtacatctcctttgttatgatcccaaatagtacagcttatgaatggggtttctatataaaacccgatgctgaaaaaggaatgggacagctgttgggcaacgttgcactgaatcatgcatttaataaacttggtttagaaaaagtttttggtcaggtcttatcatttaatgataggtctttaaattttcataaaaaaatgggttttatccaagaaggtttgttgagaaaacattttaaagatcagcgaggcgaatttgatatatatcaatttggtttgttgcgaacagaatggctagagggtaaatga

SEQ ID NO: 43588 - DNA, 1050 bp, Acinetobacter baumannii
atgagcaaaaaaattacaattaataatcgtgatatcggtacagactttccaccgtatgtaattgctgagctttctgcgaaccataacgggcgtttagaaacggcactcaagattattgaagaagctaagcgctgtggtgctgatgcaattaaattgcaaacatatagtgctgacactattacattaaatagccaaaacgaagaattcatgattcgtggtggtttatgggatgggcagtctctatatgagctttaccaaaaagcacaaatgccatgggagtggcataaaccgctttttgatcacgcgcgtgctttagatattacgatttttagctcaccatttgaccgtactgcagttgatttacttgaagaccttaatgcaccagcatataaaattgcctcttttgaagcggtcgatttgccattaattaaatatgtagcttcaaccggcaaaccaatgattatttcaacaggtatggcagacaaagaagaaattggtgaagcaattcaagctgcttatgatggtggttgcaaagaacttgtagtcttgcactgtgtaagtggttatcctgctccggcagaagattataatttgctgaccatggtcgatatggcgaaatcttttaatgtgccagttggtctttcagaccacactttagataatactacagcaattacttctgttgctttgggcgcatgcctcattgaaaagcattttacactcgaccgcaatggtggaggaccagatgacagtttctctttagagccaaaagaacttcaacaattgtgtcaaggtgcgaagacagcttggcaagcgcttggtcgcgtagattatggtagaaaatcaagtgaacaaggcaatgcacagtttagacgctcgctttactttgtaaaagatttaaaagcaggtgacacaattgatgaatcaagcatccgaagcgtacgcccagggttcggtttaccacctaagttttatgataaaattttaggtaaaaaagtaacacaggaggtaagtgtaaatacgccagtaaagttagaaattattagctaa

SEQ ID NO: 43589 - DNA, 1233 bp, Acinetobacter baumannii
atgaccttaagtttgaaaatagcaccactcataaacttgtctatccgagcactgacgcttctgggtaagtttattttacttttttatatggcaaaatttcttagtgctgaagaggtcggtgtttatggtctatttgtagtattggtgagttactcattatatgctgtaggatttgatttctatacgttctctacacgtgagcttgtgctgaaagataaaaaagaatggggaagctttttaaaaagtcaaagttttttaataatttttgcttatattgttatattaccaattattcttttccttgctagttactcgattccaactaagtggttattttttttaggtttactgattgttttggagcatttaaatcaggagctcacgcggcttttgattattgataaaaaaacagttatggcaaataacctactttttattagaagtggcctttggtgttaccttattattgggtgtatgatttttgcactagttgaaaatcaactcgatagtattctttatgcttggatagtctctgacttgattgctttgattgtaggttggttagctttaaagaaaggactagtatttagtaagagtcagaccatacaaatagaatggttgaaaagtggattaaaaatttgtataccactattgatttccactttaattttgagagctatcacaacagtagatcggctttggttagaacaattagaaggtttaaaagtaattgctgcatatagcttatttattggacttaccaatgcaattattagttttttagaaacaggagtcttttcctttatctatcctaaaatgatccaagagaaaagtaatagtgaaaattttagaatacttgtaaagaaaatgttcttccagtccttagggctagctttacttatatctattgtattagtgataagtttcccatatttcctacattggattgggaaagatatatactatacatataaacatattttctacgttgtattatttgcaaatttaatctattgcgtaagtatgattcctcattatattttatatgcaaaacatagagataagcagattgttctttctcatattcttggtttagctatatttattcttagtacactcgttttaatatttaataaagtacaagttgctgtagcttatggattatgctgtgcttttttatcaatattgatagcaaaagtggtcttctcgttcaaaaaaaataggtctgtttag

SEQ ID NO: 43590 - DNA, 597 bp, Acinetobacter baumannii
atgagaaaagtcccacagcaacagcgttcaaaaattattgttgaccatattttagaggcgacacagcagtgtatcgcccagtatggattactacatacgacgacgcctaaaattgcagagaaatctggagtaagtgttgggtcgatttaccaatactttgagaataaagatcaaatcatagaagaactattgcgccgtaaaagcgaattgctggggcaacaacttaaagaattagttgtgcgacaaggaaatattcctttagagctgctcattcccttagcaatagagttgggatttaatgcattaaaagccgatcatggattttttatagaagtgctgaaacactggcatgactatagtcattcgcaagctgctcagattttagaaaagcattttattgaagtagggctatatacattcagtagaaatcctcatcaatgggacttcgaacaggtgaagcataagtcctttgtaattattaatagtacgctttttacgatgatgcgttatgtaagccaaaacaattttcttatctcagaacaacaacttaagcgagaattatcgagcatgatactggcttatttaagtcaaaaataa

SEQ ID NO: 43591 - DNA, 1215 bp, Acinetobacter baumannii
atgcaaatgattagcccgactcgacttgcttcttttaatgacatgcaagacagtaatttctttactcagtttttaaatatctgttgtgaaaaaccagtacaaccaagctatacggaatatgtgtctttacaacatgccctttatgaaggggatattgaaatggacaaggtgattgattgggttatgcaaaatcccaaagatcaccgaataatttttgagaagatattatttcaaggccgtgatgaactctctgagcttatacctactgagttagaaaatttctttaattacatcgaacaaaagcctgaatggttagatcagcgccaaatcgatgaggctgttaaatttacccatcgtttaggaataaataatggttttattcttagagatttatccttaatggcgggatatttatatccgggatttaatcaacccctaattttaacgggtgcattaaagaaagaagcgggaacacgtttagcagaaaccacaaaatggtgggtggatattactgaacctcaagggctttctcgtttgagtgcaggttttacgtcaacgatttatgttcgctttattcatgcactcgttcgccggcaattaaaaaagtctgaccgttgggatagtgaggtttggggaattcctcttaatcaatttgatttagcaatgactaatttggcttttagcagtgtcgttttactcggtattagagctttaggtatatggccaacaaaacaagaggcaaagagttttttacatttctggcgttatgttggttggttaatgggtattgatgaaaaatggcttattcagtctgaacctgagggttggaggttactttactggatgcagtttgctcatcctcgctccgatcacagcagtgttgaattaggatcgagcttgtcgaaagaaccttttgagagaaaatatctgcatttacgctctttacagcagaaacttgcttatcgacaacatttagaacttacccaattttttattggtaagaaaagaatgaaactactcggattgcctcagcagtctgcctcatggtttgcttattatttaattgtgcgtaatttactactttataatggcgcaaagctttcaccaaaagttgaaaagtttttatctaaatcaggccgtaatatacaaaaacttggcttaacgctttatcagaatcaaggtaaggcaaaaaccttagcaagtatgcatcaataa

SEQ ID NO: 43592 - DNA, 207 bp, Acinetobacter baumannii
atgactaataaattatcgcctgaacagtcttggtggggatggaagttacttattgtggcttctatcttgagtgtattgtttatgattattttttacttggccatcaacaatgagcctgactacatgccaagtcaaaaaaagatgcagatgatggagtcacacgagcaaatgaatcacgctgaaatgcatagttcatcagctcaataa

SEQ ID NO: 43593 - DNA, 2115 bp, Acinetobacter baumannii
atgccacattctaaatttttactacaacctttatgggttgcgatgcttgctgtctctcattcgggtttagtgtttgccgaatcagaaaaaaatgatgccgataccaacacacttcactcattagcacctattgttgttacagcacagcaaggcaatgatgcaaatggtctgatcgtacacgcagatccaaagcaacctattcagccagtccctgccacagatggcgcagactatctgcaaagtattatgggttttaattcaattcaaagcggtggaacaaatggtgatgtgacattccgaggtatgtttggttcacgtattaaaattctaacggatggcacagagaacttgggtgcctgcccaaaccgaatggatgctccaacttcttatatttcaccagaaagttatgaccggatttctgtgattaagggaccacaaacggttcaatatgccaatactggttcagctgcaacagttctatttgaacgtcagcctgaaaagcttacctctgaaaaaccctatcgcggtcaagcgagtgtcttgctaggttcatatgggcgtattgaccataatgttgaagcggctgttggcgatgagaaaaaatatatccgtttaaatgccaaccgttcagaatcgaatagttatcaagatggtgatggcaatacagttccatcagcatggaaaaagtggaatgctgatgtagcgcttggctttactccagatgaaaacacgtgggtcgaaatcacaggtgggaaatctgatggtgaatcgctttatgctggacgttcaatggacggatctcaatttgcgcgtgaaagtttagggcttcgttttgaaaagaaaaatatcactgatgtgatcaagaaaattgaagggcaggtgaactatagctataacgaccatattatggataactttagcttgcgtacaccaccattagttgaaatgaatcatggtggtatgaccatgctgatgccaaatgcaatggccatgcaagtgacacgccgtacattaaactcacgtttggcaatgatttctgaatggaacaaatggagtttgatcacaggcgttgactctcaatttaataaacatggtggcagcatgtcatcgccaacaatgccttctatgaatgttccatatcgtcaagatatgcggtttcaatcatacggcgcttttggtgaacttggctatcaatggaacgatcaaaataagctggttacaggtgtacgtttagaccgagtcacagttgaagatgaacgtgctgattctcaagtaaaaggctttaatactaaacttgaaaagactttgccaagcgcatttgttcgctgggaaaatcaacatcctgagcatgacttcaaaagctatatcggtttaggttatgtagagcgtatgcctgattattgggaacttttctcgcctaaacatggtaatgcgggttcaaccaatacttttaacggtgtgaatcctgagaaaacactacagttggacctgggttttcagcaacaacatggcgctttaaatacatgggcttctgcttatgctggtttggtggatgactacatattaatgagttaccaccatcacccaagtatgggaatggatggacatgatatgagtcatgatattactgcgggagccaaaaatgtcgatgcaaccatcgctggtgcagaagcgggtattgggtaccaattcactgaccgtattcaggcagatttgagtgcgatgtatgcgtggggcaaaaacaccacagatgacaaacctctacctcaaatttcacctttagaaggtcgtttaaatattcgctatgtggctgacaaatataacttaggtctgttatggcgagctgttgctgagcaaaaccgtgtgagtctacatcaaggtaatatcgtgggatatgacctaaaaccaagtaaaggtttttcaacactttctttaaacggaagttataaccttcgtaaagatattgatgtctctgttggcattgataacgtattagataagacctataccgaacacttaaataaagcgggtagtgcaggctttggatttgcgagcgaagagcagtttaacaatatcggaagaaattactgggttcgtatgagtatgaagttttaa

SEQ ID NO: 43594 - DNA, 429 bp, Acinetobacter baumannii
ttggtttttcgtagtggtttgctgcttgcctgtgcagcagtatttttacagattgcggtatttctacagccgctattaccgaagcaatatcaaattgctccggtctgtgaaactattacccgtgctttgcttaaaccaaaagcacagacggaagccatgtcacatgccatgcaccattcacatcaccagcatcatatcgaacaggcgcaagtacctgaccatcatgatcaccatgatgcgaaccatcagtgtcaatattgtaccgtttatgccaatttggttttaccacctgaatttggcgtaaaagaggtgcttgttcgtatacaagttcgcttagtcgcgtatcaacaagctttccggcatgtttactttgcgctacagcgacttttcctactcccgcaaggacgtgcgccgcctctatttgcataa

SEQ ID NO: 43595 - DNA, 531 bp, Acinetobacter baumannii
atggccttattacctattttaagttttcctgatccccgtcttcgtaccattgctaagcccgttgaagaagttactgatgaaattcgtcaacttgcagcagatatgtttgaaaccatgtatgcggcaccaggtatcggtttagcagcttctcaggtcgatcgtcatattcagcttatcgtcatggatttgtctgaatctaaagatgaacctatggttttcattaaccccaaagtaactccgctgactgaagagacgcagccgtacgaagaaggctgtctatcagtgccacaaatatacgacaaagttgatcgcccgtcacgcgtgaaaattgaggcaattaaccttgaaggtcaagcatttgagatagaagctgacggacttctcgctgtttgtatccaacatgaaatggatcacttaaatggcaaattgtttgtggattatttgtcaccacttaagcgtcagcgtgcgcgtgaaaaagtcgaaaaaattgttcgccaacgcgaacgtgaaaaagttgcggtaaaacgttaa

SEQ ID NO: 43596 - DNA, 1155 bp, Acinetobacter baumannii
atgaaaaaggtttttaacggcatggttaattttcatgccttggggataaagaagcatttacttgccttggcgctctgtacaggtgtcgcaatcggtacgatagcagaggttcatgcaaccagtccgaaccataatccaccctcacttaaaagtaatgcacccaatgtatatgttgtaaaacgtggggatactttatgggatatttcaggacattttctaaataaaccatggcgttggcctgaaatctgggcgagcaaccaacatgttaaaaatccacactggatctatccgggtgaccgattactattatgtagcctagatgggcgtcctttagtcggtaaagatgagggcgatggttgtgtaggtattattcgccgctacactgggcaaaccactcacttacaacctcaagttcgcgtcgaagcattaaataatagtgttccggttattccacttgaacatattaaacagtggttagagaacagtactattttaccagccgactcaattaccaacacaccttatattgttggtacagccgatcaacgtgtacttgcaggaaaaggccagactatttatgcacgaggacaaggcttaattaatgggcagcgttatgcagtctaccgagaaggtgaaccttactatttcacagacaataaaggtaaaaagcatagtttagggattgagttactacaagttgcttcaggtgttgcggtatcttctgaaaaagatattactacattagaactaacagatagttataacgctgaagtacgtcgtggcgatcgtgttatgcctgaagagcaagctactttgccaacattattttacccagtagatgcgaagcaagtgacggatggtggcaagattattcgtgtcatgggctcaattggtagagctgcaaaaaatagtgtagtgactttggatcgcggtacaactcagggcgttcaagtaggccaagtttttgatattactcaacaaggtgaatcaattcgcgaccctaaaaccaaagaagtaattcaacttcctggccaacaaattggcagtctaatggtttttagaacttttgatcagctaagttatgcttatgttttagagagcgatttaccaattaaggttggttcaagcattcagccacctcaatttaatgattaa

SEQ ID NO: 43597 - DNA, 1152 bp, Acinetobacter baumannii
atgctggatgtaccttttacaatgctcactcaactttcttcacaccaataccacacacttaaagtgtggtatttggtgcagcactctttagtcagctttaaaaaaattattgattattttggaaattgtgaaaaagccactcaacctgatggtttagcaaagtggtcctctctagggctacatgctaatcacttaaaacgtgtaagcgagtttcaaacgccccaaggtcagacgcagtttgaacaacttgtacaacaagttgttcaacatacggattttattttaacgccggatgactcaggctatcccactcaattacttccttatacagattatccacctattatttttgggaaaggtcaagcacaagctttattgcaacctcagattgcgattgtcggtagccgaaaaccaagcccacatggacgacaggtcgcttatgattttgcttactacttaagtgaaaagggctttttcattagtagtggtctggcttatggcattgatgaagccgctcatcaaggtgcatctactcatcaacgtaccattgcagtgacgggtacgggcttagacactacttatccagctcaaaataaaaaacttgcagaacatattttggctcaaaacggcgccattattactgagtttttaccgggtacaccgccattacaacagcattttccacggagaaaccgaattgtcagcggtttgagtttaggcgttttggtggtagaagcgacattaaaaagtggctcactcatcacggccaataaagctgctgaacaaggtaaaaccgtattcgcgattccgggccatatttatagcgagtttcatcaaggatgccatcaacttatccgtgaaggtgcaattttaatcgaccatcctgaacaaattattgaggatcttgctttaccaacccaatggcaaagtcagcaacaaaatcaaactgaagaagctaatacgaatactccagaaattcctgagcacttgattgatctttatcagtctttagactgggtaggacaaaatattgaccaacttgtagttcaccataatattccagtttctgaactgacctcttcactaatggaactagaactactcggtttatgtatgcaacaatcagggctgtatttacgttgtcgttcttag

SEQ ID NO: 43598 - DNA, 570 bp, Acinetobacter baumannii
atgattacgacctcagtgaccgaagcagccgaatgtttacaacaaggtcaagttttggcatatccaactgaggcagtctggggactaggctgtgatccatttaatgaacaagcttttcaaaaaattcttgaattgaaacagcgccctattgaaaagggcgtcattttattggctggccatattagtcaagtagaacatctactaacttccttaccgcaaactactcagcaagaaattattgattgctggacaaaccatcaaccctcagaaagagccacaacttggctattacctgctgatcaacacattccctcatggattaaaggcgagcatcctcttgttgcagtacgcgtaacgacacatcctttatgtgtcgctttatgcaatgcttttcatggttttattgtatcgacgagcgccaaccctagtggacaagaacctgcacattctttacaagatgcctgccaatactttggttcacaattaaactatctcaatggtgatttaggccaaagccaacagccaagccgcatcattaacgccttaactggtgaagtgatacgcccttaa

SEQ ID NO: 43599 - DNA, 909 bp, Acinetobacter baumannii
atgaaatatcacaaatgggcatttatttttcccattctggcagtactgatttggtctttaaatattgtagtcacccgctatgtctcggactatatttctccggtaagtattagcttttatcggtggttaatcgctttcattattttgactccatttatgtttttgtctgtttggagacaaagacgactagtaataccctatttacctaagcttgctgtgttaagtgcatttgggatggtgctttatcaaggcttggcttatacggctgcccattatactagtgcaaccaatatggggattgtgaatgcatttattcccatctttacgatctttgtttcgcttgccattttaaaagatgtgcctaatcgatttgcagtttttggcagtattttgtcttttgctggtctgctatacgttatgtcccaaggaaatattaataagcttttaagtggtggcgggcaccttggcgatgcattgatgattattgctgtgtttttctatgcattttatggagttttcttaaagaaatggcagcttccacttccaattatgacaagcttatacgttcagattgggttttccgtgctgttccatcttcctttaattttctggtttggtctggatgccttaaatgcacaaaatgcgccaagtgcaatttatgcaggtgtatttgcttctttaattgcgccgttagtttggatgttagccgtacaacaacttgggccaaatagaaccagtatctttatgaatcttgtgccagtgttcacagccattattgcaagtatctggttatctgaacaatggacgatatatcacactttcggcggaattatgattctggtgggcattatcatggcacaaaagaaggttaattctaaaaaatcagatcttttgccagagcaaaattaa

SEQ ID NO: 43600 - DNA, 642 bp, Acinetobacter baumannii
atgacaaataggcatgaaacagatcttgttaatgaggacacgttaaaaaagaagcgtggacgccctaaatgctttgatgagcagcaagtgttagagaaagctatgttacttttttgggaacatggctatgaagcaacctctattagtgacttaacacatgctttagaaattacagcgcctagcctatatagtgcttttggcgataaggcaggtttattttacaaaagtattgactattatctcgctcatgaagcatgtcctattgaaacgatatttttagaagcaaaaactgcaaaaattgcttttgagttatatctttatgacaatgtaaaacgattggttcaacccaataagccagctggctgtatgttggtagttgctgctatgaactgttctgatgccacacaagaggtacagcaaaatcttttagataagcgaataaagactaaagaaaaattattaaaacgtctcgaacaaggtgtagagcagggcgatttgcctactaatgcccctctacaagaaatgactgatttttatgcgactgttattcaggggcttaccattcaggctagagatggtgcaaataccgaacaattacataaagtggtagaacatgccatgaaagcttggacattattttaa

SEQ ID NO: 43601 - DNA, 1215 bp, Acinetobacter baumannii
atggaccaatctactacctctaaagcacgacccatgacttccacacaagggagctggtttgctattttggctgttgccatcgcagcctttgccttggtaacgagtgaatttttacctgttggtgtcttaaatagcgttgcagccgatttacacatttctgtaggtacagcaggtcttattattacagtacccggcattatggcagcgattgcagccccactattacccgtttcagtaaagcaactcgaccgccgttatgtgcttattttactgactgctattatggtgattgccaataccattacggcttttgcagaaaactttcatgttctattgttgagccgtttgattttagggatttcaattggtggcttctgggcaacagcaattgccttaagcggtaagctagcacctgcaaatttacctattgccaaagcaactgctgtagtaatggctggtgtaactttcgccactgtactaggtgtaccgattggaacatggttaagtgaattttatgggtggcgcagtgcctttggaattacagctgctatcggtcttgttgtattagtgcttcagcttattttcttaccaaaacttttaccagagtcagcaatacatattcgtgatttacctgcattattacgcacacctaaagcacgtagcggcatgcttattgttttattaattgggcttgctcacttctgtgcatatagttatttagcccctttctttaaaaatgtagccgggtttaatggcacaactattagctcattattattgctttacggaatagccggtatttttggcaatgcatttgcagggtacagtggtaatttaaatgttcggtataccttagctttcgttggaacttgttttgccattgtattctttggcttcccaatctttgctatccatgagtttggtgccattgtccttacagcattatggggcttcgcatttggcgcattccctacctctgccaatatttggatgtttgtacacgcacctcatgctgtagaaaaaggtatgccgctttttgttggtatgttccaagtcatgattgctacaggttcattattaggtggttatgttgttgatcatttcaatgaaaatactttaatttatggggtattaagcttcgttgccttagctttaattagtacatttaccttagccaaaggtttaaacaatcccaaagcaacatgtgaaaattag

SEQ ID NO: 43602 - DNA, 765 bp, Acinetobacter baumannii
atgaaaaatgaggaccaacaattttctttattagagagtatagaagttcatgaatttctatacgagaaagaagatattgttcgtcctcatgcttcactatggggcgatttcaattttagtttaaatggtattttagaaatacaggtagaagagcaaatatacttgtctcctccaagctatgggctttggattccccctcaaacggttcatcaatctacccatatcgatcatgaaattcattatatctgcattcgtttacatcctcggctttgctctattttaggagatatctgccgatgctttagtattcagcccttctttcgaaccttagttttacaaatattggaacagcaaaaacaaacggaaaagcctgaatatttagaacatcttttacaggttttattcgatcaattacaacaagcacccgcctattctcattatttaccacaaacacggcatcctgttttactgccaattttagaaaagctttcagacccattactttttaatctctctttacagcagctacttcagaacttttctgtcagtgatcgtcatttattacgcttaagccaacaagaactacaactttcactatccgaatggcgtaatcgagccaaaattgtttacgccattcatcagatccgtcaaggaacaccgattaaacgcctagcatacgatttaggatatcaacacagctcaagttttatcgaattttttaaaagatatacaggccaaacacctgttcaaatcagaaataattag

SEQ ID NO: 43603 - DNA, 546 bp, Acinetobacter baumannii
atgactcaatctgtatatcatattccagtaaaagctatttcaggcgaaacggttgaccttgaccaatataaagggaaagttttattaatcgtaaacacagcgtctaaatgtggtttaactccacaatacgaaggcttagaaaagctgtatcaagcaaagaaagatcaaggtcttgaaatcttaggcttccctgctaacaactttaaagaacaagaacctggttcggatgaagaaattcaacagttctgctcattaaactacgatgttcatttcccacttttctctaaaatctctgtagctggcgaagataaacatccactttatcaagcgctaacaacagctcaaccagaacgcattggagaaggtcctttccgtgagcgcttagaaggtttaggtattcctactaaccctgcccctgaagtgttatggaacttcgagaaattcctagtaaataaaaacggtgaagttgttgcgcgttttgcacctaacttaacagcagacgatgaacaaattgtaaaggcagttgaagcagaattagctaaataa

SEQ ID NO: 43604 - DNA, 600 bp, Acinetobacter baumannii
atgaaaaaagttttacaaggtgcatttttcccatttgtgatttttgcttcaggtatgttgttacttggatgtgatcaggcacaagaccacgcaaaggaacaagaatccgttcagactaacgatcaaatatcagaacaagctgatgactctcaacaagaaatcacagctacacaaaataaaactgaattaaaaaatggtaatgttttttatatcgttcgtgatgccgctaacttacagttaaaggctggcgactatatcgaaaagctcaaggacactcaacttgacgttgaacaagctattcaagataaagatcagcatgagctaaaaacaactgtgacgactttgaaagcacagttagaaggtttaaaccaagctttgcttggtttagatatcagaagtcaggaagttgaaaatattcgtcaaagcctattacaggcaaaccagcaagctttaagtatgcctttattaaatgggaaattagagcaaattaatttcgaccaaattgaaaagcaacttaataccatccaaatggatatggtcaagctcgctgctatgattatggcaggagatgaaaaatcagattcaaaaactgattcttaa

SEQ ID NO: 43605 - DNA, 483 bp, Acinetobacter baumannii
atgaaatttaaatattggctacctatccttgtatccactgcttttgttggatgtgcatctgtgccacaggctaatccacagttagctcagcaagcaaaacaattgacagctccaacaaatggaaatgcagtaatttatgtgtaccgttctaataatatagtcggtagtgctctgaaaaaagatgtatgggttgatggagaatgtctgggcgaaacagcacgtggtatattcttttataaagaagttgctggtaatcaagaacatacagtttcaactgaatcagaattttcgccaaatcatttgaaatttaaaactgaagctgggaaaaagtattttgttcagcaatatattaaaccaggcgtttttgttggtggcgctaatttaaaattagtagatgatgcacaaggtcagaaagcaattaatgaatatcgtttagctgaggcaggtaaatgcagtaaagcaactatagcacttgtgaattaa

SEQ ID NO: 43606 - DNA, 420 bp, Acinetobacter baumannii
atggcgactatgcaatgtgatgtcgtaagtgttaaagagtcaatttactctggcgcagtgacgatgttaatcgcgaaaggtgcaggtggtgaacttggtattttgcctggtcacgctccacttgtaaccttgcttcaaccgggcccgattcgtgttctgttggaaaatggtacagaagaaatcgtctatgtatctggcggtgttttagaagttcaacctcatgttgtgacggttcttgcagatactgcaatccgtgctgacaatttggatgaagctgcaattttagaagcacgtaaaaatgctgaacaattgcttgcaaaccaaaagagtgatttggactcagctgctgcgttggctgccttagcagaaaccgctgcacagcttgaaactatccgtaaaatcaaaaaccgcgctcaataa

SEQ ID NO: 43607 - DNA, 1395 bp, Acinetobacter baumannii
atgagtagcggtcgtatcattcagatcatcggcgcggttatcgacgtcgagtttgagcgcacaagcgttccaaagatctatgacgctctccaagttgacggtactgaaactactttagaagttcagcaacaacttggtgatggtgttgttcgtaccatcgcaatgggttctacagaaggtcttaaacgtggtcttactgtaactagcacaaacgcaccgatctctgttccagttggtacagccactcttggccgtatcatggacgttttaggtcgtcctatcgatgaagcaggtcctgttgcgactgaagaacgtttgccgattcaccgtcaagcgccttcttatgctgaacaagcagcttctactgaccttttagaaactggtattaaagtaattgacttactttgcccgtttgcgaaaggtggtaaagttggtttattcggtggtgctggtgttggtaaaaccgttaacatgatggaattgatcaacaacatcgcgaaagcacactcaggtttatctgtgtttgctggtgttggtgagcgtactcgtgaaggtaacgacttctatcacgaaatgaaagattctaacgttcttgacaaagtagcaatggtctacggtcagatgaacgagccaccaggtaaccgtttacgcgtagcgttaactggtttgactatggctgaatacttccgtgatgaaaaagacgaaaacggtaaaggtcgtgacgtattattattcgttgacaacatctaccgttatacacttgcaggtactgaagtatcagcattgttaggtcgtatgccatctgcggtaggttaccaacctacacttgcagaagaaatgggtgttcttcaagagcgtattacatctactaagtctggttcgatcacttcgatccaagcggtatatgtacctgccgatgacttaacagacccatcgcctgcaactacatttgctcacttagacgcaacagtagtattgagccgtgacatcgcatcttctggtatctatccagcgatcgatccacttgactcaacttcacgtcagttagacccattagttgttggtcaagagcactatgaaattgcgcgcgcagtacaaaacgtattgcaacgctataaagagcttaaagacatcatcgcaatcttgggtatggatgaattggcagaagaagataaattggttgtttaccgtgcgcgtaaaatccaacgtttcttctctcaaccattccacgtagctgaagtatttactggtgctcctggtaaattagtaccacttaaagaaacgattcgtggctttaaaggtctattagctggtgaatacgatcacatcccagaacaagcgttctatatggttggtggtattgacgaagtgattgctaaagctgagaaactctaa

SEQ ID NO: 43608 - DNA, 870 bp, Acinetobacter baumannii
atggcaaatttaaaagaaattcgcgccaaagtagctagtatcaagagcacgcaaaagattactcgcgcgatgcaaatggtagctgcttcaaaaatgcgtcgtgcgcaagagcgcatggctcagggccgtccgtatgccgataatatgcgccgtgtaattgctcacttggtacaagcaaaccctgaatacaaacaccgttatatggtggaccgcccagttaagcgtgttggttacatcattgtatcttcagatcgcggtttggcaggtggtttgaacattaacttgttcaagaaagttgtgcagcatgtcaaagcacaacaagagcagtcaattgaagttcaatttgctttgattggtcaaaaagcggtttcgttttttaagaattacggcggtaaagtgctgggtgcaaccactcaaattggtgatgcccctagtttggaacagttaactggctcagtgcaagttatgcttgatgcatttgataaaggcgaattagatcgtatctatctcgtatcaaatggtttcgtcaatgcaatgacacaaaagcctaaagttgagcaacttgttcctttagcaccagcagaagaaggcgatgacctcaaccgtacttatggttgggattacatctatgaaccagaagcagaagaattgctaaatggtttattagttcgctatatcgagtctatggtttatcaaggtgtgattgaaaacgtcgcatgtgagcaatctgcacgtatggtcgcaatgaaagcagcgacagataacgcaggtcagcttatcaaagacttacaactcatctataacaagctgcgtcaagccgcgattactcaggaaatctctgagatcgttggtggtgccgctgccgtttaa

SEQ ID NO: 43609 - DNA, 1545 bp, Acinetobacter baumannii
atgcaacaactgaatccatccgagatcagtgcgctcattaaacagcgtatcggagatctggacaccagcgcgaccgctaaaaacgaaggtaccattgttatggtatccgacggtatcgtgcgtattcacggtcttgctgatgcaatgtacggtgaaatgatcgaattcgacggcggcttatttggtatggcactgaacctagaacaggattcagtgggtgccgttgttttaggtaactacctaagccttcaagaaggtcaaaaagctcgttgtacaggtcgtgttttagaagttccagttggtcctgaacttcttggccgtgtcgtagatgctttgggtaacccaattgatggtaaaggcccaattgatgcaaaattaactgatgctgttgaaaaagtagcaccaggtgtaatttggcgtcaatctgtagaccaacctgttcaaactggttataaatcagttgataccatgattcctgtgggtcgtggtcagcgtgagttgattattggtgaccgtcaaactggtaaaacagcaatggcgatcgatgcgattatcgctcagaaaaactctggcattaaatgtgtatacgttgcgattggtcaaaaacaatcaacaattgcaaacgttgtacgtaagctagaagaaactggcgctatggcgtatacaactgttgtcgctgccgcggctgctgatcctgctgcaatgcagtatttagctccgtactctggctgtacaatgggtgaatacttccgtgaccgcggtgaagacgctcttattatttatgatgatttgtctaagcaagctgttgcttaccgtcaaatttcattgcttttacgtcgtccaccaggtcgtgaagcgtatccaggtgacgtattctatcttcactcacgtcttcttgaacgtgcttcacgtgtatctgctgaatacgttgagaaattcactaatggcgcagtaaccggtaaaactggttctttaactgcattgccaattattgaaactcaagcaggtgacgtatctgcattcgtaccaacaaacgtaatttcgattactgacggtcagatcttcttagaaacatcattattcaatgcaggtatccgtcctgctgtgaacgcgggtatctctgtatctcgtgttggtggttctgctcaaactaagatcatcaaaaaattgtctggtggtatccgtaccgctttagcgcaataccgtgaattggctgcgtttgctcagtttgcttctgaccttgatgaagcaactcgtaaacaacttgaacatggtcaacgtgtaactgagttaatgaagcaaaaacaatatgctccttactcaattgctgaccaagctgtttctgtttatgcatctaacgaaggctatatggctgacgtagaagttaagaaaatcgtagactttgatgctgcgttaattgcttacttccgttcagaatatgctccgttgatgaaacaaatcgatgaaactggtgactacaacaaagacatcgaagcagcaatcaaagctggtattgaaagctttaaagcgactcaaacttactaa

SEQ ID NO: 43610 - DNA, 537 bp, Acinetobacter baumannii
atggctgaactcttgacgttggcacgtccgtatgccaaagcagcatttgcttatgcttctgagcaaggtgcaacagacaattggtcgaatgcgttacaagtgctcagtgctgcggtgcaagacgaagcattttccgcttatttaaatcgccctgaacttactcctgcggagcaagtgaagctttttgctaaagttttaggtgaagatcagtctcaagcagtgtctaactttttgacacttcttgcagataacgatcgattagtgttgttacctgaaattgcagcagaatatgaacagcttaaatcacagaataacaacaatgtggatgtcgtgattgaatcggctttcccgttaactgctgaacaagagcaactgttgaaatctgctttagaaaagcgttttaacagcacagtaactgtttcagttgaagttaaacctgagcttattgcaggtgttgtaattcgtgcaggcgatcaagtgatagatgattctgcgcttaacaagcttgaaaaaatgcgtactcgtcttcttgcataa

SEQ ID NO: 43611 - DNA, 471 bp, Acinetobacter baumannii
atgaatatcaacctcacattgattggtcaagcgattgcgtttgcgttttttgtcgcattctgcatgaagtttgtttggccaccactaatcaatgcgattagtgagcgtcagcgcaaaatcgctgatggcttaaatgcagcagaaaaagcgaaagctgaccttgccgatgcacaagcgcaagtaaagcaagagcttgatgcggctaaagcacaagcggctcaattgatcgaacaagcgaaccgtcgtgcagcgcaattgatcgaagaagctcgtactcaagctgcggctgaaggtgagcgtattcgtcaacaggctaaagaagctgttgatcaagaaatcaattctgctcgcgaagaattacgtcaacaagtagctgccttggcagtaactggtgcagaaaagatcctgaaccaacaagttgatgcagaagctcataacgccatgctgtctcagctggctgctaaactttaa

SEQ ID NO: 43612 - DNA, 246 bp, Acinetobacter baumannii
atggaactcactttaggtctagttgcaattgcatctgctatcttgatcgctttcggtgctttgggtactgcgattggttttggtcttttgggtggtcgctttttagaagctgttgctcgtcaaccagaattagctccacaacttcaaactcgtatgttcttaatcgcgggtcttcttgatgctgtgcctatgatcggtgttggtattggcttgttcttcatcttcgctaatccatttgtaggttaa

SEQ ID NO: 43613 - DNA, 876 bp, Acinetobacter baumannii
atggctgctgaagaacatgccctcacttcgacagagtatatcaagcatcacttgaccaatatgacctatggcaaaatgccagatggtacatggaaattggctgagactgctgaagaagctcattcgatggggttcactgcaattcacttggattcaatgggttggtcaattggccttggtgtgattttctgtttgttattttggatagttgcgagagctgcaaatgctggcgttccaacaaaattccaatctgcaattgaaatgatcattgagtttgttgactcaagtgtccgtgatacttttcatggcaaatcacgtttaatcgctccacttgcactcactattttcgtgtggattttcctcatgaacttaatggacttgatcccagttgactggattcctcaagttgctgcatttgtgggtgctaacgtatttggtatggaccctcaccacgtttacttcaagatcgttccatctacagatccaaacattacccttggtatgtctttatctgtgtttgtacttatcttgttctacagcatccgcgaaaagggtgttggcggtttcgtaggcgagttggcacttaacccatttaacccaagtaatccagttgcaaaagcgttgcttattccagtgaacttgattttggaattggtaacattccttgctcgtcctatttcattggctctccgactattcggtaacatgtatgccggtgagttgatctttatcctgatcgcattattgccgttctggattcaatgggcgttatctgtgccttgggcgatcttccacattcttgtaatcacgttgcaggcattcatctttatgatgcttaccatcgtttacttgagcatggcaagcgaaaaacattaa

SEQ ID NO: 43614 - DNA, 399 bp, Acinetobacter baumannii
atgagccaaactagtcgcttgattgaccgacgattagcaaaagctttggtcttcttacaagcatgcatgatccctgtttccgcacttgtggcgtggagcataaaagacatgacagcagcattaagtgcggcacttggtgcattggtctgctggcttgctacgagctattttgcgtggcaatccttcagaactgcaggtgcgagagcatctaaacaagtgctgtctaacatgtataggggcatgttaggcaaatttgcaatcatgatcgttggatttattttgattttgagcaatgttaaacctttatcaccgttagcattgctgtttggttttattctcgttcaagcgatgtcgtgggttgctcctttttgggtgtcacgtctacaaaaacgggtatag

SEQ ID NO: 43615 - DNA, 840 bp, Acinetobacter baumannii
atgttccgcgtttttgttttcagtatgttctctcttatgagtacgttaggttggagtcagagtttggttgtctctacgcacccaatctatttgattgcaaaagaaattaccaaaggagttgaagaaccccagttattacttcaagggcaaagtgggcatgatgtacagttaacaccggcacaccgtaaagcaattaatgatgcctctttagtgatctggttaggaaaagctcatgaagctccgctcaacaaattgctaagtaacaataagaaagcaattgctttgttagatagcggtattctttctattttgccgcagcgcaatacacgtggggctgcgttaccaaatactgtggatacgcatgtctggctagaaccaaacaatgcagtacgtattggcttttttattgcagctttacgatcacaacagcatcctgaaaacaaagcgaagtattggaataatgcgaatacatttgcacgaaatatgttacaggcggctcaagcttacgatagctcaagcaacggtaaaccgtattggtcttatcatgatgcttatcaatatttggagcgttcgctaaacttaaagtttgcgggtgctttaacggatgatccgcatgtagctcctacagcggcacaaataaagtaccttaatgatagtcgaccaaaagctcagatgtgtttacttgcagaaagttttacaacaaaagggcaatatcaaaaactgggtagtattaccttccaacccgttgatgaaagtatgaataatgaagataattttgtaacagcatggaagaaactggcgataaaaactgataaatgtgtattaaatacgcaaaagtga

SEQ ID NO: 43616 - DNA, 498 bp, Acinetobacter baumannii
atgagttcttgcatgcatgaacatcatgattctttgcatggtgtacatgatcaccataatgtcgcaagtcgtttagctgaagcagaaactttatgtactgcagtcggcgcacgccttacgcctttgcgtaaagaagttcttgaactcattttaaatgcttcaggtcctatgggtgcctatgacttattagcacgtattaaaagtcaaacagatcgccctgccgcccctcctactgtttatagaactttagactttttattagaaaagggtcttattcatcgcttaacatctattaatgcttacataccatgctgtcacccacgtgaaggtcatcaggctgcattcctgatttgtaccgaatgtcacacggttaaagaagcatcttcacaaggtttaacccaacaacttgaccaacttgcagctttagatgatttcgcagcacaacacagcattatagaaatttcggggaaatgccagcagtgccgcacagctcgctaa

SEQ ID NO: 43617 - DNA, 780 bp, Acinetobacter baumannii
gtgccgcacagctcgctaaatcctgtattgattcaacttgaacaggtctctgttcatcgtgatcagcgggatatattaaaaaaagttgattttgctctgcatgaaaatgaaattgtgaccttaattggtcccaatggcgcaggtaaatcaactttaattaaagttctacttggtattttaaagccaagtagtggacgcgtcataagcaataaaaaactaaaaatggcttatgtgcctcagaaatttaatccatctcatagtcttcctttacgggtacaagatttattagatcttgaaaagtgtagccctgcccttcgtcaggaaattattcaagacaccggtattgccaaactacaacaatcaaaagttcagcaactttctggtggagagcgccaacgtgtactgctagcacgtgctttacttagaaagccagatatcctcgttcttgatgagcccatgcaaggcttagatattcaatcagaagctgagctttatgaatatgtacgtagtctgccggagcgttatggttgtgccattttaattgtttcccatgatttacagtgggtcatgcagggaactcaacgcgttgtctgtttaaacaagcatatatgctgtagcggcttaccagaaagtattcagcagcatcctgaataccaagcaatattcggtactcagcgagttttctatcaacatcatcatgatcactgtgcgcatggtgacgctgcacacccctgccctcacaatagcagacctcacattcacccggaaccggaagcttaa

SEQ ID NO: 43618 - DNA, 810 bp, Acinetobacter baumannii
atgatggaatggttacaattattgttacccgcatggattatgggaaccttattagtctttttgactgcaccacttggttgtctcatgctatggagacgtatgtctttttttgcagataccatggcacatggaaccttacttggggtagcaattgctggtgctttaagccttcccctctggcttggcgtggcaggtacagctattttattagttgctattttatgggcactacatgacaatcgtttaccgaacgatgctttgcttgccctatgctcagcaacattactatgtagtggcctcctgtttattcaacatgttccaagtttaaggccggagcttttaagttatttgtttggtgacttactgagtattgactggccagatctgcctatttttacattaattattgcagtatcactcgccattctttatcgctattgggaaccacaaattcaaattgcaattgatccggatattgcaattagtgaaggggtaaatgcgaaatggcagcgtctcatttttatgttattgctagccttatttacagtactagctttacgtgcagtaggttcacttttaatgggggcattactggttattccagcattgagcgctcgattactcgctcactcaccaaagcagatggttatttgggcctttgttttagctcaactcggcgtcagtgttggcctatggtcaagcgcagcacttaatatctcgactggcctcagtattgttttatgtatggctttaagttttgcacttatctttatggttcaaaaaatcaaaaatcaaactcaagcggcctaa

SEQ ID NO: 43619 - DNA, 627 bp, Acinetobacter baumannii
atgtctttgcaagtttggtttgcttatatgttggcctgttgggtcattagtatttctccgggagcaggggctattgcttctatgtcgagcggcttaaattatggctttagacatggctactggaatgcgatcggtttgcaaatcgccttgttaattcaaatcatgattgtagctgcgggtgtaggtgttctattcgcaacgaccccgttggcttttcaagccgttaagtggtttggggtagcctatttattgtatttagcttatttgcagtggacagcacctgtaaaagacatagaaattcaatacgaaaaaaaggataaatctgtttctgctctgctgttcaatggatttgtagtcaatatcagtaaccctaaagccatcgtatttttattggcagttttgcctcagttcttagatttaagcaaaccccaatggatacaatacctgattatggcagccactatggttacgattgatttgattgtaatggctggttatacagggctagcttcaaaagttttaagattgctacgttctcctcagcaacaaaaatatttgaaccgtggttttgctgtcatgtttagttgtgcagcattattgctaagtacggtccatcaagcagcctga

SEQ ID NO: 43620 - DNA, 921 bp, Acinetobacter baumannii
atgactgctcaatctgtcattttgccattaccatctgatcatgcccgttttattgttcttcgtttaaaagatttaacaattgctgaattaaaagaacaactcgaagctttattcgaaacacgtgaccgtctcattactcaacattcagacgcacaaattaagacagcagtcgcttttggtccagaactttggaagcaactttacagtcaatctcctgctggttttaaacaacttgaaccagaaaatggcgcattcaatatgccagtcgtaccagctgatgtgcttattcacattgccagtatgcgttctgatatctgttttgctttaagccaagcattttttgaagggattaaagataaagttgaagttctggatgagcgtgtatgcttccgttacttcgatggtcgcgatattactggctttatagatggtactgaaaaccctcaatttccagacgaccgcgcagaaaccgctctcctcccagaaagtgctggagtatttgcagatggtagtttcatatttgcgcagcgctatgcacatgacttggaaaaatggaaaaaacttaaagtcgatgcacaagaaaatgtcatgggccgtaccaagcttgaatctattgaattagatgatgacgttaaaccggaaaatgcccatgtcgctcgtactgtcgttgaagatgaggaaggcgaagaaatggaaattttacgtcacagcttaccttatggtgacggtcgaggtgatcaaggtttattcttcattgcctatactaaagacctgagcattattgatgcgatgttaaagcgcatgtttggtacaagtggggatggcatccatgatcgcttattgcacttcgtgacaccacttgacggggcatattactttgcaccaagtgaagaactattagaagaaattttagaagagtaa

SEQ ID NO: 43621 - DNA, 444 bp, Acinetobacter baumannii
atgaaaaatatttatattttaatttttataggcgctttaatagcttgtagtgataaaggcacagataaaaaccagcataattctaatcataaattagacgtggtgcagacggaaacaaacaaatcacagtctgttgtaggtgaaaatcaagagaatacggataagacggttaaaacgaaagaagctgatcaagtagctcaattctcttgttcaaatcccaatattactcaatggtatggtttcaatgaaaatattgctgagcctaaatgtgaggttgtaaagaactttcaattgatagcttataagtgtgatatttcgaagaatgcctttggtgcaagtaaagatgctattttgctagaaaatcaagataaacgaattttcgtttattcaacttctaaggattgtaatgaaatgctcgaagtaagaaatgctaatgcgccttaa

SEQ ID NO: 43622 - DNA, 1698 bp, Acinetobacter baumannii
atgatatcaggtcacccaagtaaacatcccctttatatcccttatgcaggctatacacttttagagttaccccttttgaataaagggtccgctttcactcaagaagaaagaagtaactttaacttacacgggttacttccacatattattgaaactatcgaagagcaaagccaacgctcttatcagcaatattgtgctttcaatgatgatattaataagcacatctatttacgtaatatccaagataccaacgaaactctgttctaccacttaattgaaaatcatcttgaagagatgatgccaattatttacacgccaactgtgggtgaggcatgtcaacgtttctctgatatctatcgccgtcatcgtggtgttttcatttcatatccagatcgtgatgtgattgatgatattttgcaaaacgttaataaaaataatgtcaaagtcatcgtgattacagatggtgaacgtattttaggtcttggtgaccaaggtattggtggcatgggtattccaattgggaaactttcgctgtataccgcatgtggtggtattagccctgcttacacattgccaatcacaatcgatgtagggacgaataaccctcaattattaaatgacccgatctacatgggatggcgtcaaccacgtattagtggtgatgagtattatgactttgtagatatggtgattgaagctgtaaagcgtcgttggccaaaagcactcatccaatttgaagatttcgcacaaaaaaatgcgatgccacttttagaaaaatatcgcgataaaatttgttgtttcaatgatgatattcaaggaacagcagcggtttctgttggtagtttaattgctgcaagccgtgcagcaggcaaacaattaaaagaccaaacaattgctttcttaggtgcaggttcagctggttgtggtattgcagagcaaatcgttgcacaaatggtttcagaaggactaaccgatgctgaagcacgtgctcgtgtttacatggtggatcgttttggtttgatcactgaaaatcagccaaatctattagacttccaacgtaagttagctcaaaaagctgaagtagtagaccaatggggcaatattgaagaagtgatttcactgcttgatgttgttaaaaatgccaagcctacagtattaatcggtgtttctggtcagccgggcctattcaccgaagaaattattaaaacaatggctgccaattgtgaacgaccaattgtgatgccgttatctaacccgacttcgcgtgtagaagcagtaccggcggatattgtggaatggactgaaggtaaagcattaattgcaacgggtagcccatttgcacctgtaaatcatcacggcaagctttataatatttctcagtgcaacaactcatacatcttccctggtattggtttaggtgtagtagcatcaggcgctaaacgcgttacagaaaacatgctcatggcatcaagtagtgctttagcagactgttcaccgttgctgaaagatccacaagctgatttattgccacctttgggcgaaattcaacaagtgtctaaagtgattgcatttgaagtggcaaaagctgcaatggcagatggtgtggctgtaactattagtgatgatttgcttaagcagaagattgatcaatcgttctggaaaccagaataccgtaaatataagcgtattcctttctaa

SEQ ID NO: 43623 - DNA, 1791 bp, Acinetobacter baumannii
atgaatacggcaatacaagcagctctcgaccatgcagtgcaaacccttcagcaagaaggcgtgcttccttcggattggaataattcaagcaatttaacgcgcaccaaagaccgaagccatggcgactttgcttctaatattgccatgatcggctctaaagccgctggtatgaaaccacgcgatttagctgagaaaattctcgcagcgctaccagaagttgcagacatcagcaaagctgaaatcgcaggtcctggttttatcaatttctttttaaatgcagatcaacgttttgcaattcttgaccagattcaggctcaaaaagaaagctttggtcgtagccaatcaaatgcagctaaaaagattcaagttgaattcgtttctgcaaacccgacgtctagcctacacgtaggtcatggccgcggggctgcttatggtatgactgttgcaaacttgcttgaagcgacaggtgctaaagttgatcgcgaatattatgtaaatgatgctggccgtcaaatggatattttggcgacttctacttatttacgttatttggaattacttggacaaaaccttgtattccctaaaaatgcatatcaaggcgattacgttaaagaaatcgcacaaggcatcattgataaagatggcgatgcttacgttcgtgaagttgcgaatgtttataaagatgtaccagaagacgtgcaatatgctgaagagctagatagcgaaggcaacaaagtcgtattatctggcgacaaagaaaaacacattgacggtcttattgccaactcacaacaattattaggtgaaggctaccgcgtattccatcaagccgcactccatgccattttagatgatattaaagatgaccttgctgacttcggcgtaacctttaatcaatggtttagtgaagcatctcttagcgcaaaaattgacgaagcgttagaaacacttgatcaacgcggcttcttatatgaaaaagatggcaacatctggtttaaatcgactgaatttggtgatgaaaaagaccgtgttgtgaagcgccgtaatggtcaaacaacttactttgcatctgacattgcatatcacttaaataaactacaacgtggttatactgaccttgttgatatttggggttctgaccaccacggttatatctctcgcgtaaaagctgcgattgatgcaatgggttatgactcgaaaaaattaactgttcttttagttcagttcgtaagcttatggcgcggtggtgagatggttcaaatgtcatctcgttcaggtcagttcgtgactttacgtgacttgcgtaaagaagtcggcaatgacgcagctcgtttctactacgtgatgcgtaaaagtgaacaacacattgactttgatcttgaccttgctgtttcacaaagtaaagacaatgcggtgtattatattcaatacgctcatgcacgtatttgccgtatgctagaaaaagcagcgagcactggcttacaatttgaagtaagtactgctcgttcacatgctgcacgtttatcacttgatgcagaaactgaaattcttgctaaactggctgcatatccagacgttgtgttacgtgctgctaatgcatatgaaccacaccaagtaggtaactacttaaaagaattagctgcgctattccacggttggtacaatgaacacaaagttttaagtgatgatgctgaacttacacaagcacgcttattactttcaatcaatgtacagcaagtattgcgcaatggcttagaattactcggtgtttctgcacctgaagccatgtaa

SEQ ID NO: 43624 - DNA, 627 bp, Acinetobacter baumannii
gtgtttggcaaaacgcaacgcggtgtatctgaaagacctaacaagcctaaaaagcctttaattcctaaatggttagggacacttgtcgctattttagcggtcttatgtatcgcagtaatgctcatgctttggaaaccgtggcaacctgtttcctcaaaaaaccagattacttctgagcactataaagaagaagaaaccaataaagattaccgcttttatgatctattgcctcaacagcaggtcactcctattccggaacaggcaattccagaaagtaaaaatcagggtactgccatgattgtagaagcacctagtacagctcaacctgccgcttctgaacctgcaagtgtaagcactgacgacactactgactcaacagctgctatacctcaacaaccaaattatattttacaagttcgaagctatactgaccccgatcaagcagatgctcgacgtgcagaaatcattttaaatggcttatcggctgatgtaattaaaagctctgagaatggaaaaacttggtatcgtgttatttctggtccatatgacactcaagaagctgctctcgctgctcaacaaacattgcagcatagcggtattgactctatcgtgattaaacgcagataa

SEQ ID NO: 43625 - DNA, 669 bp, Acinetobacter baumannii
atgattagtgtacaccacctggaatgttcgcgatcgtttcggatcttatgggctttagaagagttaggcttggattatgatattcatttttatcaacgtcttccgaactattcagcaccagaaacattgaaatgtattcatccgcttggcaaggcacctattttgacagatgatgagcaagttatcgcagaatcggctgttattttagagtatttgcagcagcgatatgatcaaaaacagcagtttaaacctaagcaagctcaggatttacagcagtatatttactggatgcactatgccgaaggctcacttatgccgttattagtgatgactttggtcatgaacaacgtcaataaacatgtaccttggctaattcagcctgtagcaaagaaaattacagaaggggttaaagcaaattttgttcgtccacgtatgaaagatcatattagttttttagaaaattatttggctgagcatgaatattttgcaggagacttttcatttgcagatattcaaatgagttttccactagaggctctacagtcacgtcttcaaggtaaatatccgcatattcaagcattcttacatcggattcagcaaagaccagcttttcaaaaagcgagacagaaaggtttagggtcaaacgaaagaaattgtgctgatatataa

SEQ ID NO: 43626 - DNA, 408 bp, Acinetobacter baumannii
atgacagcagtaattgcgagcagtaaagcaaagcctcttgcagaacaatggaaaggtgaaattaccagcggccgtcatcaatacttttgtgatgagcctgaaaagctagaagggcatgatcaagggcctgcaccttatgatttgcttaccggaagtctggcagcatgtacacttattactttaagaatgtatgcaaaacataagggttatgattttggtgagtactcggttgaaattgattttcataccaatcgagagcatgaagaacatatcgagcgtcgtattgtttttaaagaacttccaaacgaagaacttcagcaaaaaatcttaaccatatgcagtaaaaccccagtcactaaaactttgttacgtagtttagacattcatactgtgcttgttacagcataa

SEQ ID NO: 43627 - DNA, 948 bp, Acinetobacter baumannii
atgagcaataataacgattacgatatttcggattcaaaggattgcgaaaaatttgccaatcaatttattcaggaatttccaattcgctctgccgaaattggacaggggacggtgattaagcgggctttacctagccgacaaaaacgaatgattggggcatggtgctttttagatcatgcaggaccagtaacgtttcctgccggcaatggtttagatgtaggacctcatccacatattggtttgcaaaccttcacttggatgattgaagggaccatgatgcataccgatagtttagggtcaaagcaattaattcgccctaaacaggtaaatttgatgacagcaggacatggtatttctcataccgaggttgcacctgatactgaaactcaaatgcatgctgcgcagctctggatcgccttaccggaccataagcgcaacatggatccgaaatttgaacattatcccgatcttcctgttgttgaaaaagacggtctggaatttactgtactagtgggtgaatatttagagacgacttctccagttgtggttcatacaccgttagtaggggttgatctcattgctacccaggatactaagacacgtattccactaaatcctgaatttgaatatggttttatggcattagatggcgtagctcatgtgaatggccatgaacttactgctgacaatatggttgtattagatacaggtttgaacgaaattgagattgaagtaaagaaagggaaccgtgtgctattaatcggtggtgaaccttttgaaactccgatcttattatggtggaatttcgttgcacgtacgatggacgatttaaaagaagcacgtgagcaatgggttaatcatgacgtgcgttttggtgaaattccagattatgtgggtgcccgcttagaagcaccagttcttccagatcaaatgagagcatcaaaatga

SEQ ID NO: 43628 - DNA, 306 bp, Acinetobacter baumannii
atgaaacagcatcaatatcacattacggtacaacatttaaaagatgccaaaggcgaagtttctacctatacggaacggctcgagttctatacaggtaatcatgacgatattttcgagattgttgaaaagttaaagaacgcagaattttttgatgatcaaaccacaaagtcttttgcagtcggtctaaagttatttagtgaagtcatgttagagaatcgagaccatccattgtttcaagaattcttgccacagtttggacaatttatgaaaaatttaaaacaacaagttaagacccaatcaccttaa

SEQ ID NO: 43629 - DNA, 528 bp, Acinetobacter baumannii
atgagacaacaatcagaacatcattatgctgaacataatgaccatcatcacggccatcatcgttcggggcgtcgtgggagactttttgaagctggacgtatgaaacttttagtccttcatcttattcagcaaagtcctaagcatggttatgaaattattaaagaaataagtgatttggtaggcgatggctatacgccaagtgcaggaacaatctatccgactttaaccagcctggaagaaatgaacctcattaacttgctagatgtagagcgtaaacaatatcaaattacggaatttggagaagcttatttaaatgaacaccaagacaagctaagtgggttgttagagaaattgcgtttgagacgtgaaattcacagtaatgatcaattaatcgaaattcaccgtgccatggaaaacttaaagacggctttacgtttgaaattgaataccactgacttgaagcaagagcagatctatcaaattgctgaaaaaattgatcaggctgctgttgcgattgggcgtctataa

SEQ ID NO: 43630 - DNA, 789 bp, Acinetobacter baumannii
atgtctgatttcattcagttagaatatctacaagaaaaattacagcaacttttagcggaatcattatttgcaatctatctttatggttcagctgttgatggtggcttagggccagaaagtgaccttgatgttctggtcgtggttactcaaccattaacatctgctttacgcgagcagcttgcacaagaattactaaaaatttcacagcctgttggggaattacaaagaccattagaagttactattttattaaaagatgagattcagtctggaaattatcctttaagttatgaaatgcagtttggtgaatggctacgtgaagaacttaaagaaggtggaacattaagttcgcaggaagacccagatattagtatattgcttagaaaagcgagatttcatcatacagttttatttggtccagctttggaccaatgggcacctgaaatttctgatcaagaactatggcaagcaatgtctgatacttatcccgaaattgtagctcattgggatgaggatgcagatgaaagaaaccagattttagctttatgccggatctattttagtttagtcatgaaggatattgcttcaaaagacaatgcagctcgatgggttatgcctcagcttcctcctgagcagaaattcgtattgcagcggcttatacaggaatatagaggggaaatcggcaagcaaaattggcaagaggaacattatgctttgcagcctattgttaattttctgaattcaaaaattgaagagcagtttgagcagaaaagaaatttgatcacataa

SEQ ID NO: 43631 - DNA, 1569 bp, Acinetobacter baumannii
atgactaccaatactcaaattactgaagatcgtatcctgatcctggatttcggctctcaatatagtcagctcattgcacgtcgtgtacgtgaagctggtgtttactctgaaatgtatgcctttgatatgtctgaagaagacatccgtgcttttaagccaaacggtatcattttatcaggtggacctgagagtgtgcatgaagagggcagccctcgcgcaccgcaagtggtgtttgaattaggcgttccagtattgggtatttgctatggtttacaaaccatgtctgaacagttaggcggtaaagttgagccgggtactgtacatgagtttggttatgccgaagttgatatcgttaaacgtgaccaactcattggcaacttacaagaccgcgaaaaccaactacacgtttggatgagccacggcgacaaagtgagccagattccagaaggttttacgattactgcaagcacaccaagctgtccagttgctgctgtaagtgatgaaacacgccgtttttacggtgttcagttccacccagaagtaacacacacggcaaaaggtgaagagctactttctaatttcgttcacaaaatttgtggatgtggtggcctttggacacctgaacacatcatcgatttgcgtgtagagcagttacgtgagcaaattggtaacgagaaagtacttttaggcctgtctggtggtgttgactcatctgttgttgctgcgcttttacacaaagcgattggtgaccaattaacatgtgtatttgttgataatggcttgcttcgtttaaacgaaggtgaccaagtgatgcaaatgtttgctgaaaacatgggtattcgtgttattcgtgcggatgcagaagcgcgcttcttaaatgctctagctggcgttaccgatcctgaagcgaagcgtaaaattattggtcgtgagttcattgaagtatttgctgaagaagcacgtaaacttgatggcgtgaaattcttggcgcaaggtacaatttacccagacgtaattgaatctgctgcaagcaaacaaggtaaagcacacgttattaaatctcaccacaatgtgggtggtttaccagacgatttagcatttgaattggttgagcctttacgtgacttgtttaaagatgaagtacgtaaattaggtactacacttggcttgccacatagcatgatctaccgtcatccattcccgggcccaggtttaggcgttcgtattttgggtgaagtgaaaaaagaatatgcagatattcttcgtcttgctgatgatatctttatgcaagagcttcgtgacagcggctggtatgacaaaacagctcaagcatttgctgtattccaacctgttaagtcagttggtgtagtgggtgatggccgtcgttatgcatgggtgattgcgcttcgtgcagttgaaacagttgactttatgacagctcgttttgcacatttaccatacgaattggttgataaaatctcaacacgtattatgaacgaaattaaagatgtatcacgtgtggtatacgatgtgtcatctaaaccaccagcaacgattgagtgggaataa

SEQ ID NO: 43632 - DNA, 1230 bp, Acinetobacter baumannii
atgcttcaaactatgattgcagatttccagcaacatttttggttgtatgtctctattcctttcatgagtggtttaattggctatgtcactaaagtgattgccattcaaatgatgttttcaccacttgaatttaaaggtattaaaccgttttttggctggcaaggtattgtgcctcgtaaagccgaaaaaatggcaacgactgctgtagagcttatgacggctaagctcattaagcccgaagaaatttttgctcgccttgacccaaagcgtattgctaaagaaattgaaaaaccattaatggcagcagcagaagatattacccgtgaggttgctcaagaatatcaaccaggcttatgggaaggcatgcctgagtttgcccgccaaagactgatccgcagagtgcaatcaaaagccccggaaattgtcgagcacatcatgagtgaagtgcaacgtgacgtaaatcgatattttgatattaaacatttagtcattagtaatttacttaaagacaaacgcctactgaacaatatttttaaacgtgtaggcaaacaagagtttaagtttttcagtaacgttggttttgtatttggttttggtattggtgtaatccagatgctctgctggattgtcacacaaggaaaatatccttggatgctacctctgtttggcggatttgtaggtttttttagtgactggattgccctacaaatgatgtttagacccctctatccgaaaaaaatattgggctatacatggcaaggtctatttattaaacgtcaaaatgaagtggcagctgactatgcagctttaatttccaaacaacttttgacttcacgccatatgatggaagagttgttttcaggtacacactctgcacgtgttattgagctggttaaccgtcatgtcaaacaggaaattgacatgcaagcaggtgtaatccgcccactcgttgtttatgcaattggtggagaaaaataccagaatatgaaaactcaggttgcggaacgtatcatgcagcaacttccagagaccatgaaatatgttgagtcttatgcagaagacgccatgaatattcgcaataccctgattgagcgtatgcagaaattaacgccttcggaatttgaaggtatgctacgtccagcctttaaagaagatgagtgggcactcattgcagtaggcgcagtacttggttttgttgttggtgagctacaaatccagtttatgctttaa

SEQ ID NO: 43633 - DNA, 438 bp, Acinetobacter baumannii
atgtttaatccaaatgtggtggtcaaaaatatcgtgacgcaaccaggcgcagacagttttattagccttgttgctcgtcttcttatcgcttatatctttcttgctgctggttgggggaaaattaccggttatgcagcaactgcaggatatatggaagcaatgggtgttccaggtggacttctaccattagttattctggttgagttcggtggtggtttagcgttgttatttggtttccaagcacgtttcgcagcttttggtcttgggatctttagcatcttaactgcgttcttatttcaccaaggtggggctgatgcagcagcacaatataacaatggcatccactttatgaaaaatcttgcaatggcaggtggtttattcttcttgatgcttcacggtgctggacgtattagcctcgaccatgcaattgaaaaataa

SEQ ID NO: 43634 - DNA, 642 bp, Acinetobacter baumannii
atggaacttcttgattttattctacacgttgatcaacatctcgccgaatttatcacaaattacgggacgtggatttatggcattttatttttaattatttttgtcgaaaccggtttagtggttatgccgttcttaccgggtgacagcttactgttcgcagcaggtgctttagcggcttctacaggcacaatggacccttggttactgggcattctactcttcattgccgcggttttaggcgatacagtgaactatcatattgggcgttttatcggtccacgtgtatttgagatgaattcacgctttattaataagcaacatttaattaagactcatgaattcttcgcccgtcatggtggcaagactattatttttgcacgtttcattccatttgctcgtacctttgcacctttcgttgctggcgctggcagcatgaattataagtttttcttaacttataacgtaattggcgcattctgttgggtagcttcttttgtcactttaggctatctcttcggtggacatccacttgtaaaagataactttacccaccttatttttggcatcattattattagtattttaccgggtgtgatcggcttcatacgtcaaaagctaaaaaatcgaaaagctaacgtttaa

SEQ ID NO: 43635 - DNA, 591 bp, Acinetobacter baumannii
atgattgagagctggttttttgtattagcaatgttggctgttttacttattccgggcccgacaaacgcattacttgcaaccgccgctcactcacaaggtttatctaaaacattctggcttattccaatggaatggttgggctacgcttatggcattagtttttgggcagtgttcattcatttggcagatccggtttggcctgcactactgcttattttgcatatcactagcgtattatatgtattctggatggcattccgtttatggaaaaccacgcatttacaacaatttagtcaaaatcatcgtaatattcgcccacgtcaattattcttctcaactttaaaaaatcctaagtctttactttttgccgcaggtattttccccgctgaaacatggaattcgcctgagaattttctcatggttctggctgcttttactttgattcttattccagcagcaagtttctggatgtttttcggacgtgctttattgacgggatcaatgaaaaaaataaaggccgatcatctatataaaggatcggccatgttacttattttatgtatgcttccggtggtattccgttttttctaa

SEQ ID NO: 43636 - DNA, 387 bp, Acinetobacter baumannii
atgaaaggcttatatattgtgcctttggcagcggccactttactattgggcgcttgtgctacaacggtaaaaccgacttatgtgtctccgactcagtatcaatctttgagttgccagcaactacaaagtgaatataaccgtattcaacaatatatcgacaatggtgtacagacaccaaaaagtacaggtatgggtgttggactcgggcttggcggtggctggggacgaggcggttggggattcggcccatccatctctgtcaatatgggacaatcttcttcaaccaaaaacaccgaactttcacgtgtattaggtcaacaagaagccattgttcaggctgctcagttcaagaattgtccaattattgttcggaaaaagacgaattaa

SEQ ID NO: 43637 - DNA, 843 bp, Acinetobacter baumannii
atgctaactcgtgtggtgtttaaccaaaaaggcggtgtagggaaatcaagtattactgtaaatttggctgccattagtgccaaacatggcttaaggaccttggttatcgatcttgatcctcaagccaactcaagccaataccttttaggtgaagaagcaacatacgctgctgataaagcagttttagaaccaaatattgaaaacttctttgaagatgtgttgggaaataatcaacagaaaggtttaattgggaacgcactgggctcaattctaaaagctccacgcaacaaagatctcgacagttttgtacactctacatcctttgcaaaattagatgtgcttccggctagccctacgctcggtgctcttgaacatgcacttgaaagcaaacataaaatttataaattgcgtgactctattcaaagcttggttgggcgctatgaccgcatttatattgacacacctccagcctttaactttttcacattgtctgcattaattgcagcagataaggtcctgattcctttcgactgtgacgtcttttcaaagcgtgctttacaaacattgattgaaaatgttctcgaaacgcaagatgatcataatgatcgcttggaaattgaaggaattgtggtgaatcagttccagtcccaagcaaagctacctcgggaagtggttcagcagttaaaagatgaagggttaccagtgctcaatagcatgttaccgccttcgattttgatgaaagaatcacatcagaaaaatttacctttggctcacttagcgccagaacacaaattgactcagtcttatgaggcattgttcagcgaaattgaaccaaaacgataa

SEQ ID NO: 43638 - DNA, 393 bp, Acinetobacter baumannii
atggatgcacatttactcactaaaattatccatatgactgcggtagcagccgcacttatggtttttgtattacgcgcttctacactatttattggtgtacaatgtgaacaacctaacccagcagggcgtaaagttttagttgctttacagcatttgtcatttaccgtggttttcattaccggagcaattttactggtgatgaagaactttcaggtacagccatggttctacgctaaaattatcttatttttagtgctcttatcatctttaatgaaagcctttaaaaaggatgacactattttactagctcagcgccgtgcgggtttggtcattagtgcaatcgcatttattgccattattattttggtaatagtgaaacctgtttttgcttaa

SEQ ID NO: 43639 - DNA, 309 bp, Acinetobacter baumannii
atgagccttgaacaacagttgattgaacggttacagacccttgcacctagccatttagaagtcattaatgagtctgctggccatggtggttattttcctggtaaagaatcccactttaaagtgattgtggtgagtgaagaatttaacggcttgcgtttggttcagcgtcatcaaaaagtttatgccttggcttctgatttaatgaatccaggacaaattcatgctttagcaatccacgcttatttaccaagtgagtggcaaggtcaagcgccagcaagtccagaatgtgcacatgcacctaaaaactaa

SEQ ID NO: 43640 - DNA, 2007 bp, Acinetobacter baumannii
atgtttgttagaaaaagaaactcagcgctcttcacggtcatactcctcggttcaatcctgagtggatgtcaggtcgtcaatgttaagcaacaagctctcaacgttactattgcaaatgagcgtaatagtattcttacccaagataaactaagtgaagcaagtcttaatgttttgtccatgtcagggcaagaagctaaggcctgtacagactcccctgacacttgtgttaatcaacttaaaaatctgccccaaattttagatgaacagttgttatcggctgcaagtgaaatgtatctggcgaaagcaatggctttgtcagattcttctgaatgtaaaattagtcgtttcactaaacataagccaactgaagaacaaaaagttattcaaaataaatatgatgaatgcttagatcaacagttaagtctactcgataagagtatccgttatagctatgcttatctgttttctacaaaacgtcagccaactgatcgtatttttgataatagacaagttcagatacgcgacttctataatcaagcgattgccaaaatggtcagtgtgtatgatttaaggtatccacaaaaaaatgtggtagagccacaaatccatattggtaagagtgtatattcaattgattttgagtttcatagacaattatctggccaaaaattagaaaaattaatttcaagttataacttaaatttctcaggtttaagaacaatcaaccgtcgtgatggtttcggttccgaatttgtagctgtcttcccaagttcaggcaaagaagacattaatgaatacattttagatccacttaattacagctataaaaatggtgtaaatccaaatattcaccatgcacgttatttagcggcaactattgttgcagagcctaaacatgctaaaaccattcaagaaattattaatgacccagaatttgtgattcgggtttatgatccttatcgaaccgataatattaatgtcgctggtaagcaatatcctttagctgcaaacttctcagctccttatggtctgtggttagctgaaaacaacctaggtgtagcggcttatttaagcttgattgatcgtgatcagcacttaaccatgccgcatttatatatgcttgaaccttataatccaaacaaaaaaattattgtgttggtccatggtttagcaagtagccccgaggcatggattgcgctcaccaacgatgtcatgggtgatactgttttaagagataactatcaagtttggcaagttttctactcgaccaatatgccaattctggaaagccggttccagatttatgcccttttgaaacaagcattcggttcgttaaacccaagtgatcctgccgcgcatgatgcggtgcttgttggtcatagtatgggaggaattattagccgtttacttgtaagtgatgctgatattactaaacctgccttggagatgatgacgatccgtcagcaaaaccgttttaagaaacatcctatggtgactgaacggctgcaaatgcattcaattagtaactttgatcgtgcaattttcttggcatcgccacaccgaggtacagattatgccgatcgttggttcacattagctgcgcgtaaaattatccgcttaccgggtgcttttttatcagctgttgcaacttcgctcaccacagaaaatttagatattaaagatttcttgaataatattgataatggcctgattcaaaatggaccaagcgacttaagccatcaatctaaatttatggaactcactgagaatattaatccccatcaagggttaatcttccactcaattatgggcaacattaccaaaagtgatgatccaaatgtgattaccgatggtattgttccttataaaagtgctcacttagaaggtgctaaatctgagaaagttctaccgggtggacactctattcagttaacaccacaagccgtattagaactacgtcgtattttacgagagcatttagttgaacatggtttgtataaaccataa

SEQ ID NO: 43641 - DNA, 942 bp, Acinetobacter baumannii
atgaattttaagcctttggcatatatccttcttgcgacctcaagtttaacagcgtgtaccatggcacctgtaaaagaacaaaaaattgagccgtttgtttttaaggaaccagagcttacacctccattttatgcattaaacccatttaattatgatgctccgcctgcatttgaagttgctttaaaagaagctgctgcacagcctgtaaccaaaatggttgtaactcgtcaggacgatccaaccaaaacacttacattagatacgaataaattgatcgtacctacagtcaacaactcacaacgttcaatgaagtacgcagttttagcgggcgataatgaaattgatgtaactgaaattgatgacttcttacaacttgttgaaggtaaagcgcgtcactatccgcctcgttttactgaccgtcaagaacgtaaaggctttgaaagcaaacttaaggaagtcactcagcgcttagatactttagctgctaatccagatgcttcatttgatattcttattcgtgcttttaaagcaagtgtacttgcccgtaaccttgatttaggtactgctcataccactaagtctttagaatatgcacaaagacttttaaaaattaatccagatgatgctgaagcgaatttctggtttggttttggcttatctgaaggtggcggtcaacgtgaggctattccgtatttagataaagctattaaaggtaatgttcaggaagcatatttagccgctgcaaataactatattgcaatggaacaaaagaaaaatgcgattcagactctaaaaaattacaaggttaaataccctgatgaagctgaagtagcagaccgtttaattcaagaaattgaaaaacaaggtcgctggaatgtatggcaagttttaacaaaccctgctatgtcttctgctaccccaagcgcagctacaaaaaagtaa

SEQ ID NO: 43642 - DNA, 816 bp, Acinetobacter baumannii
atgcttaaacagcttaaagaagatatacaggctgtattcgcgcgagatcctgctgcacgaaatacactcgaagtacttaccacttacccgggtatacacgctttacttttgcatagacttgcacatgaattgtggaaaaaagattgcaaaggtaccgcccgttttgtttcgtcatttagtcgttttgcaacgggtatagaaattcaccctggagctaaaatcggcaaacgcttctttatcgatcatggcatgggcgttgtaattggtgaaactgctgaaattggtgatgatgtaacgctataccacggtgttaccttaggtggtacgacttggaataaaggtaagcgtcacccaactttagaagatggcgtggttgtcggtgctggtgcgaaaatcttaggtccatttacggtaggtaaaggcgccaaagttggttcaaatgcggtagtcacaaaagcagttcctgctggtgtaacagctgttggtaaccctgcacgttatatctataaagatgccgacaaaactaaagataaagatgaagaacgtcgccgtgattatgcacaaagtattggttttgctccgtatgcgactactgctgatcaatctgacccaattttagaaggaatgcgagttttacttgaccgtattcagcacaatgaaacgcgtatgaataatttgtgccagcgtttgtccgaacttgacccaactttcaaaaaagaaagtcaagatgaacagccttttagtgatgaagagctaaaaattcttgaagaagttcgtcgtgaatgcggtgcgcagaataagacatcaaaaacgtaa

SEQ ID NO: 43643 - DNA, 840 bp, Acinetobacter baumannii
atgagtttgtttgacgacaccgccgtgtcaaaacaattagcacaagtgcgtattgtcatggtcaataccactttaccggctaatattggcagtgctttacgcgcaatgaaaacgatgggcttgagtaagttggttctggtttcaccaaaaacctacccacatccagatattcaggcgcttgctgctggtgcacaagatttattagaacaggttgaaattgttgaaacactcgaagaagcaattaaagattgccatttagttttcggaacaagtgcaagaagccgtactattccatggcctttgttagatgttcgccctgcttccaaagaagcaatcaaggcggctgcacaaggacaacaaattgcgatcgtttttggacgtgaagaccgcggtttaaccaatgaagaactggctttggcaaactatcaccttactattcctgtaaactcggactatggtgtacttaacgttgctcaagcgattcaagtggtttgttatgaacttcgtatgtcggtattagagcaaaaagaagttgcttctgatgctgggcaaatgccgcttgctcaaggtcaaagcatgcaatgggatgagccgttagtgactcagcagcaaatggaagagttctaccctcatttggaaaaaatgctcaccgaaattgaatttttagatccagaaaatccacgtttactacctttacgcttgcgtcgtttatttggtcgtatacaattagatcgtatggaatatcatttacttcgcggtatttttagtcgagtccaagccctcacaagcggcaaatggaaaaaagcatcatcggacaaggaggatcaatccaatgcttaa

SEQ ID NO: 43644 - DNA, 3564 bp, Acinetobacter baumannii
atgcagtttgttcatctcggtatttacacagaattttcgattacagagtcgattgttcgcatacccgacttggtcaagactgcggtaaaggatgaaatgcctgcgctggcacttaccgacttatctaaccttcatgctgctgtaaagttttataactcttgccttaagaaaggcattaagccaattttgggtagtacaatccgtcttaatgatgcccaacatcgtgcaactttgcttgcaatgagtgatattggatggaaaggactgaccgaaattgtttcgcgtggctttattgaaggtcaacaactcagtatcccttgtgtacaaaaagaatgggtcctagagcagcatcaagatattattgttttacttggccaacatagtgatgttgggcaaatgctttgctcatctaacccgcaaaaagcagaacctttacttgaagagtggatcgaaaagtttggtaatcgtgtttatctagccttaacacgtactgatcgtcctggcgaagaagactttattcaagaagctgccaaacttgcagctaaatataatattggtgttgttgcacacaacgatgtgcactttattgaaaaagaagatttcgaagcgcacgaagctcgtgtatgtattgcagatggttacgttttagcagatgatcgacgtccgcgcttatatagtccagagcagtatttcaaaacttctgatgaaatgattgagctgttctcagatattcctagtgctattgaaaacacctatcaaatcgctaaacgctgtaatgtcactttaaagctcggcacttactttttacctgagtatccaattcctgatggttttaccatcgatacctattttgagcacttatcaaaagaaggtttggaagaacgcttaaattacctttaccctgttgaaaagcgtggtgaagactggcctgaaattcgtaaaccatatgatgaacgaatagattatgaagtcggaatcatcctgaaaatgggattccctggttacttcctgattgtcatggacttcattcaatgggcgaaaaacaatggtgtccctgttggaccgggccgtggttcaggtgcaggttcattagtagcttatagcttaaaaattacagatcttgatccacttcgttatgacctactcttcgaacgtttcttaaacccggaacgtgtatcgatgcccgactttgacgtcgatttctgtatcgcaggtcgtgaccgtgtgatcgattatgtatcacgtacttatggccgtgaagcggtgtctcagattgcaacgttcggtacgatggctgcgaaaggtgcgattcgtgacgttgcccgcgttttagggaagtcttatggtctagctgaccgtatttcaaaaatggttccaactaagccacttggtgtggatttggcaactgcgattgaaatggaacctcagcttaaagatattgttaccaacccttccaacccagataatgatgatgccagcgaaatttgggaaatggcattaaagttagaaggtattaccagaaatacaggtaaacatgccggtggtgttgttattgcacccggtaaaattaccgacttctctgctgtgctttgtgacgcagacggtactaaccgcgtagcacagtatgataaagatgatgtagaagctgcaggtctcgtaaaattcgacttcttgggcttacgtaacttaaccgttattgaggatgctatccaaaatattaataaaaaccgcgatagcaatgaccctttaaacatttcgcacgtccctcttgacgaccctaaagcttattctgtctttgctgatgcaaatacaaccgcggtattccagtttgaatccgtcggtatgaaacgaatgcttaaagaagcgcgtccaagtaaattcgaagaaattattgcgttcgtatctttatatcgtccgggtccgatggatctgatcccagactttattcaccgtatgcatggtggagaatttgagtatcttcatccattgcttgaaggtgtattagaaccaacctacgggattatggtttaccaagaacaggtaatgcaaactgcacagatttgtgcaggttacacactcggtggcgctgacttgctccgccgtgcaatgggtaaaaagaaacctgaagaaatggtgaaacagcgccaaatcttccttgagggtgctggacaaaaaggtattgatgaaagcacagctaaccatatcttcgactatatggaaaagttcgcaggctatggttttaacaaatcgcacgccgcagcctatgcgcttgttgcataccatacagcatggttaaaagcccactatcctgccgaatttatggcagcagtaatgtcatcggaaatgcagaacactgacagtgtcgtatttttgattgatgactgccgaaataacggtctcgaggtcttaccaccatcagtcaatatgtcgacttatcatttccatgcgagcgatgataaaaccattgtctatggtttaggggcaattaaaggtgttggtgaacaggcaatgcagtctgttattgactcacgtcgccaacaaggaccttatactgacctattcgatttctgccatcgtattgatttgaaaaaaatcaataaacgaaccttagaagcacttatccgtgctggtgcgcttgattgtttaggtattgaacgttcaagtttaatggctcaattgccagaagctgtgcaagctgccgaacaggcacgtagtaaccgtgaaagcggtattatggacttatttggtgaagttgaagaagttcaacgtaaaccagctaaacctgttaagccatggagtgatgaagttcgtctcaaaggcgaaaaagatacacttggactatatttaacaggtcacccaattgatgtttatcgtcaagaactcaaagcgtttattcctgcaaaacttaatgaaattaccgcaactcgtcgcggtgtaacgactgtttatgcaggacttgtccttgatgtagcgaatttcccaaaccgtgttgttattgtacttgacgacggaacagcgcgtattgaagtcagctgtaaccacgaacgtttccaacgctttaaagatattattcaagttgagcgcgtagtcgtctttgaaggcgagatctatgagcgtgaaggttttgatcgtccaatgggacgcttgaacaaagcgtttagcttaaatgaaatcagacaaaaacgtgccaatagtattcaaatcaaattaacccatgatctattgcaaccaagtttggcaaaagatctacaaaatatattattgccgtattgtaatgtcgatatgcatcagcatattgcaatacagttacagattgaccaaccatatgctcaggctgagcttcagcttggcccacaatggaaagtcgctcctttagatgaacttcttgccaaactaagagattactttggtaaggataatattcatattgaatatcaggtaaaatctaaggcagctaaagcagcagaacctgttcgtccacaacctgttgcctcacctcctgtggacatgactattgatgatgcattggattcataccaaagcgaagtttctcaatattcgtaa

SEQ ID NO: 43645 - DNA, 1068 bp, Acinetobacter baumannii
atgttgactaaaactgttaaatctttcggtttagcgatgggcttattagcctgctctctcccactttacgcaaaaaacaatgttgttgttgtcgctactggcggtaccattgctggtgctggcgcaagctcagcaaatagtgcaacttatacggcggcaaaagttccagttgatgctttaatcaatgcagttcctcaaattcaagatttggcgaatgtatctggtatccaagcattacaagtagcttcggaaagtattactgacaaggaattattacaaattgctcgtcaagtaaatgaacttgttaaaaagccaactgtaaatggcgttgtgattacacatggtacagatactttagaagaaacagcatttttcttaaatcttgttgttcatactgataaaccaatcgtacttgttggctcaatgcgcccatcaactgctctttcagcagatggtccacttaacctttatagtgctgttgcattggccgcttctgatgatgcaaaaaataaaggcgttatggttctcatgaacgactctatttttgctgctcgtgatgtaactaaaggcattaacattcatacaaatgcttttgtaagccaatggggtgctttgggtacacttgttgaaggtaaaccatattggtttagacaatctgttaaacgtcataccaatgcttcagaatttaatattgaaaatattaaaggtgatgctcttccgacagtacaaatcgtttatggttctgattctatgcttcctgatgcttatgaagcatatgcaaaagctggcgctaaagcgattattcatgcaggtacaggtaatggttctgtagcgaaatatatcgttccaacattacaaaaccttcatgacaaaaacggtattcaaattatccgctcatcacgcgttccacaaggttttgtgttacgtgatgcagaacaacctgactctaaatatggttgggtagcagctcatgatttgaatcctcaaaaagcgcgtcttcttgcagcgttggcacttaccaaaaccaacgatgcgaaagaaattcaacgcatgttctggcagtactaa

SEQ ID NO: 43646 - DNA, 1308 bp, Acinetobacter baumannii
atgaagcaaaagaaattgctcaagtatattgtggttgctattttactaggagtattgacgggttggatctgtcatcacttctttaatgaaggcgagcaactgaagcaaatcgcttcttatttcaacatcgtcacagatatctttttacgtctcatcaaaatgattattgccccattggtatttgctacaattgtgtgtggcattgtgtcaatgggcaaatcaacttcaattggtagcattacactcaagtcaatgacttggtttattaccgcttcgtttgtctcacttgccatcggtatgggtttagcaaactttttccaacctggcgcggcgctagacctagcattaccaacagctcaacaacttagtagttcttctctcccaacaactactggttttaccttgcaatcattcttgagtcacgtgttcccacgcagcattgcagaagcaatggcgaacaatgatattttacaagtccttgttttctctattttctttggttcagctcttgcttttgtaaatcagggcaaagaaaaagactcagttatcattcgcttaactgatgaactcagtaaaatcatgttccgcattactgactacgtaatgatgttcgcaccttttgcagtatttgctgcaatcgcttcagcaattacagtacaaggcttaggcttaattgttgattatggcattttaatcgcagaattctacttcggtctgctattactttggatcattttgttctctgttggcgcaatcgtacttaaaaaagatatcttccgtttaggtaaattgattcgtgaacctgtaacacttgcttttgctacagcttcaagtgaatcagcctatcctaaagttatggatgctttaaataagttcggcgtgcctaaaaaagtaacgagcttcgttttacctttgggttattcatttaaccttgatggttcgatgatgtacaccacgtttgcagtactttttatcgctcaagcttacaatattgatctgagcttcacacaacaaatcttgattttgttgacgcttatggtgacaagtaaaggtattgcgggtgtttcaagagcttctattgtggttatctcggcaacactcacaatgttccatttgcctgaagccggcattctattattacttggtattgaccagttccttgatatgggccgtactgcaacaaacgtagtaggtaatagtattgcgactgcagttgttgccaaacttgaaggcgataaagtagctgatactgaagaattaccagagcctgtattaattaaatcaactcaagaacaaacaatcgcttaa

SEQ ID NO: 43647 - DNA, 1431 bp, Acinetobacter baumannii
atgtctcagaaaaaaagtgtgcttttccagcaactattaccagttatcaaacaatatcagcaatcgggctttacccatgaaaaaattgttgaattacttaaagatcaacatgatctgaatttggtaacagtcaaaacatttaaaagttatttataccgatatgcaaaagtgaatccagctatgtctaaaaatactgctactctccaatccatgccaacttcccgagaaattaaaaaatcatcgaagcttgagcatgtttgttatgacattcgcggaccagtattacgagccgccaatgaaatggaagagcaaggacataaaatcattaagctgaatatcggcaaccctgctccatttggttttgaagcaccacaagaaattattaatgacgttgctttaaacctaccaaatgcaattggttatgtagattcaaaaggtatctttccggcacgtaaagcaatctgccagtactaccagcaaaaaggcatcttaaatatgcacgttaatgacgtgtatatcggtaatggtgtatctgaactcattgtcatggctatgcaaggcctactcgatgatggtgatgaaatgctcattccgatgccggactatccgctatggacagctgccgttaacctgtcgggcggtacagccattcactataagtgtgatgaagaaaacagttggtatcctgatattgccgatattgaaagtaaaattacttcaaacacacgtggtattgtcattatcaatccgaacaacccaactggttcggtatatccacgtcatgtgcttgagcaaattgtggcacttgcaaagaaacatgacctgattttatttgctgacgaaatttacgacaaaatcgtttacgatggcattgaacatgttgctgttgcttctttagcaggcgaccaattatgtatttctttcaatgggctatcaaaagcatatcgtattgctggtttccgttcaggctggatggcaatcacaggcgataagagccgtgcagcagactatatcgaaggtctggatatgttagcttcaatgcgtttatgtgcaaacgtacaagctcagtatgcaattcaaacggcgcttggtggctatcagtctattaatgacttgatccgaccaggtggacgtttatatgaacagcgtaatatcgcatgggaaatgttaaatgaaattcctggtgtaagctgtgttaaaccagaaggtgcgatgtattgcttcccgcgtcttgaccctaacatttacccaatcgaagatgatgaaaagttaatgttagatttacttcgcgctgaaaaagtactattagttcaaggaacaggttttaactggccaacaccagaccatttccgtgttgttttcttaccggcagaaaacgaattacgtgaagcaattggtcgtttaggtcgtttcttggccaatcgccgttaa

SEQ ID NO: 43648 - DNA, 420 bp, Acinetobacter baumannii
atgggaaaagttaataaaacagaccgagaatggcaaagagagttatcacctgaagaatatcggataacgcgacaaaagggcactgaaccagcatttacggggcaatactggaatactaagcaacatggcacatatgtttgtcgttgttgtggcgcggaattgttttcgtcagatgcaaaatatgatagtggttgtggttggccaagtttctttcgccctctgaatggaagcgttattgatgaacatgaagatttaacgcatggtatggtcagaacggaaattgtttgtcatgattgcgaagctcatcttgggcatgtttttgaagatggaccacagccgacaggtttgcgctactgtgtgaactcggcatcattacaactgaaaacacaagaaaaaaatgatgaggaaacctatccatga

SEQ ID NO: 43649 - DNA, 486 bp, Acinetobacter baumannii
atgagtaacatttatcagtttgaagctgaattgttagagggagatattaaacaattcgctgattacaaaggtaaagttttattaattgtaaatactgcaagtaaatgtggttttactccacagtttgcgggtctcgaaaaactttatgaaaaatataaagaccaaggtttagaagttttaggttttccctgcaatcagtttggtgggcaagatcccggaagcaataaagagataggtacattctgccagcgtaactatggagtgaaattccctatgtttgccaaagtagatgtaaaaggtcctgaagctcatgtgatctttagatatttaacccgtgaagcaaaaggaattttaggaagcagtactattaaatggaactttaccaagtttttagttggtaaagatggttcggttttaaatcgttatgcaccaacaaccaagcctgaagcattggaagctgatattgaaaaagcattagcgagttaa

SEQ ID NO: 43650 - DNA, 846 bp, Acinetobacter baumannii
atgggttcaatgaacgctattcctcaaactttcgagttttggcaagatcggcgaatgccttatgtggaaacccgaaggtcatgttttggcagaacatgttataagtctcatagccatccaacattttcaattggtgctatagatgaggggaatagtgtttttcaaagttcttttggcactgcacaaaagatcacggcgggtacattagttattgtgcccgcacatgttgagcattcatgtaatcctatgccaaatcaggcatggagttaccagatgcttcatttagatctagcatggttaaatcaactgtattcagaatttcaagagcaaggtcttgatttacatatacctcagcataagccgctcattataaaagacgaatttttatatgacgcttttactgaaatgaatgagacattatttgatgcgcaaaaattaatttttgaaaaagagcagtctcttctccattgcctgattcatttgttattacctcattttattttagaagaaatacaaaagcctcaatatttatataaagactttttaaacctgatcgatgtgatttcatcctcagagggttttatttctttagaagaacttgctcaacgagtaggtttaagcagatatgcaatcatacgtttattcaaagcaaatgtaggtttaacaccacatgcatttcaaattaacttaaagattaatcaggctcgagagcagctcaaaaaaggcgtgccacttgccgaattggctgtaaatttaggttttagtgatcaaagtcatttccataaagcttttaaagcacatacaggggtaactcctcggcagttccagctcgcagccgcgcaataa

SEQ ID NO: 43651 - DNA, 633 bp, Acinetobacter baumannii
atggaagtttttttagttattgcatttactcattttttagcactcttatcaccaggtccagatttctttcttattctcactagtcttctacaaaaaggacgccgttatacatatggtattgttctaggaatcactttgggaaatgctttaattctggctggatgcctgtttagttttatgttgcttggaaatctaagtagtatcttacttttaatatttaaatggcttggcgctttgtatttggcttatttgagttttctttgttttaatgcagcccgatctacagttctaaatttctcaaccgatgtaaataatttaagtgaccaagcagaagataagcacaacaaaattaaaagcttggtattaggtttgcaatcgagtcttctaaatccaaaaaatattatgttttatagtagcttaatgctgcttatacaacataaatttagtttatttcaaaaactgcttatgagtgtatggatggtcagtgtggttttaatctggaatatcttatgggttaaactgctggcaaacgatcgaattttaatcaaaattaagcgctctgcaacaggtttatattattgttctgcagtagcttttattctttttgctgtgcttttgattacatataaatag

SEQ ID NO: 43652 - DNA, 1227 bp, Acinetobacter baumannii
atgaagcatctaatcaaatttgtcagcactgaaactcaactacttggtaactgtttaatgaactctagcttgtcgttattacacccgtatccatttgaaaagttaaaccaactttttaaggatattaccccagcgaaccttcccttgattcctctatcaattggcgaaccgaagcacccagcaccagagtttgttaaacaggctattattgataactttaaccatctatccacttatccaaacagcaaaggcttacctgagcttcgccagagtattgcagactggctaactaaacgctttaaacttaacagtattagcgctgaaaaccacatcttgcctgtctctggtacacgtgaaggtattttctcttttgtacaggcattaattaaccgtgaagatgcaccgtatgtggtaatgccgaacccgttttatcaaatttatgaaggtgctgctttactcgcaggtgcaaagccatacttcattaattgcacagaagaaaatggctatttaggtgactttgatgctgtgccagcagaagtttgggaaaagacagcccttctttttgtatgtacaccgggtaacccaacaggtactgtgctttctaaagaacaatttaaaaagctgattgccttatctgatcaatataatttcgttattgcgtctgatgaatgctattcagaactttggtttgaccaagctcctacgggtttattagaagtatgtgcggaacttggccgtgatgactacaaaaactgtatcgtttttcattcactttcaaaacgctcaaacttaccgggtatgcgttcaggttttgtagcgggtgatgctgctttattaaagccatatttgcaataccgtacctatcacggcgcagcaatgccagtacaacatcagcttgcctcaattgcagcatggaatgatgaaagccatgttgaagaaaaccgtaagcaatatcgtgcaaaatttgacttatttcaatctgagctaggtcatttgcttccattacaaaaaccagatgctggtttttactattggttaaaagtggataatgatgaaacttttgccaaaatgctgatggaaaaagcacatattaaagtcttaccgggccgttatttatctcgtgataccgaacaaggtaacccaggagctaaccatgtacgtatggcgttagtggcagatttagctcaatgtgaagaagtagttaagcgtttaaaagcgattttgtaa

SEQ ID NO: 43653 - DNA, 2664 bp, Acinetobacter baumannii
atgatcaatacatcgccattgctgaactatgtctcaagtcatcatgatattaaagccattaatcagtggcgaacggatgtagaaaagcaattgcaagattcatatgaaaatgggcaatctattcgagaaatcattaaagctcgttcagatttagtagatgaagcgctcgtctttttatggaaacatgcagaacttgaccagtcaaaactaggtctttttgcagtaggtggttacgggcgccgtgaaatgctgccctattctgatgtagatatcatgattttgtctgaagatgaaatcagtgaagaaaatgaaaagcgcatctccacatttatttcctctttatgggatgtaggaaatttcaaaccaggcattagtgttcgcaccattcaaagctgtgttgaacaagccgctaccgatttaactgttgccaccaccttaattgaagcgcgtttaatcacgggcaatacacaacttgcgaaatggcctcgccgtattgtttcacagacatggacagacaaaacattttatgacgcaaaaatggccgaacaagccaagcgttaccaccaacacaataataccgaaagtaatttagaacctgacattaaaaatgcaccgggcggtattcgtgacattaatcaaattggttggattgccaaacgccacttccgagtgaaccgtatctatgacttagtgcatttaggtttcatttcagagtttgaattggctgttttagaagaagctgaaagctttctttgggaaattcgacatcatttacaccgtttagccaaacgtgatgaaaaccgtttactctttgaccatcaaagagaaattgctgctaaatttggttacgttcgccaagaaggccaacctgtaaattacggcgttgagcaattcatgaaacgctactaccgtacggcgcagcaggtttcaacactcaatgaaatgttgctggcgtattttagtgagtctgtcattactcctcgactccccaactatgaacgcaaaattgaagttgtgaatgatcactttaagattgtcgacaataaacttgcagtacagcatcataaaatttttgcagagcatccgagcgcgatcttagagctattttatattttagccaatcgaccagatattgaaggtattcgcgctcggactttacgcttacttattcttgctgcgaaacgaatcaaccaaagttatcgcgataatccagagcatcaagcactgtttatgtcgattattcgctcaccatatcgtttatacgataccttggtcgcgatgaaacgttatggtgttttaggaaactatattcctgcttttggccaaattatgggccttatgcaatatgacctatttcatatctatacggttgatgcccacaccttattattgctgcgtaatttaaatcgttttagagaacctgaatttgccaaagaattccctgtggtaagttcggttttccaacgtcttgctcgtcaagatattgtctttattgctgctttattccacgacattgcaaaaggccgtggtggtgaccatagtgaacttggcgcagaagacgcgattgagtttggacgtgcacatggctttactgagcgtgaatgcaaattaattgcatggcttattcaaaaccatttgctcatgtcacttacagctcagaaaaaagatatttctgatccagatgtcgtgaaagattttgcagaaaaacttggtgacatggagcatcttgattatctctatactttaacagttgcagatattaacgccacaaatccaaaactttggaacacatggcgcgcatcgcttatgcgtcaactttatacgcatgcccgtgatgtaatccgtacaggtttaggtcgtcctgttgactaccaaatgttaattgaagacaccaaatttgcagcaagtgaattactggtaaataactttgcattggctgatgtcgaaaaagtatggcaagaacttggtgatgaatacttcattaaagagtcggcagatgaaattgcatggcatacacaagcaattttaaaacatggtgataatccagagccattagtcctcttgcgtgctcaccgtaaagcagctcaagatgcggtgcaaatctttatttatacacgtgaccaacctaacctgtttgctactactgttgctgttttagaccgcatgaacctagacgttcaggacgcaaaaattatcacagcaagtacagcatttagcttagacacttatgttgtactcgatcgtttcggtacattgcttaccgacccagagcgcgaagaaaccgttaaaaatgcattagtgaaggcgcttagccaaccagaccaatacccgggactcatgcaacgtcgtattccacgtcaattacgtcacttcgatattgaaaatacagtcgacgtaacattaaatgaagccttacagcaaaatatggtcgaaatttcaacactcgatcaccctggcctacttgcacgcgtgggtggtttatttatgatgcaaggtttagacatccattcagcccgaattgcaactttaggtgaacgtgccgaagatattttctttgtcaccaaaaaagatgggaaaccgctgaatcacgaagaggtcaaactcttctcggaaaaactgaaagctgcattagatgaagcatctaatcaaatttgtcagcactga

SEQ ID NO: 43654 - DNA, 1209 bp, Acinetobacter baumannii
atgagcgtgacactcggtaccccacttcaatcttctgcatttaaagttttattgttaggttcaggagagcttggcaaagaagttgtaatttccttacaacgccttggtgtagaagtacatgcagccgaccgttatgatcatgctccagctatgcaagtagcacatttttcttatgtgttaaacatggcagatccagcccaattaaaacaactcattgaaaaagttaaaccaaatttaattgttccagaaattgaagcgattgcgacagaagttttactggaaattgaagcaaataaaactgcaacagtcatcccatctgctaaagctgtaaacctgaccatgaaccgtgaaggtattcgccgtcttgctgctgaagaacttggtttaccaacatctgcttatcgttttgctgatacgctcgaaagcttccgcgctgcttgtgatgatattggttatccaaactttgtaaaaccggtcatgtcttcttctggtaaaggacagtctcgtgtaaaaagtttcgatgaagtcgatgctgcatgggaatatgcaatgcaaggtggccgtgttaaccaaggcactgttattatcgagtctcaaattgattttgactttgaaattacactccttaccgttcgcgctaaaaaccctgaaacaggtgaaattgaaacgcactactgtgacccaattggtcaccgccaagatgcaggcgactatgtcgaaagctggcaaccacaacccatgactcctgcagcactcgaggaagccaaacgtattgcaaataaagtgactacagcacttggtggctgtggtatttttggtgtagaactgtttattaaaggcgacaaggtttggtttagtgaggtttcacctcgtccacatgatacaggcctcgtcactttagcatctcaatttcaaagtgaatttgaattacatgcacgtgcaattttaggcttacctgtaaatacagcacgtcacagtgttgccgcaagtgcggtaatttatgctggagttgatgctaacaatttaagttatagcaatctgaatgtggctttagctcatccagataccgacttacgtttgtttggtaaaccagaaggtttcaaacgtcgtcgtatgggtgtggcaactgctcgcgctgaaaatactgatcttgcccgtactttagcgaaagaaaccgctgatcaagtaagcgttcaaactaactcttaa

SEQ ID NO: 43655 - DNA, 390 bp, Acinetobacter baumannii
atgtcacaagttaaaatttatgcaaatgaacgaaccattattcagtatcgcgaactgctctctcatgcgatccatcaagcacttattgaagaattgaagtatcccgtcgagaaaagatttcaacgcttcattagccttaaacctgagaattttatttatccatctgacagaagccaacattacattatcatcgaactttcaatgtttgcaggccgcagtccagccactaaaaagcaacttattcaaaccttatttcgcaatattgaagagcaatgcaaaattgcacctcaggacattgaaattaccatttttgaaacacctaaagaaaactggggcatccgtggtaaaaatgcagatgaattgcttttaaactatcaggttaatatctaa

SEQ ID NO: 43656 - DNA, 342 bp, Acinetobacter baumannii
atgaacctagaaattattttggtcggcattattgtgggtatcgctaattttgcttcacgcttcggaccatttttcgtaatacaaaaactacagggcaaccaacaaagacgcggctcaatctggttaaaaatcgctttaggaagtattggtatatctgcaattagcgccatgcttgtggttgcaacccttccacctttacttgaaaccccaaataagagcttagcaatgcttatcggttttatggttctagctggtctttattttaaatttaagaaaattgttcctgccaccttaacagccgcaatcgtttatggccttatctatacttatttacctttataa

SEQ ID NO: 43657 - DNA, 741 bp, Acinetobacter baumannii
gtgtcaaatcaacaacagatggctgctcaaacagcaactttttggcaaggtgccaaagatagtcaagccatcgttctcacctacttaccagtttcttttgcctttggcgtttctgcatctcaatttggttttagcccatgggaagcattttttctttcttgttccatgtatgcaggtgcaagccaatttttagtggtcgcacttttagcaagtggttcttctatatggttaaccgccttaacagtcattgcacttgatatacgacatgtactttatgggcctgctctttataatttgattcccactaaattaaatttaaagaagacagccgtttgggcttggggtttaacggacgaagtttttgccagtggtatgatccaactttcacagcgcagacaacaatggtccgagtcttggatgttgggcttaagtctatttagctggatgtcttgggcaagtgggtcattattaggcgggttatttgcagatcaagtcgcacaccttccaaagtttttacaagcagctttagacttcttattacctgctttatttttaagttttttattagcggcatttgaacgaaagcatagccttgtagttgctgtatcgttagtggtttcagctttagcatgttattggattaacttatcagcagctatctttattggcattctttcaggcattttagcaggtctatttaaacattatgtgctgaaacaatttgatgaggttgaaacttaa

SEQ ID NO: 43658 - DNA, 471 bp, Acinetobacter baumannii
atgttcaaatcaaagactcgtttagtttatatcgccatcctgagtgcgagcgtatttatattgcaaggttgtgataatggcaatcagagctcagataaaaaagtagaaattaaaccagcgccgaaactaacgaatgatgcgacagtttatgcaaaaaaggcatggacattaatcaataccgttgatcatttagtctatgaaaaacagctcagccaaattaatgataatgttcgtaaaccactacgtcagctcagtacagactggcgtattaatgtaaaaatgacagattcggtcactgaaggaaaatatgcgctttgccgtaaagctttaacgagtctagatgtatgggcgcgcgaaacgcttgaaaataatagttcggttgctcaaaaacaggcagattatgagcgcgataaacaacaatgtaaggaagcgattgaaaatccgaatttaggaaacacatctcctaaataa

SEQ ID NO: 43659 - DNA, 336 bp, Acinetobacter baumannii
atgaaaaaattatcaacaattcttacagcaggcgtattggctatgttaagtgtttcggcatttgcatgtccaaaaggaactcaactacaaggcggtactggaccaaatcacaaaggtggaaaatgtgtagcggtacatggaaaggctacagctcaaaaaacaaagaaagaggcaactaaaactaaacaggaagttaaaaaagacttaaccatgcaaaagcatgatgcaatgaccagtgcgactcatgcacaacatgaatcacatcaaatgactcaccaaatgaagcaagatgctgtaaaaactgccaactcagctaaagctgcaacaaaaccgtaa

SEQ ID NO: 43660 - DNA, 693 bp, Acinetobacter baumannii
ttggacctaatttatattaaccgattaaaagaaaacacatggtttagtgtgcttccggaagtattccaaaagtttattctagaatatggcaagcaaattacttttgagaaaaatagctatgttttccacgctcaagatgagtttgatggtatttataccgtccttgaaggctcaattagcttaggttatgtcgatgtaaatggtaatgaagcactttctgcaattgctgagccgattatgtggttcggtgaaatatctttaattgatcatgagccacggtcacacgacgcgattgctttgaaaaaaagtatagttctgcatattcctgcaaaaccattaaatgagctactaaaagaacatccatattattggtattattttgcacgtttaactagccaaaaactcaggtacgttttcttagaacagattgcgatacaaacacgcagtatttctcaaaggctggcacaacgtcttctgttcattttagaaggatacggtaaccatattcttattcaagatcatcacattcagatttctcaagagcaattagccaacatgctgactacatctaggcagacgatcaaccatgaattgagcctacttgaaaaacaaaatattattaaaattgcttttagaaaaattgagattttagatattgaaaaattaaaagtaattgctcaatttcattcataa

SEQ ID NO: 43661 - DNA, 522 bp, Acinetobacter baumannii
atgtcaaatctggagcagaaactgagccaatatgcggcttatcatttaaatcatcaaaatattttgacgcattttataggcattccactcatcgtgttttcaattttatgtttaacagcgagggcaggaatcgatattggtaattttaaagttactttagctatggtactgattgcattcagtacaatctattatttatttctagataaagtttttggcttaatcatgctcatgatattggtggctgtgtatccattagcgagccaaattgccgaactttctttaggacaatggttggctgcaagtattggtttctttgtggtgggatgggcttttcagtttgtggggcattattttgaaaagaaaaaacctgcttttgttgatgatgtgattggactcgcgataggaccgttatttgtattggcagaatttatatttatgttaggttttagaaagcctttacatgagcgaattttacacgaggcacgcagtaaacgagagatgatggatttaagccattaa

SEQ ID NO: 43662 - DNA, 1092 bp, Acinetobacter baumannii
atgggttttaattgcggtattgttggtctgccaaatgtagggaaatctacccttttcaatgcattaactaaagcagcgattgcagcggaaaacttcccgttctgtaccattgagccaaacacaggtattgttcctgttccagatccacgtttagataaacttgctgcaattgttaaccctcagcgtgttttgccgaccactatggaatttgtagacattgcaggtcttgttgctggtgcatcaaaaggcgaaggtttgggtaaccagttccttgctaatattcgtgaaactgatgcaattgcacacgttgtacgttgtttcgaagacgaaaacgtcatccacgtaaatggtaaaattgatccattagatgacattgcaactatcaatactgaacttgcacttgcagaccttgagactgttgctaaagcaattttacgtttaactaaagttgctaaaggcggtgacaaagaagctgtagcaactaaagcagttttagaaaaaatccaaccgttacttgacgaaggtaaaccagctcgcgcggctgatttgtctgatgacgaacgcaaattaattcgtggttttggtttaatgactttgaaaccaaccatgtacattgcaaacgttgcagaagatggttttgaaaacaacccacatttagaagctgttaaaaaacttgctgccgaagaaaatgcaattgttgtgccgctttgcaaccaaatcgaagctgaaatttcattattagaagatgaagatcgtgctgaattcttagaagcaatgggcatggaagaaccaggcttaaacgtagttattcgtgcaggctataaacttttaggtttacaaacttatttcactgctggtgtacaagaagttcgtgcatggacagtaaaagttggtgcaacggctcctcaagcagctggtgttatccatactgattttgaaaaaggctttatccgtgctgaagttgttgcatatgatgacttcgtacaatacaacggtgaaaacggcgctaaagaagcaggtaaatggcgtttagaaggtaaaacttacgttgttcaagacggcgatgtaatgcacttccgttttaacgtttaa

SEQ ID NO: 43663 - DNA, 660 bp, Acinetobacter baumannii
atgcaagaccagctcattgatttattaattactggaactgtagataccttgctcatggtaggcgcatctgcgttcattgcctttttaattggcttacctatcgctgttattttagtcagtacttctgaacatggcattcatccgtcgcaaaagattaatcaagctttgggttgggtcatcaacattactcgttctgtaccctttctaattttaatggttgcacttattccgcttactcgctggattgtgggtacaagttatggcgtatgggcagcggttgttcccttaacgattgcggccattccgttttttgcccgtattgcagaagtcagcttacgtgaagtcgatcaaggcttaattgaagctgcacaagccatgggttgtaaccgcaaacaaattatctggcacgtacttttaccagaggctttgccaggtattgtggcaggctttactgtgactattgtgacaatgattaactcatctgcgattgctggtgctattggtgcaggtggtctaggagatattgcttatcgttatggctatcaacgttttgatatgcaaattatgttggctgttattttagtattgattgttttagtcatgttagtacaagcgactggtgatgcattagcccagcaactcgataaacgtaaagtttaa

SEQ ID NO: 43664 - DNA, 1071 bp, Acinetobacter baumannii
atggtgagttttggatcacaagttgatttttctctaccccacatcaaaattcgtggtttaaataagttttaccaatctcaaggtcaaaaactgcacgctttaaaagagattaaccttgatattccccaaggtaagattttaggcattattggtaaaagtggagcgggaaaatcttccctactccgcactttaaatggtttagaacaagtaaatactggtagcattcatattcatcaacaaaacattgctgaattgagccattccgagcttattcaaacccgtcaacgaattggaatgatttttcaacatttcaatttaatgtcggcaaaaacagtttgggaaaacgtggcattgcccttaaaagtttccaattacaacaaagcagatattgaccaacgcgtaaatgaggttctagctctcgtaggtcttgcagataaatctaactattatccatcacaactttctggcggacaaaagcaacgtgttggtattgcacgcgcacttgttcaccacccagaaattttactgtgtgacgaggcaacctcggcacttgatcctgaaagtactgccactattttgactttacttaaaaagattaatcaggaacttggtctcaccattgtattaattactcatgaaatgcaagtgattcgagaaatttgtgatcaagtcgtggtgattgaccaaggtgagattgtagaggctgggcaagtttggtcggtattttcacgaccagagcaacaaattactcaagaactattaaaccttgagcaaattaccctgccttttaaaatcagccgtctacccgatgaagattcgactcatattattgtaaaactgaaatatgaggctgaaacacatcaggttccagatatccaagaactacttgccagattcaaagcaccagtcaatttatatcaaagtcaggtcgatatcattcaagggcacattattggttcacttttagtcggtattcctaacgtagaaattgatctttcatctatacaacaagatgcattaacagcaatcgcacaatttgaggtacttggctatgcaagaccagctcattga

SEQ ID NO: 43665 - DNA, 834 bp, Acinetobacter baumannii
atggcgattcatttcaaacagcataagccttggttactcggaattacgattttaatcgtagttctgggcctcgtaggttacccttatattaaaaataaacaagccgatgatgttttaacgatcgggattagcccgccttatgctgagctattacaaagcgttgccaatgaagtagaaaagcaaggcgttcatgtcaaactcgttgaattttctgattggcgagcacccaatgttgccgtacaaaacggtgatattgatgcaaactttttccagcaaagcgtatttctacgtaatgctgttaaagaaacgggttatgacttacatgcatttggtgtgggttcaggaagtcatgtgggtttatattcaaaaaaatataaatcacttgaagagttgccttcaaaagcacgtgtagctattccaaacgatccggtcaatttagcccgtgctttaattttattgcatcgtgctggcttaattcagcttaaagatattaataatgaactttcaactactcaagacattattgctaatccgaaacagctgagcttcgttgaagttgaaggaccacagacagcacatgcctataacgatgtcgatttaattttcggcttcccccactacttaaaaatggcaaaggtaaccgacccacatagcgcattatttttagatccaatcgataaaaaatatgcaattttgtttgtgactcgtcgcgattaccaagataaaaaccaaaaacttgcaacctttgttaaagcattccagaactcaaaacaagcacaagatattctggataaagactttggtaaaggtatgtggtttcaaggctggaaataa

SEQ ID NO: 43666 - DNA, 831 bp, Acinetobacter baumannii
atggctcaaacagcctctaaaaaatggctaggcataggcttagtcgttgtagtcctttttgttgctttgttcttatggaataaacatcgtcaaagtggcttaaatgaacttgtgattggcattagtccaccatttgcaaaacctttacaagctgctgccgatgaagcaaagaaacaaggtttaaatgtaaaacttgttgaattttctgactggaataccccaaacattaccttaaatcatggggatattgatgcgaactttttccagcatcaacctttcttagataatgcaattaaagaaactggctttaaattaaaggcatttgcggtgggtgcagcctcacatgtggggctgtattcaaagaaatataaaagtcttgatgaattgccacaaaacgcacgcgtagtcattccaaatgatccggtgaaccaaggtcgtgccctacttcttttacaacaagctaagttaattacgcttaaagattcaaataatcacttatctgcactcaaagatgttgtttcaaaccctaaaaatttgcaatttattgaggttgaaggaccacagactgctcgtgcaattgatgatgttgacttggcttttggctatccacattacttgcgcttagcaaaaacagcagaccctaatagtgcgcttttactagatgacaataccaataaacgttatgccattttgtttgtagtgcgtgatgactatgaagataagggcgacaaattaaagaaatttgttgagatctatcaaaactcgccaaaagttaaagctgtgttagacgctgaaattgggccaaaactttggttccctggctggaagtaa

SEQ ID NO: 43667 - DNA, 1413 bp, Acinetobacter baumannii
atggcagatttcaaagcgaaagagattttattaaacgcctttgatatgaactgcgttggtcatattaatcatggcttatggacacatccacgtgatgaatcacatcgttttaacgaattgagctattggacagaacaggccaaaactttagaaaatggtttatttgatggtttgtttatcgctgatattacaggtgtgtatgacgtctatcaaaacggtatagatctcactttaaaagagtccattcagcttccgagccatgacccgtctacactcatttcagcaatggcggcagtcactcaaaacttaagttttggggtcactgtgaacttaagctatgagcatccatatcaatttgctcgccgctttgcaagtctcgaccatttaactcaaggtcgtattggctggaatattgttacaggttatctagatagtgcggaacgtctaattggccaaaaaggtttaaaagaccacgatgcccgctatgagcaagccgaagaatttttagaactttgctataaatattgggaaggttcatgggaaaacgacgcagttaaaaaagataaaacacggcgtgtttttacagatccatctaaggtgcataccattcactaccatggaaagtattaccagagtgaaggcgtgtttcaggtatctccttctgtacaacgcactccaaccctatttcaagcaggtgcttcacctaaaggtatgcagtttgcaacacgtcatgctgaatgtgtatttattggcggtgacaaacccgaaaagatacgcgaacaagtgaaaaagattcgtactcttgccgaacagcaaggacgctcagcgaacgatattaaagtgtttgtcggcataactgttgttgtggccgaaacacatgatctggctgtacaaaaacttaatgaatatcgtcagtatgcgagccctgaagcaggcttagcgcattatgcgagttcaacaggcattgacttaagtaagtttgctgacgatgaagcgattccttaccaaaaaagtaacagcattgtttcgattaccgaaaagtttaaagaacagcaaatcacaaaaaatgacttaaaagctcagcatgttttaggtggtcgttatccccttattgtgggtagtggcgaagaggttgctgaatacttaattcatcttttagatgagactgatattgatggctttaatttgacacgtactgttgcacctgagtctcaccatgactttattcgcttggtcattccagagctacaacaacgtggtcgctataaaactgcatataaaacgggttcactacggaacaaaatttttaatcggggtgatcaattaccagaacagcaccctgttcaagcgttccgatgtagtccctataacaacagcaaaaacttaacaaaaattgaagaaataaccgcttaa

SEQ ID NO: 43668 - DNA, 1224 bp, Acinetobacter baumannii
atgacttcatatcaatcggttcaaactaaacaaacatcggcatctggccaagcccacattattcaaaatgatgctgaagcattagaaattgccaaacagtttgccgaacaatttaaaaaaaccgcagttgagcgagacgctaagcgaattttaccgtataccgaaattgatgcattaagccagtctgggctttgggcaattacagtaccaaagcaatatggtggtgccgaagtttcaagccatacagttgccaaagtaattgcgcttttaagcggtgcagatggttcaatcgggcaaattccacaaaaccacttctatgcattagaagtgttacgcaatacaggtacagaaactcagaaacaacgtttatacggcgaagtgttaaatggcacccgctttggtaatgcacttgctgagtttaaaactaaaacttcaacccataaacaaactaacattcgtccgcatgaaaatggctatcttattcagggtgaaaagttttactgcacaggaagtttatttgctcaccgtatcccaaccttagttttagacgatgcaggacgtgagtatctggcatttgtaaaaagtggttcacaaggattaaaacttgtagatgactggtctggctttgggcaaaaaaccacaggcagcggaacggttaaatttgatcaggtttttgtcgatgcagatgatgttattccttttgatacagcatttttacaaccaaccttagtcggtccttttgctcaaatcatgcatgcatcgattgaggtaggcattgcacgtgcagcctttgaagaaagcttgcaaagagtacatcaagctcgcccatggattgattcaaatgtagaaactgcaaaccaagatcctttaacgatttatgaattaggacgcattgcggtagatgtacgagctagtgaagtcctattaaaacaggcagctcaatcaattgatgccgcaaaaattgaaactacacctgagagcattgctaaagcatccatcgatgttgccaaagtacgtgctcatagtaccgatatcgcactcaaagcatcgtctaagctgattgaacttgctggtagccgtggtagtcagtctcaagatggcctagaccgtttctggcgtaatgcgcgagtacataccttacatgatgccgcacgatggaaatattactttattgggaactacgttcttaacggtgttctaccacctcgtcgggggacattgtaa

SEQ ID NO: 43669 - DNA, 1212 bp, Acinetobacter baumannii
atgtctaattctctatctaaaacgacggcatacgtccaagtcattcaaaatgatcaacaagcaattaatgctgcttatcaagtggctgattttgctttagagggtcgtaatacacgtgatcaacaacgcttattaccgcatgagcaaatcgaaagctttagccaaaaaggcttaggcggaattcgtattgcaaaaaaatacggcggtgctttcgtttccaataaaacactggcacaagttttccgtattttaagtaaaggtgatgcaaatgttggtcagattccacaaaatcagattagcctgttaaacctgattgaaatcatgggcacagaacaacaaaaacaatttatcttttcagaaatattagccggtaaacgtcttgccaacggcggtcccgaacgaaatacccatgactcaaaaaccttaaaaaccacgcttactattgaaaacggcaaatattttttaaacggcgaaaagttttattcgacgggaacaagttttgcgcattggctcgcaattaaagcgattcatccagaaggccatgtcgttttagtgattgttaaccgagatgctcaaggcattgaagttattaatgactggaatgggtttggtcagcgtactacagcgagtggtacggttaaattaaatcaagttgaagttaatcctgaacttatttttgatgagcgattattaacacaagttccaacctatcgcggtgcgtattcgcagttattacaagtggcaattgatgtcggtattgcggaagctgcttttgaagatactttatcgaccatacacaaagcgcgtccaattattgatgcaaatgttgaaaaagccagctttgaacattacaccctacaagaggtgggtaagttaaatattttactcgatgcggcaattttactgcttgatgaagctgctgaatatttagatgaacttgatcaacttcaaacggtgactgacgaacaagtagcaaaagcttcaattttggtcgcagaagcaaaagtctatgccaatgatgcggctctacagatctctgaaaaactactagagctaggtggtagccgttcaagcttaaaccaacacaatttagatcaacattggcgaaatgcccgtgtacataccttacacgaccctgttcgctggaaattacatgccattggcaattattaccttaatggtcatttccctgcccgccatgcctggatttaa

SEQ ID NO: 43670 - DNA, 765 bp, Acinetobacter baumannii
atgcgggttttgtatcagtttcctttgtctcattattgtgaaaaagctcgctggttgttagaccataaagaacttgattacgttgcacataatttgattcctggatttcaccgtgcttttgcacaacttaaaacaggtcaaaatttgttgccgattttaaaagatgaccatcgctggattgctgagtcgactaaaattgcgctttatctggatgatacttatccggaacatgcacttttacgccgtgatgaacaacttagacagcaaactcttaaaattgatagtttggcagatgaacttggggtgcatgtacgtcgttgggcacttgctcatactttagctcaaggtgatcatgctctagagattatgatgggcgaacaaggctacttacgacagtttgagaaaatatcaaaaccgtttctcaagactctagtcaagaagaattataagcttgaagaagagctcgtaagtcagtcaaaaggacgcatggatgaactcattaatgagttaaaccactatttaattgaaaaccaagcacgttatatggttggtgaccgcttaagccttgctgatatttcagtatgttctatgcttgcacctttattagaaataaaaggtacaccatgggaaagggaagaagatggggaagtatcgcctgattggagtaattatcagaaatatttacttgatttgccgcttggacagtacgttttaagaatatatcaaactgaacgtaatgcacgcgttgactggcgaggaatttaa

SEQ ID NO: 43671 - DNA, 894 bp, Acinetobacter baumannii
atgaaacgttctgcaacctctctcattgtttcaacagttatgctttgtacggttggtgctacttctcaaattcaggcagcagatacattagctaaaattaaaagtactgggaaaatcgttattggccaccgagaatcgtctgacccgatttcatatgttgttgcaggtaaaccagtaggttatgcagtcgacatttgtaaccagtttgcaaatgatattaaaaaagaattgaaaatgcctggtttaaaagttgaatacaaggcagtaacctcatcaacacgtattcctgagcttttagcgggcaatattgatatggaatgtggtaccaccacaaattctaaacagcgtcagcaacaagtgggtttctcaactaactactatgcaacagaagtacgcatggctgttaaagcaaactctggtattaaaagtttggcagacttaaatggtaaagcagttgttacgactcaaggtactacatctgacaagtacattaagatgaatgaaaaaggccaagcaattaatgtacaaaatatttatggtaaagaccatgctgactcttttgccatgatggcatctggacgcgctgctgcatttgtaatggatgataatattttagcaggcttaattgctaagtcttctacacctaaagcatttgcaattgttggtccagtactttcatcagaaccttatggcattatgattgcaaaagatgatccaaaatttaaagcaattgctgaccgtactgtaaataacttatggaaaactggtcaaatggatgctttatataaaaaatggttcttatcgccaattccaccgaaaaatactaatttgaacatgcaacaaagttcatcttataaaaaactcaaagctcacccaacagatgcaggaatctaa

SEQ ID NO: 43672 - DNA, 843 bp, Acinetobacter baumannii
atgtcagtcggctcactaaactggactatattctgtgcggagtctaatgaatatggtgtcgataaagccgcatgggcagaatcagtttgtaaggttattggtagttctagctacaatgcctatgctgaggcgcccacatggttacaaatgttaggttctggtgtctttactatggtttggactgccattgtagcctttcttatcgcatttttattaggttctctcctcggggtaattcgtactttacccaataaaccacttgcttttatcggcaactgctatgtcgaaatattccgtaatattccattaattgtacagttattcttctgggcttttgtttttccggagttcttaccggacagtttaagtgcaggaagtggagatgttgtagcagggggatggtggaaaaacattttaaatcaacaacccgctgttatcggtgtttttgctttaggcctttatactgcggcgcgtgtttcggagcatgtcagagccggaattaacacggtatctcgtggtcaaaagtttgcggcatcggctatgggatttaccaccgctcaaagttatcgttatgtgattttgccagttgcataccgtacggtatggccaacgattacatcagaagcaatgaacgtctttaaaaactcggcagttttatatgccttaagtgttttaaatttctttgcttataccaaaaccatgcgtgaagagacttcacaggacattatcattcttatcctgtctacacctgtctatttaatcattacatacaccattaaatttataatggcatggattgaaaaacgcatggctgtaccaggtttaggctcgggaggaaaataa

SEQ ID NO: 43673 - DNA, 678 bp, Acinetobacter baumannii
atggatttttctctattgcataatcctgatgttattgcggcattaaaagaaggatttatttttacacttaccgtaaccgtgcttgcaatgatggggggcatcctcattggaactcctttggcaatgatgcgtttatccaacaacgcccttgcaagtaactttgccaagttctatgtcgatttattccgtggtatcccattaattcaggttatttttattttttatttcttgttgccaaagatatttgagtttcaatcagatacatattgggggccattattttccagcgttgtgacctttgctatttttgaagctgcgtttttctcggaaattgtacgttcgggtattcagtctatttcaaaagggcaagtcaatgcaggctacgctttaggatttacctacggacaatccatgcgttatgtggtgttaccgcaggcctttcgcaatatgcttccggtattacttactcaaaccatcattctatttcaggatgtgtcattagtttatgtcattagtgcaccagacttcttaggtcgtgcagatactttggctaatacctatggtcctgaaacgaaagcaacattctatttaatcgtcgctgtggtgtatttctgtagctcgtttgtgctatcgcaattagtcaaacgtttgcagaaaaaaattgccatcattcgctaa

SEQ ID NO: 43674 - DNA, 744 bp, Acinetobacter baumannii
atgccaatgatagacatccaacatatctctaaatggtatggtgattttcaggttttaacagattgcacgacgagtattgaaaaaggtgatgtcgttgttgtttgtgggccatccggttcaggcaaatcaacgctcattaaaactgtaaatgctttagagccgtttcagcaaggcgacattattgttgatggggtttcactaaaagatccgaaaactgatcttgcaaagttccgttctcgggtaggaatggtgttccagcattttgaactttttcctcacatgactgttttggaaaatttaaccattgcccaagtaaaagttttaaaacgttcagttgcagaagcgcgtgaaaaaggtcttaaatatttagaacgtgtaggtctgcttgcccataaggataaatttccagggcaactttctggtggtcagcaacagcgtgttgctattgcccgtggcttatcaatggacccaatctgtatgttgtttgatgaacctacttcggcactcgaccctgaaatggtaggtgaggttcttgaagtgatggtgcaacttgctcatgaaggtatgactatgatgtgtgtaacacatgaaatgggctttgcaaaacgcgtatctaaccgtttaatttttatggatgaaggtaaaattcttgaagattgcccaacccatgaattctttgataatttagaagcacgtcatgagcgcgctaaaattttcttggaaaaaattcaggcaatgcactaa

SEQ ID NO: 43675 - DNA, 1332 bp, Acinetobacter baumannii
atgtggggaatgcctgtgaaaaatatcaaaacattaattcttgcaatgagcactatcagcttaactggtgtagttatgccagctcatgctgctactgatgcagaagtagatgctttacgcaaagaagttagtgagttaaagcaactggtccagcaattatcaaatcagcaaaaagtagtaactgtagtaaatactccaacagttccaccaactacaattacagcaagctcacccgttcctcagagcaaaccgggttggatgcaaatgcctgatggccaaacgcaagtcaagctttatgggaatgtccgtgtagatgcaacctatgactttaaggggtcaaatggcagcatttcaaatggtgctaactatcctttgaataaagatgacccaagacaggactccttaaatgtatctgcagcgactacacgcattgggttagatcttactcgacctacacaatatggcgatttaacaggcaaaattgaagccgattttatgggtggcaatggcgataatggcagtggaactttccgtgtacgccatgcctatatgtctttaggcaaatggttagctggtcaaaccacttcacctttcgtcaatacagatacttctccagaaacactagactttaccggtgcagtaggtacaggaaccacacgtactgtacaggttcgctatactcaaccaattaatgctcaacaaaaaatattagttgccttagaaggtggtgatgttgaaaaagtgagtaatgctgcgggagggagccgtttccctgctctaacaactcgttatgatttcaaaaccgcagataataaaggcttattacagcttcatggtcttgcccatgaaaatcgagtagcgactaaagatagttcatctgaagaaaaatttggctggggtgtaggtatcggtggcaagtacgatatcacacctaaggatagtgtggttgccaactattatcatgttaaaggtgatggccgctatttatcttatagcaattctgcatatgcatacgatacgtccactcaagatatcaacttaggtgaatttgatagtgcggtgatcggctaccaacggaaatggagccctattttccgctctacttttgctgtaggtggtattcaatataaagatgatagcgtctatgcaaatagcaatttaaccaatactagctataacaaagaaatttataacgctttggtcaacttaatctggaatccggttaaaaatattgatttaggtgcagaatatacttacggccagcgtgaaacttttgcaggtgataaaggtgattactcacgcataaatttattagcaaaatataatttctaa

SEQ ID NO: 43676 - DNA, 471 bp, Acinetobacter baumannii
atggagttagaccgttttgataaacaaattctggaaattttgtctcatgaagacctgaatttgaatgagctttcagaacggattaatctttcagttagttctgttcatcgccgaattaaacacttgatagaagctaatatcatggggcaactcaaaagagaaattaactttagcaaattgggttttaccttgcatattttgctacaggtctctttaagcaagcatgatagtgagacatttgataaatttctttctgaaattgaagccattcctgaagtaacaaatgcttttttggtgactggtcaaagcgccgattttattcttgaattagttgcacgtaatatggacgactacagcgaaattttattaagacggattggtaaaattgataatgtcgttgctctgcattcgagctttgtcattaaagaatacaatgtatttaactgttataacttattaaataaagtataa

SEQ ID NO: 43677 - DNA, 750 bp, Acinetobacter baumannii
atggcgggtcattctaaatgggccaatattaagcatcgtaaagcgaaacaagatgccagtcgcggtaaagtttttactaaatatattcgtgaaattgtcactgctgcaaaacttggtggtgcagatcctgccagtaaccctcgccttcgtgctgttgtcgaaaaagcgctttctgtcaacatgacacgagataccattaaccgtgcaattcaacgcggtgtgggtggtgaagataatgatgatttaaaagaagtaacctacgaaggttatggtgtaggtggtgttgctgttcttgttgaaacaatgacagacaacctgaaccgtacagttccagatgttcgccattgtttcagcaaaactaatggtaacttaggtaccgcaggttctgttgcttacctatttaccaaacgtggtgagattacttttgacgatatttctttagaagataagatcatggacgttgctttagaagctggtgcagaagatattgaagtttcagaagatgaaattttagtaatcacttctccagagacttttggtgaggttcaagatgctcttgcagctgctggtttaaaatcagacaatgctgaagtagtgatgagcccttctactaaagcagaaatcaccgatattgatcaagctaaacaagtgatgaaactcattgatatgcttgaagatctagacgatgtacaaaacgtttatacaaacgttgagtttagtgatgaagttttagcgcaacttgatgcctaa

SEQ ID NO: 43678 - DNA, 546 bp, Acinetobacter baumannii
atgaaaaagtttttaggcaattctatcttcaaagcagttggttggacctatgatgcagatcctacaattcttgagaaaaaacaagttattatcggttttgaacatacttctaaccttgatgcgatcttatcaatcgctttgtttcaaatattagatttaaaaattcatacactaataaaaaaagaacttttcaaaggtccaatgaagcctattcttgaaaagctaggtggcattcccgtagaccgaaaagcaagcaaagatatcgtctctcaaatggtcgaaaaattccaaagtagcgatacatttaacctagtaattgcacctgaagcaacgcgtgccaaagatggatcggaacgcaaacctattcgtaccggtttttggcatattgctaaggcagcaaatgttccaattgtactgatgtatgcaaatgcaagaaccaaaaaaggcggtattttaggtaagatttatcctacggatttacagaaagatcttgaaacgattaaagaactttatgcgcaatatgatattgatgtgaaaattaactag

SEQ ID NO: 43679 - DNA, 453 bp, Acinetobacter baumannii
atgactttctacaaatattttccatcgaaagaaagtttaatcatggagtgcctaaatcatcgaaatattaatatacaaaattcaatttatgaaaaattaagcttacatccagctgtgagtccaattgagaaaatacatttaatttttaattggtatattgactgggttaatagtgagaattttaatggttgtctatttaaaaaggcttttattgaagtgtctaaacaatacacctcaattcgtgaaccatttcaagaatatacaaactggcttataaatttattaaatagtttattagtagagctagatattaaagaccctactccacttactcatatcatcatttcaattattgatggtattattattgatgggacaattgataaagatctgattgatccctctaagaaatggcaatatattgagtatttgattaaaactgaaaatccttaa

SEQ ID NO: 43680 - DNA, 312 bp, Acinetobacter baumannii
gtgaaagagcgtcacgactactataaaaacgctttaaatcaattaaatgaaaaatatgaagtctttaaagcaattcgtggcagtggtttattgctcggatgtgttttaaaagacgagtttgctggtaaagcaaaagatattaataaccttgcgggtgaagaaggtttactgagtcttattgctggtccaaatgttgtacgttttacaccttctttaatcgttccatttgctgatattgatgaaggtataaaacgctttgaacgtgcgcttgctcgctttgtagaaatgcaaaaggatgaacaagcagcatga

SEQ ID NO: 43681 - DNA, 1095 bp, Acinetobacter baumannii
atgatgattattcgttacattgaacctaaagatgttaatgacctttacctgttggcacaaaaagcaggttttggtttgacatctttgcagccaaatatggaaaaacttgctgctcgtattgaacgggcgtgtaagacagtcgcaggcgaacttccaaaggcagatcaggtttacttatttgttttagaagatactgaactcaacaaagttgtcggcgtttgcggaattgaagttgcacttggtttaaaagaaccttggtataactttcatgtaggaacccaagttcatgcatctgaacccttaagtgtttataacgctttaccgactttgtatttgagtaatgatcataccaactgtagtgaactgtgtactttatttttagatcctgactatcgcttaaataaaaatggcaaatttttatctaaagtccgtttcttatttctttcagcattccgtcaatattttgaagaaacgattgttgctgaaatgcgtggctattccgatgcaaatggacagtcaccattttggaatgcggtaggccataagttttttaatattgaatttaccaaggccgattatttgagtggagtagggcaaaaggcttttattgcagagctgatgccgagacatccactttatgtcgatatgctgcctgatgatgcgaaagccgcgattggcattgttcacccaaatactcgaccagcctacaacctcttgcttgaagagggactacgctacaaaggctatgtcgatatttttgatggtggtgcgacgctgcaagcagatatcgaaaatttacgggcgattaaagaaagtcagtctgtagcggtacaaattgaacaacctgaaaatatcgctgtaggtgatgaagcttacattgtagccaatgatgattatgaaaattatcgcgccattcttgtgtatagccagcctcatcagaacatattgcaattaacaaaagaacaggcaaaacaattgaatgttgaaaatggctctttagttcgggtgctcagtgttcaagttaaacatgtttcgaatccagaagtggtcaataaactcaaagagactgaacattttcgaatggctgttaattaa

SEQ ID NO: 43682 - DNA, 1464 bp, Acinetobacter baumannii
atgagtaagaataaaggaaagcagttcctggaaggagatcttcttggtagtcaacatatgactgagcaagaagaagagaaattgcagcgctcattaaccaatcgtcatattcagatgatcgcaattggtggtgcaattggtactggattatttatgggttccgggaaaacattaagtgtttcgggtacttcaattgttttaacctatttaattattggtttcttctttttcttcgtgatgcgggcaatgggtgaattgttgcttgcgaataccaattttaaaaccttcgccgattttgcaacggcttatctcggtccatgggcggggtttttccttggttggtcgtattggtgtaactggattattacagccattgccgatgtaatcgtgatcggggggtatatgcagttttggtatcctgatttacctgtttggattccggcatttacttcattagcgatcttaaccatactcaactttgtggccgttcgattgttcggtgaacttgagttttggttctcactcatcaaaattactgcaattattctatttattctggctggtatttatttaattgggacagggtttacttctccaaatggggttaaggcctcaatgagccatttgtttgaaacagagtcgatgtttccttatggtgtaaccggtttcttggcaggctttcaaattgccatctttgcgtttgtgggtattgaacttgttggtacaactgctgctgaaaccaaagatccgcataaatcacttccgaaagcaattaactctatacctttacgcattttattgttctatgtgggtgcattggtttgtattattgcggtcacatcttgggcaaaaatttcaccagaaaagagcccatttgtagaaatgtttactttggtcgggttaccaattgcggcaggtttaatcaactttgttgttgcgacttcagctttatcttctgcaaatagtggaatctttgcaactagccggatgctatacggtttggctttagacaacgatgcacctaaaagctttagtaagctgtcaaaaagaaaagttccaattcgcggactcgtattttcaatggcatgcgtaacggttggtacttctattttatttattgtgcctaatgtcatgaccgcgtttacgattatctcagcgctcacttcaattttatgtatttttacgtttatgttgattgtgctttcgtatatttattatcgtaagaaaagcccagaactacacattcagtcaaaatataaaatgccgggtggtttatttatggcatggatgactatgttgtttttagtgtttactatcgtaattttggctttagaccatgatactttaattgcacttgaatgttcaccaatctggtttattggtttatttattgcttataaatataaaaagaaaaagatgttgcagcttaatattttaaaagctcaaaaggttgattatatttaa

SEQ ID NO: 43683 - DNA, 411 bp, Acinetobacter baumannii
atgtttgaaataaccccatatgtgggagctagtttaattaagtttggtatgaaaagagaagaagtaagaaaggttttttctgagtatgaacctagagtgtttggggaaaactcgtctactgatggttatgatgaacttgggattagtttagattatgataataaggatggagttgtcgcattagtcttttgtgaacctgcacaagttgtttttaaaggaatagacctatttaagctttctgcatcagaagcttataaactaatggcttcattagataaagatattgctattgatagggatggtctaacttcatttaaatttgggatagatttttatgagccgaattatgaagaagaaccatttttaccagttgaagcaattataatattcatagaaggatattatgattaa

SEQ ID NO: 43684 - DNA, 459 bp, Acinetobacter baumannii
  misc_feature (320)..(329): n is a, c, g, or t
atgaataatcaaaaaattgtaatagactacttagataaaaataatgaactttcaaaagagttaatatggggagagatgtacaagactgatcaatactttgttagaagtattcctttgtttgcacctaaccttgcatttggtgatcttattcaggttgaaatagatgatgaaacgctctattttgatgatttaataaagccatctaacaattcaacattaagaattgtattttttaataacgatattaaatgtattgaaaaaatattaactactttggaatcttatttatgtggttgggagggctttgaaagtagacgctnnnnnnnnnnctattatgcaattaatatacctaaaaaggttgattatgctctaattaaaaaatatttagatgataggaaggatttttttgattatgaggaatcatgcttgtcggataagcatttaggagattcattttag

SEQ ID NO: 43685 - DNA, 285 bp, Acinetobacter baumannii
atgttgataacaaactatatagcaaataggctttctaaaaagaatgaaatctatattgatcaagtcttaaagcaagatgtggaactacataataaatatggtgatataacagaatataatttacgtaaggctgggaaatctttttcaggcggtggtgatgagaaaagctactattactatacgtattctgttaaaggaaatattactagtggattgattaaattgaaactgtttgaaaatgatcaaaaaaagattgatgggtatacaatagaatttattaaataa

SEQ ID NO: 43686 - DNA, 1461 bp, Acinetobacter baumannii
atggaaagctccactttaaaagaatatagcggctctgccactgaacatatggaacttattttttccaaacaacgtgccaattttgaggcagatccttacccaagtcttgaagcacgccgcacaaaactgcatcaacttaaaaaacaaattattcgttatcaagatgctttagctgccgcgattaatgctgactttagttcaagatcactcgatgaatctaaactactagatttgcttggctccgtgttggaagctgatcatgcgattcatcatttacgccgctggatgcgtccaagtaaacgccgtaccgagcttttatttttatcaaaccgtttaagtgtgcaataccaacctaaaggcgtggttggtgtgattgttccttggaatttccctgtttatttagcacttggtcccctcattgccgctttggctgcgggcaatcgagtcatgattaagctgcctgaaattacaccgaatactaatgccatgcttcgacgcatgcttgccgaagtttttaatgaagatgaagtggccgtatttggcgaagaaattacagatccagctagattcaccactttgccatttaaccatattgtctttaccggctccccggctattggcaaggtcgtcatgcgagcagctgctgaaaatctaacacctgttacacttgagttaggtggtaaatcaccagcaattgtaagccgcaactacccacttgccgatgcggcaaaacgtattacacatggtaaagcaactaatagtggtcaaatctgtgtagcgcctgactacgcgttggtaccaaaagaaagtattgatgaatttgtggatgcagcaaaatccagctttataaaaatgtttggtcaaagcattgaaaataatgagaattatacatctattgtgaacgaccgccatttaaaacgtattcaagatattttgaccgatgcacaagaaaaaggtgcccgtattattccttgcgatacttatagttttgaccaacaaggtcgcaggatgcctgtacagattgtgctgaattgcacaccagacatgcgcattatgaaagaagaactctttggccctattttacctgtggtagcttatgattctttagatgatgcaatcacctatgtgaaatcggacgaacgacctttagcactttattgctttacgcatagctcagtagaacgcgaccgaattttacgtgaaactcattcgggtggtgtgaccatcaatgattggggctggcatgtagttaaccatgatgctcctttcggtggtatcggcaactcaggtatggggtcatatcatggcgaagaaggtttccgtgaactttcacatgcaaaaactgtttttattcgccatcggtttttcccaactcagcttttccaccctccttatggaacattcctacaaaaactagcgattcgctttttcttgaaaaaaggcgatccaaatattaaataa

SEQ ID NO: 43687 - DNA, 1071 bp, Acinetobacter baumannii
atgcctaaaaatctttataaaaatgcaaataatgttagcgaaggaaattatgataatacacccttaggtgccaatacatatttgctgggtttaaccagtttatttgatgaagtgggatcgcaaggccattcaatatccgatgttttatctggcacaaatatttcgccagatgctatgaatcaatcctctttatatatttctcaagtccaaaaaattcagctatttcaaaatattcaaaaactatctcacgatcctttaattggactacgcgcaggacaaaagcagcggttgtcagattttggggtgtatggctacgcactatattcttcgcgtaattttagacaagcggtagagcttggtattcgacacattaagcttgcagggcctattttaaagaagtcattttatattcgagatgatgttgccgtttttgaagggcaggacattattgcacttggtaagcttttacctttagtgtgcgagttttggtttagctctatgcaaactttaattgaacgagtgcttgaaggaccatttcaagcgaagaagcttttattaccatacccagcgcctgactatgcagaagaatatgaaaaagtttttcattgtcccgttcagtttaatgctggggtgatgcaatggcactttgatttaaagtggctcgatgtaccttgcccaaatgccaacccgattaccgctgatatgtgtaaatcgttttgtgagcggatgctaggtgctgctgaacttgaggaacctgagttggtgaaaatgattcgtttaatactattggatggaacggggctttttccgtcggctcaagaaatggctgaacgtttacatatctcaaaacgtactttacaccggcgcttggcaggttttggtttaacctatcaagaactgttagatgagactcggcgccgtcttgctgatgaatatttgcgagagacaactttaaccatagatgaaattgctgagagaattggcttttcagatacttctaactttcgaaaagcctaccgtcactggacaggcatttcaccaaatgagtatcgaatacagtacctaaattag

SEQ ID NO: 43688 - DNA, 897 bp, Acinetobacter baumannii
atgcaaaatcagactgcttcaaacctcccctctacacaacttggaaaagcactgctttgtcttatgacgtcggcattattgttttctattatgggagtgtgcattcgttttgcttcacaaacggtagataacgcgactgtcgtgttttttagaaatgcagtaggtttatttatttttattccgatgctctttaaacaggggctagattttattaaaaccgataaactctggatgcatacttggcgaagcattgtcgggctagccgctatgtatggttttttctatgccattgcgaacttaaaactatcgaacgccatggtttttagttattcatctcctatctttattccactcattgcatggcttttcttaaaagaaaaaattaccaaatcgatgatttttgccgctgtgattgggctcattggagttttatttgtcgctaaacccgatcaaggtctatttaacgcattatcttttattggcttgggtgcatgctttttatcagcaatggcctttgtcaccgtaagagctttaaccagtacagagccacctgaacgtatcgttttttacttctgtgtttttggtagtttaatttcctctattccaatgttctggcattggcgtattttcacttggcatgaactagcactactcattgccgcaggacttttagctaatattagtcaactgtttatgtcttatgcctacagcttagcgccagcaggacaaattggcccaatgaattacattgctattatttttgcaggaatttggggatttgttttttggcatgaattaccggatctttttagcattatcggcatatttattattttatttgccatcttgctctgtaatccatttttgcagaaaaagttactttctcgattaaaataa

SEQ ID NO: 43689 - DNA, 1548 bp, Acinetobacter baumannii
atgctgaagcctctcctaataagaatcagtcctctcgataatgtagccattgtagtcaatgacggtggcttaccatcctctacatatattgaagaataccaactcaccttggttgatgaggtaccacaaggacataaggttttattggagccgttaaagcaaggtgaagcaattgttcgttatggcgaaatcattggctatgtcaacaaagatttacccgcaggttcttgggtaaatgaagccgttacccaaatgccagaggcacctgagctagatgctcttgagttagcaactcgccccgatcctaagcttcctccactgaccggatatacatttaaaggttataaaaataaggatggcagcgtcggcacaaaaaatattttaggtattacgaccagtgttaactgtgtagagggtattgtcgattatgttgttaaaattattgaacgtgatttacttccaaaatatccaaatgtagatggtgtagttggattaaaccatttatatggttgtggtgtggcaatcgatgcacccgctgcaattgttcctattcgtaccatacataaccttgcactcaaccctaattttggtggagaaattatggtggtgagtctgggctgcgaaaaaatgcaacccgaacgacttttaaatattcctaaagaaaacaaatatattcccctagcaaacgaagatattattcagttacaagatgaacgccacaacggttttgaaagtatggtaaaccatattttaaccgtggcagaacaacaccttgaaaagcttaatcaacgtactcgagaagaagttccagcctctgaattagttgtaggcatgcaatgtggtgggagtgatgcattttccggagttacctctaaccctgccgttggttttgcagctgacctgattgtgcaatgtggcggcaccgtcatgttttcggaagttacagaagtccgcgatggtattcacctacttactccacgtgcagcaaatgaacaagttgccaaagatctaattcgggaaatgaaatggtatgacgattacttagcagcaggccaagtggaccgaagtgccaataccacaccaggtaataaaaaaggtggactgaataacattgtagaaaaagcgatgggatcaattgcaaaatcgggccgctcaccgattgtagaagttctcgcaccgggtcaaagaccgactaaaaagggtttaatttttgcggccaccccttcgagtgactttatctgtggtacgcagcaaatggcatctggtattaccgttcaagtctttaccacaggtcgcggtacaccctacgggctggcagccgtacctgtcattaaaatggcaagccgaaacaatattgcaaaccgttggtatgacctgattgatatcagtgctggcgatattgcgattggaaagaaaactattgaagaagtgggctgggagctttttgaaatgattttacgcgtggctagtggtgagcagcaaacgtggtcggaccgttggggtattcataactcactcgctgtatttaaccctgcaccagtgacctaa

SEQ ID NO: 43690 - DNA, 1359 bp, Acinetobacter baumannii
atggataatctgcaaacaaatattgctgtagtgactcagcaaagagccaagcatacaaaaactcgctattacattcttgcgatgatttttttggtcacggcttttaattacggtgatcgtgcaactctatcaatggcagcaacgccaatgtctcatgaactgggaattgactcagtcactatgggatatattttctcggcctttgcatgggcctatgtgattggtcaaattccaggtggctggctactcgataagtttggtgctcgccgtgtatatttctggagcctgtttttatggtctttgttcactgttttaatcggttttaccgacattttaggtgatactgcgaccatcattacttcactctttatactcagatttttagtcggtttgtctgagtcacctgcttttccgggtaacagtaaaattgctgctgcatggtttccaaccaaagaacgtggaactgccgctgccatttttaactcatcctcttatttctcgaccgtacttttcgctcccctcatgggctggcttgttgcaaccgtccactggcagtctattttctgggtcatgggtggtttaggaatcattctttcctttatctggctcaaggtcatttatagcccgaccaatcatccaacagtaaatcctgaagaagtaaaatacattgcttcagaaggtgctttactcgatatgggcgaaaacagccaaaacgctaaaaaagagaaaattacttggagtaaagttaaacaactgcttgcttcacgtatgatgctcggtatttttattggtcaatattgtgtaaatacactgacctattttttcttgacttggttccctgtttaccttgtcaaagaaagacatctcagcattttagaagcgggttttgcggcggttgcaccagcactctgtggctttgtaggcggaattttaggtggcttaatttcagataagttaattcgaatgaattacagcttaagcttttctagaaagctccctatcgtagttggcttcttggtttcaacctcaattattttatgtaattacgtagattctcaagcagcaattgtattctttatgtccttatcattcttcggtaaaggaatcggctctttaggctgggcagtgatgtctgacgttgcccccaaagaaatggttggtttatcaggtggaatgatgaatgcatttggtaatacggcaggaatcgtgaccccaattgtgatcggctatatcttggcaagtacaggctctttcaaccttgcattaacttatgtcggtatacatgccatcgcagctgtcatttgctataccgttattgtcggtaaaattcagcgcttcgagttaaaacctacttcttaa

SEQ ID NO: 43691 - DNA, 1332 bp, Acinetobacter baumannii
atggcgacctctacacctattgttaaatccattcgagcaatccctgttgctgggcatgatagtatgctgctcaatttgagtggtgcccatggaccttatttcactcgtaatatactcatcattgaagataactctggaaatattggtgtaggtgaaattccaggcggagagaaaattttagcgacattaaatgatgctaaagccttggtagaagggcagccgattggtgaatataaaaacttgctcaaaaaaattcagcaaacttttgctgatcgtgacagcagtggtcgaggcaatcaaacctttgatttacgtaccacaattcatgttgtaacggcctatgaatcggcattacttgatttgcttggtaagtatttaaatgtaaatgttgcaagtttactgggtgaaggccagcaacgtagtgaagttgaagtattaggatatttattctttatcggcgaccgaaaacagacttcattagactacgcaacatctactcagcagcatgaatggtataaagtccgtcatgaaaaagcgttaacacctgaggctgtgcagcgtttagcagaagcatcttatgaccgttatggttttaaagactttaaattaaaaggtggtgtattacagggcgaacaagaagccgaagctgttacagctatcgcgcgccgtttcccggatgcacgtgtgacgcttgatccaaatggtgcgtggtttttagatgaagcaattgctttaggtaaacatttaaaaggtgtgctggcctatgcggaagacccgtgtggtgcagagcaaggttattcaagccgtgaaattatggctgagtttaagcgagcaacggggttaccgaccgccacgaatatggttgcgaccgactggcgggagatgtcgcatagtattcaattgcaagctgttgatattccattagctgacccgcatttctggacattggaaggttcggtgcgtgtttctcagttatgtaaaatgtataacttaacgtggggatcgcattcaaataatcactttgatatttcccttgccatgtttacccatgttgcagcggctgccgtgggtaatgtgactgcaattgatacgcactggatttggcaagaaggtacagatcaactgactaaagcaccgcttgaaattaaagacggtaaaattcaggtaccaacagcaccgggacttggcatcgaacttgattgggatcgaattaatcgagcccatgaactttataagttaaaaggtttaggagctcgtaatgatgcggatgcgatgcaatttctgattcctaattggacttttaataataaaaagccatgtttggttcgttaa

SEQ ID NO: 43692 - DNA, 912 bp, Acinetobacter baumannii
atggatgctcttgagttaaaaaacattatttctgatggtttactgtctttccccgtaacagatttcgatcaaaacggagattttaataagtcttcttatgcaaaacgtcttgagtggttagctccatacggcgcaagtgctttatttgctgcaggtggtacaggtgagtttttctcattaactggcaatgaatattctgaagtaattaaaactgcggtagatacatgcaaaggcagtgtaccgattattgctggggcaggtggtccgacacgtcaggcgattgaacaggcaaaagaagcagagcgcttaggtgcacacggtattttgttaatgccgcattacttaactgaagcaagccaagagggtttaattgaacacgttaagcaagtatgtaattcagtagactttggcgtaattttttataaccgtagtgtatcacgattaaatctcgattcgatccaaaagttaactgagatgtgcccgaacttaatcggttttaaagacagctctggccaaattgatatgatgacggcagtgactcaaactattggagaccgtttgtcatatttaggtggcttgccgacagcagaagtttttgcagcgccatataaagctttaggttgcccagtttactcgtcagctgtatttaactttattccaaagactgctatggagttttataacgcgcttcgcagtgatgactttgaaacaaccaatcgtttgattaaagatttcttcttgccactgattaaaattcgcgaccgtaaatcaggttatgcggtaagcatgattaaagcaggtgccaaaattgttgggcatgatgcaggtcctgtgcgtccaccattaagtgatttaactcaagcagactatgaagatttggctgctctcattgcgacacttggtccgcaataa

SEQ ID NO: 43693 - DNA, 1587 bp, Acinetobacter baumannii
atgagtaaaaataacggtcggcagtttattaatggtcaacgcgttgctgtaaatgcgccagctttagaaagtataggtgcaaaagactatcagccaacaggttatgtatttagtcaggcatcacttgaagaagtagatcaggctgctcaagctgcgcataacgcttttttagtttatagccaaacgactcaagaacaacgtgcatcttttcttgaagaaattgctcgccaaattgaagcattgggtgcgaacttgcaagaggttgcttcacttgaaacaggtttaccacttgctcgtcttcaaggggagacagggcgggttactggccagctaagactatttgctgaacttttacgccgcggcgatttttatggtgcccgtattgatgtggcattgccagaacgtaagcctttaccgcgtgttgatttgcgtcagtataaagttggggtaggaccagttgccgtgtttggtgcaagtaattttccacttgcattttcaactgcaggcggtgataccgtagctgctttagcagcagggtgtccggttgtctttaaagcacactctggccatatggcgactgctgagcttgttgcagaagccattgaaaaagcaattgaagtttgcggtatgcctaaaggcacattcaatatgatttttggcggccgtattggtgcaaacttggtagaacatccactgattcaggcagccggttttacaggttcacttgaaggcggaatggcgctttataaccttgcgcagagtcgtcctcagccgattccattttttgctgaaatgtcgagtgtgaaccctgtggtggttttacctgaagcacttcattcacgtggtgaacagattgcacaagatacggttgcttcttttaatatgggatgtggccagttctgtacaaaaccgggtctaattttaggtataaaaggccctgagtttgatcgctttattacagctttagctgaaaacacgcagaaagccgtacctcaggttatgttgaatgaaggtactttaaaaagctatcgaactggtattgatgcattaataaatgaagctggttttgaggtcattgcatcgggtcaggaacctgagttggtttctcaagcaaaagcacatctatttaaagcggaccaatctgttttattgtcaggcaacccaaaactacaacatgaagttttcggaccgatgtcgattgtgattgcggtcgaagatgaagccactctgttgaagggtattgaagctttaggtggacagcttacagcaaccattattggtgatgaaaacgaattgtctaaggcaggcgagcttcttgatttgttaactcgtaaagctggccgtgtattgtttaacggtttcccgacaggggtagaggtatcggatgctatggtacatggtggtcctttccctgcaaccagtgatgcccgtggcacttcggtaggtacgggagcaattgagcgcttcttacgcccagtatgcttccaaaataccccacaattattattacccgatgcattaaaagacagtaatccactacagattactcgtctggtcaatgggcagttaagtcaggcccaaatttaa

SEQ ID NO: 43694 - DNA, 714 bp, Acinetobacter baumannii
atgtctagcgcaattaaacctagatcaacaaaaaaactaagccagattattgtagaacaactgatcgaaaaaattcagtctggagaatttaaagttggagaaaagatcccgaccgaacttgaattaattgaaacttttgaagtaagccgttctgtcattcgcgaagcaattactgagttgcgttcattaggatttgtcgagactcgtcacggaattggtacttttgtcaaagagcagactgttgagcaaaactttctgttgtctaatgccagtttagaaaccattaatgacattatttccttgcttgagcttaggattagtcttgaatctgaagctgtctttttagcatctgagcgccgtaagcaaatccatattgataaaatgaaagctgcgcttgaagactttgaacgacatatttcttcagatgcaaatgatggtacggtaaaagctgactatgatttccatattgccattgctgaagcttctgaaaaccaatatttcgttgattttttgaagtatctgggtgaaaaaattattccacgtgcacgtgttaaatctattgagcaaagtcctgaaaatcgcgaagaatatttaaaagcggttcaccatgatcatgtcaatatttataacgcaattgtcgatcaggatggtttgttggctagacaaatgatgcgagctcatttgtctaaaagtattaaaaagtttaagcagtaa

SEQ ID NO: 43695 - DNA, 1752 bp, Acinetobacter baumannii
atgaattacaccaacaataaacgaattttgacccactccgctttagtacttgccatgcttggtgctttggcaggctgtggaagtgataatgatgacacaacggctccctcaacaaccaaaccaccgcagttatctcctgctgttggtgtaaaaatgacaggaagctgttcagacttactcggatttcagtacaacaataccgttattagctcagctacccttcaagaaacaggcacattgactgtcgccaacaaaccgattggcgcacattgtctggtcaaaggttatatggatcaacatgtaagccctgtagatggacaaacttatcaaattggttttgaaatgcgcttaccaatagactggaacggccgttttctctatcaaggcaatggcggaaccgatggtaatttagtacctgcaacgggtcaggtcggtagcggtggtccactaaccaacgccctgcatgatggttttgctattatttcttccgatgcaggacataatgcttcacaaaatccaatgtttggtttagaccctcaagccagaattaactacggctacggtgccattaccaaactcacgcctatggcaaaaaacctaattaaagccgcatatggtaaattgccagaccgctcctatgcaggcggcacatctaacggcgggcgtcatgccatgattgctgcaactcgtttgggtgaccaatatgacggaattttagcaagtacaccgggttttcatttacctcgtgcagctgcagctcaactctatacagcacagcagcttcgtcgtgtagcaacagatgaaaatgacctaagtactgctctaactcttccagagcgtaaagtattagcaaaagcgattttagatcgatgcgatgctttagacggtgttacagatggactggttcaagacgttgaggcttgccgtacagcttttgatattcataagcatgtaaccgtttgctcaagcacaagagacggtacttgtttaagcaccgaacaaattgatgtattagccaacatttaccgtggccctgtaaattcggctggacaagccctctatgcaacccagcctttcgaccccggtttagtgggaagcaactgggcaagctggaaattcgaatcttcggtgggaacagcacgtgaccccgttgcagtcggcattctttttcaggttccaccagacccaactgtgactcaaaactctagacaatttgcctttaattttaacttcgataccgactatccaaaactatcagcaaccaatgatgtttataccgaaagttccatgtcattcatgatgccacccgatgaactcaatctagataaactccgtaatcacggtggaaaaatgattgtggtacaaggcacagcagacggcgttttctctgtagatgacacccaaaattggtacgatcaactgctacaacactataaaaatgatgcaaaaggtacagcacctgaatttgcacgtttctttagagttccgggcatgaaccatacccgtgatggcattgcgaccgaccaatttgatgcattgactgctttagtcaactgggtggaatatgggcaagcacctgacaaaatcattgcaactgcacgcggtgcaggtaacccgagtggtcaagtgaatactgaaattccacaagactgggcaccagaccgtacccgtccactttgtccttacccactgattgctcgttacaatggtcaaggtgatagcgaaaaagctgaaaactttagctgtaaataa

SEQ ID NO: 43696 - DNA, 390 bp, Acinetobacter baumannii
atggatcaaaaaactttagaacacttaccgcccatccatcagcatttgggtggacataatatccattggaatgaccaaaacactgaactaaccatccactacacggcgctagaaagctttaccaatccacgcggcaccgttgaaggcggcatgatctgcgccatgcttgacgatgtgatgggactttttgcatatctcgctaatgaccgtaaaccagccaccaccatcaacttaacaatggattttttaaggccctgtgctgtgggcgaagtcattacaaaatgccgattcattaaacaaggcaaaactgtactaaatctcgaaagtgaagcttggcaaaacaacaaaatgattgcacgaagcacagctaattttttggttttagattaa

SEQ ID NO: 43697 - DNA, 537 bp, Acinetobacter baumannii
atgaagaaagttgtaacactactctgcggaattagtctgattgccctgactcatgccgcaactcaatataacccaccacctattcagcttgagcctttagcaaaatttagtgttgatctaaatgcgcctgtttgggaattaggcacgaccagtgatgcaggtaaacgtcgaattattcccattacaggtgggacatttgaaggcaaatcccttaagggccgcattttaaataatggtgcagattggcaaatcgttgacagtaaaggactggccattattgatacgcgatatttgttagaaaccgatgacggtgcgcttatttaccttcaaaccaaaggttaccgccatggctcggcagaaacactaaaacagcttgcccaaggcaaagatgtcgacccgaaaaactactatttcaaaattaccatgcagtttgaaaccagctcaccaaaatactcatggcttaaccagaccgttgcggtaggcagtgcaatgcgcttgggtaaagcagttatttatgatgcctataccgtgaaataa

SEQ ID NO: 43698 - DNA, 1251 bp, Acinetobacter baumannii
atgtcgaaattatggatgtactctacccttatgctctcaggttcagtgtgggctggcagttttattgataacagttcagtagaactcaccacgcgaaatttctattttgaccgcgactaccaagagcaatctgcttaccctgctgccaaggactggacacaagggtttattcttaaagccaattcaggttataccgaagggactgtcggtttcgggctggatgtgcttgcaacagcaggctttaaactcgatgccgatgccgagcatggcggtacaggaaacttacctagagatacgcgaaccaacgaacctgccgactcttatggcgaaattggagtcacagcaaaagctaaaatgagccagactgagctacgcattggtacactcatgccaatgaaccctgttttagtggcgtcacctgctcgtttgcttcctcaaacttatcgaggaatttcactaaccagtaaagatattaaagattttgatttacaagccgcatacctcgataaagtgaatcatcgtgattcgaccaattatgaaaaaattaaaatttctggggtgaatggacgatttaaaagtgccgaaactgatggactctattatttaggtggaaactatcagtttaatcctgcattgaagctcaccgctttttacatggatgttgatgatctttataaccaaaccatggtcggtgcattacaccaacataaaattaatgacaccaccaactttagctcgcaattacgttactatcgcagccgagatgacggacaggcaaaagcaggcttagtcgataatgacctctatcatgcgcatttcgaactcaaacatcaaaaccataaatttatttttggaaccttccaacatcacggcgacaccgcgtttccatatttgacgggaggtgaaacgggtctactcattgatacatggccgggcgagtttttgaacccaaaagaaaaagcctatagcttccgttatgaatatgactttaaagattatgttccgggtttacgttttatgacccgttacaccacaggtcacaatatttatgcacccaatttaggcggaaccaatctaaaagaacgcgaaacagactttgatttaggctacaccattcaaagtggctggttaaaaaatctagggttacgcgcacgctacgccatttatgacaacaacatgctctctacagccaatatcaaacctgtaaatgaaacccgtctcaacatcgactacacatggaaatttaaataa

SEQ ID NO: 43699 - DNA, 1140 bp, Acinetobacter baumannii
atgccacacgatacagaatttgaactatttcgggacagctatcgcaggttcttaaaagaacaggttgctccttactacgaacaatgggaacacgatggtcttatcccacgtgacctatggcttcgtcttggggaaaatggctttttgtgcgtcgatgtgcccgaggaatacggtggctacggtgctcctgtgcactattcactcatgctggttcaagaaacggctcaagctggctttgcatctttggcagttgccattggcgggcaaaatgagttggtctcaccttatctgcaaaatattggaactgaagagcaaaaacgttattggctacccaaaatggtgacaggtgaagtcgtcactgcaattgccatgacagaggccaacgcgggttcagacttacaagccatacgcactcaagccattttagaaaatgatcattaccgtattaatggttcaaaaacatttatatcaaatggcttgcatgccgacctgattgttttggtggcaaaaactgactctcaagctaaagcaaaaggcatttcaatattattagttgatgctgctttagacggcgttaaaaaaggtccctctttacaaaaaatcgggctgcatgcccaagatacagccgaactattttttgatgatgtttgtgtgctggcaactcagcgtttgggtgaagaaggacaaggctttgcctatttaatgcaagagttacctcgcgaacgtttaagcatttcaatgatggctttgggggcaattttaggcgccatcgaactgtccaaagactatgtgctggaacgtaaagctttcgggcaacctttaagccaaatgcaaaacacgcgctttgttctcgcaaatgcgcaaatcaaagccaaagccgctcaagcttttgtagaccaatgtgcagcgctgtatcaacaacaccagctaagcgtgactcaagttgccgcactgaaatgctttattaccgatgtccaatgtgaagtgattgatcaattacttcagctttttggtggctacggttacatgcaggaatacccgatttcacgcttttttgtggatgcgcgggtacaaaaaatttatgggggaaccaatgaaattatgaaagaaatcgtcgcccgagaactgctcggaaaataa

SEQ ID NO: 43700 - DNA, 1878 bp, Acinetobacter baumannii
atgcaaatgaatgccactcaatcacaagaccgcgaacggttcgtaaaattagggcaacacgatattcattatcactataaagatcaaacgctctatatcagcccaaaagagcaattaaaaccgtatccacaaaaactgacagatcggttaattcattttgcacaaaccaagcccgaccatatttttgcagcaaaacgtaatgctcaaggcgaatgggtcaaactgagttatgcagaagttctacaacgcgcatggcacattgctcaggctttgcatgaccgtaatttaagccaagaacgaccactcgttattttaagtggtaatgatctcgaacatttaacgctctctatgggtgccatgctggcgggtgtgcctttctcggctatttcccctgcctactctcttatttctcaagacttcggcaaactcaaacatgtgtttgaagtgctcacacctggtatggtttatgccagcgatggacaagcttttgccaaagccattcaagcatgtattacatccgacattgaagtggtgaccaataaagggattgtgggcgatcagatctgcacatcttttcaatcactgttagatacgtcagttacaaatgttcaagagttttaccaaacccttgatgaaaaccagattgccaaatttctatttacatcaggttcaaccaaattgcctaaagctgtgccgaccacacatttaatgttgtgtgttaatcagcaaatgttattgcagactttccctgagtttgaagaaacgccgcctgtcctactcgactggttgtcttggcaccacacatttggcggcagtcacaatgtcggcatcgcactctataacggcggtacgatttacattgatgatggcaaacccgttgcaggaaaatttgacgaaaccattcgtaacctcaaagaaatttctccaactgtttatttaaatgtgccaaaaggttgggaagagctcaccgaagctttagaaaaagatgaagaattaagagaccgtttttttgccaaagttaaaattttattctttgcaggcgcagcgctttcagaagcgggctggaacagactcgataaaattgctcagcaacattgcggagaaaaaatccgcatcatgagcggattgggtatgaccgaaactgctccctcttgtgcttttacaactggcccacgtgtgatggctggctttattggttaccctgctccgggatgtgaaattaagctagtgccatgtggtgacaaacttgagttttgcgtccgtggcaaacatgtcatgaaaggctattggcgcttaaaggcggaccaacaaagtactatttttgatgatgaaggctttttccatacaggcgatgccgttcgtttagtcgacatcaatgatccaaccaaaggcctaatgtacgacggacgaattgccgaagactttaaactcaatacaggcacttttgtgaatgtcggcacactacgcaacaaagtactgattcaaggtaatttactgattcaagatgtttgtattactggttcaaacctgaatgctgttggttttctgatttttccaaaattagaagcttgtgctcaatatgcaggtcttaagcttggtgatcattctgcaacagagatattacagcatcctaaagtccagcaatggttccgccaatttttaacgacctttaataaagatgcgactggcagttcaaatacagtctcaatgctttatttaatgaccgagccacctcagttagatgccggcgaagtgaccgataaaggcaacctcaatcaaagcagtattaccaagcgtcgtgccgctttaattgatgaactttatcaaaagcagactgataacccactgattattcgggtgcccaccttaaaacaataa

SEQ ID NO: 43701 - DNA, 1452 bp, Acinetobacter baumannii
atgcaaaatgtacagttacttattcacggtcaatctgttgatgcatcaaatcaggcaacttttgagcgtattagtccaattgatggaacggtagcaactcaagctgctgctgcaacattggaagatgttgatcgtgcaatcgattcggcacaacaagctttcaaagtatggtcgaaactctcgcctaccgaacgccgtttacgtttattaaaagcagccgatttaatggaccaaaagaccgagcaattcattgaaactggaatgcaagaaacaggttcaactgcaacatggtatgggtttaacgttcaccttgctgccaacatgttacgtgaagcagcagcaatgaccacacaaattgacggaagcctgattccgtcagatgtgccgggcaatcttgcaatgggtgtacgggttccttgtggtgtgattgtaggaattgcaccttggaacgcccctgtcattttggcaacacgtgcgcttgccatgcctttggcttgtggaaacacggtggtattaaaagcatcggaagcttgtccagcaacacatcgtctcattggtgaagtgttacatgaagcaggtctgggtgaaggtgtcgtgaatgtgattacgcatgccgccgaagatgcaccacaaatcgtagagcgcttagtgtctcatccagctgtgaaacgcattaattttaccggttcaactaaagttggaaaaattattgccgagactgctgccaaatatttaaaaccagttttactcgaactcggtggtaaagcccctgttgtggttttaaatgaagctgacattaatgaagccgtaaatgcagttgcttttggagcattctttaatcaggggcaaatttgtatgtcgaccgaacgtgttttggttcaagataaaattgccgaccagtttattgaaaagctgattgaaaaaacccgctctattcaagcaggtaatccaacttccaaagacaatgtactcggcgtattagaaagtcgccgcgctgcaaaccgtattcagcatttgctggaagatgctcaaaacaaaggggctgacttacctttaggcatccatattgaagataccaccatgcaaccgacgctggtgctcaatattaaacctgacatgctgctttaccgcgaagaatcatttggacctgtatgcacagttcaacgtttttcaagcattgaagaaggcatagcactggcaaatgacagcgagtttggtctgtcttcggcagtgtttagccaaaatatttcacaagcattagaagtcgctaaacagattgattcgggtatttgtcatattaacggcgcaaccgtacatgacgaagctcaaatgccatttggcggaacaaaatcgagtggatacggacgttttggtagtaaagtctctgttgccgagtttaccgaactacgctggattaccattcaaacccaatcacgtcattacccgatttag

SEQ ID NO: 43702 - DNA, 834 bp, Acinetobacter baumannii
atgagttatgaaaaccgctgggaaacagtagatgttaaagttgaagatggaattgcatgggtcactttaaaccgccctgaaaagaaaaatgccatgagcccaaccctcaatcgtgaaatgattgatgtgcttgaaacccttgagcttgatcaaaatgctaaagttttggttctgactggtgcaggcgactcttggacagcgggtatggatttgaaggaatatttccgtgaagtcgacactcaaccagagattttccaagagcgtattcgtcgtgactcatgtcgctggcagtggcaacttcttcgtatgtattcaaaaccaaccattgctatggtcaacggctggtgcttcggaggcggtttctcacctttagtggcgtgtgacctagcaattgcagcagatgaagcaactttcggtttatctgaaattaactggggcatcccaccgggcaaccttgtaagcaaagcaatggcagatacggtaggtcatcgtgcatctttgtattacatcatgacgggtaaaacctttagcggtaaagaagctgaaaccatgggacttgtgaacaaaagcgtaccgcttgcccaattaaaagcagaagtgactgaacttgcaaattgcttactcgagaaaaaccctgtggttcttcgtactgctaaaaatggctttaagcgttgccgtgaactgacatgggaccaaaacgaagattacttatatgccaaactcgatcaatgtatccaccgagataccgagaatggtcgccaagaaggtttgaaacaatttttagatgaaaaatcaattaaaccgggtttacagagttataaacgtactggttaa

SEQ ID NO: 43703 - DNA, 1233 bp, Acinetobacter baumannii
atggaaaaaatatcaggacagccttcaagggcaaaaatcacgttgctactgtgctttgccatagcgatttttgaaggatttgatcttcaatcaatgggggtagccgctccacgaatgcgggctgagtttatgttagataatgcccagatggcgtgggcatttagtgctgcaattttgggaacactcccaggcgcaatattaggtggtcggtttgccgatattgtcgggcgtaagaaaattctgatttttagtattttactttttggaattatgtctttgctaaccgcctatgccgccaattttagtctgttgctactcattcgtttttgtactggtttgggaatgggtggggcattacccatgatgattacacttgcttctgaagctgtacctgaccagcacaaaggcactgcagttagtgtgatgtatagcggcattccttttggtggcttactcacttctgtggttgcgatgtcgttggcaggcgatgcagagtggcgtcatattttctatatcggggggattgcgcctattttactaatcccactgattatgcgctttttacctgagtcaaatgactacctgcaacgcaaagttcaagcacagcaaactacgccattctttgaggttttatttgccaaagagcgtcgtatgtcaaccattcaactttggataagttttttctgcacattggtggtgttgtacttcttgttgaactggttaccattgctgatgggtgcgcagggattatcaaaactacaggcgaactatgtacagatgggctataacgttgggggaattttaggttcggttctgatgggcatattgcttgataaattacgcatgagctttgtgattaagctaatttatctcggcattttattctcactatgctgtttagcaatttctccaaccgttgctttacttgcactttcggcagtgggttgtggcttattcattgtgggtgggcaatcggcgttgtatggtttggctgccatgtattatccaaccgaaatgcgtggaaccggagttggcgctgcggttgcaatcgggcgtattggttcgtttgctggacctttaatggctggttttttactctcgcttgggcaaagctcgaccattgtgattggttcaagtattccagtgattttaattgcagcgatctctgcattacttcttgtcaaaaaacctaaacagcctgtacatttagtacaaagctcaggtgctcgctaa

SEQ ID NO: 43704 - DNA, 459 bp, Acinetobacter baumannii
atggtacgttcgaatttagttcaaaaaaaagtagaagatgagcctaagttaagttacatgattgctcgtgttgaccgaattattagtaaacatttaacagaacatttaaaagagcttgaaattaccttaccgcaatttaccgcactttctgttttagcttcaaaaagtaatttatccaatgccaagcttgctgagcgttctttcataaagcctcaatctgccaataaaatcttgcaagatttactggtgaatggctggattgagaaaaaaccggacccgacacatggccgccgtattttaattaccctgaccgaaagcgggattgaaaaattaaacaaatgcaatgaagtggttttaaaagtcgaagaaaaaatgcttgaaggcattgatattaacttggcttatttaattcgtaataatctcgatattatggtgaataatcttaaaaattttaaataa

SEQ ID NO: 43705 - DNA, 681 bp, Acinetobacter baumannii
atgtcttcaggacaacaagttttactaaaactaagaaaaatgattatttcaggggaacttgaaggcggtgccagaattgccgagattcctactgccgagttacttggcgtttcacgccagcctgttcgtatagcctttcggttgctcgaacaagaaggtctcctcattaaaaacccaactcgtggttatacggttcgtgaaatttccggaaaactggtgcatgacgcacttgaagtacgcggtgtgcttgaagggttggctgcgaaaactttggcagagcaaggcttaagcgaagatcagaaaaagacgttgcaacattgcattcaggaaactgaaaaactctttaatgaaaaagacgagtttggtgatgctgagctagaacgttatcatcattttaatgtcatctttcatgacaccattattgagggggcgcaaaacgttgcgctcatccaagccttagcaaaaaacaaccaattgccaatggcttctgcccaagccattacctatgaccagaaccaagctttatcggaatatcgccgtttgcactatgcgcatttacagcattgttcgattttcgatgcattggtaaatcgtcaggcagggcgtgctgaaacattaatgcgcgaacacagtagtgtggtgattttaggtgaaaccctaagaaatgttctcagcgcttaa

SEQ ID NO: 43706 - DNA, 945 bp, Acinetobacter baumannii
atggacgttatcattcaaaaaattcaccagctcaccccgactattcgtgcgtttgaattggttacagcaaatggtacagagctgccgagttttgaagcaggtgcacatattgatgtgcatctaaaaaatggcctcacccgtcagtattcactttcaaactgctgcagtgaaaaacatcgctatgtcattggtgttttacatgatgccaattcacgtggtggttcacgttgtatccatactgaatattgcgaaggcgaccatttaaagattggtgaaccgcgtaatttatttgagattcacccacaaaccaaacaggcagttttatttgctggtggtattggtattacccctattttgtcgatggcatatcggcttaagtcagccaatattcctttcgaattacattactttgttcgtagtcatgaaatgattgccttctatggcaacttaaccgaacactttggtgaccaagttcattttcacattcaagaccaaccagacaccgaatgtaatatggcagaggttttgggccaagcttcacctgataaacacttatatgtgtgtggacctacagggtttatgcagtttgtcatgagctcagccgaacaagcgggttggcatagcgaacagttacatcaagagcattttgtcgcgcaaaaagtagatacgtctaatgatgaagcttttacaattgaagtgaaaggtacgggccgccgaattgaagtattgccagagcagactgcaacagaagcattaattgcaaatggctttaatattcctgtttcatgtgaacaaggtatttgcggtacctgtattacccgcgtggtagaaggtatacctgatcatcgggatctatttatgaccgatgaggaacatgccctaaatgaccaatttacgccttgttgttctcgtgcaaaaactaaacatcttgtgatcgagctttaa

SEQ ID NO: 43707 - DNA, 1077 bp, Acinetobacter baumannii
atgtttattaaaaatgcttggtatgtcgcttgccgtccagaagaaatccaagataaaccattaggtcgcaccatctgtggtgaaaaaatcgttttttatcgtggtaaagaaaaccaagttgcagccgttgaagatttttgtccgcatcgaggtgccccactctcacttggctatgtcgaagatggcaatcttgtctgtggttatcatggcttagtcatgggttgtgacggaaagaccgtttcaatgccagcccaacgtgtaaatggtttcccttgcaacaaagcatatgcagttgttgaaaagttcggctttatttgggtatggccaggtgaaaaggctttagcagatgaagcaaaactgccaactttagaatgggcagatcatcctgaatggagctatggcggaggcttgtttcacattcagtgcgactatcgcctaatgatcgacaacctaatggatttaacccatgagacctatgttcactcaagcagtattgggcaaaaagaaattgatgaagccctgccagtgactaaagttgagggtgaccatgtcattaccgaacgctatatggaaaatgtgatcgcacctccattttggcaaatggcccttcgcggcaatcatttagcagatgatgtacctgtcgaccgttggcaacgttgccacttctttgcgccaagtaatgtccacattgaagtaggtgtagcgcatgctggacatggcggttatcacgcaccgaaagacaaaaaagtttcctcaatcgtggtcgattttattacaccggaaactgaaacatcacattggtatttctggggaatggcacgtaacttccagccagataatgctgaactcaccgaccaaattcgtgaaggccaaggcaaaatctttactgaagatttggaaatgctggagcaacagcagcaaaacattttaaacaatccacatcgcaagttactgatgctcaatatcgacgcaggcggtgttcagtcccgtaaggtcattgaccgactccttgccgaagaaaataaaacacctcctgaaacgtccacacagaagtttccaaacattcggattatttaa

SEQ ID NO: 43708 - DNA, 1347 bp, Acinetobacter baumannii
atggaaagagatgttctaagtgagattaatcacaataatatgagccgttatcaatggttcatcattttgatttgtatttgtctcaatattattgatggctttgacgtgatggtaatggcttttaccgctccatctgtatcagcagaatggtcactttcaggcgcacaaattggcttattgctgagttcaggcctttttgggatggctgctggttccatttttctcgcacctttagccgataaaatcggtcgccgtttactcatcttagtttgtcttgtgattgcaggtcttagtatgttgggctgtgctttagtgcaaagtcacggcatgttggcagtacttcggtttattaccggaattggggtaggcgggattcttgcgagtagtaatgtcttggcaagtgaatatgccaacgctcgttggcgtagtctcgcagtgagcttaatgtctacaggttatggcattggtgcgacactgggcggagtactctcactggctttaattgagcatttaggttggcgttcaatctttttggcagggggcatcacaaccatagtgatgttattgattagtgcgtggttattacctgaatctttagattatttgttggcgaaaagaccaaaacaggcactagaacgtattaacgcaacagtgaaccgtatgggtttaactgctttaaaagctttaccttattacggccagaataatcaaaaaaatacaggtgatattggtaaattattttcagggcagcaggggttccagacactttgtctttggtttgcattttttttagtgatgtttggcttttactttgtcatgagctggacaccaaaaattctgatttcaatggggatgtcaccagagcaaggcgtaagtaccggtattttaattagtattggtgggattttcggagcagccattattggtttattggcatcgcgtatgaaaatattctatgccctaagcttatttctgggattaaccgctgtctgtgttttcctatttgtcgccgtttcatctcaagtgagcattgctctcatagtcggtttattacttggcacactcattaatggctgtgtggcaggtttatattctatttctccaacgatttacgatgctgaaatccgtagtcgcggcgtgggttatgcaattggttttggtcggattggggcaatcttatcgccaacggttgcaggcattttcttagataaaggtattgcacctgcaacgctgtatgcctattacggtgtggtgtttattttggctattttcctgattttgagtttaggtagcgctttttaccgaagtaagaaagagcaaaacttctcacttaaaacagcaccttaa

SEQ ID NO: 43709 - DNA, 1281 bp, Acinetobacter baumannii
atgaaaaagacaccattatgggtgggggtatgcttgtgcccattatttagtcaagttgtgcatgccgagtttattgcagacagtaaagctgagctgacactccgtaatttttactttgaccgagactataaaaaagatccatatccctatacagcagccagagattgggcgcagggtttaatttttaaaggacagtcgggttataccgaagggacagttgggttcggagttgatgtactggcaatggcaggttttaacctgatgggaagccgtgctgatgactatgcaaggagtggcttattaccagtgaataccgataactcgcgtgatgattattatgggaaaattggtattacagggaaggctaaatttagaaaaaatgagctttttgtgggcgatttagttccgcaattaccaaccatattttcatcgccagctcgtttgttccctcagacttaccgtggtatccgctttgtttcaaatgaaattccaaatcttcaactcgaagggttttatgtcgacgaagtacggcagcgtgactccattcgttataccgatgttggaacagacaatatcaatcatcgatttaacaaagctgccaccactgactcgttttatactttaggtggaagttatcagttaaaagattaccgtttacgtgcttatcatgctgaactcaaagacatttaccagcaacaatttttgggctttaacggcaaacaacctttgaatgaccagcttaactttttaagtgatgtgcggttttttaatagtgaagaaactggaagtaaaaaaataggagaggtcgataaccgacatattagtggcttatttggtttgaactatcaaaatcatacggtttctttgggctacatgcagtcgtttggctcgactggtctgccatttttgtcgggaactgaaagtccggttgtgcttgattttatgagttcggactactcaaataaagacgaaaaagtctactcgattcgttatgaatatgactttaaaaatgcacggataggggatgtttcattaaacggactacgttttatgacccgttatgctaaaggtgaagatattgatttgttgcaatatggcgatcagcgatttaaagaagattcgctagagtttgatttgggttataaaattccagaaggcaagttaaaaggcttaggaatgcgggcccgcttttctcactaccgtaatgacatgccaacgaatatgactttccactcggcaaatgaaacacgtttgaatgtcgattacacctttaaattttaa

SEQ ID NO: 43710 - DNA, 1671 bp, Acinetobacter baumannii
atgacaataaacaattatgactatgattacctgattattggttcaggctttggtggtagtgtttctgcttgccgtttaaccgaaaaaggctactcggttgccgtaatggaaatggggcgacgctggaaagctgaagattttgctaaaaacaactggaatacccgccgctggatttggcgtccgggcatgaaacttttcggttatttcaacatgcgtttttttcgccatgtcaccattatttgcggtaatgccgtaggtggcggttcaattacctatgccaataccctactggttccacctgaacatatttgggatgaaggcacatgggcagatgccgcggactggaaaaatgaaatgcctcagcactatgctgaagcagaacgtatgcttggcgtgactgataataaaattttcggccctgccgaccacatgctaaagaaaatgggtgaagcagtcggtgttggccatacatttaaacctactcgtgttgccactttctttccaccggaaggtgaagaaggtggcaagacctaccccgacccttattttaacggcgaaggtccagaccgtggcacttgtaccgcatgtggcggttgtatgacgggttgtaaacacaacgcaaaaaatacattagataaaaactatttgtactttgccgaaaaaaatggcgccaaggtttatgaagaaaccaaagtagttgatgttaaaccactcaatggtaaagccgatggcagcgatggttatgaagtcacgactgaatgttcaagctcatggtttaacaaacaacgtcgtacttggcgagttcgtaatgtaattttctctgcatcttctttagggacacaagagatgttgttccgtttaaaacagtccggttctctgccaaatatctctgatgatttaggtaatcgcgttcgtactaatgccgagtcgattttaggtgttcgcttttttggtaaagatgtcgacatgagtaaaggtgttgctattggttcaagtatttacattgaccatgacactcacattgaagcgactcgctaccaaagtggttcagatgccatgggccttatgtgtacttacatggctaaaggcaaaccgggttggacacgtattttcttttggttatgggcactcatttgccatccatttattttccttcgcatgagtaatcctgtcagttttgcacgtcaaaccttaattttccttgtcatgcaaactgccgatgcctcaatcaacatgcgcttgaaacgtaactggttctggccttttggcaaggtgttatcgagcgagggtaaaaagctacctgtttatattccgcaggccaatgcatttaccgaaaaagttgccaaaatatttaatggccaccccatgacgaccattaccgaaattttgtttaacgtaccttttacagctcactgtatgggtggttgtgcaattgcttcaagtccagagcgtggtgtggtagatggacaaaatcgggtgtttaactataaaaacttatacgttgtagatggttcaatgttaggtgcaaatttgggggttaacccaagtctcaccattacagctctagcagaacgtgcaatgtcttatattccggctaaacatactttagaagaacaagcttatactcaaactcataatgaagttttagaagcagcaaaagtatctgcttaa

SEQ ID NO: 43711 - DNA, 894 bp, Acinetobacter baumannii
atgaagcaacttcttgcatggaccatccgtaccacactacgtccagctttatcccctaaaacaccactaaagctacaacgtttttgtagtgatgcagccagtgctattgtgcttgggcctcgtggttatcaaacaaaaaagcaaataattgctcaagttcctacgcttcatattcggcctaagaccattaagtcaggtcgcggtattttgtatttacatgggggtggctatgtcgtgggcagtagcaaaagtcacgctaaacttgccgctcaggttggacatatagctcaagcacaagtctggttacctgaatatcgtctggctccagaatacccaagccctgctgctattgaagatatcgttgctgtctataaagctttacttgcttatggacaagaccctaaaaaacttgtaattgcgggggactcagctggtggcgggctgagcttaagcaccgtaattgctttacgagatgcgggtttacctttaccagcggctttagttttactttcgccttgggttgacttaagtctttcaggaaacacaataaaaactcatgctgctcaagatgcgatgttgtcagagggctggttagcttggtgtgcaaaaaactattgcggccaaaaatcggcaaccgatccaacatgttccccactctatgctgacttaaccggattaccgccaattctgatccatgtcggtaccgaagaagttttattagacgatgcaaaacgtcttgctgaacagactgaaaaatacggcattccgacgaacttaagggtttatgaccaagtcggacatgtttttcaatttcatgcaggtatactaaaggaatctaatgactccattgagtgcattgggcaattcattgataaacatacagagtcaatataa

SEQ ID NO: 43712 - DNA, 855 bp, Acinetobacter baumannii
atgaagtcttttaaaaataaagtcgcagctgtgacaggtgcgggttcaggtattggacaagcaattgcaatcgccctcgccaaacaaggctgtcatctggcactttctgatattagtgaagccgggttagccaaaacagtcgagctattagcaccctattctgtcaaagtcaccactcaaaaagttgatgtggctaaacgtgatgaggttgcaacttgggcaaaggcagtggtagatgagcatggccaagttaacctgatttttaataatgctggtgtcgcaataggtagcacggctgaaggtgtgagctatgaagatcttgaatggctcattggtattaatttttggggcgtggtttatggcaccaaagagtttttaccttacttaaagcaaagtggtgatgggcatattattaatatttccagtatgtttggcttaacagctcaaccgacccaaagtgcttataatgcaagtaaatttgccgttcgtggttttactgaatcattgcgccaagaacttgatatgcaaaatgctggtgtgagcgcgacttgtgtgcatccgggtggtattcgcaccaatattgccaaagctgcacgtatgaataatagcgtccagtctttaggaatggacccgctaaaaagccaagatgctttcgataaattacttcgcacccctgctgatgatgcagctcaacaaattttggaagctattcgtaaggaccgccgccgtttacttattggagccgatgcaaaagccgttgatgtaattcagcgtattctgccgcaaggttaccaaaagatctttgcagccgcgacagcttggcaaactcgcctactcaacaaatcagcaaaataa

SEQ ID NO: 43713 - DNA, 1488 bp, Acinetobacter baumannii
atgtttaattcatcgtctaattcaaataaaaatgtacgcatcgccattattggcactggctttggtggtctaggacttgccattcgactcaaacaagcaggttttgaacaatttactctatttgaaaaagctgccgatgtaggtggtgtctggcgtgacaacacttatccgggcgctgcatgtgatgtgccgtcacatctttattctttttcttttgaacaggaacttggttggaaaaatcgctacgggacatctcaagagatttatcaatatttacgtcactgtgccgataaatatgaccttcgcccgcacatcaaatttaacactgaaatagccagcgccgaatttgatgcactgcaaggtatatggcacatccaaagtacaactggtgaacagtttgaagctgaatttttagtgggcgcggtaggccaacttaaccgccctgcctatccaaaacttaaaggcattgaaaacttcaaaggtaaggcatttcactcagcacgttgggaccatgactatgacttaactggtaaacgtgttgcagtcattggcacaggcgcaagcgcgattcagtttgtacctgaaattgcaaaacaagtggctcacctagacgtttatcaacgctcagcgccttatgttattccaaaaccggatcgggtttaccaacctttagagaaaaaagctttccgtaaactgccgatcttgcaaagtctagaccgcgccttgcaatatggccatcatgaaattcgcctacttgcctttacaacttcactcaatgaaatgcctttggtggaatacatattccagcgccacattcgaaaagttgttaaagatgggaagttacgccatcgtttaatgccggactatccaattggttgtaaacgtattttaatctctaaccactggtatgaaacgctgacccaacctcatgttgatgtgattgatacaggtattcaggaaattactgaacatggcattttagatacggaaggaaaactgcgtgaagttgatgccattatttacggtacaggttttacggcgactgaatttatggcgccaatgcaaattactggacttgatggacgtacattaaaagacacatggaaaaatggtgctgaagcctatttaggtctgacagtaaacggatttcctaacttctttatgttgtatggaccaaataccaacctcggacataactcaatcgtctatatgattgaaagtcaggtgaattatattctagatgcactgcgcactactttgaaaaataacctgctgttcaccaacattcgtgccgaaattcaacacgagtttaatcaaaatattcaggaaaaaatgaaaaaaacggtgtgggcgcaaggctgtaccagttggtatcaaactgctgatggcaaaaataccaataactggccaggttttacccttgaatatcgccaacgcactcgtcgctttgacattgaaaactacactcaggtgtcggctatttcttaa

SEQ ID NO: 43714 - DNA, 1014 bp, Acinetobacter baumannii
gtgaagtatgcatgggcatttgaacgcagtgtacatagtgttcggttaatggctgatttcgcgatggaatcaggcatctcttatcagataattttgcaagggactgggcttagccaacaacaattacttgaccctaatatggtggtgacaggccatcaggaattacagttgattcataacttggttgagcaactaggagacagaccgacattaggcttagaggtgggcacacgctatcatttcaccacatttgggccattaggcatggctctgatgagtagtgcgagcattcgtgaagcactggatttggctttaacctattttactttaacctttgcttttacccgctttgatgtgtcggatacaccacaaggaatccgtatcgaaattgatgagcaagatattccatcttcagtgcgtcaattcattattgaacgcgatgccgctgcactcattacggtacagcgagatttggtgcaggacaatttttgccaatatttggctttttctttccaacctaaaggtgatgccgagccttatcggaatttatttggggtcatgccagaatttggcgcagctaaaagttttgtaattcttgatccgcaaaaagtggatcaaaaattactcatggcgaatgagttggttctgcacactgcagaagaacaatgtcgtcaaatattagaaaagcgccaatcacaaaataaatttacaaccttagtgcaacagcagctgatgagtatgcgcggggaaatgccatctatggatatagtggctgatcgactgcatttaaatataagaaccctgcgccgtcacttggcatcggaaggaatgacttttatccagattcgtgaagaggttagacaggtcttagcagagcaatatttggcattaccaaaagcttcagttgaacagattgccgagtggttgggttatgcagaacctgccagttttattcatgcttataaaagatggcatgggaaaacacctcatgccatgcggttaaatagccaatag

SEQ ID NO: 43715 - DNA, 714 bp, Acinetobacter baumannii
atgaattcacccattttaaaccgtaccttaggtttattgagtggacaggttgtcggtcgatcacgttatgccgaggacttacttaatcaagctgttcaacacaatattgagcaatatgttttggttggagcgggtttagactcttttgtgctccgaaaatcacagcattatccaactttaaaaatttttgaagttgaccatcctgatactcaggctgccaaacaatctaaactcaaaaaattaggcgaacttccctctactgttgaatttgtttctattaattttgaaaaagaatctatctctgaagcgcttgcccgaagtcgctatgtacgaaaaactccggctttcttttcttggttaggcaccactcattatttaaagccggacactacgctacaaactttaaaaagtattgctgaatttgctgcaaacggaagcgaagtggtactcgactattcaaccgattttcaggaattaaaaggtattgagcgacttgggagtatgggcgttgcacagtttacccatttgctcaaagaacctttactaggtcaatttaaaccttcagatttacatcaggcggttgaaaaaatgggttttgaagtagtcgaagacttgtctggtgaagctattactgaacgttatttttataaccgtgccgacaatatatgccatacatcggcaacacgtttgctacatttgcgtttaaagaaataa

SEQ ID NO: 43716 - DNA, 162 bp, Acinetobacter baumannii
atgaaagaaggtcaatcaagtcgtactgccgaagccgctgctgctttacgtgcgaatcactttaaaaatacgacaaaccctgtattttcagatccctatgcttttgaaatgaccagtaaaggttggaaaaagctttatctacaccactcattgttaaattaa

SEQ ID NO: 43717 - DNA, 1011 bp, Acinetobacter baumannii
atgttccattcggcgaaatggaaccatgactatgaccttactggaaaacgtattgccgtgattggtactggtgcatctgccatccagtttgtgccccaaattcagcctaaagcaaaagaactgtttgtattccaacgtacagccccttgggtactgccaaaaccggatacagacttaggtgagttgagtaaatcaattattgccaaatacccaaaaatacaggccacttggcgccagactgtagcaggcaccttaaatgtcatcaattttggtttacgcaacccaaaagctttaaagcctgtcaattttgctgcaaaacaactattaaagttacaaattaaagatccggttttacgtaaaaacgtcacacctaactttgatattggctgtaaacgtattttgtttgctaacaattactaccctgcactacaagcaccaaataccacgcttattccacatggcctggttaaagtcgaaggcaatacggtgattgcagctaatggcgaaccccacgaagtagatgtgattatttggggtacaggttttgaagtatctcacccaccaatcggcaaacgtgtgtttaatgaaaaaggccaacgtttaaatgatttgtggaaaaatagttcaccggaagcttacttaggaactaacattgaaaatgtaccaaatgcattcttagtgttgggaccaaacgtactggtttatgactcatttattggtttggcagaagcacagctcgactatatcgtagatggtttgttaaaaattaaaaacaaaggaattagtaagttaaatgttaaggctgatgtaattaaaaagcacaacgacttggtgcaaaagcacttacaaacaactgtattcaatagtggtggctgtaagagttattaccttgacgctaacggtcgcaactttgcagcatggccgtggtcattgaaaaagcttaaacaacgtttgaaaaaactagatttgaaggattatgaagttacatatcaaatgtcaaagacacattaa

SEQ ID NO: 43718 - DNA, 288 bp, Acinetobacter baumannii
atggacgattggcaatgtaagtattgtaatggttacattatggttaatcattcaaggatagaggtaggggaaaaagtttactttttggtatataaattcgatgcaaaaaatgaaagaaaaaaactatataaaaaaggaactgtaattgcacgttgcgatagtattttacatatcgaatcaagaaaaaagacatataaaatagaggaggctaaagtctatcctttaggtgcacctatgccatttgtttataatatgttctggatatgtggttgtgaaaacagaccataa

SEQ ID NO: 43719 - DNA, 453 bp, Acinetobacter baumannii
atgagtgaaaggaatcaaagtcgtttgttaacggttggtgaggttgcaaaacgtagcggtgttgcagtttcaacccttcatttttacgaatctaaaggtttaattaaaagtataagaaccaatggtaaccaacgccgttttactctagtggtgttacgttacattgcgatcattaaaattgctcaaaaagttggtattccattagatgaaataaaacaagccctaagtaaatatccgatgggttctaaattaactgcacaacaatggaaagagctatctctcgattggcggaagaatttggatgagcgtattcaaaaactcacaagactcagagacgaaatggattggtgtattggatgtggttgtttgtcattagaacaatgtccattaagaaatcccaatgatgtgttggggcaagaaggtgccgggccgcgtattttagaaagaccatag

SEQ ID NO: 43720 - DNA, 435 bp, Acinetobacter baumannii
atgaaaaaaattatctttcttggtttagcgcttgtttcgttaacggcttgctcatcagtacaacataaagattcaactcctccaaaaattggttcaccaaatcctgctagtcaatattgcgttgaacaaggcgggaaattagaaattagaaatgaagcaaatggtcaggtaggttattgccatttgccaaatggacaagtcgtcgaagagtggaaattattccgtgataatcaggcgaactgtgtttcagaagaagctcaaaaattagttgggctatctggtttaaccgatgatcaaattaagcaaaaaacgaagtcagaaattgttcgtaaagttgctccaggtcaaccgatgacaatggattatcgttcaaatcgagtaactgtcacaattgatccaacttctaaaaaaattactcaagcaacatgtggttaa

SEQ ID NO: 43721 - DNA, 936 bp, Acinetobacter baumannii
atgagtaatatcttcacaggatgtatcccggcgctaatgactccatgtactcctaaccgtgagccagattttgatgcgcttgtgaaaaaagggcatgagcttattgaagcgggaatgagtgcggtagtgtattgtggttcaatgggcgattggcctttattgaccgaagctcaacgtcaagaaggtgtagcacgacttgtagctgctggtattccgacaattgtgggtactggggcagttaattcaaaagaagcagtttctcatgcagctcatgcagaaaaagtaggtgcacaagggcttatggtaattccacgtgtattatcacgtggtgcatcaccaactgcacaaaaggcacacttttctgcgattttaaaagctgctcctagcttacctgcggtaatttacaatagcccgtattatggatttgcgactcgtgcagatttgttttttgaattgcgccgtgaatttccaaacttaattggttttaaagagtttggcggcgctgctgatatgcgttatgcagctgagttcatcacttctcaagatgactctgtgacattgatggctggtgtagatactcaggttttccatggtttcgttaactgcaatgcaacgggagcaattacgggtattggtaatgctttgcctaaagaagttttacagttggttgaccttagtaagaaagctgcagcaggggatgcgaaagctcgtcgtttggcacaagaattatcaagcgctttagaagttttatcgtcttttgatgaaggtactgatttagtcctttattacaagtacttaatggtacttaatggcgataaagaatataccttacattttaacgagacggatgcattgagtgaatcacaacgtaaatacgttgaaactcagtatgaattattccgtacttggtaccgtaactggtcagctgaaatctaa

SEQ ID NO: 43722 - DNA, 909 bp, Acinetobacter baumannii
atgagtacgccaacagaagcaaaattttccctgacttattatacgggtttcttatctgtactatttgctgcttttctatggggtacggcaggcacagcagcatcttttgcaaagggcatcagtccacttgtaattgctactatttctgtgggcttcggtggtttaattcacacatttttaagtttaaaagctattaaaaaagattaccgaaagctttttgactataaaactaaagttttgattgccgtcattgtttctattctttgtccatttgctttttattcctcggtctcattagctggtgtttctattggtactgttatttcaattggctgcgcccctttgttctcagttatgcttgagtggctattagataaacgtaagctttctttaaaatggcttatcagttttattcttggttttttaggagtcgttttactctcatatgcaggcgaacacagtcaccaacatcaaggcgtccaatccgaacggctattaggtgtattttttggcttactctcaagtctgagttatgcaacatattcgtggattatgaaaaacttaatccataaaggcatcaactcaagagctgccatgggcgtgatctttgggatttcagcagttctgttattacctactttattaattacagcaactcacctatttaattatccaaataatatttgggtagccctttatatcccaatcgtacctatgttcttaggctatttattttttagctttggtttaaaacgtattccagccagtcaagccatgacgttagctttggtcgaaattcctgttgcagcgttattggcagttgttgtagtaggcgaaagtttaacaatgaatagttatttaggtttagttttaatattcctctgcgttattgtcctcactaaaaaataa

SEQ ID NO: 43723 - DNA, 684 bp, Acinetobacter baumannii
gtgacgctaccatcttttaatgtatcaaatcttggtgcaatgccttcggtatctgaagttattgtcaaatatattagagaagcaattattgcagggcatattgctgaaggtgagcctatccgtcaggatgaaattgccaagctatttaatgtcagcaaaattccggtacgtgaagccttaaagcaacttgaagccgaaggcttagtagagtttataaaaaatcgcggtgcaattgtgacccgaatctctgaagaagaattagctcagatttttgaagtacgggttatgttagaaacgaagctgattcagctcgccgtgccgaatatgacagaagaaacttataaaaaggcagatgaaatttgtaatgcctttattgataacatggatattggaagttggaccacactaaattggcagttacatgcgtgcctttatgaaccggcacagcgaccttatatgctcggattaattcgttcgatttacgataaaattgagcgctatttaagattgcagatgaatgtttccgaaggcaaatcgcgtgcaaatgatgagcacaaagaaattgtgaaagcctgtaaagccaaggatgttgatttggcggttaagttaattgaagagcatattaatggtgtttgtcaatcactttatgagcacttacctcatcataaaaatgcgaaaaaataa

SEQ ID NO: 43724 - DNA, 933 bp, Acinetobacter baumannii
atgaaaacagtaaaaattttggactctcatactggtggtgaaccaacacgattagtacttgaaggttttcctgatttaggcacaggagatatggaaagccgccgaaaaatattatcagaacaatatgaccatttccgtcgagcaaccatgttagagccgcgcggtaatgatgtgttggttggcgcattattgtgtaagccagtgaatcccaaagcgagcgcgggcgttattttctttaataacacaggctacctaggcatgtgtggtcatggcacgattggtttagtggcttcgttagcacacttgggaaaaatacaagtgggcacgcatttaattgaaactccagtaggtgatgttgaagcgacattgcatgaagaccattcagtgagtgtgcgaaatgtaccggcatatcgttataaaaaagcagtcgaagttgatgttgaaaaatatggaaaagttactggtgatattgcatggggcggtaactggttcttcttgattaatgatcatggtcagcgtgttgcaagtgataatttagatcaacttactgaatatgcgtggactgttagacaagcacttacggcacaaggaataactggtaaagatgggcaagaaattgaccatatcgaattatttgcaagtgacaccgaagcagatagtaaaaatttcgtgctttgtccaggcaaggcctatgaccgttcaccgtgtggaaccggaaccagtgcgaaaattgcttgcttggccgcagatggcaaacttgagccaggaaagttatggaaacaagccagcattatcggtagccagtttattgcctcgtatgagcaagcaggggaatatgtgattccaaccattcgtggtgaagcttacatgagtgccgaagcaactttatttatggatgaaaatgacccatttgcttggggtattcagctatga

SEQ ID NO: 43725 - DNA, 1104 bp, Acinetobacter baumannii
atgagaaccgatgccatcgtcattggggcaggcattgtaggtgcggcatgtgcttatgaattggctcggcaagggttaaatgtgcaagttttggatgctcgggttggtggtgcaacagccgcgggcatggggcatttggtcattatggatgacttggaagccgaattaaaacttagtcattggtcagttcagctatggcatgaattaggacacgaactttcggaagactgtgcctatcgccaaacgccaactttatggctggcaagtagcccagaagaaatgcagattgctgaggaaaaatatcaacgtctcactgcacaaggtgtccgttgccaacttcgaaacgcagatgaagttcatcagcttgaacctcacttaaagcagggtctttatggtggtttagaagtttttgatgatggaattttatatgcaccttgtgctgctgaatggttattaaaaaaatttccccacaaggttcaggttcaacaaactaaagttattcatattgaagaaaatcgggttcagttaagtgatggcacatggctagaagctgcgcatatcgttttggctaacggtattcatgcgacagatttttttccagagctaccgattgaacctaaaaaaggtcatttggcgattaccgatcgttatcccgaattaaatgtaaaacatacattggtggctttggcctatgcagccagcactcaagcgacaagtggaatttcggtggcttgtaatattcagcctagaccgacgggccagctttttattgggtcatctcgtcagtttaatacagttgatccgactgtagagccagaagtctttactcgggtacttaaagaggctgtcgattattttccagctttggctgatcttaatgttattcgggcatggactggctttcgcgcagccacacccgatggtattccggtaattggacaacatcctgcatttcaatcggtttatttagcggtaggtcatgaaggattaggtgtaaccacggcgacaggtacagcaaagcttattgcctcacacatatgtggtttaacttttgatatagatccagaaccttttttacctcatcgttttataggagctgcatag

SEQ ID NO: 43726 - DNA, 231 bp, Acinetobacter baumannii
atgattcagctttttattaacggccaatcggtttgtgtgattgagggtaccagtgttgctgctgctttagcacaagcgaagtcttatagtcgtttgtctgtctgtggtgaaaaacgcactccattttgtggaatgggagtgtgtcaggaatgccgtgtcaatattaatggactcagagtgcttgcttgtcagacgctgtgccagcaagacatgaaagtggaaacacaataa

SEQ ID NO: 43727 - DNA, 1263 bp, Acinetobacter baumannii
atggaaaaacaatatgatgtggtggttgtcggtgctgggcctgcagggttgtcagctgctattgcagccgccgaaagtggcgggcgaattttaatattggataataacccacaggcgggcggtcaaatctggcgcgctggaccgattttccctgtacctgaaatggcgcagcagaaatatcaacaaattaaggctcattctaatattgaatttatgtttggtgcgaaaattgtcgccgcaacttttgcaggccaattgcttgttgagcgacctcacgacagcctaaacttgtcttatcgccagcttatattgtgtacgggagcaagagaactgtttttgccttttcccggttggactttacctggcgtaacaggggcaggtggtttgcaagccttaattaaagcaggcacacctgtcaaaaatgaacgcattgtgattgcaggttccgggccattacttttagcaagtgcggatacagcaaaaaaagcagaggctcaagttctctatgttgctgaacaggcggcttcatcttccgttcgtaagtttgcactacaactttggcgttggcctgcgaaaataatacaggcgttatctttgccttatcgtttatatcaacctgacagttatgtggttgaagcgattggtcaggaacgtcttgaacgagtaaggctacaaacgccgaaaggaatcattgaaattgagtgtgatcgactcgcgtgcggatttggtttagtcccgaatactcaattagggcagttaatgggttgtcaaattaaggacaatgcgattacggtcgatgactatcaacgtacatcacagccacaggtgtgggcagcaggtgagtgtacaggttttggcggaagtgagctggcgatggtcgaaggtagcatcgcaggttatgctgctataggccaaaatgaaaaagcgagacaattatttgctcaaagacaacggtatcgtttatttgcacatctccttgagaaaagcttcaatttacgtgctgagttaaaaacacttgcacgctcagaaactattttctgtcgatgtgaagatgtgacttttgataaggttgccaagcgtagtagttggattgatgcaaaattacatacacgttgtggaatgggagcttgccaaggaagcacatgtgcaacagcagcggcctgcctgtttgattggcagttgcctaactctagaccaccattactgcctactcgtgtaaaaagcctcatggcgatgtctacttctcctttaaatcaaaaatga

SEQ ID NO: 43728 - DNA, 753 bp, Acinetobacter baumannii
atgactttggttcaaattccgaaactaactaccactttggaagatttcttaaaaaatctggaaagtatagaaccattgtttgatgctttatcttcggtggtgtttttcatcaaaaataccgaagcacgttatgtctttgtcaatcaaacattagtaaatcgctgcggtctaaaagataaaactgcaatattgggaaaaacctcttctgaagtttttcctcattcacttggaaaaatatatacatcgcaagacttgcaagttattcgccgcggtaaaaagttaacagagcaattagaactacatttatatgcaaaaaatcagtcgggttggtgtttaacttataaagaaccattatttgatgcggatggaaacttagtaggaatagcgggtatttctaatgatttaaatgtgcctgaaaatacacatcctgctttttataaaatggttcaggttgaggaatatattaaaaagaattacgccgaaaccattactttggcgcatttgaccgcaattgctggcgtgtcggtggctcagttagaacgttattgcaaaaaaatataccatttaacgcctcggcaaatgattagcaaaattcgtcttcaagtcgccactgaactattggcgacagatttaccaatcactcaaattggtttgcgttgtggctataccgaccatagtgctttttgtcgtcagtttaagttgcatacaggcatgtcacctactttgtatcgggcctctatcaaaaatatttag

SEQ ID NO: 43729 - DNA, 1290 bp, Acinetobacter baumannii
atgacgacaacactaaaaaaggtagtcgcggcctctatggtcggctccgtagcagaatggtatgaatttttcctttatggcaccgcttctgccctcgtctttggcgaacttttctttcaacaaactggcaatgctatagatggaattttggcggcctttgctctgtatgccgttggctttttagcaagacctctcggtggcctcgtgtttggtcactacggcgataaaattgggcgcaagaaattattgcaaattagcctgatcattgtcggtatcactacttttttaatgggctgtattccgacctttcatcaaattggctattgggctcctacactcctagtgatattacgtttaattcaaggttttgcttttggtggtgaatggggcggcgcagttattttagtttcagagcacagtccagatgatcgcagaggttattgggcaagctggccacaaactggtgtaccgctcggaaatttagtagccacactggttttattattactttcaaaaaacctctcacccgaacaatttctagattgggggtggcgctgtgcattctggttctcagcagtcgtggtactgattggtttatggattcgaaaaaatgtagacgatgccgaagtgtttaaagaagcacaggccaaacaacagcttcttgaaaagcaacaactcgggattattgaggttttaaaatatcataagaaatctgttattgcgggtatcggtgccagatttgcagaaaatattttgtactatatggtggttactttttcgatcagttatttaaagttagtcgtccataaagatacttcgcagatcttactgctcatgttcggcgctcatctgatccatttctttattattccttttatggggcatttaagcgatatatttggccgtaaacctatttaccttattggggctgtacttactgctttttggggttttgtcggctttcctttaatggatacaggcaatgactggctcattatgttagcaattgtgcttggtttatttattgagtccatgacctactcgccttactctgcgttaatgactgagttatttccaactcacatccgctatacggcgctttcattttgttatcaagtcgcacccattatggcaggttcgcttgctccattaattgccctaacattactcaaagaatttaatagttcgattccgatttctttatatttggttgccgcaagtctgatttctattgtctcgattttgctggtgaaagaaaccaaaggccgatctctagcttttaaagattaa

SEQ ID NO: 43730 - DNA, 1581 bp, Acinetobacter baumannii
atgttaaatattactggtcaaaattttattgcaggtcaacgttcaagtgcaggcagtaagtttgtattaagctacgatgctgcaacagatgaagcattaccctatcagtttgctcaagcaactcctgaagaaattgatcaggcagctcaagcagctgcattggcttatccggcttttagacaaactacgccagaacaacgcgctgtttttctagaaacgattgccagtgaaattgatgcgcttgatgaccagtttattgcaacagtctgtcaagaaactgccttaccagaagcgcgtattcgcggtgaacgtgggcggactacaggtcaattacgcctatttgctcaagtattacgccgtggtgactatttaggtgcccgtattgatttggctttacctgagcgccagccacttccacgtccagatttacgtcaatataaaatcggtgttggaccagttgccgtatttggtgcaagtaacttccctcttgccttttctactgcgggtggcgataccgcttcagcacttgctgctggatgtccagttattgtgaaggctcatagcggtcacatggcaacggccgaatctattgcaaatgccatttgtagtgcgattgagaaatgcgccatgccaaaaggtatctttagcatgatttatggtcaaggtgtcggtgagccactggtaaaacatcctgcaattaaagccgttggatttacaggttcacttaaaggtggtcgagctctatgcgatttagctgccgcacgtcctgaacccattcctgtttttgccgaaatgtcgagcattaacccaatgattttattacccgaagctctaaaagtgcgtggtgataaaattgcgaccgaacttagtggttcagtggttttaggctgcggtcagttttgtaccaatccgggtttaattattggaattaaatcaccggaatttagccaattccttgaccatttcaaggctgcaatggctcaacaaccgccacaaactatgcttaacaaaggcactttaagaagctatgagcatggtcttaaagaattactcgcacatgacaaaattgagcatttagcgggtcaaccccaacaaggccagcaagcctatcctcagctctttaaagccgatgtatctcttttactagagcatgatgaattacttcaagaagaagtgttcggcccaacgacgattgtgattgaggttgaatcggcagagcaactcgctctcgcgttaagcggtctacgtggtcaacttacagcatcattaattgccgagtcacaagattttgagaacttcgcgacacttattccattacttgaagaaaaagcaggacgtttgcttctaaatggttatccaacaggtgtggaagtctgtgatgccatggttcacggcgggccatatcctgcaacttcagatgcacgtggcacatcggtaggaaccttagcaatcgaacgttatttacgtccagtatgctaccaaaactatccagatcacttattgccactcgcccttcaaaatgccaatccgcttggtattgcgcgcttggtcaatggtgaaatgagtaaagctgctctttaa

SEQ ID NO: 43731 - DNA, 1572 bp, Acinetobacter baumannii
atgacaagtcagtttaaaaaacagttatctctaatggatcttacattcattggcttaggcgccattttcggttcaggatggttattttcagcaagtcatgtggcctctcaagccggccctgcgggtatattgtcatggattattgggggctttgccgttttaattctgggaattatttattgtgagttaggcgcagccttaccccgagcaggcggtattatccgttatcccgtattttcacatggcccattacaaggatatttattgggttctgtgaccgtcattgccttttcaagtttaattgcaattgaagtcgtcgctgcccgcgaatatgcagcagcatggttcccttctcttaccgccgtacatgatggtgttcgaactccaacgaccattggatggttgtttcagtttgcacttttatgcgtattttttgcattgaactattacagcgtaaaaacctttgcaattgccaacaacctcatcagtgcattgaaatttgctgttccggttttagtgatggttgcacttctataccattttaaacctgcaaacttttcaatgaccgagtttgctccaatgggcgctcacggcgtacaaggtgccgtatctgctggcggtattatttttgcgtatttgggtttaacgccgattatttcggtagcaagtgaagtaaaacgtcctcaatttacgattccttttgcactcatcttatctgtcgttttggcaacgattatttatgtagtgcttcaagttgctttcttaggtgcagtacctaccgatatgttagcaaatggttggtcaggacttagtgacaagttcccattaccttaccgcgacattgccatgttattaggcttgggatggttagcactcttagttgtttcagatgccattatttctccgtctggctgcggcaatatctatatggctgcaactccacgtgtcatttatgcatggtcaaacagtaatacattcttccgtatttttacacgtgtagatccaaaatctggtattccacgttatgcgttatggttaacgtttgcactttcagtattttggaccatgccgtttccatcttgggataaattaatttccgtagtttcagcagcgttagttttaagttatgccctagctcctgtcacagtgggtgctttacgccgtaatgctcctgagcttgaacgtccattctatgtaaaaggatttactgttctcgggccgctcgcttttgtcattgcgtcttttattgtgtattggtctggctggaatgtcatttcatggttattaggcgcacaaatcgtcttgtttgcactctatgtcatttttaagcgctacgtgccaacccaagaagtcagcttagcccagcagttaaagtcatcaacatggctccttgtttactacattttaatgattcttgcctcttaccttggcagcttcggtgatggcgcatcacacctattggcagcgcctttcgacaccttattcgtcatggtgatttctcttggttgctactactggggtatacgctcaggtttaccaaaagcactgattaaaaatgacgatgaagcttag

SEQ ID NO: 43732 - DNA, 1278 bp, Acinetobacter baumannii
ttgaagcaaaacgatttacaagcaacagctagagttcaggtgaagttatacggttcgctgtcggcaacgggtgtcggtcatgcgacagacaaggctgttctattaggtttaatgggttttgaccctgaacatattgatacccaagtaagtacaagcttgattgaagatgttctagaaaataacgccatccagcttaatcagcaaaagactatttcttttgattataagcatgatgtgctttttctagatgaatctttgccttatcaccccaatgcaatggaactgattgcctataacgaggctcaagaaattttatatgcagaaacttactattcggttggtggcggttttattgttagccaaaggcaattagcaacaactcaaactgaaacaaacgacgttaaggttccatatccgtttcacagtgcggctgaacttttaagcttatgtaaaactcatcatttatcagtgagtgagttaatgcttgaaaatgaaaaaagttggcgtagtgaaactgagattcgtagcaagattatggaaatctggaaagtgatgcagcaatgcattcacaacggattaattaatgaaggaatattaccgggcggattaaacgtaaaacgccgagccaaaaaaattcacgataagttattaaataagaaaaactcaaacctgattgtgacgacttttcatgcgatggaatgggtcaatttatttgccttagcggtaaatgaagaaaatgctgctggcggtcgagtagtgacggcacctacaaatggggccgcaggaattattccggcagttttatattactacgtgactttctctaaagacttttccgaagataaagtggttcgtttctttttaagtgcggcagccgttggcattttatgtaaactcaatgcttctatttctggtgcagaagtagggtgtcagggtgaagtcggttcggcatgtgcaatggcttcggcgggtttagccgagattttaggagcatcgcctgaacaggtggaacatgcggctgaaattgggcttgaacataatttaggtttaacgtgtgacccgattggtggtttggttcaggtgccttgtattgaacgaaatgcaattgcagccgtaaaagccattaatgcagcccaaatggcacttcatgatgacgatgaacactttgtcacactagataaagtcattcagactatgaaggaaacaggtaaagatatgtctgagaaatataaagagacttcaaaaggcggcctcgctgttaacgctattgagtgttaa

SEQ ID NO: 43733 - DNA, 2103 bp, Acinetobacter baumannii
atgcttgaacaagcacacctagaaggaacctcaactgacacagattttcagcagtctgggcttcaactgcctcatcttgcttcttatgtctatggaacatggcattcgtctgacgaagaattacgtaccgtttatcatgccattacaggtgaatcgatttatgccgtaagtagtcatggcatagatatgaaacgtgttgttcagtatgccaaacagattggttcagaactggctaactggacgtttcaccaacgtgccaatgcgttaaaacaaattgcccaacatttacttgaacgtaaggaagacttctacaaacttgcttatgcgacaggcgcaactcgtaaagatgcatggattgatattgaaggtgggatccagacattatttgcttattcgagtctggttcgccgtgaactcaatgatgaaaaaattattactgaagacagctggattcaattatctaaaaacggcactttcggcgctaaacacattttaagtcctaaagcgggtgttgccgttcacattaatgcttttaactttccaatttggggcatgcttgaaaagattgcaccaactttacttgcaggtgtgccatgtattgttaaacctgcaaccgatggtgcccaattaactcaagcggttgtaaaagccattgaggaaacacatgtcttaccaaaaggctcactacaactcatttgcggtcagacttatgacctgttagaacagttaggcccacaagactgtgtgacctttacaggttctgcctacacaggccaaaaactacgtaaccaccctcacctcaataaatattcgattccatttagcatggaagccgactcggtaaacagcgcaattttaagccctgatgcaaatgaagaaactgtcgatttatttgtgcgtgaagtcttccgtgaaatgaccacaaaagcaggccaaaaatgtactgcgattcgtcgtgcatttgttcctgaaaatttattagcgactgtgcaagagaagctgactgccaagcttgctaaagttgtggtgggtgacccgcaaaaagaagaaaccaccatgggggctttagccagcattaaacaaaaacatgacgttgcagaaaaagttgccgaactcagcaaagatgcaaaaattgtttttggtggcaacgatagctttacatttaatgcagatcatcctgaaaaaggcgcttttttcgctccaactttattggtgtgcgaacagcctttacaagcgacgaatgttcataccacggaagctttcggtccggtatgtacactcatgccatatcaaaacattgaagaactagctgaccttgtttcacgtggtgaaggtagcctagtggcttctgtcgttaaaaataacgatgagaatattgagcagattattcaaaaaattgcgccttggcatggtcgtgtgcatgtacttgatgcagagtcagcaaaagaaagtacaggacatggttcaccacttccacatttagtacacggcggccctggccgtgcaggtggcggtgaagagttaggtggtattcgtgccgttaaacattatatgcagcgcactgcaattcaaggctctccaaatagcctgacgcaaattactcactcatggactgctggctcaaaagttaatgaggaccgtgtacatccatttaaaaagtcttttgatgagttagtgattggtgagcgtttattaactgcgcgccgtacagtcaccgaagcagatattgtcaatttcgcgtgtttaagcggtgactacttctatgcacatactgacaaaattgcagctgccgagtctttctttggtgaacgtgtggcacatggatatttcattgtgtctgccgcagcaggtctatttgtagatgcagcacaaggccctgtaattgccaattatggtatggacaacttacgttttgttgaaccggttaaaattggtgactcaatccaagttgaactcacctgtaaacaaaaaacacctaaaccacaaaaagacccgtctcagcctgcacatggcgttgtggtatgggatattaaagtcaaaaaccaacgtggtgaacttgtcgcaacttacgacattttaaccttagttgctcgtgaggcttaa

SEQ ID NO: 43734 - DNA, 939 bp, Acinetobacter baumannii
atggaaaacaattaccagaaatttgaacaaaatattgccaatgaaattacgatcgaggctaaggatcaaatgcctgatgcctaccgcaaaacattgattcgtcaaatcgggcaacatggccattctgaaattgtaggtatgttgcctgaaggaaactggattactcgtgcgccgactttaaaacgtaaagcagttttgctcgcgaaagtacaagatgaagcgggtcatggtttatatctgtatagcgcggcagaaaccttaggtgctgaccgtgatgacatgatggaaaagttgattaatgggaaaatgaaatactcatcaatctttaactatccaactttgacttgggcagatgtcgctgcaattggttggcttgtcgatggggcagccattgtgaaccaagttgcgctttgccgtacttcatatgggccatatgcacgtgcgatggtacgtatttgtaaagaagaaagtttccaccaacgtcaaggttttgaagccatgatggctttggcaaacggtacaccggaacaaaaacagatggcacaagatgcagtgaaccgtttctggtggcctgcactcatgatgtttggcccaagtgatgagcactctccaaacagcgcacaaagcatggcgtggaaaatcaaacgctttagtaacgatgaattacgtcaaaagtttgtcgataacaccgtacctcaagtgttgcaacttggcttggaagtaccggacccagatctaaagttcaatgaagaaacaggccactatgagtttggcgagattgactggcacgaatttaatgaagtgattgccggacgtggaccatgtaatcacgagcgtatcgaagcacgccgtaaagcatgggaaaacggcaaatgggttcgtgatgcagcagtggtctacgcgaaaaaacagcagcttgaagcgaacaaagtggcttaa

SEQ ID NO: 43735 - DNA, 291 bp, Acinetobacter baumannii
atggaagataaaaacaactggtcgctctacgaagtatttgtacgtagtaaacaaggcttaagccaccgtcacgtaggcagcttaagagcacctgatgatgaaattgcactacaacatgctcgtgatgtttacacgcgtcgtaatgaaggaattagcatttgggtggttcgttcagaactgattaagtcatcacagccagatgaaaaagctgaatttttcgatccttctttagacaaggtttatcgtcatccgactttttaccatatcccagatggcattgagcacatgtaa

SEQ ID NO: 43736 - DNA, 756 bp, Acinetobacter baumannii
atgaatcattcagttttatctaaattcttattacatattggcgacagccaactggttttatctcagcgtttggctgaatggtgcgggcatgcacctgagctagaaattgatattgccttagccaatatcggcttggacttgttaggtcaagcaagaaactttctgactttggctggtcaatatgatgaagctaagcgtgatgaagaccaacttgcgtatttccgtacagaacgtgagtttttaaacctcttgttgtgcgaacaacccaatggtgactttgcacaaacgattgtacgccagtggttgatggaccattaccatcttcatttatttacggctttagcgcaaagctcacttcctgaattaagtgcgcttgctgtgaaatctttaaaagaagtgaagtatcacatccgcttttcgacaagctggatggaacgtttaagtttaagcacagatgaagcgcatcaacgtgtgcaagacggtttaaataatttatggcgctttaccgccgagttatttgaactcaatgcagacgagcaagcactagttgcagaaggcgtgattccagatttttcaaatgaaaaagaacaatggaaccaatccattgcagatgagcttaagcgttttgaattaaatgttgctgtgaacggtgcttatcgccgtggtgcgaaacaaggattgcataccgagcatttgggttatttgttggctgaaatgcaatgtattcaaagaacttatccgggaatgacctggtaa

SEQ ID NO: 43737 - DNA, 501 bp, Acinetobacter baumannii
atgcaaatgattcgtcattgcatcgaccaatgttgggacgttctacaaacggtaagtgaccctgaaattccggttttatcggttgtcgatttgggcatgattcgcggtgtagagattaacgatcaacaagaaattattgttcgtctaactccgacatatagcggttgcccggcaacagatatgctcaaagcacaaattgttgaggcatttaccgcagaagctttgacaccggtcaaagtcatggtcgatttgtcagaagcatggaccacggactggatgtctgatgcgggtaaaaagaaactgcaagtttatggcattgcaccacctgaagggttggcgcatcagtgtggaactcacgttcatttaaatgatggtgtcgagtgcccacgttgcaaaagccgacatacccgactgttaacagagtttagttctaccgcctgtaaagcactttataaatgtcaggactgtcttgagccttttgattacttcaaatgtatttaa

SEQ ID NO: 43738 - DNA, 1062 bp, Acinetobacter baumannii
atgagccaatttgtaccattaaaagtaaaaagtattacgccgcaaaccgatcaggcaatttgtattgcatttgacgttgtacctgaacaacaagaacaatttcaatttcaaccgggacaacatttaaccattcgccatttaactgaagcgggtgaaatccgccgttgctattcaatttgtagctatgcgggcaaagaagacatcagtattgcggttaaaaaaattgatcagggtcaattttcaaactgggccaatgaccatttaaaagtgggcgatgtgcttgaagtcatgccaccacaaggtgtgttttttcaaaaagcagccaagatgggcggacaaaactatttaggcgttgcggcaggcagtggtatcacgccaattctatcaattattaaacaagttttatttgaacaacctgaagctaactttaccttgctctatggcaatcgttcatggaaacaaaccatgtttgccgagcaaattatggatttgaaagatcagttcaaagaacgctttcaactcatcaatattttttctcgtgagttcaacgatagtgaactcatgaacggtcgtattgatgcagaaaagcttaagcaactttttgattatgaagtgcttgaaacaaactttgaccatgtgtttgcctgcggcccagatgaaatgatgaatgccgtagaaaatactttaccgaactttggtattgccaaagagcgcatccacaccgaacgtttccatacgggacaagcgcgtaaacgtagtgttgaagcggatgcaaaccgtaaagaagaaaaagtaaacatcattttagatggccgtgaactgattgtttctgtggctcaagatgatgaaagtattcttgatgcggctttacgtgcaggtgccgacttaccgtatgcatgtaaaggtggggtgtgtgcgacctgtcgttgtaaggtgctttctggcgaagtcgacatgttccttaactatagtcttgaagaagatgaagttgaaaagggctatgtgctgagctgtcagaccttaccaaaaggctcaaatgttcgcttgagttttgatgaatag

SEQ ID NO: 43739 - DNA, 774 bp, Acinetobacter baumannii
atgcaagagttcatcaaagccagcacagcaactgacggtgttttgttattaaccctaaaccgtccagaaaaaagaaatgctttaaacaatgcaacattgcagtgtttatgcgagttgctcgaagaagctgaacataatgctcaagtcaaagcagtggttttaactggtaacgctcagtgttttgcggctggagcagatcttagtgagttggctgcaatggatgccgtgtctttgcaactcgatattcgcccgaagctttggcaaaaaattgatgcgtttagtaagccactcattagtgcagtcaatggttatgccttaggcgctgggtttgagttggttttgcattcagatatggtggtttgcggtgaaaatgcccgttttgctttacctgaaattaccttaggtatgttgccgggtgcaggtggaacacaacgtttagcacgcttggttgggcaacaactcaccatgcgctgggccatgacaggtgagatgatttcggcaaaacaagccgagcaacatggcatttgcagtcaagtggtaccgaccgaattaacagttgaatatgcggttcaacttgcagccaaaattgccaaacaagcgcctttagcgattcgcgtgattaaacaatcaattaaaagtattcatgaaacaacattaagtcagggactcaagtttgaacgtcaaaactttgtctggctggcggctacaaaagatcgaaacgaagggattaatgctttctttgagaaaagaaagccagtgtttagaggtgagtga

SEQ ID NO: 43740 - DNA, 792 bp, Acinetobacter baumannii
atggactatcaaaatattattgctgaagaaaaaaatggtgttggctacctgacatttaaccgcccaaaagcactgaatagctttaacgttgatatgcaccgtgaagttgctgaggttttaaaccagtggaccaaaaatccggaagttcgctgtgtggtgattagtggcgaaggtcgtggcttttgtgcagggcaagatttaggtgaccgtgtagttgacccaaatgctgaagctccagatttaggatattccattgaaacttactataacccgctcattaaaacgattgtaaatatgccaaagcctgtgatttgcgcggtaaatggcgtggcagcaggtgcaggagcaaatattgcactggcatgtgatttagtgattgcagctaaatcggcaaacttcgtacaagccttttgccgtttaggactggttccagactctgcgggtacatggtttttaccacgtgctgtaggtcatgcacgtgctatgggattggctttgttaggtgacaagctcccagcagaaaccgcaaaagaatggggcatgatttgggatgtggttgaagacgctgagcttaaaacaaaagtgactgaactcgctgaacgtttagcgaaacagcctacttttggtctatctctcattaaaaaagccattcatcaatcaagcaacaacacctttgatgagcaagtgctgttagagcgtgatttgcaacgcattgcgggtcgttcagaagattatcgtgaaggtgtacaagcctttatgaataaacgtgaaccaaattttaaagggcgctaa

SEQ ID NO: 43741 - DNA, 1539 bp, Acinetobacter baumannii
atgacagatttagacttatctcgtgcccgaattgccgttattggttctggcaccatgggcatcggcattgcccagttagccatcgttaatggacacacgaccgttttatatgatctggacgctcaaaaagcgcaacaagccgttcaaggtttagggcagacgtttaaaaagctggttgaaaagagcaagcttacccaacagcaagcggatgaagctttagcgcgtttaactgtggtcaaccaagttgaagcactgcgtgatgctgacttggttattgaggcagttgttgagaaaaaagaagttaaacaatctttatttaaacagctcgctgaaatttgtagtgcgcaaactatttttgcaagtaacacatcttcaatttcagtgactgcaatttcggcgggcattgctcaccctgagcgcgtagtgggtttacacttttttaaccctgcgccagtcatgaaactggttgaaattgtacaaggcttaaaaacaccaaatagcttatgtttggctttaaaaaacttaatgttggactggaaaaaaattccggtactcaccaagtcgactccgggttttattgttaaccgaattgcacgtccgttttatgcagaaggctttagagcactgcaagaacaagtcaccagctatgaccagctagattatgccttaaagcaatgtggcggttttgcgatggggccgtgtgaactcaccgacctcattgggcaagatgttaacttttcggtgacgcaaagcgtttatcaagagtttttttatgagccacgctaccgcccaagcctcattcaaaaagaattggtcgatgcaggagcttggggccgtaagtcaaaacagggtttctatagttataacgaaaaaaatcagtatgaggcatttcagcctcaagctgtggttgccaaaccagttgatgcccatattcagctaaaagggacttggtctcagctacctgcgtttttaacccgtttaggtttaaaaagcggatctgcaagtgatgacaatatccttcaaattgatgatatcgacttgcgtttaagccaaggtgagtcagccaatattcattacctaagccgtaaagtggttttaatggattggcaccatgattttgagcacgcagaggctttagtactcagtcataacgagctttgtgaaacaaatgatctggctaaagttgaggcttactttgcacagtttggtatgagcgtgatgtggattaaagaccatccggcactgttaaccttacgtaccatcgctttactcattaatgaagcctgcgaagcaagtttacatggagttgcgagtctggaagatattgataatgccatgaaatatggagtgaattatcctaaaggcccttaccagtggttgacacaaatgggtggcgcttatgtgctccaaaccttaaataacttatatgcactgtatggagaggaaaaatatcgcgcgagtatctacctcaagcaatatgtagcaaaaactcaaaacattgctacccaatattcacgtgatatgaccgaatttgcataa

SEQ ID NO: 43742 - DNA, 1209 bp, Acinetobacter baumannii
atggaagacgttttaatttgcgattttattcgtaccccaattggacgatatgcaggtgccctaagtgctgtacgtgcagatgatttagctgcattgcccatcaaatatttaaaagataaacacccgaacctaccgtggaatacggtagacgaagtgtttttgggatgtgccaaccaagcaggtgaagacaaccgtaacgttgcacgtatggcaacactgttagcaggcttacctgatacagtaccagccatgaccgtcaatcgtttatgtgcttcgggtttagatgcggtaggacttgcagcacgctcaattaaagcaggcgaagcgcagtttgtgttggcgggtggtgtggagtccatgagccgtgcgccatttgtacaagctaaaccgaccgaagcctttagccgtacacctgaaatttatgacaccaccattggctggcgttttgtaaataagcaacttaaagcgcaatacggcaccgacagcatgcctgaaactgctgaaaatgtagctgaaaaatatcagattagtcgtgaagaccaagatgcgtttgcattgcgtagccaacaaaaaaccgctgctgcacaacaaaacggtttctttaacgatgagattttgcctgtcgagattacagaccgtaagaaaaacgtagttgtggtgaaccgtgatgaacatccgcgtgaaacgacacttgaagcactcgcaaaactaaaagccccatttaaaaaagaaggtggttcggtgactgccggaaatgcctctggtgtaaatgacggtgctgcgtgtgtgttaattaccaaccgtgaatttgcaaatacatatggtttaaaacctttagcacgcgtgataggcattgcaagtgtaggggttgaacccaaatatatgggtataggtcctgttccggctgtacagaaaattttaaagcaaacaggtttaacgctagatcagatggatgtgattgagctgaatgaagcattcgcagcccaatctttggcttgtatgcgtgaacttggtttaaaagatgacgatgaacgcgttaacccaaatggtggtgcgattgcgttaggccatccgctcggtatgagtggtacacgtttggtgattaccgcaacacgtgagctaaaaaaacgcggtggacgctatgcactttgcacgatgtgtgtaggtgttggacaaggtgttgcactgattttggaaaacttaaattaa

SEQ ID NO: 43743 - DNA, 1290 bp, Acinetobacter baumannii
atggacagccttacaatggataatgttgagcaattaacacttgcagagcttagagagctgcaaactaaacggttaaagcaaaccctgacttttgtatatgaaaatagtccggtctataagaaaaagttcgatgatgcaggtgtgcatcctgatgacttcgtgactttagacgatctggcaaagtttccatttaccaccaaacaggatttaagagacaactatccttttgggatgtttgccgtaccgcaagagcaaattgtgcgtttacatgcatcatcaggtacaacgggtaaaccgacagtagtgggctatacccaaaaagatattaatacttggtcggacattgttgcgcgttgcttacgcatggcgggtttaaccgcaaaagatatggttcaagtggcttatggctatggactatttacaggtggtctaggcgcacattatggtgccgagcgcttaggtgcaacggttattccaatgtctggcgggcaaactgaaaagcaagttcagcttattcaagactttaaaccgactgcaattatggttacgccatcgtattgcgtgagtattattgaaaagctcgagcaacaatttggtactgcacgtaatacgtctttaaaagtcggtatttttggtgccgagccgtggaccaacgaactgcgccgtgaaattgaagaacgtctcaatattaaagcactcgatatttatggtttgtctgaggtgatgggaccgggtgttgcgatgcagtgcttaggtgagggtgagggattaaccatttgggaagatcatttctacccagaaattattaaccctgaaacaggtgaagtctgtaaagatggcgaacttggcgagctagtctttacaaccattaccaaagaaggcttaccgattattcgttaccgtactcgtgatttgacccgcttactaccgggtgaaaatctggcaatgcgtaagatggataaaattgtgggccgtagcgacgacatgctgattattcgcggtgtgaacgttttcccgacccaaattgaagagcaaattttgcaagttccgcatttagttccaaattatgaaattttggtgactaaaaaaggccatatggatactttgcatattcgtacagagatgtgtcataactgtactatacaggccaatcaacttgctcaggagttgatgaaacgcattaaaaccatgattgggattagcgttactgtagaagttgtgacagaagcgaccttacctcgttcggaaggcaaggcaaagcgggtaatcgatatgcgtcagattgcttaa

SEQ ID NO: 43744 - DNA, 966 bp, Acinetobacter baumannii
atgagtatgagtgcaaaaatacagcaaataattgattctgttgtaaagaatgaaaccttaagtggaacttcgcttatttcgacaatttttggagattcagtacttcatcggggtggaaacattagtcttgcaagcctgattcagttattagagctatttggttttaatgaccgcgctgtaagaacctctgtttttcgtttagttaaaaatgattggttatgttcagacaaaatcggcagaaccagtttttatcgaattaccgattcgagccgttcgacttatttgcaggccgaacaacgcatttataacgaccagatgaaagagtgggaccattattgggatcttattctgatgtctagcctcgacactgaaaataaagcgttattaaagaaagaactcgaatggttaggatttgccaatatttcaacaaacttaatggcgtatccgggttgtaaccgtattgaactgcaacgcttgttggttgacttaaatatgagtgagcaagtggtggtgtttaaagccgaaactttgcagctctttaataattcggtcgataccattggacgtatgctcagaaccaactggccaatcgatgaattgcgccaaagatatctacagtttctcgatatttttagggaaattggcgtgttgctgatgcaagaaaacgaacaactcgaacctgttcaagcctttcaaattcgaactttgctcattcattattatcgacggattttattgaaagatcctgcattgccgcttgagttattgccaactgactggcccgcgattagtgcacgaactttatcaatgaatatttataaaaaagtatttgaacctgccgatgaatacttcttgtctgttgccgcaacagcagaaggaccaatgccaaatgccacagcacattactggcgccgtttcggaggtttggttgcgacaaatgagaggttaaatcatgccttgttatag

SEQ ID NO: 43745 - DNA, 606 bp, Acinetobacter baumannii
atgccttgttatagtattgacggtgttattcccgttgttagcccagaggcttttgtacacccaactgctgttttaattggtgatgtgattattgaagcgggcgtgtatgtggggccatttgcttcattgcgtgccgattttggtcgtattcatattaagcaaaatgccaatatacaagatagctgcaccgtacatggctttccgcaaagcgtgactttagttgaggaaatggggcacattgggcatggggcaattttgcatggctgccgcattggtaaaaatgttttggtcggcatgaacagcgtaattttggactatgccgaaattggtgaaaacactattattggtgcaaatagtttggtcaaaaccaaagatgttattccggcaaatgtactggcaatgggcagtccagccaaggttgcacgtgatttatcagaacaagaaaaaaaatggaaaaccagaggcacgcaagaatatatggagcttgcacagcgctgcttaaattcaatgcaagaggttcagcctttaacttcagagttggatgaccgcctgacttataaggactttaattcttcaaactatcagattaaacaagatagtgtttaa

SEQ ID NO: 43746 - DNA, 384 bp, Acinetobacter baumannii
gtgcaaaaaatggaaaatactgcggttgatcaattcgcagagctattgggtgtacaagtgctgcatcgcagttttgatgaagcgcgttgtcagcttaatgtaaaagacgagcacatgaatgccttgggcggcgtgcatggtggtgtcatattttctttagccgatatcgcttttgcgatggcttgtaatgcaggggatgcgccatatacaggcctacaggctgatattcgctatatgagcggtgctaaagataaggtgttatttgcaacggcaaccaaggtcggaagtagtaaaaaatttgcgcattatgaagttgtgataacagacggtttgaataatagagtcgctttgtttacatctacgtgttacagacttgcgccgtga

SEQ ID NO: 43747 - DNA, 498 bp, Acinetobacter baumannii
atgatttcagatcaattgcttaaggtggaagaaacagatttaaacttttcaactttgaaaaatgaaaaacctttaattttaaatagggatgttagtgtattaattcttcctagtgttagacagaatgatgcatttcatactggtacaattgatattttttcttatttacaagaagaattaggtgaaaatgaagttgaactttttgcttttgatgaggagtatcaagagttagcattacattcaaaagcacattggttaggtgtttttttagtagctcaagtagctgtaccaatattcacaaatgttatgagtgattatatttcaaatgaattgcaggcaaaaagtaatgatgaaatagaggtcaatattataattgaaaagaacaacgataagaatatcaaggtagcctatcgtggtaaagctgagcatattaatagtgttctagataaagttaatgagttgagtagagacaatgaagttaatagacatgctaaataa

SEQ ID NO: 43748 - DNA, 849 bp, Acinetobacter baumannii
atgaagttaatagacatgctaaataatatagatactttattactaagcaattctactaatgaaagtcactataaagttgctttagaagaagttagtaaactgttagaaaatattcaggaacaaggagatgaagatttatctaactttttgtggaaattgaaaactatacttataattaaagatagatatattaaaactttctttttattgaaagataagaagcattatgaagcttgggttctattagaaaggatagaaatagacatttctttcctagagaaaaatgtagatgaagattttataaaaaaatataagttggatttctacaaagagattgttgagagttggcaatcgttatttccttacaaaattttctttagtattggtgcaacaataaagcagtatacatgttcaatatgtgggcatgttattcggccaaggaataaatgtattcataaaaaaggtaaattatataatggtaaattgtgtgtgcatgtagcagatgggggctgtgagctgaaagaaatttctatggtaaaaaatcctgtccaaaaatcatgtataccaatgctagattatgattatagcgcagttgattttatatcagaaagattacaatctccttttgattattggaagccatttaaaaccaaaaaattaattgatcgttctgaatttaatactgttgacgaaaatgatatatgtccatgtaaagaatctaaaaaaatattcaaagaatgctgttttaataaagaaaaaattgaatttccacatattcatatacattttagtaaatcacccccttctaatttggctacaagcttaattaaaataggtgggaaattgtaa

SEQ ID NO: 43749 - DNA, 1131 bp, Acinetobacter baumannii
atgttattttatgattttttaaaagaaggtttttatatttcaattaaagagtttgaaaaagatattaaagttaattcagaaaatattttcaattctataaaaaataacaattataaatttcaatctctataccctatagttattgaaaataaaaaggaattaaacaaaaagccacgtttaatttgcataccgacagttagagatcgcctaatacagatgatcttaatttattatatttcaatacatttaaaaaatgaattagctgttcttaaatcccaagatttttctgtttctggtgtaggaattttaaaagctcgtcaaaaagcaaaggatttgagaaatactaaaccctatgtattaaagacagatatatcttctttttttgacaatattgatcgagcaaaattattaaatgagataaaggatgtaatgccaccagatatactttatttattccagtcaattatttattgtgatccaagcattccttatgaatataataaagattataaaaaactaatttactctaaattaaggaaaggcgtaaggcaaggtatgcctatttctccactccttgcttctttctatttaaatgattttgatgaatggttaattaagaagaaatacaagcatgtacgttatgctgatgacctaattttttttcttgactcagaaaagcaatgtaaagaagtctatagagaagtttctcaagagttacttaaattaaatttaactttacccacacttgaagaaaatacaaagactcaaattatttctcctaaagaaacagtcaattttttaggtttagatctgcgttatgaaaatgaaaaatataattggtatattccaccccatgtaattgaaaatgtaaaatataatttattacatctaactaatattcaaaataatctcaaaatgaaattaaatttctccaaaactataagtcgtatggaacaaattatttctggttatcaacattgttatagtgatgccgactctttaaacttaaaagatttcaataaaatactaattttagaaaagcaaaaagctattaatttactttttaaaaatttaggaattgatattagcacagtacattcacaatatttaaaatatttattagacaattaa

SEQ ID NO: 43750 - DNA, 603 bp, Acinetobacter baumannii
atgccaaatttagttctcccaacacgtaccttatatgttgtaaataaagcaattgatctattccaccaccgtggttttcaccttattggggtcgacagaatagtgaaagaatcagaaattacgaaagccactttttataattactttcactctaaagaacggcttattgaaatctgcctgatggtgcaaaaagaaaagctccaagagcaagtagtcgcaatggtcgagtatgacttaagcactcccgcaatagataaacttaaaaagctttattatttacataccgatttagaagggccgtattacttattatttaaagctatttttgagattaaaaatagttatccaaaagcctatcagaccgcaatgcgctatagaacatggctaaaaaatgaaatttacagtcagcttagagtgctaaacgcgggtacttcttttaatgatgctaagctatttgtatatatggtggagggtacaatcattcagcttttaagctcagatggggcaatcgagcaggaaaagatgttggattgttttttaaattcttttgttagaaattttagtccatgtatgtttactcatgtcgatgctagcaagtgctag

SEQ ID NO: 43751 - DNA, 627 bp, Acinetobacter baumannii
atgaaatttctaaaatttttaacttttagcacgattcttaccttatccgcacatagctatgcgacagtgggtggtggacaaaaaattgaagtgttgggctatcagcaaaaagagaagaaactttatgtattaagacattatgaagatggccgaggacgtctgccacaactctattattatctattaaatagtaaatcgcctgataaacttatcgaggttaaatctctctatatcaatccaaaaacacataagattgattatgatcaagatagtacagcgtttaataaggcacttaataaaattaaaaagaatttaactcctttgatcgtaagtaatagtaagactgtaaaaattcaaacattaaaaactcatcagaatcaggtatcgtcttggtttgatccttcaggaaagatcacgcaatataaaacagaatatgttgtaaaatcgccgtctttacaaagtaagacccatgttgcggttcattacagcaaagcaataaaaatttcccaaaattatagtgtgcctaaacacaataagaggttggttgtcgttaaatatttgggggttccagaagaaactggttacgacattgaagaccctgttttactactacctataaaaaaataa

SEQ ID NO: 43752 - DNA, 1065 bp, Acinetobacter baumannii
atgaataatttgaattttgaaactctaaagaagtactggctgcgattcgtaggtattgctgtaatcgcaggcgctttagtattggcatttgcttggaccgctggtctatttggacatcgaacaacatccaaaacttttttgggtgacacattaaaaaactttgatcccggatatcgacgagcacatggtaaaggtatttgttttgatggcacttaccatagtaatggtgcggcagcagcactctctaaagccactgtgtttgccaagtctgatataccagcaattggccgattttctattggaagcggtaatccgcatgcggcagataattctaccgcaacagtgagtatggctttattactttctccagccgatcattcgcagtggcgcatgaaattaaacaactttccctatttcccgacgcgaaatgctgaaggttttttggcgcagcaaaaagcatttaaaccggttccgtctactggtaaacctgatccagcccttgttgaggcgtttttaaaagaatatcccgaagcgcgtaagtctattgagcaaaaggcaaaaatgccattaaccggtagtttcagcggtgcagaattttatgtcgtaaatgcctttatattgcgggcagccaatggacaagaacagccagtccgttggtctatgcgtcctcattcaaaatttattagtctgacgaaagagcaacgtgatcaagctgatcatgatttcttatttaaagacatcaaaaaacgtttggctgaaggaccgctctattgggacttagttttgcaacttgccgagccgggagacccagtgaatgacccatctcagccttggccaaaagaccgtaaagaagttatagccggaacattagaagtcaaaaatgtgactgatcaggtaaatggcgcatgtcgtgatattaactttgacccaactttggtgccaccgggaattgagttatcagatgacccagtactcgcagcacgagcggctatctattcacagtcttacaatgctcgattacgtgaaattggatttggcaaagcaacggatgccgtgggcaaatag

SEQ ID NO: 43753 - DNA, 573 bp, Acinetobacter baumannii
atgcaaaataaatctaacgataatgctccacgtcattttaatttgactgctcgaatactgcattggcttatggcggcagcaattctggctatgctatttattggggtaggaatgaccacctcaatgacttggcgtccgtggttaattgatattcaccgtcctttaggaatcgcaatcttattattggtcatcataagattaataaatcgactctgttatccaattccacctttgccgccgactgtaccgcgctggcaggcgtttcttgctcatgcatcacattggctactttatattttgatgtttagtttgccattgctcggatgggcaacgctctcggcaggtaattggcctgtcactttatttccgggttgggatcttccgcctatagcaccaaccaactctatgctttacgcttggttccgtactctacacggaattttggcttggttattatttgctgtcgtgattggtcatctatctgctgcgttattacatgcatggatttatcgcgatggcgtattttcgagtatggctttggggtcttcttctaaaaaagagaatatcgattag

SEQ ID NO: 43754 - DNA, 774 bp, Acinetobacter baumannii
atgcaacatgagctaagtgcaatttctatatttgtgactgtggttgaagctggaagttttgttaaagctgccgagcaattgcatttaactcgctcagccataagtaaaaatattgctcgccttgaagatcagcttggtgtggctttatttaaaagaacaacacgttcactcagcatgactgacgaaggagctttgttttatgaacatagccgtcgagcgttaagtgaaatacaaaatgcagcagctttattagaccaaaggaaaattaacgcaacaggccggttaagaatgtctgtgccagtgctgttcgggcaactttttgctgccccgctcatggttaaatttgctcagcaacatgcggacttacagttagaaatttcatttaatgaccgaaatgtagacttgatcgaagaaggttttgatttatgtataagaatcggggcattgcctgacaccactcagctcgttgccaaaccgattggtgagcatcgaatgctactttgtgcctcacctgactatttaaataaagcaggtcccgtagaacatattgaagacttagaccagcacgcgacgattgccgatccgcattttggtcaaatgcagaaatggcgacttcaaaaggaaaatgacgagcctttatttattaaacccaaagcaaaacttcttttaaatgatctacaagctattaaaaatgcagcgcttgctggagctggtatcgcttggctacccgactggctcattcaaaatgaattacaggacggtaagctggtataa

SEQ ID NO: 43755 - DNA, 597 bp, Acinetobacter baumannii
atggctaaaatattggtattaaaatccagcattatgggtgagggttcacaaaccaatcgcctaattgatgtaatgcttgaacaccgtaaagaccaaggtttgcaagatgacattaccatacgcaatttagctgaaatgaacttgcctgtattagatttagaaatctttcaggcgcttcgtggggctgaaaatgtaaatcaagacattcaacgaatcgttgctttgtctgatgaattaattgctgaattaaaaagcgctgatttattggttattggcgcacccatgtacaacttaaatgtcccgactcaacttaaaaactggtttgatttggtggcacgagcaagacaaacattccgctataccgaaacttatcctcaaggtttggttgaaggcgtaaaagctgtgttggtaagcagtcgggggggtattcatgtcggccaagaaactgaggcagtcacgccttatctcaaagcagtgttagggctaatgggcattcatgacgtcgattttatctatgcagaaggcttagacatgcaggcctatcgcagcaacgctttagatttggcaagccagcaagtgaaagaattcgccatttaa

SEQ ID NO: 43756 - DNA, 816 bp, Acinetobacter baumannii
atgccttctctcgatgcttttctagagcacccgaactcgcatgagaaaattcgtcaagatgactacattgcaggattagcaaaaggcttggctttattggaagcttttggaacagatcggcaacggcttaatgtcactcaagtggcagaacgaacaggtattagtcgtacagcggcaaggcgttacctaaaaactttaaaatacttaggctatttagagacagatgaacattacttttggctcactcatcgcgtgctgcgcttttcaagttcttatttaagctctgctcatctgcctaaagttgctcagtcatttttaaatcttttgtgtgcgcagacatcacttactttttcaattgtggtgttagacgataacgaagtggtgccgattgcccgtagttatctaccacagcaagataatttgcgtgtcagcccttatggcatgcacttaggaaaccgtctccctgcccatgccacttccacgggtaaagtattgctggcagcactacctgaagaagcccaacatacgtgggtaaaaaattacggtttaaaacgcttaacgccttttaccatagtagatgagtcaaagttttttgaagtgcttaagggtatttcgttatcggattattgtctttctaaagaagaacatgaacttggtgtaattgcgattgccgtgcccgtttttaatgcacaaggtcaagcagtggcagcacttaactgcatgtctcaaaccaaccgtgtacaagaagattatttggttcagcaaattttgccattgctgcgtaacacggcaaatgaacttagaaatgtaatttaa

SEQ ID NO: 43757 - DNA, 1215 bp, Acinetobacter baumannii
atggatattttaaagacacaggttgcaattattggttctggaccagcagggttattgcttgggcaacttctatataaagctggcatcgatcatattattgttgagcaacgtagcgctgaatatgtggcttcacggattcgtgcaggaattttagagcaagtttcggtcgatttacttaaacaagcaggcgttgaccaaaacttaaaagaaaaaggattaccacattcgggcatcgaaatcttaaccaatggtgagttacatcgagttgatttagccgcactcacgggtggaaaacaagtgactgtatatggtcagaccgaagtgactaaagatttaatggctgcgcgtgaagcagcacagctcacttcattttatgaagctcaccatgtacaagtaaaagatttctacactgcaccaaaagttgaatttgaataccaaggtaaaacctttcaaattcagtgtgactttattgctggttgtgatggttaccacggtgtctgccgtgccagcgtgcctgaagacaaaattaaaaccttcgaaaaagtttatccgtttggctggttaggggtattggccgatgtgccacctgtagccgatgaactgatttacgtacagtctgaacgtggatttgctttatgtagtatgcgttcagaaacgcgcagccgttattatttacaagtccctttaacagatcacgtagaagactggtccgatgaaaagttctgggacgagttaaaaaaccgcctagatcctgaaagccgtgaaaagttagtgacaggaccttctattgaaaaaagtatcgcgccgttacgtagctttgtgaccgagccaatgcgttttggaaaactatttttagcaggtgatgctgcgcatattgttccaccaacaggagcaaaaggcttaaatctcgctgcatctgatattgcttatttatcaagcgcactcattgaatattacgccgaaggttccgaacatggtataaatgaatactctgaaaaatgcctacaacgcgtatggaaagcagagcgtttttcttggtggatgactcatttattgcatcgttttgaaactgaaagtgagtttgaccataagattaaacaagccgagttgagttatgtactgggttcgattgcgggtaaaaccacattggccgaaaattatgtcggtttgccttatgagattaagcaaattgatagttttaagcacgccagctaa

SEQ ID NO: 43758 - DNA, 1293 bp, Acinetobacter baumannii
atgaaacttaaaacaaatttttcgcatctcgcttatagttgtgcattggtattattcggttccatgcaatttgcccatgctgcacctttactcacgtctcatatcacaaatgaagtcagccctgcacctacagcaaatgcatggattgaagttgatactcaagcttttgaagataatattaaaaggacaaatcaattacttaatggcaaaacacaactttgtgtagtcatgaaagcaaatgcatatgggcatagtattgacctacttatgccgagtgttatgaagttaaacgtatcgtgtattggcatcaccagtaatgcagaagcggcgatggtgcgtaagcatggctataaaggtaaaattacacgtttacgtacagccacagatagtgaaatcatcaatgcacatgcgttaaatatcgaagagcttttgggtaattatgatcaggctacccgtatctctaaatgggcagaagcgaacaatacaactgttcattatagcttggctttaaattcgggtggtatggatcgtaatggtcttgaaatgtctacagctcaaggtaaagaacaagctgttgcaatcactaagcttccaaatcttaaaattgatggcattatgacccattatgctgtagaagatgaaaaatatgttcgtgagcgcctagctcaatttaatgaacaaacagcatggttgattaaaaaagccaaactaaatcgtaaagaattaacattacatacagcaaattcatttgctaccgtaaatgttcctgaatcacatttagatatggtccgtgcaggcgcaattatttatggagattttcctaatcacccagaatataaacgcatgatggcatttaaaacacaaattgctgcagttaataattaccttaaaggttcaactgtaggttatgaccaaacttatacgttgacacgtgactccaaacttgcaaacctgcctgtcggttattcggatggctaccgtcgtagttttagtaataaagcttttgtcttagtcaatggacaaaaagcgccagtggttggtcgagtatcaatgaatactgttatggttgatgtaacagatattccagaagccaaagcgggtgatgaagttgtattatttggacgtcaaggcaatgctgaggttcaatctagtgatttaacgagtcttacaggccatattttgacagaggcctatactccatggagtaactctaatccacaagtgattaaacctattcaatctccacaacaagtgatattaaccaatagtaaagttgcagcaaccgctgagtaa

SEQ ID NO: 43759 - DNA, 2607 bp, Acinetobacter baumannii
atgaatattgcggcgcagcctccagttcaggcagatcaaacagtttatttaaaagattatcaaaaacctgcgttcttggttgaatcaattaatcttgatattcaagtctatgacgataaaacaattgttgattcaacattagtcatgaagcgtcaaactgctggagacttggtgctactgggccgtgatcttgagttgcaatctattcagctcaatggccaagatcttactcctgcacaatattcactcgatagtgaacaactggtgatcactgatgcaccagatgaagtcattttacaaactcaagtgattattcacccggaaaccaacactcagcttgaaggtttatataaagctggcgacttatttgtaacgcaaaatgagcctgaaggtttccgtaaaattacgttctatccagaccgtccagacgtactttcagtttttactacacgtgtagaagcagacaaaaaatatccggttttacttgcgaatggtaacttgcttgaaacaggtgaagttggtgaaaaccgtcactttgcgatctggcaagacccgactaaaaagccaagctatttgtttgcttgtgtgattggtgatttagctgtattgaaagaccgctataccacttctgaaggacgtgatgttgctttagaaatctatgcaattgagaaagacattccaaaatgccatatcgcaatggaagctttaaaacattctatgcgctgggatgaagagcactatggccgtgcctatgatctcgacaactatatgattgtggcggtgagccagttcaacatgggtgccatggaaaataaaggtttaaatatctttaacacctcatgcgtacttgccgatgaagaatacacaactgacgcagcgattatgcgtgtacagtctgtgattgcccatgaatatttccataactggacagggaaccgtattacttgtcgtgactggttccagttgtgcttaaaagaaggcttaacggtattccgtgatcaatctttctcggaagatttacaatctgctgcggttcaacgtattgacgatgtcgctgttcttaaatcgcatcaattcccagaagatgcaggtccattgtcgcacccaccacgcccagaccactttgtcgaaattaataacttctatacagcgactgtttatgaaaaaggtgcggaaattaaccgcatgatgtcgacattactgggtaaagaaaaattccgtcagggaacggatgaatatttccgccgtcatgatggacaagccgtaactgttgaagactgggttgctgcactctctgcgggttcaagtgttgatttatctgcattcttaacttggtataaccaaccaggtacaccaaagcttgaagcgaaaggtgaatatgatgcagcagcgcaaacttatcgtctaagctttaaacaaagcctaaaagcgcatccgaaatatccaaacttaaaagctgtcccaattcctgtagcgttggcattatttaatgctaaaacaggagagcaatatacactccatagcgaaagcctatttgtaaatggtgttaaagatggtgtgtatttgtttgaccaagacgaggcagctattgagtttacaggggtaactgagcaacctgttgtttcactactacgtaatttctctgcacctgtaaatctggtatttgattacagtgatgaagaattagcattcttaattcaacatgaaacaaatggttttaaccaatggcaagcaacacaaaccttgcttgaacgtattttgttagaagatcactctgcggatacctatattcaagctattcaaagcacattgcctgaattagttggtcgtgatccacttttagcatcgcgtttgtttgatgtaccaactgaaggttatttaggtagccgtattgatcaaaactatgcaccagccgatattcatgtaaaacgtgaagccttactcaatcgtttggctcaagagctgggttcgttctggaaagatacgtaccttacactggaccctgacttgcaaaaagaattttctttagcgatgggtgtacgtgcattaaagaacattatgctcatgatgatggcgcgtcagggtgaccaaagtgcatttgtattagcttacgatcaatatcaaagcacaggcaatatgtctgaacgtttaggtgcgctgcgtgtactagtgtggcaaagtgcgcctcaagcacaagaagccctagctgatttctataaccgctttaaagacgaagcattgtctttagaccaatggtttatgattcaggcagcaaacccaaatgccacagttgagacaattgaatatctaactcagcatcctgattatgacttaaccacaccaaaccgtattcgcgccgtgagtggtggtttgtcaaataaccctgaaaatacgtggggctttggtgtagctcactttattaatcttgcagaatatctggacgagaaaaacccgattttaggttcacgcttattacaggtgttatctcgctggtacacgcttgccgaacctcagcgcactcaagtgcaacaggctttacaagcgttgcagcctaaagtgaaatctaaaaacgtttctgaaactttaaatagtatgctgagcgtttaa

SEQ ID NO: 43760 - DNA, 258 bp, Acinetobacter baumannii
atggaattaaaagcttatttacatcgaatagaaaacattaaagcgattcatgatctagatgcagcaggactcgaccatcatgtgattgccgtgttcttgtctgccgaaggtatttcaatgactgctcaggaggtaacaactatcgttaatacttatgacgccttaggtaaagtgaaattaccaagtaaaaaagtgcaggcactgatcaatgccaaaaaacttggacaaaatgatgagaccttgccgtgccctgtttaa

SEQ ID NO: 43761 - DNA, 1158 bp, Acinetobacter baumannii
atggccttacaaattctacaaaaacagctagatgaaagtagccattgccctctctgccaagcgtcgatgtactgggtagatgccgaacaatttgagcaagacgttcaatttcatgaatgtagccattgccaacaccgtgtatttaaagacacaaaaatgacgtgtcattgcgaccaatgcactaaacaaagaaaaaagcttttacagcaaacacgcctacaagaacaacgccaatttaagtcaaaagaccaaccacaacgtagtctggaacaactgagttttttacataaactttttttactcagcctacttgacgactatgctcgtgatgacattgcacatgacgaatacattcattgggatcagataaaatatcagccgattacccccaactggatgttccagaaccatctcattaaacagcttcataaagatgggattttaaatacacaagatcaaaccgatgaaccacagtgcttttatttaaatattcgtctagatggctatagcgacccaagtttatttagtgtagctcagcaattacgccactggttctatgaaaacctaagtcttggtattccatttcgtagtgcagatgaagtgaaagacgtgctgtttcaggtgctctatcaagaaattattcagttcacccagttctattgccgaacttggggtatccaaattgcaggaagctctaattttcaagccttttgctaccgtttaatggactcattggcgattgggcaaatttattatcttattcagactgcacttgaatatctttataaacaaaaggcactacagccacgaaatgaaaagtttattaataccaatctattaaagaaaactttagagcaatatcgggaacgagctttggctgaaaagtgggaaacttcgatgttgccacgcccttacaatattccttacagtaaaatgagccatatattatttaaccgctttttaggttatgacgaacagatatttgtacaacctgtatggaaagcatggcgaaaaatcgaacctcgtttaaacttttactcggttaaacgttgtatgtactgtggttcaaatgatctaagtgtggactatgatgcagcagattatgtgtcgttgatttgccaaaattgcaaacatcaagatcactattttacccgttaa

SEQ ID NO: 43762 - DNA, 828 bp, Acinetobacter baumannii
atgacttcgacatccaacctcattgaacaggtgattgaagcttggcaaaacatgcaggcaaaaacgccgctggtacaatgtattaccaacagcgttgctgccaactacaccgccaatgtattacttgcttccggtgcttcacctgccatgattgataatccttatgaagcagaaagttttaccaaaatttcatcggctttaagcattaatttaggcacaccgacttcagagcaaatgcaagccatgcaaatctctgccaagaccgcacagcttaacaatgttccttgggtactcgatccggtgggatatgggccaatattagcttggcgtagtcaaatgacagacgagcttttacagttcaagccaagcgttatacgtggtaatgcctcagaaatcagtacgctagcaggcaaccaagttcaatctaaaggtgtggatagtaccttaagcagtgaccaagcttatcaacaagctttttcactattaactcatgcaagctgtatcgctatttcaggtgaatcagattacattttgtctaacgaagttgatgctgtaattcaagtaaatggtggaagcccgttacaacccaaaattactgcaactggctgcgctttgggtgcattaattgcagcatatagcgctgtgacgacaccaaccattgcagctctttcagctcatattcattttgcaattgcaggtaaacttgctgcaaatcaagctcaaacgatgggtagttttagtagcatatttatggattatatccatatgttagatgctaatctgattgagcaatacgcagatatcaaacttttaaataaacaggcataa

SEQ ID NO: 43763 - DNA, 360 bp, Acinetobacter baumannii
atgccgcacgttgtagttgattattcagataacttaactggactaaatgcaaaacaattacttgaagaaattaataccacgttgattgaaacagagttgtttagtacagaagacattaaaagtcgtgcgcgtagagatgaggtttttctgattggcttaggggttgatcaagcctatatccatgtaaaagcctatattttgtcgggaagaactgctgaacaaaaacagcttgtgggtgagcaattattagcggcgctcagcaacaaaaaatatctaccacaagagtttaataaagaaattcaattgtgtgttgaacttatcgacatgccaagagacgattattttaagcaagttgtataa

SEQ ID NO: 43764 - DNA, 1713 bp, Acinetobacter baumannii
atgaaacaggaaactgcacttaaactgctaaaagcaggtgaaaatgtttttttaaccggttcggctggtgcagggaaaacctatacactcaatcagtacatccattatttaaaagcgcgtaaagtacctgtagcgattacagcatctaccggtattgctgcaacgcatatgaatggcatgacaattcatacatgggctggtattggcatcaaagatcatctaactgacgatgatctaaaacgcatgaaagagcgtaaatatctcaaggaacaccttgaaaacgcgcaagttcttgtgattgatgaaatctcaatgctccatgcgaagcaacttaatctggtcaatcaggttttaaaatattttaaagaaagtgatgaagcattcggtggcattcaagtgattgtagctggagatttcttccagttgccacccgtaggccgtaatggtgaagccaatcgtgacaagttctgttttatgtctgatgcatgggtcgaagccaaatttcgggtatgttatttaacagaacaacaccgccaagacgatgaaattctgaatcagatattaaatgcgattcgtgcgcaaagtattcaaaccgagcatttgcaagctttgcatcaatcccgtactcatgacattggcgaaacctttactcgtctttatacgcataatatggatgtcgacaatatcaattatcagcacttaaacgaaattgataatgaagggcatcaatttaatgccgttttagacggtaatgaaaagttattagagaccttaaaatcttcagtccgtgctccggaagaactcacacttaaaaagcatgccaaagtcatgtttgtaaaaaataactttgatatgggttatatcaacggaagcttgggtgaggtgatcggttttgaagaggatgacgaaaatgggttattgccaaaggtaaaattaactgacggtacaactttgctggtagcacctgaaacatggtcaattgaaaatgaagcaggaaaagtcattgcaagtttccagcaaattccacttcgtttggcatgggcgattaccattcataaaagtcaaggtatgactttggaggctgctgaaattaacctgatgcatacctttgaaaaagggcaaggttatgttgcgctctcacgtttgaagtctttaacagggttaaaattattaggttttaatgaacaagctttggagttagatagtctggctgtaaaagctgatcgccgttttcaagaactttctaaagaagccgaagacaactttgctgatgtcgatttaacggctcaacataaagcctttattcgtcattgtggtggaaccttaaatgaaactgaaatttcaagaaatgagaaaaaactagcgagaggcgagaagcaaaattacgcctcagcgactttggatgaaactcgtacattgtttgaagaaggctacgaaattgaagatattgcacatgaacgtggtctaacacctgcaaccattattaatcacttggctcgactgcataaagaacaaaagctagatatttcggttgcccatcctggtgaagaagtggtcgaagaagtgcgtaaaatttataagaaattgaaaaaacgccaaaatccggatcatttttctgatgatggttcgatcaaactaagaccaattgttgaggcaaccagccctcgaatgggatatgatcaggttcgattagctttattatttattgaataa

SEQ ID NO: 43765 - DNA, 1173 bp, Acinetobacter baumannii
atggcttttaaaaatattgcagatcaaacaaacggtttttatattccttgcgtatcactctttggaccaggatgtgccaaagaaattggaacaaaggcgcagaacctcggcgcaaaaaaagcattaattgtgaccgatgaagggctatttaaatttggcgttgcagatcttatcgcaagctatttaaccgaagcaggcgtagcgagccatattttcccgggcgcggaacctaacccaaccgatattaatgttcacaacggtgtgaatgcctataacgaaaatggctgtgactttattgtgtcgttaggcggtggctcatctcatgactgtgcaaaagggattggcttagtgactgcaggtggtggtcatattcgtgactacgagggcatcgataaaagtaaagttccaatgacgccattgattgcagtcaatacaacggctggtactgcatcggaaatgactcgtttctgtattattaccaataccgatactcacgtaaaaatggctattgtggactggcgttgtactccacttattgcgatcgatgacccgaaactcatgattgcaaaaccggcgggtttaacggctgcaacaggtatggatgcattaacccatgcagttgaagcatatgtatctacggcggcaaacccaattactgatgcgtgtgcagaaaaagcaatcaccatgattagtcaatggttacaacccgctgtcgcaaatggtgaaaacatcgaagctcgtgatgctatgagctatgcgcagtacttggctggtatggcatttaacaatgcatctttaggttatgttcatgcaatggcacaccagttgggcgggttctacaacctacctcatggtgtatgtaacgcaatcttgctaccccatgtttgtgaatttaacttaattgcttgtccagatcgttatgcaaaaatcgcagaattaatgggtgtaaatacgcatggtctcaccgtaacagaagctgcgtatgctgcaattgatgccattcgtaaactgtcttcttcaattggtatcccatctggcttaaccgagcttggggtaaaaaccgaagaccttgcggtgatggccgaaaatgctcaaaaagatgcatgtatgctcaccaaccctcgtaaagcaaaccatgcacaagttgtggagattttcaaagcagcactttaa

SEQ ID NO: 43766 - DNA, 969 bp, Acinetobacter baumannii
atgaatacatctacagctaaacacaattatgccccagatattttaggtgccggctatgaacagctaacgctcaactttccagatgattatgaaggtaaagttgtagccaccttagttcgtaaaaaagccactcaaccgactcaaaaagccgtactttatattcatggttttttagattatttctttcaaaccgaaatggccgagcaatttaatgcccatggttatgacttctatgcactcgatttaagaaaatatggccgctcaaaactgcctcatcaaattttctataatgtgctcgatttaaatgaatatgatgccgaaattactcaagcattagagattattggccaagaaaaacatacacaagttttacttgcaggtcactcaacaggcggcttaacggcaacgctttatgctgcgcatcatcctgatcatcccctcattaaagcactctgggcgaatagtccgttttacgattttaatttaagcttagtcgaaaagaagtttggtattccaatgctcagtcgagtaggaaaatatctgccaaaagttaaatttccaagccaactgaacaaatggtacaccaccagccttcataagcagcttaaaggtgaatgggatttcaacctcgattggaaaccaacctctgcccctacagttcaactcagctttgtacatgcaattcatactgcgcaaaaagaaattcaccgcggggttaaattgaatattccagccctgattatgcattcgcaccaaactaaaaacccacgcaaatggggacccgatgcaactcaaagcgatgtcattttagacgttaaagacattgctaaatttgggaaaaaaatgaaaggcgatgtctcggttgtctctattcacaatggtttacacgatttagtcctttcggcccagccagtaagggaacaagtctatcagcaactattccaatggctggatcaaaaagtcacctaa

SEQ ID NO: 43767 - DNA, 1191 bp, Acinetobacter baumannii
atgttcacaaaaaaggatttattgcagcaacggatgttgattgatcaactgcgcacgcaaaatagtctctctcctcagaacgctgccaaactcggtcaaagtattgcaagctcgtgggaacgatcagcttctgctgcgattcctaaagaacgatttgcagcacctctacttgaaagaaaatctgcttcacaaaatgctttggatctggcactaagccagtgtgctgatgacttacgtcatattgcagagcaatcttctatggtcattgctgtgggtgacatcggtagtaccattatctggacagcctcaagtgctcaaatgcagagtgccgctgaacgtgtacattttgtacaaggtggtcaatggcgtgaagaatttgtaggtacgaatgcattagcgttatctttaaaaactcaacaatcaagttgtgttttttccaatgaacattatatggagtcgattcacgattgggtttgttatgcggcacccattatcgatccatactcaaaacaaaccttgggcgtggtagatttatcaactacatggaaaaaccataataccttgggcatattggctgctgagcgttgtgcctccattattcaatctgccttgttagaacaacagcgccagcacttacacatccgggcattttcgacgccgcaagttaaatttaacggcaaaagtttattattgacgccgcgtcaaattgaaattttaacgatattggcactatgtccacatggtttaaccttagagcatctctatcaggcactttatggtgagcgtaaagtaagcatgggtacgcttaaagctgaaatgtctcaattgcgagatatattgggaggtttgcttggttcacgtccatatcggttacttgtgcatgttgaggccgattttttacaagctgaacaagcgcttgatgctggatatgtcgcctctgcattgcagctttatacgggcgtatttctggcaaaaaccgaaagtccgtttctatgtgcatggcgtgactgccttgagtcgcgtttaagtgatgcgatttttaaaacacaagaaacagatttattacttaagcatttagctcatttccctgaagcaatcgatgcggtagaacgtcttatggagttattaccgagtgaacatcctgcgcatcaattgttagtgaaatatattgactcacctaagctaagttag

SEQ ID NO: 43768 - DNA, 1512 bp, Acinetobacter baumannii
atgcgctatatcgatccaaatcaaccaggctcaaaagttcaatttaaatcacaatatgaaaattttattggcggtgaatgggttgcacctctaaagggtgaatattttgataatgtgtcaccagtggatggaaaagctttcacacgcattccacgctctagtgctgaagatattgaacttgctttagatgcagcacacaaagcgaaagcttcatggaataaatcttcaccgactacacgttctaatatacttttaaaaattgctgatcgtttagaagcaaatcttgaaatgcttgcggttgcagaaacttgggacaacggtaaagcagttcgtgaaactttagcagctgaccttccacttgcaatcgaccatttccgttatttcgcaggatgtattcgtgctcaagaaggcggcatctctgaaattgatgaagataccattgcctaccatttccatgaaccactaggtgtggttggtcaaatcattccatggaacttcccgattttaatggctgcatggaaactcgctcccgctttggcggctggtaactgtgtggtgattaaaccagctgagcaaactccggtaggtattttgttagttgccgaactcatccaagatatcttaccgccaggcgtacttaatattgtgaatggtttcggtgcagaagttggccgtccgttagcgacaagcccacgtattgccaagatcgcgtttaccggttcaactcaaactgggcaaatggtgatgcaatatgcgaccgaaaatattattccagtcacgctagagcttggtggcaagtcaccgaaccttttctttgaagacatcatggataaagaagatgacttcttagaaaaaacgctggaaggttttgccatgtttgccttaaaccaaggtgaagtatgtacttgcccttctcgtgctttagtacaagaaagtattgctgatcaattcttagagttggccgtcgaacgcgtaaaacgtattaaaactggtcatcctcttgatactgaaaccatgattggtgctcaagcatctttgcaacaacaagagaaaatcttacgttgtattaatacgggccgagaagaaggtgcagaactcttacttggtggtagtggccgtaaagaagtaggtgatggtttctatgttgatccgactatttttaaaggccacaacagcatgcaagttttccaagaagaaatttttggtcctgtactggctgtgacaacatttaaagactttgacgatgcaatcaaaattgccaacgacactatgtatggtttaggtgcaggtgtatggtcacgttcagcccatatttcttaccgtgctggtcgtgctattgaggcgggtcgtgtctggacaaactgctataacatctaccctgcgcatgctgcatttggtggctacaagaagtctggtattggtcgtgaaaaccataagatgatgctagatcactaccaacaaactaaaaacttgttggtgagttattcaaccaaaccaatgggcttcttctaa

SEQ ID NO: 43769 - DNA, 1437 bp, Acinetobacter baumannii
atgaatcaaccagaaacagcttccgttatttcttcaagtgcagaagtctcatcagcagaatattttgctcagcgccaacttaaacaaggtaccgtgggttggttactcctgattggtttaggcgtagcttatgtgatatcaggtgattttgccggctggaacttcggtattgcccaaggtggttggggtggtatgtttattgccactgctcttgctgcgcttatgtacttatgtctatgtctttctatgtcagaaatgtccaccatgatgccgacagcaggtggcggttatagttttgcacgtgctgcatttggtcctttcggaggctacttaacaggtacagcgattttaattgaatacgcaattgcgcctgccgctattgccgtatttattggtggttattgcgaatctctatttggtattaatggctggatgatttacctcgcctgttatgccatttttatgggtatacatctcaaaggtgccggcgaagctttaaaaatcatgtttgcgattacacttgtcgccgctgttgcccttgtcgtgtttattggggcaatgattccacactttaatgcacaaaatttatttgatattccattcagtacaggtgttggcgcaagtctttttttacctcatggctacttgggcatctgggccgcggttccttttgctatctggttttttcttgcagtagaaggtgttccgttagcagcagaagaagcaaaagatccagccaaatctctgccacgcggtttaatcggtgcaatgctcatcttaacagcatttgccatgcttattttgttcttgggtgcaggcgcagcaggtgcaagtactttacaaaactcaggtgcccctctggtagatgctttggttaaagtttatggcaccaacacttggcttgcgacattcgtaaactttgtgggtttagctggtttaatcgcaagtttcttctcaattatctatgcctattcgcgtcaaatctttgcattgtcacgagctggttacttacctacttcactctctttaaccaataaaaataaagccccttatcttgcaattattattccgggcattatcgggttcttgctttcacttaccaaagaaggcgattcactcattttaatcgcggtttttggtgcaactatttcttatgtgctgattcttttatcacacatcaaactgcgcttatctaaacccgacatgcctcgtccttataaaactccaggaggaatcatcacttcaagcattgcactagttttagcagtcgctgctgtggtcgcaggttttgttgttaatccgaaagtgtggtttattgctgccggtatctatgtcgtatttattgcttactttttgttctacagccgctatcatttagtgaaaggaacaccagaagaagagtttgcaaatattaaagccgcagaacaagaactataa

SEQ ID NO: 43770 - DNA, 1386 bp, Acinetobacter baumannii
atgagttatcgcaatattgtcgccaatcaacagtatcactttgctgacctaaaaacgttaatggccaaagctacaccgttacgttcaggcgatgagttagccggtgtagcggccagagatgcaaccgaacatgttgcggcgcaaatgactttggctgatgtgccattaaaaacctttttaaatgaagttgtaatcgattatgaaactgatgaaattacacgactgattattgatgaacatgatctggcagcctttgcccctatttcacactttacagtaggtgattttagaaattggctacttggagaagatgccactccagaaagcttaaaagcattagcatcgggtttaaccccagaaatggtggctgctgtcagcaaaattatgcgcaatcaagatttgatttatgtcgccagcaaatgtgaagtggtcacccaatttcgcaacacaattggtttaaaaggacatctttctacccgtttacaaccgaaccaccctaccgatgatgtgctcggtatttctgccagtattttagatgggttgatgtatggcaatggtgatgccgtaattggcattaaccctgccacggataacctgcataatttgtcagagctactgaaattgcttgatcatgtcattcaggaatatcaaattccaacgcaatcttgtgtacttacgcatatcagctcaggcattcaactggctgaaaaaaatgtaccgattgatttaatgttccaatcaattgccggcacccaactggctaatgaaggttttggaatttcacttgatttactacaagaaggatatgaagccaccctctcactcaagcgcggaaccattggacaaaacgtcatgtactttgaaacgggtcaaggtagtgccctatcaagcaatgctcatcacggagtagaccaacaaacattagaaactcgtgcctatgcagtggcccgtaaatacaatccgcttttagtgaatacagtcgttggttttattggccccgaatatctctttaacggtaaacaaattatacgtgcgggactggaagatcacttctgcggtaagttacttggcgtgccaatgggttgcgatatttgttataccaaccatgccgatgccgaccaaaatgatatggatgtacttcttactctatttggcgccgcaggcattaactttattatggggattccgggttcagacgatgtcatgctcaactatcaaaccacttccttccatgatgccctctatttaagacaactcttaggtttaaaacccgctcctgagttctccgcttggcttgaacaacaaggtatttttaaacagcaaaactctcaaatatgttgggcagaccatatgcctgaccaattctctcgtctgctcatgaactag

SEQ ID NO: 43771 - DNA, 816 bp, Acinetobacter baumannii
atgaaacttaatcgtgatattcaatatccatcctctacccatcaggatcagtgggaaaagctcaaacagtttaccgatgcccgcattgctctgggtcgtgcaggttgtagtatcccaacacgcgccttacttgagtttcagttgtctcatgcacaagcaaaagatgcagtttatcaagagatggatgtttcctacctctcggagcaattagcacagcagcagctgcaaagttttcatatacaaagtaatgcacctaataaagaaatttatcttaaacgtccagatttggggcgccaactttcaaatccatcaaaagataccttaattaagaagtatgcagaaaacccgcaacagtatgatgtttgtattgtggtaggtgacggtctctctgcaagagcgattgaagcaaatgctatcgtatttattgcagcgctaagtgaacaaattcagcaagaaaattggagccttgccccgattgtacttgcaacaggaagcagagttgctttaggcgatgaagttgcagaaatttttaaagcatccatgttagtcatgctgattggagaacgccctggtttaagctctcctgacagtatggggatttactacacatggaatgcatattcaggctgtctcgattccaaacgcaactgtatttcaaatgttcgctcagcaggtttaagtattccggttgctgtacaacgtttaatggcattaatgagaaaatcaaaacagcttggcttttcaggagtgaatttaaaagatgaacatcaactttcaaatatcgaccataatgaaaacgcaaagcttttattttaa

SEQ ID NO: 43772 - DNA, 723 bp, Acinetobacter baumannii
atgaacacaacaaacgccttccctaaaactatttatgccattcagcatcttgctttcgaagacctaggttcattagaagatgttttttatcaacttgggtttcgcgtccgctattttgaagcaggtgtggatgatttaacccctgcttttatacatgacggtttaactattattttaggcggcccaatcggagtttatgaaaccgaagattatccgtttttaaaagatgaaatcgctttacttaaacaacgcttggcagcagataaacctacacttggtatttgcctaggcgcacagcttattgctcatgcacttggggccaaagtatatgcaggccatcaaaaagaaattggctggggaaccttaagcttaagtttacgtcctaatcaggtattatcacctttgcttaataatgtgcatgttttacactggcatggcgacacttttgacctgcctgaaaacgcagtgttattagctagttcagagatttatactaatcaggcatttgaagttggaaataatattcttgccttgcagtttcatattgaaacaacagaagaaaattttgagaaatggttaattggccatacatgtgaacttcgtaatgccaaaatttcaattccgaaactacgagaagaaaacttacaatatgctcaagcacttgaacatgctgcatttgaagttattcaaaagtttctaaaacgaatcggatatagtggttaa

SEQ ID NO: 43773 - DNA, 1728 bp, Acinetobacter baumannii
atgaagcctaatgatgttgtctcgaacctgccaaacaacccgacaccgaatactcatgcctctgtcgattctgcgcagcaagaacaacaggctggattagattttgttcgccaagtcattaccgatgatttagctgccggacgtgccaaacaaatcgtaacgcgtttcccgccagaaccaaatggttatttacatattggtcacgtaaaagcaatttgcctcaactttggcgttgctgaagagtttaatggtctttgtaatttacgttttgacgatactaacccggatgcagaagaacaagagtatgttgatgggatcgccaatgatgtgaaatggcttggatttagctggaatggcgaaccacgttatgcttccggttattttgatcagctttatgcttgggcaattcagttgattgaacaaggtgatgcatatgttgatttgcagtctccagaagaaatcaaattaaatcgtggtagctttgttgagccaggtaaaaattcgccatatcgtgatgcttctgttgaagaaaaccttgctcgttttgaaaaaatgcgcaatggtgaacttaaagaaggtgaagctgttttacgtgccaaaattgatatggcaagcccgaatgtacatatgcgtgacccaattttgtatcgtgttttacattcagagcatcaccaaacaggcgataagtggaaaatctacccaatgtatgactatgctcatccattgtctgatgcgatcgaaggaatcacacattcactttgtacattagagttccaagaccaccgtccgttttatgactggattgttgaaaaagttaagtctaaagctgtgccgcatcagtacgaatcttctcgtttaaacgtagattacaccattacgtctaaacgtaaattacgtaaattggttgaaggcggttatgtgaatggatgggatgatcctcgtatgccaacggttgtcggtatgcgtcgccgtggtttcacaccagaaggcctacgtgatttctgtaaacgtgtaggtgtgtctaaaactgacggtattgtggatgtcgcaatgcttgagttctgtattcgtcaatctttagagaatacggcagcgcgcggtatggcagtgttaaatccattaaaagtaacacttacgaacttaccggaagatttagaccttacccatgctcgtcatcctaatgtcgatatgggtgagcgcgttattccattgactaaagaaatctatattgaccgtaaagatttcgaagaagtaccgccaaaaggctttaaacgtttaattcctgatggtgaagttcgtttacgccatgcatatgtgattaagtgtgatgaagtcattaaagatgcaaacggtgaagtcgttgagctgaagtgttcaatcgatccggatactttaggtaaaaatcctgaaggtcgcaaagtaaaaggcgtaatacactgggtatctgcaactaaaggtattcctgctgaggtacgtatttatgatcgattgttcacagaagctgaccctgaaactggtgatgatttcttagcaaacttaaatccagattctttgaaagtggttcaagctgtgatcgaacctgctttagctcaagcgaagccagaagatcgcttccagtttgaacgcgaaggttatttcgttgctgatcaatacgatcatactcctgagaagcctgtgtttaaccgtgttcttgacttaaaagacagcttcaagcctgagaaaaagtaa

SEQ ID NO: 43774 - DNA, 510 bp, Acinetobacter baumannii
atgagttttcctcaagtcgaattaaacaccaacaaaggtcgtattgttcttgagcttaacactgaaaaagcaccgaaaacggctgctaattttctagaatacgtacgtgacggtttctatgatggcgtgattttccaccgcgttatcgacggtttcatgatccaaggtggtggctttgacgaaaacttcaaagaaaaagcaactcgtgatgcgattgaaaatgaagctgacaacggtttaagcaacgatgtaggtaccattgcaatggcacgtactcaagctccacactctgcttctgcacaattcttcatcaacgtaaaaaacaactctttcctgaaccatacttcaaaaactgcacaaggttggggttatgctgtattcggtaaagttgttgaaggtatggacgttgtagaagcaatcaaaggcgtacgtacaggtaaccgtggttatcacgctgacgttcctttagaaaacgttgttatcgaatctgctaaaattatttctgaataa

SEQ ID NO: 43775 - DNA, 720 bp, Acinetobacter baumannii
gtgacttatctgtttatttcagatttacacttgtcacctgaacaccctcgactcgttcgagggtttttagatttgttggtacattatcaaaataaacaaacacagctttatattttaggtgattggtttaatgcttggattggtgatgactattcagcgccttggctcgacgaaattgtcgaggctttgaaagtatttaaccaaaaagggaatcgcgtttatttccaagtgggtaaccgagactttgctttaaatcaggttttccttgataagtttaatggtgtattacttcctgatatttattatctcaacattgcaggtcaccaataccgtttggaacatggcgatgcgttatgtactgatgatatttcctatcaaagatttaaaaaaattatccgaaatcccttcctagttgcttttttacgccgtactcccttgagtttccgtacgaaactggtcaatggttttcgcaaaagaagccattcaaacaaacagcaaaaaagttatgaaattatggatgtaaatgaacaagctgttctctctgccctcacagatgtagatatacttattcatggacacactcaccgtccagcaattcatcaattacaacataaacagcggattgttcttggcgattggcgtgaagatcatgcacaaattttagaaattgatccctcttcacatctgcagcaaatcaaactagctgattggtattattaa

SEQ ID NO: 43776 - DNA, 219 bp, Acinetobacter baumannii
atgtttgaattaataccaattaatcgaaaaagtaagctgcgagaaattagaattattaaagcctttctaatttttgcatttgtattgtgtcttttaattttatatatcgaatatcaaaagtatgcacatataaactggaaatttgtatttattacctgtctatgtatgatttgggattttgatttaaataaacaatctaagtatttgaaaaataactga

SEQ ID NO: 43777 - DNA, 654 bp, Acinetobacter baumannii
atggatttattaaatacggttaaaagtcgctacactaccaaagcgtacgatcccgagaaaaaaattcctcaagaaaaattcaataagttattagaaattttacgctttaccccttcttcagtgaatattcaaccttggcatttcttggttgcagacaatcctactgctaaagaacgcattgccaaagccttaacaggacgatatgcctacaatgcacccaaggttcttgagtcatcacatactcttgtattttgtacgagaacagatatttcatccgaatatttaaatcagttacttgaacaagatgatttaagtggccgttttaaagatgagaaagccaaacttggtcaaaaggatactcgtcatggctatgttgagttttaccgcaatgagcaaaagaatttattcggctggatggaaaatcaaacttttatcgctttaggacaactactgtttgcagctggtcttgaaggcatagatgcaaccccaatgggtggctttgacgaaaatgttttaaatgaagaatttggcttaaaagaaaaaggcctgcgtagctctgtaattgtttcactgggttatagaagcgaaaatgacttcaatgcgaaattgccaaaatctcgtctgccggatgaagttatttttacacatttataa

SEQ ID NO: 43778 - DNA, 858 bp, Acinetobacter baumannii
atggtattaatatttgctgcagcattgtgcagtgttctggtttctgtactacttaaaaatttaaagaaaaagggatatcaacccatgcaaatgattgcatggaattacgcaagtgccagcttgctatgttatctgtggtttaagccagatattcagcatatttctatacaacatacaccttggtggctaatagtggctttaggcgtcattctaccgagtatttttttgtgtcttgctaaatctttagagtacgcaggtattgtcaaaaccgaaattgctcagcggctgtccgtggtactttctttattggcggcttatttctttttccaagagcagtttaattctcttaaattattagggataggtttgggaatttttgctgttctcttaattttattaggtcatttcaacgagtcttccggatctcaatcaaaaaaagcaatttttgctttgatgagtgtttggtttggatatgccgctgtagatatcttgttaaaatatacgagtagcttaggcctacagtttactttgactttaaatctaatttttataacggcctttgttttatcgattatttatttaatatttcaaaaaaattcagcatggcattttaaaaatacttttgctgggttaatgctaggcgtactaaatttttcaaacattgccctatacgttaaagcgcatattttactcaaagattctccggccattgtctttgcgagtatgaatattttggtcgtgttacttggaatagtgtgtggcgtagttttatataaagaaaaattaaaattacctaccatcctaggaattattttaggaataagcggactggtgagtttagccttagctatgaaatag

SEQ ID NO: 43779 - DNA, 453 bp, Acinetobacter baumannii
atgtctaaaggtcaaactttacaagatccgttcttaaattctctccgtaaagaacgcatcccagtttctattttccttgttaacggtattaaattacaaggtcatattgaatcttttgaccaatatgttgttttattaaaaaatactgtaagtcaaatggtttacaaacacgcaatttctacagttgttccagctcgtaacccacgtccagcaggtgcacaaggtgcaggtttcccagctcagggtggtagtcaaggtggcttcggtggtcaaggcgctggctttggtggtgctcaaggtgctggcttcggtggccaaggcggcttcggtggtcaaggtggcttcggtggtcaaggcggcttcggtggtcaaggcggcttcggcggacatcaaggcggttttgataacgattctaaatttgaagatggtcaagacgacgaaaacaatcgttaa

SEQ ID NO: 43780 - DNA, 945 bp, Acinetobacter baumannii
atgtcaaaccaattgcccgtcatcaatttaatgggaccgactgcaagcggaaaaaccgctttggcatgtgaactctatgaacgtggaaattttgaattaatttcagttgattctgcacttgtatataaagatatggatattggtacggctaagccaacacgtgaagagcaggagctatatccacatcatctaattgatattattactccacttgaggtctattcggctgctcagtttgttgaagatgcttgtgctttaattgatgagatgcattcacgtggcaaaactcctattttggtaggaggaaccatgctgtatttcaaagctctcttagaaggattatcaagtaacttgccaagtgcagatgcaaatgttcgcgcagcaattgaagaaaaagcagcaaatgaagggtggcaagctgtttatgatgagctagtggcagtagatccggcggctggagtgaagtttaaggtttctgataaacaaagaattattcgggcgttggaagtttaccgtattacaggtcaaccaattaccaaattgcaggcagaacaaccaaaaaatgtaccatatcgatacacatttcataactacgctttacttccagatcggttagaattacatcaacgcattgagcaaagattaagcaaaatgtgggatatcggttttttgagtgaagtcgagtctctaattgaaaaatacgatttagatgaaaatttaccctctatgcgttctgttggttatcgacaagctctagaatttctattaaaaagtgatatgagtctcaaaaaaaagcaggaaatggaggataaagccttatttgcaacacgacaacttgccaaacgtcaatatacgtggttacgttctttgcaagaaatacacgattttaaaacttacttgacgataaagcaggcgaaagaagacttgcgaaactcttatggataa

SEQ ID NO: 43781 - DNA, 1953 bp, Acinetobacter baumannii
atgactgatgaaaagctaacacaacgtcgtattcatacattagacgccgcgttagcgaaccagattgctgccggtgaggtgattgaacgtccttcatcggtcgtaaaagaattattagaaaactcaattgatgcaggtgcaaccgaattaattgtgcggattgcacaaggcggctcaacattaatcgagattattgacaatggacatgggattcatcctgatgatttaccattggcagtgatgcgccatgcaaccagtaaaattaaaacagcagaagatttacatgccattgttagcttaggtttccgtggtgaagcacttgcttctattgcagcagtttcacgattgactttaaccagtagccaagatgaaagcggaattggtcatcaggttgaggtgaatggtaccgcctttgatcatcaacaagtccaagctgttgctgcacaaaagggcacccatattcgagttcaggacttgttttttaatgtgcccgctcgccgtaaatttttaaaaaaaccaaccactgaatttgggcatattgaagaaattgtacgccgtttagctttaacgcattttgatatacgttttgtacttgagcataacgataatattcgaattaatttaccaatagcagatagcggtgaattaagatttcagcgtgtacagcaattattgggtcaacagtttgttcaaaatgcttactggatcgatgccgaaagtattaacatgcgtttgtcaggttggctagggcatccttcagatgcaagtgcccaagcagacttacaatatgtgtatgtaaatggccgaattgtgaaagataaaaccatttcacatgctttaagaatggcatatgacggtattttacatggccatcagcattcatcttatttacttttcttagaagttgatcctgaaaatattgatgttaacgttcacccgacaaaacatgagattcgttttctaaatcaacgtgaagtacatgagtttgtaagacattatgctaaagaaacgttagcacaatttcagacagctagtgctgatttagcacaagccatgaaagtggatgatattcaaaatctttcggtacaacctcagcctaaataccaagaacaatttacattgcaccgtacagcgcaagccgctgatacagcagtagacaaaccaaatggttatcagccttctactgagcttttaactgattttaataatagtcgtccccaagctgttcattatgcggaacaaactccaaaatataatggttctgcgcagttaaataatgcattaaagacttacttggctccattacgtgatcaacctacaaatttttcagttgatgaaaatattgagcctgtcgctaaggtagatgaatttccattaggtatcgcaattgcccagcttcatggaatttatattttggcgcaaaatactgaaggcctgattattgttgatatgcatgcagcacatgagcgtattttgctgcaacaaatgaaaaatgcttgggataaacctgaattttggacatctcaacagttgcttatccctaaagtgatctcaattagtcgtatgcaagctgttcgtgttgaggatttaaaacctcagcttgaacgcttagggttagagattgatttatatggcgatgagcaagtcattgtgcgtggtgtgccggctattttgcaaaaagcggattttgaaaatcttattcccgaacttctcaatgacttagatccaaatgatgaagcacaaggtttattgcaaaagcgtgatgaactgttagcaggtatggcgtgtcatggtgcagtacgtgctcatcgacaacttagtctctcagaaatgaatgctttacttcgccaaatggaacaaaccgaatttgcaagccaatgtaaccatggtcgcccaacttggcgtgcatttccattatctcaactagataaattatttgctcgaggagagtag

SEQ ID NO: 43782 - DNA, 456 bp, Acinetobacter baumannii
atggtcttaaatcatgaagaagatacccagcgtttagctcaggcattggcgcagcatgttcaagctggcgtgatttatctgattggagatttgggcgccggtaaaacgacattgacccgttattttttgcaagctctagggcataaaggctcggttaaaagtccgacgtatacgttggttgaaccatataaaatcaataataaagaaatttttcattttgacttatatcgtctcaatgatccgtacgaacttgaattaatgggaatccgtgattatctagatattcaggatgcactatttttatttgagtggccatcgaaaggtggagacgaaatccctgaagcagatatcgtcattgatattcaaaaatcagatgatgaactcaatcgtttcgtcaccttaactttaccaacagagcatttataccagactttgcaggaacagcttcatgactga

SEQ ID NO: 43783 - DNA, 909 bp, Acinetobacter baumannii
atgtctagtccgattgaatttttcccacctatgattgatggcgtaagcgcaagccaagtctatcttcctccacaaacgacagcacaaaccatctatcaatttctttgcgaaaattttccacatataaaagcaacagagtggcagcagcgttttcaagatgggcttatttacgtggcaaatggcgaaaaattaacattaaacagcccttatatagcaaacacgcatattttttattaccgattccttgctaacgaagtacatgttccctttgagcatcagattttatttgaaaatgatgacttgcttgttgtagataaaccccattttttaacgattagcccaacagggcaatatgtacaagaaactttattagtccgattaaaaaagcaaactggcaatgagtttttaaccccgatccatcgattagaccgtgaaactgccggtgtcgttttattttgcaaacgaccacagtcacgtggaatttaccaacagttatttgcagatcgtcaagtcaataagatttaccatgcaatcgctgcatataaagctgaattaaaatttcctcagaatttaaaactgtatttagataaaggtactcccttttatacaatgcaggtgattgcacatacaaaaaccaataccgaaactaaaattgagctgattgaacataatcactcatgggctaaatattgtttaacgccaaccaccggaaaacagcatcaactccgcgtccatttaaatcatttgggaattccgattaaaaatgatccgttttatccaatagttcaacataaagccgatgatgatttttctcagcccttacagcttctagctaagcaaatttcttttatagacccgctaacaaaacaggaaatggttttcaattcacagcttgaattgacactgtaa

SEQ ID NO: 43784 - DNA, 309 bp, Acinetobacter baumannii
atgcgaaaaacagaagtttatcaggttcgacttgactcccaagagaaaaaacaggcttttgctgtttttaaacaattggggattacccctgcccaagcagtgcgactgttctttaaacaagtcgtcttaaccaaatctattccttttgcgatcgaaaaccagaatattaatatggaacaattattaaaactgagaaaagcaaaagcatcttcattaaatcagaacgcttcaactttaaatgaagatgatgaccatgaagatttatttgaagagttaaatgcactattaggtgaaagtgacaaaacttaa

SEQ ID NO: 43785 - DNA, 444 bp, Acinetobacter baumannii
atgattgtaagacgagcgacctatgaagatctaagccaactcgctgtcctatttgatgaataccgtcaattttatggtgcatcttctaatctcgaagaatcccatcatttcttaaaacaacgttttgagaataaagagagcgtatttttcatccatattaaggacgaaaaaattactggattcgtattactttatttaggtttttcttcagttgcttgttcaacttactacatcttagatgatgtatacgtcactccccctttccgtcgtcaaggctcggcaaaacagctcattgatacagcgattttatttgcaaaacaagaaaatgctttacgtattagcctagaaacccaatcgaataatcatgaatctcaccgcctctatgaaaaaatggggtttattagagacagtgagtttcagacatttcattgttttcttaaataa

SEQ ID NO: 43786 - DNA, 705 bp, Acinetobacter baumannii
atgctgctggaaaaaattttacaatcacaagggtttggttcacgtaaatattgtcagcagttaataaaaaatggttcagtaattattgatggggaggttgtgagtgatctcaaaaagcagttctccccagaaaattttgagttttccgtttttggtcaaaattatcaatatagagaaaaaatttatattgctctaagaaaacctcaaggttttgagtgttctcatcatcctcagcatcatcaaagtgtttttagcctactgcctgagaccatgattcatcgtggtgtgcaggcggttggacgcttggatcaagacacaacgggtctgcttttacttactgatgatggtaaatatctacaagctttaactcatcctcgtaaacatgtaccaaaggtttatcacgttacaacttacgaccccgtaacccctgagcaaattgaaatgcttactcaaggtgttaatttacaccaagaaaaggggggatttgctgccacagatgtagcactactaggaactcatcaattaacgatgactattcatcaaggtgtttatcatcaagttaaaagaatgattgcagccgtaggcaataaagtcgagaagttacatcgacatcaaattggtcaattggttttacctgaaattgaggaagggggctgggtatatttgtcggagcaggaaaaacaactcgctcaaaatattatttaa

SEQ ID NO: 43787 - DNA, 219 bp, Acinetobacter baumannii
atggatattatagatatcaagatcaaagatcaatttgatcaaattcatgatgcgaaagctcaattaaagaagaatttagttgaacatgaaaatgagcctttaaagctaagtcagcgtatcgaacatattattgtagataatgaggtgatcttacccactacagaattgctatttgaaagtgaacaaaacgaaaaaatttatcgcgttattgaagaataa

SEQ ID NO: 43788 - DNA, 453 bp, Acinetobacter baumannii
atgcttgcccaattcgatgttaatttagttgttttattagttttacttatctgcggtttactaagtcaaaatgcagctgtaactatcgcagcaggtattttaatcgtcataaaaatcacgccattaaatcaattttttccttatattcaggctcatggcctaaacttaggcatacttattctaacaattggggtactcacccctattgcaagtggcaagcttagtggagagagtattttaaaatcctttattagttttaaatctttagtcgctattgcaattggtctgctcgtcgcgtggctaggtggtcgtggtgtaaaacttatgtcgagccaacctgatgttgtggcaggcttacttattggtacggttgcaggtgtagcgttactccgtggtgtacctgttggcccgctgattgcagcaggtctattatctttgtttataggtaaataa

SEQ ID NO: 43789 - DNA, 921 bp, Acinetobacter baumannii
atgttagaaattcgacaccttaaaactttagttgctttacgtgaacatggttcactggtcgctgcagctaatgacctatgcttaacgccctcggctatttctcaccaattaaaagaattagatcattggtatggggtagaggtggttaatcgccgcagtcgacctgttagtttttctaatgtaggacaacgcctacttaagttagctgatgatgtattgccgcaaattcagattactcagagtgacattacacgtattgtgcacggacaaacgggcagaattattttttcatctgaatgtcatagctgttttgactggctaatgcctttactcaatcagtaccgtcagcaatatccagacgtcgatttagactttgcttcggggtttgaagcgaatccacatgaacttttacaaaatgctgagtttgatttacttattacagccgatccgattgcgctaaaaggaatcgaatacttcccgatttttgaatatgagtcgcgtttggttttatcaaatactcatcgattggttcgtgctgaaaatattactgttcaggatctcgcagaagaggttcttattacttaccccgttgataagcaccgtttagatatcatgtcgaaactgtttatacctgcaaatattcaaccaaaacaaatccgaacaacagacttaacgcaaatgcttattcaacttgttgcgagtggccgaggtattgctgctttgccagattgggtagtcaatgaatacgaacaaaagggttgggtgactagccgtcgtctagattgtgtttctccagcaggtttaagacgtacattgtatgcaggttatcgaactgaagaaaaagagaagagctactttgaaggtttcttaaagcagctagaaaagttttctttaaaacgcacttcttactattcaggctaa

SEQ ID NO: 43790 - DNA, 795 bp, Acinetobacter baumannii
atgaatagattattagtaacatcacttgcttttgtatgtagttacagccttgctcatgaaccttatgttgcgccattagcgtataaaactgagcagacacaagtaccggtagtagctggttatgctgaagaagcactaaatagtgaatacgctttaaaagatgccaagcttaccgtcattacccctaaacaagatcctaaagttattaatgctgaagccctacataaatctgtaactgttttcgatgttgctttaccggaagacggtacatatattctgcaaactcaggcgagttaccctttaaaatacgtatatgatcaaaaggagtggcatttattttttgatttaccagcagataaagctccgccaagaaaagagcgtgactatctaattcctgctgatcttaaaactaaaaaaattaaaacagaggaagtaacaagagaatgggtgttacaaagttatctttcaaaaggtaaagtttcagatattcaacttccaaatacaccagttaaagttaatttttctgttcatcctaaccagcttaaagttacccaagcagttcagctaaccataagtgaaaaaggccagaacctaccttatgctgaaattaatttaagagaaaaaggtgcaactgataaacaagtactacattttaaagctgatgataaaggacaagttgaacttaaatttccaaaagctggagaatatttaatggaagtcacagctccagtggatttaaagttaaagcctaaaaatcaaaattatacgattgttagcttacaagttaccgagtaa

SEQ ID NO: 43791 - DNA, 429 bp, Acinetobacter baumannii
gtgagaaaattatgtattgcctgccttattggtatggctatgttatctatgtctggttgtgccgtatttatggctggcaatcaaccaagtaaaaaaaatttaaatgttttaaatccgggtagctctcgtaattatgttattgcagagtttggggcacctgtattgtctgagtaccgtgatgggacaagagttgaaatctatacattccagcaaggttattcaaagtgggtgaaagtaggtcgtgcatttgggcatggggttgcagatgttgcctcaataggtttatgggaagtatttggaactccagctgaagcatactttaatggtaaagaaacaacttatgaagtgacttatggtgaagatgatttagtaaaaagttataagctcattgactttaatcaagcttttccaaaagtaaaagaacaatga

SEQ ID NO: 43792 - DNA, 1200 bp, Acinetobacter baumannii
atggcgtcaccccaatccccttcatcttcctctcgacattactcactcttcttggcaattttttctctcgcagtaggcggtttctgtattggcactacagaatttgtcgcaatgggtcttattcaggaaattgcacacaatttaaagattacagtacctgaagctgggcattttattagtgcttatgcattaggtgttgttattggtgcccctattattgccattttgggtgccaaagtacctagaaagaccctattgctttgcctcatgctgttttatggtattgccaatgcatgtacagctttagcacataccccagaaaccgttttagtctctcgttttattgcaggtttacctcatggcgcatattttggtgtcggcgctttagtcgcggctgaactagcaggcccttcacgaagagcttcagcagttgcgcaaatgatgatgggactgaccgttgctaccgttattggcgtacccttagcaacatggttaggtcaacattttggctggagagcaggttttgaattttcagcaacgatcgcattctttactttaattgctgtagcttgctttgtaccgaatattccagttcaagctactgccagcataaaaacagaattagcggggcttaaaaatataaatatgtggttaacccttgcagtcggcgcaattggttttgggggcatgttctcggtatatagctatgtctcaccaattctcactgaatacactaaagttaatatccagattgttcccattgcattagcgctgtggggcatcgggatggtgattggtggtttagctgcgggttggcttgcagataaaaacctcaataaaactattgtgggcgtactcattagctcagcgatcgcatttgtagtcgcaagctttttaatgagtaatatctatagcgcaattggctctttattcttgattggcctaaccgttatgggtttaggtggggctttacagacacgcctcatggatgttgcaggtgatgcacaaacgctagcagcttcacttaaccactccgcctttaatcttgctaatgcattaggcgcttttttaggtggttgggtactgagccatcagatgggttggattgcaccaatctgggtaggttttgtactaagccttggtggccttattatcttactcattgcatttgctgtagaaaaagcaactcaaaaagcctga

SEQ ID NO: 43793 - DNA, 984 bp, Acinetobacter baumannii
atgcgaattttagcatggaagacagtacgtcggttcttctataacaaccttcataatcatgattatgaaacgacagtaagtagatgtattaactactttttagttttcttaattattgggaatgtagttgctgtattactagaaacagtaaatgatctgtattacagctaccgtatatggtttgactactttgaaaatgtctcaattgcaattttcagtgttgaatatctcttacggctctggagtatagtcgagcgtgatctgacacaagctgcatggaagcaacgtttagcatggatgaaaagtggtgaagcactgattgacctcatggcaattttgcctgcgtatctaaatttctttgtacgaatagatcttcgtatgttaagaattttacggttacttcgattattaaaattaactcgttatttcatttcattgcaaatattgctatgtgtgattaagcgagaaaaaggttcttttcaggcagtgatttttattttaatcattatgattattatgactgcctctggtatttatgtcgttgagaataaagcgcaaccggaagcttttagctctattcctaaagcaatgtggtgggcggttgtgactttaactacagttggatacggcgatgtcacaccagtaactagtttaggaaagttattgggagccttaattacaattctaggggtagggattgctgctttaccggctggtattttagcttctggtttggccaatgaacttaaccagcgtaatcagcgccttgaacaagagttccgtgagttacttcaagtgcgtggtattgatattatgcatgatgaagttgaaatagaacgtattcgacagaaagtagggctaccaaaagaacaagcgcataatctgattatccaaattatgcgcgaaaaagtattagaagagaaagaagctgttagagagaagaaatgttattgcccgcactgtggtgaaaagttaacagattag

SEQ ID NO: 43794 - DNA, 435 bp, Acinetobacter baumannii
atgctaaagacaattgttgaatttaaatttgatgattatcagctatatgatcaaaatttatcagcagaagacggaaatacgttagtacagaaaactgaagatattgcacagtatatttatagtatattgaaaaatagatatcacttaagtattgaattaactgctgagcgttggggctgggaaatagaagtcccattacctgagatcaccatgtatatcggtattagtgtgtatgaagaatacagtaatggctttgcgatatttatttcaccaaatacaccaattttgagaagatttctttttagaaagttagatattactcaccatattatgttgctacaaaattatattaatgtcattttgaagtcccatgccggtatatatgatgtgcaatggtgggaggaaaatgagtttagatatgttgcagcgcattaa

SEQ ID NO: 43795 - DNA, 2640 bp, Acinetobacter baumannii
gtgctagaagcttaccgccaacacgttgctgaacgtgccgcactcggagtcccaccgaagccacttgatgatgctcaaactgctcaacttgttgagttattaaaaaacccaccggcaggtgaagaagcattcttggttgatttgcttgaaaaccgtgttcctgcaggtgttgaccaagcagcttacgtaaaagcagctttcttggcagcgattgcaaaaggcgaagcgacatctccgctagtttctaaagaacgtgcagtttatttactaggtacgatgcttggtggttataacgtagcgcctttagttgagcttctggatgatgctgaattaggtagcttggctgctgaagctttgaaaaaaacattacttgtatttgatgcgttccatgacgtagctgataaagctaaagctggcaatgcaaatgcaaaagctgttttacaatcttgggctgatgctgaatggttcactagtcgtaaagatgtaccagaagaaatcaaaatcactgtgttcaaagtaacaggtgaaacaaacactgatgacttgtctccagctcaagacgcatggagccgtccagacatcccattgcatgcaaatgcaatgttgaaaaatgagcgtgatggtatcaatcctgaaaaaccaggtgaagttggtccattaagccaaattaaagaactcattgctaaaggcaaccaagttgcttatgttggtgacgttgttggtacaggttcatctcgtaaatctgcaacaaactctgttctctggttctttggcgatgaaatcgctcacattccaaacaaaaaagacggtggtgtgtgcttaggcggtaaaatcgctccgatcttctttaacacaatggaagatgctggtgcattaccagtagagatcgatgtttctaacatgaacatgggtgacgaagttactcttaaaatcgatcatgctgctgcaaaagtaactgcgttcaaaaatggcgaacaaatcgctgagtctgaacttaaaactccagtacttttagatgaagtacgtgctggtggtcgtattaacttgatcattggtcgtggcttaactgctaaagcacgtgaagctttaggtttagctccatctacattgttccgtactccagtacaaccagctgacactggcaaaggtttcactttagctcagaagatggttggtcgcgcatgtggtcttccagaaggtcaaggtatccgtccaggtacttactgtgagcctaaaatgactacagttggttctcaagatacaactggtcctatgactcgtgatgagttaaaagacttagcttgcttgggcttctctgctgacttagtaatgcagtctttctgtcacactgctgcttatccaaagccagttgacgtacaaatgcaacatacacttccagacttcatcatgaaccgtggtggtgtatctttacgtccaggtgacggtattatccactcttggttaaaccgtatgcttcttccagatacagtaggtactggtggtgactcgcatactcgtttcccaattggtatttcattcccagcaggttctggtcttgtagctttcgctgctgcaactggtgtaatgccacttgatatgcctgaatcagttcttgttaagtttaaaggtaaaatgcagcctggtatcactttacgtgaccttgtacatgcgattccttactatgcaatcaaagaaggcgatcttactgttgagaaaaaaggtaagaaaaacatcttctctggtcgtatcttagaaatcgacttaacagaaatggaaactgacttaacagttgagcaagcattcgaactttctgatgcttctgctgaacgttcagctgctggttgtgcaatcacactttcagaagagaaagttgctgagtacttacgttctaacatcacaatgcttaagtggatgatttcacaaggctatggtgatgcacgtacgatggctcgccgtgttgaaaacatggaaaaatggttagcaaacccaagcttacttaaagctgatgctgatgctgaatacactaaagtgtatgaaattgacttgtcagaaatcaaagaacctatcctttgctgcccgaacgatccagatgatgcaaaacttctttctgacgttcaaggcgacaaaattgatgaagtattcatcggttcttgtatgactaacattggtcacttccgtgctgctggtcagttacttgaaaaagtaccaagcggttcattaacaactcgtttatggttggctccaccaacacgtatggacgaacatcagttaatggaagaaggcttctataacacttatggccgtgctggtgcgcgtactgaaatgccaggttgttcattatgtatgggtaaccaagcacgtgttgcgccgaacacaactgttgtttcgacttctacacgtaacttccctaaccgtttaggccaaggttctaacgtttacttagcgtctgctgagcttgcatctgttgctgctgtacttggtaaattaccaactccagaagaataccaacaatatgcagctcaaattgacagtatgtctgctgacatctacaaatatttgaatttcgaccaaatgggcgaatatacaaatgctgctgataaagtagatactaagaaaattgctgctgctcagttgacttaa

SEQ ID NO: 43796 - DNA, 360 bp, Acinetobacter baumannii
atgaaaaaagttttatttgttttaatgggcatgttattagtcggctgtacagaaaaaaagcctttaacacctgaagagcaatggcatggctattgtacaagtgtggggaatgcagcaagaagtattctgtttgatcgtcagcaagcaattgagaagtctcaagctattgagcatgctaataaaattgaagacgaaattacgaaaaaattcatctttaatattattgaaaaagtttacgccattccacaagacgaattaaaaacgaatccagaagccttacaagaaaagattagaaaacaaatgacagatgagtgtttggttaccccacatgacaaaatgccaaactacaaaaaattctaa

SEQ ID NO: 43797 - DNA, 2304 bp, Acinetobacter baumannii
atggattcgaaccaaaaaggttttttacctcagcaatttgaggcaaataatctatttttagtttatgcacaaaaccagttgcaggcgactggtaatgcacagaatttaaaaattaagctgaatgcacctgcgctttatgagttgtatccgggtttaagtggacgtgcatatggagacttgagtgtccaatctcaaccgcgtttgaaagctacggctaatattgcggttgataattttgcatttaatacattagtcagtattaaaaaacttcgtatccagggtgaattgcctacttccgaaacaacaccaactcagttaacagcaaaattagacaacttacgtagtggtagccgtcaaattcagtctgctgaggtgaatttaacaggaacaagaaaagcacatttattaaaagtgcaaggaaataataatgtttctaaattctatgttcagttagcaggtggatttaatgcgaagaatgattggttagggcaaattcaaaaaggaagttttgattcacgccgaattcgtctagcacaaaatcaaaatgcaccagttgttttctcatcggcacgttctgaattatatgttgggcaacattgctggcaaagtacaaatagccagttgtgtcttgaccagcctgtgcgtgtgagtaaagcacaaggtaatatttcatttgttactcaaaatctagatttaggtgattttgctgcgttcatgccggaaggtttggctatgacaggccaacttaatggttatgctaaagcttcttgggtaaatggtgggcatcctaagcttgatgcacgcttagtgaccagaaaaggtgaactgggcctagcagcggaagacccgcaagatccaccgactactttggcttatgatgaactgagtgtaattgcaaaaagtatttcagaaggcttattgttccgtgtcgatgtaaaaacacctgatattggtacaggatatgcgaatgttattattaatccataccaatcatctatgccaatgcatggtgaggtagcttttaacgatgtacagttaaaagtcttaaaaccattcattcaagatgtacgttcaatgagtggtaccttagccttagctggcaaagtaaatggtacattgacccagccacagtttacgggcgaaatgcgtttgaaaaacggggcgatcagtatgatttccctgccggttaatttaaccaatgtacaggtgtattcatctattcgtcaggacatggcaacaattgatggtgcattcaatagtggacaaggtgtagggttacttaaaggtagttttgactggaaaaatgcaccgcgtctacagttaaacttaaaaggtgataacttacttgtacgtcaagctccattaattaccgccattgcaaatccgaatttgacacttgatatgtatccttttgataagcgtttaagcttgaaaggatcagtagatgttcctcgtgcacgtatttcaatgcctgaaacaactgcaccagtggttaatacatcttcagatgttcgtattgttcgccaaggtcaggacccacttgcaattttacgtgcggcaaaaccgtgggatatccgtgcagatatctcggtaaatattggcaatcaagtcatcttccaaggctttaacagtaatattcctttagtggggcgtttgaatttaacccaacgcggttatgaaacggcaatgcgagcaatgggtgctattggtgtaagtcaaaaagtgaaaattgaggcctatggtcaaagcctggatttaaaccgtgcaattgcccgttttaatggtccattagcaaacccgacgttagatattgatgcgaataaaaatgttcagggtagtatggttggggttcgtgtcactggtactgcttcatcaccaaacattcaagtttataatgatgcaggcctttctgagcaagaggcattaaatgcactcgtgacagggcgtattaatgaaggtgcaagtggtttaagtaatgcagaaggctttaaatctgatgtgaacaatacaattgctgctgccggtattagtatgggcttgggtggtactcgtgctttaacgaatcaaattggacgtacttttggtttgagtggtcttgcattagatgctcaaggtacaggggatgatactcaagtaagcttaactggttacattacacctgatttatttattcgttatggtgtgggtgtatttaccccggtcaataaactgacgttgcgttatcaaatgaaccgccgtttgtatttggaagcaagtcaatctttagaacgagcaatagatttattctataactggcgattctaa

SEQ ID NO: 43798 - DNA, 267 bp, Acinetobacter baumannii; identical to SEQ ID NO: 43415

SEQ ID NO: 43799 - DNA, 918 bp, Acinetobacter baumannii
atgaaaaaatttctatggtggggaataagtttatacttcagtataagcttacaggtagctgcttttgctcaaagcaatttatcaaatatttcttttaatcagcctttaaaatataggattgattatatagatccacgttttgaattaacgaaagaacaatttattcaaattggtaaagaagcagctgaaatttggcaaaaagaaactgggaaaacctattttatttatgattctcaagcagagcttactattaatttagtattagacaaccaacaagctactcaaaatgaaagaaaaaatagtataaatgagctattaaagcagcaggaagaatggagagagaaaaataaagctattcttttatttaaacaacaaattgatcaggaaacctctcttttgaataaagaaaaagagaatctcaagtgtaaattcgaacaatatcaaaaagatgtatctctttttaatcaaggaaactatgggcaatttactcaaagcagtttaaacaaacgccaagctgagttaagccagctttcgttagaattacaaacaaagttttctcaacatagcaataaaatagaagtgcttaatagacaaattaaacaaataaatcaacaacaaaacctgcttaatcaatctattgagcaatttaatttgagcacgacttctggttcaaaaacttttcataaaggcttatttagccaaaaccaaattcagatttatggctttacttcattcgatgatctgcgcctaacacttgctcatgagtttggacatgtattaggtttaaaacacaccgatgatcctaaatctttaatgtaccctcttttaagagagcaggatattcataacttcaaattaacaaattcagatttagatctattggctacattatataattcaaatgacgaaaatcattaa

SEQ ID NO: 43800 - DNA, 906 bp, Acinetobacter baumannii
atgcgtttaacttctttgttattaggcatggcctttgctttttctaattttcaggctaatgctaatcttgcgactcccctacacacccaagttcagcaaaaaaatgttcaacatttgacatataaaattgctgaagttgaccctcgttttggtttaagtcaagagcaattaatccagattacacagcaagctgctgatatttggaaagaaggtacaggtaaaaattactttacttatgacccaaatgcaaagttagaaattcgtcttgtatacgatgacagccaaaatcgttcagcagagcgtcaaaaaatcgcttctcagttcaaacaagaccaacaacgtgtaattgatgagcaacaacaaattaaacagttgaagcaaaatttaagtcaaactcaatcggatcttgaaaataaaaaacagatcttaaatgagaaattgaagaattttgatcaacagatgatgcagtttaaagaaggaaaattagcacctgaatacactgcaaaatcactttcgaaaactcagaaagatttacagaaacagacagttgctttaaagaaagatatcgctgcttataatcagcaagctgcagacttaaataaaaaggttactcactttaaccagattaatgatgaattcaatcaatcattaaatcagtttaagcaaaatgcccaagctgatgtatttaagaaaggtatttataacggtaaacaaatcatgatctatgaatatagttctattgatgatttacgtttaacaattgctcatgaattaggccatgcacttggcttaaaacatagtgatcaaccgggtgctttaatgtactcagttcgaaaagatagcgataaaaaaagtaatattttaactgatgctgatcgtgatctattaagcgctttacctcaataa

SEQ ID NO: 43801 - DNA, 375 bp, Acinetobacter baumannii
atgagttattatcatatcctgattgaagtaaatgatcacattagcacgattgagcaaactcgagatatcgaactatttgatattattgaacttaaaccttaccttcattctattttattaccttacttcaatgagcaagaaattgagcttgaagatgaaaatattgaatataaagatattttacatctggaagttaagcagacattattgcctatcgagcacctaattgaagaagaacaaaagcagctaccaagtgatacagatgtcacaattactgcttatgaaatctttaatgaccgtgatttaagccaagatgttacctcagttatttttgatatattggaagcagttaagctagatcaatctatagtttag

SEQ ID NO: 43802 - DNA, 1293 bp, Acinetobacter baumannii
atgcgacgtttttcttgtattgttgggtctgtatttttggcgatgacccaggctcaagcagagctggtaattaatggttctacaatatctagtaatgcgactgttccggtaacgaatagtgatacttatacgcctaataataatttccagagctgtttggcaaatttacgttcacaggctattgctgctggtgtttcaggtagcacttatgatcgctatacgcaaaatttaacaccagattactcggtgattgataagttaaattaccaaccagagttttcgacaccgatttgggattatttgtctggtctggtagatgaagaacgtgttgcacttggaaaacaaaaacttgcacaacaccgtgatgttttaaatcgtgcttctcaagtgtacggtgtgcctgctgaaaccattgtagcagtatggggcgttgaaagtaattttggtgatatctctggaaaatatcctttattacaagcgcttggaactttaagttgtgaagggcgccggcaaagttatttccgtaccgagttttttgccacaatgcgtattttacagcgtggtgacttaactgaagatcaacttaaaggttcatgggcaggagcatttggtcatactcaatttatgccatcaacttatgaacgcttagcggttgattttgatggagatggccgacgcgatttagtatcgagtactgcagatgcattggcatcaacggctaatttcttgaataaagcaggttggcagacgggtatgccttggggttttgaagttcaaattccagcaagcatgtcaattgatggagaaggacgacgctcgaaaaaaccattaagcagttggagtgcgcgaggagtaacacggattgatggttcgccactaatacaaggtcctttgtctggtagtacgccagccggtttaatggctccagcaggaccaagtggaccagtatttttagtatttaagaattttgatgctatttatagttacaacgctgcggaaagttacgggctggcaattgcacatttgtctgatcgcttaagaggagcaggtccatttgttagctcttggccaactgatgatcctggtacttcacgtgcagagcgtcgcgaaattcagcaatttttgattaatcgtggttatgatattggtgctgttgatggattgattggcgataaaacccgtgttgctattcgtcaggagcaaacccgtttaggtttaaatccaacaggacgggcagggcaacaaattttacgtgcattccgccaagaacaagcacgaaaaatgatgcaataa

SEQ ID NO: 43803 - DNA, 1122 bp, Acinetobacter baumannii
atggataaaactatcggtatttttggtggtgggcaattgggccgtatgatggcgcaagcagctttaccattaaatattcaatgtactttttttgaagcaaatacagattgtccagcaggtgttttaggccaagttttttctagtcaagatgaacaaggtttaaagcagtttattgaaagcgctgatgttttcagtcttgagtttgaaaatacacctgttgcagatgtagatgtgttaacacaaactaaaaaactgcaccctccccgtattgctttagcaactgcgcaaaatcgtttgtcagaaaaagcattgtttgatgaacttgagatccctgttgcgccgtatcgtgctgtagatagcctagaaagcttgaaaaaagctgttgctgagcttggtttaccaattgtacttaagactgcaactggtggatatgatgggaaaggtcagtttgtacttcgttcagaagaccaaattgatacagcttgggcagagcttggtcctgcaaaaagcttagtggctgaaagttttgtgaaattttctcgcgaagtttcgattattgcagtacgtggtcaaaatggtgaagtgaagacttggccattagctgaaaaccaccatcacaacggtattttgtcgcactcaatcgtacctgcaccgaatagtgaagctctacaacctgttgctcaagactacattacgcgtttgttaaatcatctcaactatgtcggtgtgctaactcttgagctatttgtgacagaacaaggcttgtgtgcaaatgagatggcaccacgtgtgcataactcaggtcactggtcaattgaaggtgccgtatgttcacagtttgaaaaccatattcgagctgttgcaggactaccattggggtcaacagacgttgttcgaccaacggttatgatcaatattattggtcagcatcctaaaactgaagatgttttggcactaaatggtgctcatctgcacctttataacaaatcggaacgtgctggccgtaagttaggccacattacgttaatgcctgtggatagtaatgaattgacgaatttatgccgtcagttagcgaaaattttgccagaaccactcgctttaacagatgatatgaccatttaa

SEQ ID NO: 43804 - DNA, 513 bp, Acinetobacter baumannii
atgaacgcggtcgcaacagatacccaacctttagtcggaattatcatgggttcccagtccgattgggcaacgcttgaacatactgccaatatgcttaaacaacttggtgtcccatttgaagcggaagtggtatctgctcaccgtactccggaccgtttgtttgaatatgcagaaactgcgcgtgatcgtggtattcaagtgattattgcaggcgctggtggagctgcgcatttaccaggtatgtgtgcggcaaaaactgatttacctgtgttgggtgtaccagttaaatcatcaattttaaatggcgtagattcattactttcaattgtacaaatgccagcaggtatcgctgtaggtactttggcaattggtccggctggtgcgaccaatgctgcgattatggctgctcaaatcttaggtttaactcgtcctgaaatcgcaaaaaatgttgcagatttccgtgctgcacaaactgataaagttgcaagcaacaatattccgggacaggtttaa

SEQ ID NO: 43805 - DNA, 366 bp, Acinetobacter baumannii
atgatgaaggatgtgcctttgagcccaacggttttagctttcgttctgttaattatttctaactgttttatgacacttgcatggtatgggcatcttaagtttttgcaccacgcaccattctggcaagcgattttattcggttggactattgccctgcttgaatatagttttatgattccggcaactcgactcttgagtgaccaaggttggactttgggtgaaatgaaaattacccaagaagttgtcacgcttattgtatttgttccatttatggtgttgctatttaagcagccgttcaagctagactatgtttgggctatgttatgcctgtttggttgtgtctattttgtatttagaagccagtaa

SEQ ID NO: 43806 - DNA, 1374 bp, Acinetobacter baumannii
atgcatctgcatatcttgggtatttgtggcacttttatgggctctttagcacttttagctcgtgatttaggacataaggtaacaggttccgattcaaacgtttacccgccaatgtctacccagttagaaaatgcaggtattgaactcatgcagggctatgaccgtagccatttacagcctcatccggacttggttattgtcggcaatgccatgaaacgtggtatagatgctgtcgaatacatgctaaatgaaggtctgccatatatttctggtccacagttccttgctgatcacgttttacaaggtaaacatgtgcttggtgtggcgggtactcacgggaaaacaactacgacaaccatgcttgcttgggtacttgatcaggcgggtttaaacccgggctttttaattggcggtgttccacttggttttagtgaaagcgctcgtttaggcggtggcaaatactttgtggttgaagccgacgaatatgactcagctttcttcgataaacgttctaagtttgttcattatcatccaaaaacggcgattttaaataaccttgaatttgaccatgccgatatttttgatgatctggcagcgattcaaaagcaattccatcatctggttcgtactattccaagtgaaggccgtattattgcgccaattaccgaaactcatattgatgaagtacttgaaatgggctgctggacaccagtgattcgtacaagtttagaagcaaatgaaaaagcggctttgtctgccgaattaatttcaattgatggcagccattttaaagtactcgaaaatggcaatattgttggcgaagtgaaatggagcatgacagggcaacatagcgtagcgaatgcattggcaacgattgcagccgctcagcatgtaggcgtttcgcttgaaaaggcatgtgaagctttgtctaactttggcggtgtaaaacgccgtatggagttactcggcacgatcaatggtattgaggtttatgatgacttcgctcaccatcccacagcaatcgacacgactttagatggcgcacgtaaacgtttaggcgaacgtcgtttatgggccattattgagccacgttcaaataccatgcgcatgggtagccataaagatggcttggcacattctgcacgtttagcagacgaagtgatctggtatcagccagaaggcctagattgggatttacaacctgtgattgaagccgcgactaaccatgctcaagtgagccgttcacttgatgaaattattgaacgtattgtcaatgaagcaggtgagggtgatgccgttgtaattatgtctaatggtggttttggtggcttacatcaaaaacttatgagcgcattaaaagcaaaagctgcttaa

SEQ ID NO: 43807 - DNA, 1251 bp, Acinetobacter baumannii
atgcgtgttcggggcgttaatattaaagtgttaacgtgttggcactttattcgagaacgttattttatgactactcaagaaaaacagaaaaaattaagtttgaggcccctatctccaagagatccagaacagccgcatagagcagcaactcccctcgaattattattcgatttaatttttgtggtcgcgattgcaacagcgggtcagcagctacatcatgcaattattgaaaatcatctatggcatgcattaccaagttatctgatggtattttttgcgctgtggtgggcatggatgaatttttcatggtttgcttcggcttacgataatgacgatgcattgtatcggtgtcttacctttgtacagattgtagggtcattagtcatggccgcaggtattcctgatgtgttccatagtcaggattttgacatcattattgtcggctatgtgattatgcgtttggctttagtcacccagtggctaagagccgcaaaacatgaccctgaacggcgaattacggcgtatcgttatgccgtaggtatcgtattggtacaaattggttggcttgttgctaactttgctcatgccctttcaattcctttatttttacttctggttgtggtcgagttatttgttcctatctatgcagaaaaatattcgcctacgccgtggcatcctcaccatattgtagagcgctatgcccttcttactattatcgttttaggggaatccatcgtaggtagctttaatgccattcgtgatgcgcttgcggctcaatctattaatattccggctgtttttttaatgattggcggattaatgttgatgtttgcaatgtggtgggcttactttgaccgcagtgaacagcatcatcatgttaaaggtgtacgtccgtttgtttggggatatggccattattttgtttttgtgagtgttgctgccgtaggtgctgcccttgctgctgctgtggatgttaccacccaccatgcccatatttctgatttatacatgggtgtaattgtcgcggtgagtgtggtgctttataccagctgcatatggatactttacgagtttcagtgcttatctggaattactaaatggttttatcctattactgcactcattattttatgtattccgtttatttgtaataacgtgggatatagcgtgtttgcgatgggtattgtctatacgttacgtttattcatctcgaataaatttatggaaaatatagagccaaaacaggtttaa

SEQ ID NO: 43808 - DNA, 597 bp, Acinetobacter baumannii
atgtctttagaaacactcaaccttagcttattccatgtcattaatggggctcaggatgcgagtcaatttatcattcgtcttgctatcttttttgctaatgatctcctctatattcttatattcatacttacatttttatggttttatggcgatcaagatttaaaaaatagggtcattaaatctgtctttctaacctgtgtatcgcttttagtcggttacgttatttctctgttttaccaccatccaagaccgtttgtaatgggtgtgggcaccacctttattgaacatgcgccaacagcgtcttttccaagtaatcatatgctaatttttagcaccattgccctgtcttatttgtttgctcagcgcaaaataattggaattattcttttatttttgtcatttgtggtggcgtggtcacgtatttatttaggtgtgcatttccctttagatatgttgggtgcttttattgtcgcgttactagtcaacacagccggttattacttctggaatgtttatggtacgcctttaacagcattctttattcacctttaccagattatatgcaaaccgcttttagaccgtggtttgattaaataa

SEQ ID NO: 43809 - DNA, 957 bp, Acinetobacter baumannii
atggaaacaatcggcaatttatggctgtacgtagcattctttggcatagtcattgtcatgcttctgattgacttcttgggctttaagcaaaaacaaggtcaagatgtctcaattaagcaagctgcttactggagcgtggcgtgggtaagcgttgcagccttatttggtggtggtttatggctttacctacaacaaacagttggggtgaccttagcaaaccaaaaaaccatggaatactttgcaggttacttactcgaaaagtccctcgcaattgacaacgttttcgtctggttaatgattttcgcagcgtttgctataccggctgcgctacaacgtaaaattttgctctacggcgtattaggtgcaatcgtactgcgtaccctctttatttttattggtgcatggttcgttcaagagttttcttgggtactttatatcttcggtgcgttcttggtatatacaggctttaagttcttaaaaggccaagaagaagaaaccaatattgaagatatcaagcttttaaaatggttacgtaaccatatgcgtattacgccacagcttgagggtgacaaattttttgtacgccaaaacggtttattatgggcaacaccgttatttctagttttgattttggttgaagcttcagacgtgattttcgcagtagattctattcctgctattttcgcggtaactagcgacccgtttattgttttaacggcgaacttaatggcagttttaggtttacgcgcaatgttctttttacttgctggcgctgcgactaaattgcattacttgccatacggcttaggcattatcttattgttcattggtgcaaaaatgttgttgcttgatgtattccacatgccaatctggatctcattaagctttatcgtcatagtgttagcaatcactgcttacctctctttacgacacaacaaaaagcaattgcagtcctaa

SEQ ID NO: 43810 - DNA, 366 bp, Acinetobacter baumannii
atgcgttctaaaaaaattaatcttgtcattgtcccgttattactcacggcatgtagccataatgatggtcctttggtacaagacgtatataacaaccaatatgactgtgctcgtgactggaataatgaaacatgtaaccaagaaaatagctcaagtggacatggttctagctatgttggaagccgctatttagggcctgcgtattatcaaaataatcgggaagtttcttatcacggaaataccttacatccttacagcaatttgagtgtaggtcgccccattatttcaagtacggcgaaaagcgcgtcttcctcatccccaatacgtggggggtttggtcgtagcggtttctctttcggcggctaa

SEQ ID NO: 43811 - DNA, 1161 bp, Acinetobacter baumannii
atgaaaagaaaaatatttactccacgtccagactggcaagtggagcatcaaaatattggttttgattattttaatttaccttctctcgatggctcaatttactggtctgaaggggttgcgtatgagtttactcttaaacagattgaacaacttgaagatgcggcaaatgaactacatcaaatgtgtttatcggtagtaggagatctcattcaacgcggggactacccagcttattttcaaattcctgaagttgccataaaccatattgaacattcatggaaacaaaatgctccgatgctgtatggccgctttgatttcgcttacgatgggcgaaatatcaaaatgctggaatataacgccgacacaccgactggcttacttgaagcttctgtcgcacagtggctgtggatagaacaagtctcgggcattgcaaaccgagaccagttcaatagtattcatgaagacctgattaaacgctggaagacaattttaccgcgtggtagccatgtgcattttgctgcctgtcaggaagctggaagggaagactggggcaatctcgagtatttgatggataccgcttaccaagctcatctacaagtttccgagctttctatggagaacataggttggaacgggcaagattttgttgatctccataatcagcccattcagaacatatttaaactttatccatgggaatggatctgggaagaagcattttctcaatatatccacccacaaacacagtggattgaaccttgctggaaaatgctactttcaaataaggcgattctggttgagctttggaagtgttatcccaatcatccattattggtcgaaacccatacctatgacccgcaacaaagtttgtctggcaaatgggtgaaaaagccgattttggcaagggaaggggccaatattcgggttttacaagacggccatgaccaaggcgcggcttctggtagcttttattttgatgactatgacaaatatggttatgtcgtacagaaatgggtagacaccccattattttcaggacaactacctactcttggtttatggatggttggacatcaatgtgcaggcatgtctattcgtgaagattgttatgacatcattggtaatgatgcccactttgcagcacattattttgtcgagtaa

SEQ ID NO: 43812 - DNA, 1056 bp, Acinetobacter baumannii
atgaatgctattccaactttaacgccactttctcaaccatgtaatagcagttttgatgcaaaagattgggaaattttatctactcactggtatcccgtcgcacgtattcaagatgtctctaatgcacctcaaagagtcacactactagacgtcaatatggccctctataaaacagaaagtggcgaaattcatctggtccgagatatttgcccacatcgtggcgtgcctttaaccaaaggttgggtcgatggtgaagagattgtttgtccttatcacggtctacgctataacactgaagggaaatgtaatcaaataccagctcagcccgaactaactaaaatttctgatcgtttttctctgaccaaatttccggttgtgcaaagatatggcctcatttggaccagtattcatggtcgtgatattgctaaagccaatattcctgtgttagatacttgggaccgtgcagagcatcaatcaattttaccgccttttgtggatattggtggttctagtggtcgtcagcttgaagggtttattgatgtcgctcattttgcatgggtgcatcacaacgcctttgcgaatcgtgataaccctgtcgtccctaaatatcacactgaacgtaccaactatggcttaaaaacggtctatatcagcaatgtcagtaattatccgcatgaactaaaacatctcgaaccagaaggctttttgtggaagcgtacttttgaggtttatccgccattttctgccgtgcttactgtcgattttccagaaagtgggatcttaaaaattttaaatgcctgttgtcctatctcaagtaataaaacccgtttatttgttccactcacacgtaactttgaccaaacaggtgatttagaaaaagtatatgcatttaatgcgcaaatttttgccgaagaccaagacatggtcgaatcacaaaaaccagaagaactaccgctcgatctaatgatggaagcacattttgaagcagaccgttcatcaacgacttatcgacggattttggctgaatggggactaagtaaacgttataccgtttaa

SEQ ID NO: 43813 - DNA, 1326 bp, Acinetobacter baumannii
atgtcattgatcgcaaataccaccgttgtgcgtggtcgttttttagatattcaacaaactgtctctgagccagctgatattccaaatcaagtacgttatttggaagatggtgtattgattagtgaacatggaaagatcaaatggtttggtgcatgggaagatgctcaacagcatctacctgctggagttgaggttcaacattatccagaacaattgattgtacccggctttattgatacccatattcactttccgcaaaccgaaatggtgggagcttacggcgaacaacttttaagctggcttaatacttatactttcccaactgaaatccagtttcaagacaaaacatatgcaagcgaaattgcccagttctttgttcaggaactcttaaaacacggtacaaccacggccctcgttttctgtacagttcatcccgagtctgttgatgccttatttgaagccgcagagcgcgttcagatgcgtttaattgccggcaaggtacttatggaccgtaatgctccggaagcgctgtgtgacacgccagaaacggcttacagcgacactaaagcactcattgaaaaatggcatggtaagggccgtgctctgtatgcgattacgccacgatttgcgccgacttctacacctgagcaattagaaagagcagggcagttaaaacaagaatttccggatgtgtatgtccatacgcatttaagtgaaaacaaagatgaaattgcttgggtgaaatctttatttccggaacaagcgggctatttagatgtttatcaacattatggcctgactggtaagcgttctgtgtttgcgcattgcgttcacttagaagatgaagaatggcaatgtatgcatgatacgcaatcggctatcgcattttgcccaacttcaaacctgttcttaggcagtggtttatttccattgaaaaaaacttgggaaaaacaagtgaaagtaggcttagggacagatattggggctggcacatcgtttagcttactgcaaactgttaacgaggcttataaggttcagcaattacaaggtgataaactctcagcttatgaagcgctttatcatgcaaccctaggcggagcaaaagcactcgatttgcaggatcagttaggtaacttcaacgtcggtaaagaagcagactttgtggtactaaacttaaagccaacagcattacaggaacttcgccagtctaaatctaaatctgttgaagattcactgtttgcattattcactttaggtgatgaccgtaatattgaggcgacttatatttatggaaaccgtgcttatcaaaaagaaacagccaaataa

SEQ ID NO: 43814 - DNA, 150 bp, Acinetobacter baumannii
atggaaaccgtgcttatcaaaaagaaacagccaaataaaaaaggcattgttaagtttttgttattatttggaatatgtgctattgcgttaaagcgtgatcgacatattccgcaaaatgataaaatttcacagccatcaaagggtgcatga

SEQ ID NO: 43815 - DNA, 528 bp, Acinetobacter baumannii
atgactgttgcaatgagcatcatgatttcaaccgaagaaattcaagcaaaagtcaaagagctcggcgagcaaatcaattctcactatgcaaatagtgacaaagaattggttctgattggtctacttcgtggttctgttattttcatggcagacttatgccgtacgattaccaaaccacatgaactcgactttatgacagtgtctagctatggcggcggtaccacttcaagtcgagacgttaaaatcttaaaagatcttgatggtgaaattcgtggtaaagacgtgcttgtggttgaagatattattgactcaggcaacaccttaagcaaagtcgtggaaatgttgcagactcgcgaaccaaattcaattcaattatgcacattagtgagtaaaccatctcgccgtgaaattgatttagaagttaaatttttaggttttgaagttgaagataaatttattgttggttatggcttagactacgaccagaaatatcgtcacttaccatttattggtgagattggcctataa

SEQ ID NO: 43816 - DNA, 252 bp, Acinetobacter baumannii
atgtggtcacttattgttgctattgtggttggtttcttcgctggcttaatcgctcgagctttacacccaggtgatgataaagcaggttttattgttactactttaattggtattgcaggttcacttctagccacttatggcggtcgcttacttggtctttatggagaaaattcagcggcgggctttattgcttctgtcattggtgccgtcattattctctttatctataacctaattgcacgaaaaagctaa

SEQ ID NO: 43817 - DNA, 699 bp, Acinetobacter baumannii
atgattaaaaaattaggaatattggcgttatttagtttaactacaagtttgagtttcgctaatgtagatactgttcgggaaaatattaaaaaacaatatcctaatttgaaaattagtaatattcagaaaaccgaaatgcctgggctatatagtgctaatctggaccagcaaattatttatcttggtgaagatgggcagcacatgtttgtaggctctatgattcggttaaaagaccaaaagaacttaactaaagatctggttttagggcagaactcaattgattggaaacagttacctttaaaagatgccattaaaacagtcaaaggtaatggtcagcatgttttagcagtattttctgatccaaattgcccttattgtaagcagcttgaacctgaactcgacaagcttaaagatgtcactatttacacttttatttatcctttaaaacctcagtctattgtggtttctagacaagtttggtgtgcaccgaatcaatcatattcatggaaaaaattaattgagcaaggtgttaaaccaacggttacgagctgtacaaacccgattgaccgtaacttggaattagggaaaaaattaggttttaatggcacacctactctcatttttgctaacggatttaaactcgtcggagcgagctctgctgaagaaattcaggcagtttggaaagagttaggtttataa

SEQ ID NO: 43818 - DNA, 975 bp, Acinetobacter baumannii
atgcaggattatagtgtatcacgtcatcatcaacatcagtttgatgaaggaaatccacttgcacaaaaacgtattttgattgcaaccattttaacggcgtccatgatggtactggaagtatttggtggatggttcttcaattcaatggcactactggccgacggttggcatatgagttcacatatgttggcccttggtttagcctactttgcctatcgtgcagcccgtcattattccaatgatcatcgttttagctttggaacttggaaaattgagattttagccggctatagcagcgcaattttgctgatggttgtggctatttttatggcttttcagtcagttcaacgtttatttaacccggttgaaattttttataatgaagcgattccgattgcaattttaggtttggtcattaacttgatttgtgcctggttacttcatgatgatggtcaccatcaccatcaccatcaccatcaccatcaccatcacgagcatggccatgggcatcaacaccatgatttaaaccaaaaagctgcgtttttacatgtggttgcagatgcagtgacttctgtttttgcaattgtagcgcttttcgcaggtaaatattttggatgggattttttagatgcacttttaggaattttaggggctattttagttgcaaagtggtcttttggcttaatgaaagagacaggaaaaacccttctagatgctgaaatggaccatcctgtagttgatgaaattcgggaagtaatagctgaatttccgaaacatgtggaaattacagatattcatgtctggaaagtcgcaaaaggtaaattttcttgtattttggcgcttgaaactgacgatatctctttaaatgcagaccagattcgtgatgctttatcgattcatgatgaaattgtgcatatttcagtagaaattaatatcttaaaacctgtttatgttccacgtgaaacattggcataa

SEQ ID NO: 43819 - DNA, 264 bp, Acinetobacter baumannii
atgagtcacattggtcaggataaaaaaattgttaatcgtgtaaaacgactaaaagggcaaatcaacagcattgaaaatgcgatagaacaaccagaatcttcatgtatagatattttgcagcaagttgcagccataaaaggtgcaataaacggtttgatgagtgaattaatggaacagcacttacatcatcacgtacttaaaggcgcagaagtcgatcaaaatgagctagatgaatttttaaaagttttaaagagatacggctga

SEQ ID NO: 43820 - DNA, 1356 bp, Acinetobacter baumannii
atgcatagtcaaaccacaattgccgcaattgcaacgccaccagggcgtggtggagtgggcgtgattcgcttatcgggacctaaggcttatgatattgctcaaaaactgacgcaaaaaaacttacctgaagctcggatggcgggtttccgtaagttttatgatgctgatggaagtattatggatgaaggcattgtcttgtgctttccaaatccacattcttttaccggtgaagatgttgtagaacttcaaggccacggtggccctgtcattcaaaatgccttacttggccgtttatttgagcttggggcaattgctgcaaaagctggggaattctccatgcgagcttttgaaaatggcaaaatggacttggtacaagctgaagcaattgccgatttgattgatgcgacctctcaagctgcggctcgttcggcagtccgttctttacaaggcgctttttcaacaaaaattaatacagttttagaaaaactgattcatttacgtctgcacgtagaagctgcgattgattttccagaagaagaaattgattttttggctgatggcaaaattttagctttgttggaagatgttcaacaatctgtacatgccgttcaaacctctgcacgacaagggcaattactccgtgaaggtctacaggttgttattgcgggtaaaccaaacgcgggtaagtcgagcttgttaaatgcacttgctggtgttgagcgtgcaattgtgactgatattgctggtacaactcgtgatgttttacatgaaaaaattagcttaaatggtttaccaatcaccttaacggatactgcgggtcttcgtgaaacgggagatgtagtcgagaaagaaggcattcgtcgtgcaatcaaagaaattgagcaggccgatttgttgttattggtctacgatttaaatcaaggcgatgaccccttaaaactggctcaagaatactttgctgaacatattgaaccgcgtcgtctcatgttaattggcaataaatgtgatttaactggtcaatctgccgaaataagcgattatcaagggttccgtcatatcacagtttcagcaaaacaagagatgggcgtacaaggcctcgtagatgcgattacagcgcatgcaggatttcaccctgaggaagatacatttattgcgagaacacgtcatttagacgcaatgaagcgcactcagctctatttggcagaggcacgtgagcaacttgttgtatttaacgcaggtgaactcgttgctgaatcactacgtcttgctcaaaatgctttaggtgaaattacgggtgactttagtgccgatgacctattaggcaaaatctttggttcgttctgtatcggaaaataa

SEQ ID NO: 43821 - DNA, 1761 bp, Acinetobacter baumannii
atgcaacaatgggccaggtttgcaattctcggggccatgtttgtcaccgcatatttgctcattttggcttggcaaaaagattatggaaatgctgcaactgcaccgcaacaacaagcggcggctgtaagttcacatgaagtatctgctgatttgccaaatgctaaaactgcaacagtggcttccgatgtgccacaagcaaatattgcgcagtcacaaaccacagatgcaactgcacctgtgaatcaacagcttatttcagtacaaactgacctttatcatctttggatcaatccaaaaggtggtgatattgttcgtattgaattactctctcacgacaagagcaaagacagtaatcaaccatttgttatgcttgaaaatgatgccaagcgtacttatgttgctcagtctggcttaattggtttgaatggaccagatagcagtcgtggtggtcgcccattatatgctgttgaaaaaacatcatatactttagctgatgctaaaggggtacaagatcaaagtggacattctgagaaagttttaacagttcctatggtgtttaagacaccagaaggcgttgaaattattaaaacttttacatttactcaaggtcaatatccaattgttgtcaaacatcaagttgttaaccgtagccaacaaaactggcaaggtcagatgtttggacagttgaaacgtgataattcggaagatccaggtaagtcttctcagggtattttcactttaggtacgttcttaggtggtgcatggggtactccggatgctcactacaacaaacttaagtttgcgaatttctctgaagaaaaactcaataccgaagctaaaggcggttgggttgcaatggttcagcactactttgtaagtgcttggattccaggaaaccttaaactgactcaagcaaatggtcagccttatgtcgctaaacttgaatctcgtcagtctgcggatcatatgaatattattggctttacttcgccagtaattaatgttccggcgggtacttcaatggaagtcgatgcgaagctttattcaggtccaaaagtacaatctgaattaaaagatttagcggtaggtttaaaccagactgttgactatggttggttatggccaattgcgaagttattgttcctaggtcttcaattcttccatagcattgtaggcaactggggatggtcaattatcttacttaccattatggtgaagatgattttatggcctttatcttcaaaaagttatcgttctatggcgaaaatgcgtgtgattgcaccagaaatgcaacgcatgaaagaagaattcggtgaagaccgtatgcgcttctcgcaagaaatgatggcgctttacaaacgtgaacaagttaacccgctttctggttgtttaccgttattgctacaaatgccaattttccttgctttgtactgggtactcatggaaagcgtggaattacgtcatgcaccgtggttaggctggattcaagacttgtctgcgatggatccatggttcatcttgccattaattatgggtgcgacaatgtttgctcagcaaatgttgaacccgcaaccagctgatccaatgcaagcgaaagtattccgcattatgccgattatgtttacggtatttatgttgttcttccctgcgggtcttgtgttgtactggattgtgaacaacagtattacaatcttacagcaatggtttattaacaagagcgttgagaaaagtcgtatcagtaaagctgaatcgacatcttaa

SEQ ID NO: 43822 - DNA, 321 bp, Acinetobacter baumannii
atggttcgtattttgcgttggttcattcgactgtatcaaattgcgattagtccgcttcttggaccccgttgtcgttatatcccaacttgttcccaatatgcgctagaagcattacaaactcatggtgcaatcaaaggcgtttggttatcttctaaacgtatttgtcgttgtcatccgtggggaggctctggatacgatccggtaccgcctaaagcaattcgttttatttcgtttcatcaaatagattctcaaacgcatcatgttgctgtaccctttcgtgatcgtttaatgaagcaaaatctctctaaccatttggggtaa

SEQ ID NO: 43823 - DNA, 393 bp, Acinetobacter baumannii
atggcactttacagttttagcacagatcttcgtatacgctgtgctgcagattataaaagtgtatttgatggtgcgctttttaaagtgcatcaaccccattttttatttcttgcaaaattaaccgaacagcctaacagccgtttgggtattgttgttgctaagaaaaaagtgcgtcgtgcgcatgaaagaaatcgaataaaacgtcttgctcgtgagagctttcgtctacatcagccgaaatttgggtcagacatagatgttgttgtgatgcctaaagttggtatagaaacgattacgaatgctgagctatatcaacaattagattttgcttggcaaaaattacaacgcttagcgaaaaaacattctaaagttgtcccaacctcgcagaattaa

SEQ ID NO: 43824 - DNA, 135 bp, Acinetobacter baumannii
atgaaacgtactttccaaccatctgaattaaagcgtaaacgcgttcatggtttccgtgctcgtatggcaactaaagctggtcgtcaagtattagctcgtcgtcgtgcaaaaggtcgtcatagcttaactgtttaa

SEQ ID NO: 43825 - DNA, 1398 bp, Acinetobacter baumannii
atgctttggacagactgcttaactcgcttgcgacaagagctctctgataacgtctttgcgatgtggattcgccctttagtagctgaagaagtagaggggatactacgtctctatgctcctaatccttattggacgcgttatattcaagagaatcatttagagttaatttctatattggctgaacaattgtcagaagggcgggtgcgtcaggttgaaattttggtagattctcgtcctggtagtattttgtcctctagtgaacagcctgcaacaactacagcagctttacaaactgcccctatacctcaacctgctaaggttaaaagagaaccggaacctgttgctaatactgcagttagttctaagagttcaaaaaagaaactattaaatccacaatttactttttcactatttgttgaaggccgttctaaccaaatggcagcagaaacctgtagaaaagtattaacacagttaggtgcttctcaacataaccctttatttttatatggtccgacaggtctaggtaagactcacttaatgcaagcagttggtaatgccttactgcaagcgaagccgaatgcaagagtcatgtatatgacttcagaaagttttgtacaagattttgtgagctcattacaaaaaggaaaggtagaagagtttaagaaaaattgccgttctttagacttgttattagtagatgatattcatcttttggcaggaaaagaagcaagcctcgttgaattcttctatacatttaatgccttacttgatgaatctaaacaaattattttaacttctgatcgataccctaaagaattaacagaacttgatcctcgtttggtttctcgtttttcctgggggctatcagtaggtgttgaaccacctgatattgaaactcgaatcgaaattctgcttaaaaaagctgaaaatagtggcgttgatttacctagaaactgtgcgttgtttattgcccaacaagtcgtagcgaacgtacgtgaacttgagggcgcactgaataaagttgtcgcaatttcacgttttaaaggtgctccaattgaccttgatgtcgtacgggaatctttaaaagatgttttagcgatccgtgctcgtacaattagtgtagaaaatatccagcgtgtagtgagtgaatatttccgaattccattaaaagagctggtaggtccaaagcgtacccgaatttatgctcgaccacgtcagttggcgatggggcttgcccgtgaattaacgggagatagttttcctgaaattggaatggcttttggtgggcgtgatcacagtacagtgatgcatgcttgtgaaaaagtcgtcagtttaagggaagaagacccaatctttgatgaagattataagaacttattacgtttgcttcaaagttaa

SEQ ID NO: 43826 - DNA, 1149 bp, Acinetobacter baumannii
gtgcgtttgaaaatcgctaaagaaagtttactcaatgttttatcgcatgtggtcggtgcggtagaacgtcgtcataccttgaatattctttcaaacgtcaaaattcagactaatgctcaagcgctcactattacgggttccgatttagaagttgaactcgtagcgagcaccgctttatcagaaggggcgtgccttgaggcaggcgagacaactgttcctgctcgtaaattgatggaaatttgtaaatctttgcctacagctgcattgattgatttacaaattactgaagatcaaagatgtattttaaaatctggtaatagccgttttgtgctaggtacactaccggctgaagattatccattgttaaccactgagaatagccagggtacgcaagtacaggtgactcaacgtgaattaaagcgtttatttgaaaaaactgcttttgcaatggctgtacaagatgtacgtttttacctcactggtactttattagaaattgatgaaaatcaattgcgtgcagtaacaactgatggtcaccgtttagcactttgtgaaattttggcttcctctacttcatctcagttggtacaagcgattgtgcctcgtaaagctgtgggcgaattgcaacgtttactcagcattgaagatgaacagctcacattgcttattggccgtgaattattaaatgtaacgattaatacgccaagccgtgataaagaacaaggtgatattacagttcgttttacaactaaattgattgatgggaaattccctgattatcgccgtgttattccacgtggtggtgataaacatgttttgattggtcatgacgtatttaaacaatcattacaacgtgtagcaattttaagtaatgaaaaattgcgtggtgttttccttaacttcaatcaggattctttacagcttcgtgcaaataaccctgaacaagatgaagcaattgaagatttagcgatccaatatcaaagtgccccattagaaatgtcatttaatgctcaatacctactcgatgtgttgggtgtattagatggtgatgatgtaaatatgagcatgactgaggcgaatcagtctgtattggttcaagatccggctcatcctgaccagacctatgtggttatgccgatgcgtgtttaa

SEQ ID NO: 43827 - DNA, 1083 bp, Acinetobacter baumannii
atgcatcttacgcgcttaaatattgaacgtgtgcgtaatttaaaaacggttgcactccatgggttgcaaccgtttaatgtcttttatggcgcaaacggttcgggtaaaacatcaattttagaagcgatccatttgcttgcaacaggtcgctcattccgtacacatatacccaaaaattatattcaatatgaagctgacgacgcgattgtatttgctcagtcagcaactgaaaaaattggtatgcaaaaactcgcttctggtgagcaactcatgaaagtgaatggcgacaccgttgcgactcaaggtcagctcgcaaagttacttcctttacagcatattgatccacaaagtacggatattattgatcatggtgccaagccaagaagacaacttttagattggcttatgttccacgtggaacctgaattttattttgcgtggcaatattactctcgtgcgctaaagcagcgtaataccttactcaaaacacggcgtaatctttcattagctgatttagaaccgtggaacaaaatgttgagtgattatggcgagattttgcactcacaacgtttaagtatagtcgagcaatggaatgtttatttccaaaatgacttaagccaattactgcctgatttggagattgagctggaatatagcccaggttttcatacagagcaggggcttatgcaagacttgttgaatcagcatcaaaaagacatcgagagacgttataccgagtatggtccgcatcgggcagatttgcgcttaaaaacgccatttggacatgcggatgatgttttatcaagaggtcagaaaaaactcttgattattgccttaaaactgtcacaaattgcaatgttgcatgcgagtaataaggaaactgtggtattattagatgatctgacagcagaattagacttaaccgcacaacaacgtttaattgaacgattaagccaacttggtagccaggtttttatgacaactttagatcatgcatcggtaaaaaaacatttacatgatctgtctatttcatatcaattattcagtgttgaatccggtcaagttagtcttgctgcaccataa

SEQ ID NO: 43828 - DNA, 2469 bp, Acinetobacter baumannii
atgagttcagagtctcaatcagcctctcaaacagaacaaaccaatgaaaaggcttatgattcctctagtattaaagtattacgtggattagatgcagttcgtaaacgtccgggtatgtatattggggatacagacgacggtaccggtttacaccatatggtgtttgaggttgtcgataatgcaatcgacgaagctttagctggccactgcgatgaaattattgtcacgattcacgaggatgaatcggtcagtgtttcagataatggccgcggtattccaaccgatattcaccctgaagaaggggtttctgctgcagaagtaattttaacgattctgcatgcaggcggtaagtttgacgataatagctataaagtttcaggtggcttacacggcgtaggtgtttcggttgttaacgcactttcaagtaaattgcatctaacaatttaccgtgctggtcaaatccatgagcaagaatatcatcatggcgatccgcaatatccattgcgtgtgattggtgaaacggataataccggaacaactgtacgtttttggccaagtgcagaaacattcagtcaaaccatttttaatgttgaaattctagcacgccgtttacgtgagctttctttcttgaatgctggtgtacgtatcgttttacgtgatgaacgtattaaccttgagcatgtgtatgactatgaaggtggtttatctgagtttgtaaaatacatcaacgaaggtaaaaaccatctcaacgaaatcttccatttcacagctgatgctgacaacggcattgctgtagaagtagcattgcaatggaacgatagttaccaagaaaatgttcgctgtttcacaaacaacattccacaaaaagatggtggtacgcacttagcaggtttccgcgcagctttaacacgtggcttaaaccagtatcttgaaaatgaaaatattctcaagaaagaaaaagtgaatgtgactggtgatgatgcgcgtgaaggtttaacagccattatttctgttaaggttcctgatccgaaattctcgtctcagacaaaagaaaaattggtatcaagtgaggtaaaaccagcggtagagcaagcaatgaacaaagagttctctgcttacttacttgagaatccacaagctgcaaaatcaattgcaggcaagattattgatgctgcacgcgcacgtgatgctgcacgtaaagcacgtgaaatgacacgccgtaagagtgcattagatattgcaggtttgcctggtaaattggctgactgtcaggaaaaagacccagcgctttctgaattgtatcttgtcgagggtgactctgcgggtggtagtgccaaacaaggccgtaaccgtaaaatgcaggctattctacctttaaaaggtaagatcctgaacgttgagcgtgcgcgctttgacaaaatgatctctagtcaggaagtgggtacattaattacagcacttggctgtggtattggccgtgaagaatataaccctgacaagctccgttatcataaaattattattatgaccgatgccgatgtcgatggttcgcacatccgtacattgttattaacattcttcttccgtcaaatgccggagttggtggaacgtggtcatatttatattgcacagccacctttgtataagctcaaaaaaggtaagcaagagcaatatattaaagataacgacgcattagaaacttacttgatttcaaatgcgattgatgagcttgctttacatattagtgctgatgcgcctgcaattacaggtgaagcgctggcaaaagtaattcaagactatcaagtttcacaaaagagcttacaacgcttaacgttacgttatccagcaagcttactggatgcattactcgaagtcgacgcatttaaagcagatcagaaccatgatcaagcttatgtgcaacaatgggcagatcaagtacgtgaagctgtagagaagttgcaaccaagcttacgtccggaaattacgcttgaaacatttgaacgtgagaatgctcaaggcgagaaatctgcgcattattggccgcgtgtaactgtatatgttcataacttgccacatgcttacttacttgacgcaggtttattgaattctgcggaatatgctcgtttattgaagaactcgaagagttggttcaagttaattgaagatggcgcatacttacaaaaaggtgatcgtcgtattcaagtcgctaatttccatcaggtatggcagcacattctgcaagattcacgccgtggaatgatgatccagcgttataaaggtctgggtgagatgaatgctgagcagctttgggaaaccacaatggaccctgaaaaccgtaatatgttacaggtgactattgatgatgcaattgaagctgatcgtatgttctcatgcttaatgggcgatgatgttgaaccacgtcgtgcctttattgaagaaaatgcattaaatgcggatattgatgcttaa

SEQ ID NO: 43829 - DNA, 393 bp, Acinetobacter baumannii
atgatgagtcaaaaaattctagcaagtatgctgatttcatgtgcggctttagtgagtcattctgcatttgcagcagacttggaagccgacatgaaaactttagcgaagagcactaaagcctttgctgaagcaaaagatatcgataacgctaaacagcagcttgtgattatgcgtcaggcagcattatcttcaaaattatctttacctcataagttggaaggtttaccccctgaaaatgtacaggtaaaagagtaccaagcgggtttagatcagttggttgctgaaattgatcgggttacggtttttgttgataagggacaattggaccaagccaaaactgaagcaattaatctggtaaatattcgtaatgaaaaccacaaaaagtttagataa

SEQ ID NO: 43830 - DNA, 558 bp, Acinetobacter baumannii
atgaattttattgattttattactaattttgaacaatttttacctattttgattcaggagtatggtgcatgggtttatgccatactctttttgattattttttctgaaaccgcttttgtgtttatgttctttttacctggagatagcttacttttaactgtaggtgcactgtgctcggtggttgaactgatgcatcttggttatatgattactctgctcaccgttgcagcaacattaggctatatcgtcaattattctattggccgccattttggaaatcgtatttttgaagcaaaatcacgttttattaagaaagaatatttgaataaaacgaaccgctatttcttgcaacatggtggtaaaactattcttttagcacgttttatacctttcgcacgttcttttgcacccctcgctgctggctcaagcaatatgagctatggaaaatttttgatttacaatgtggcaggagctattttgtggatctgtatcctcttaacggctggctacctatttggccatgcactcattcaagttacagattttgtagagaattaa

SEQ ID NO: 43831 - DNA, 1932 bp, Acinetobacter baumannii
atgattcaatttgaccaagtttctttacgccgcggtggacgtgttctatttcaaaaagcgtctatgcaattacacccaggttggaagattggtctgactggggtcaatggtgcaggtaaatcaacactatttgcagcattactcggtagcttaggagcagatgaaggctcgcttactcgtccttctgtatggactgtggcccatatggcgcaagaagttaaagccctagacatgcctgctatcgactttgttctttctggtgatgaagaatattgggatattcaaaataaacttgctcaaccagaacaattaacagactcggatttggctaaattacatggccgttttgatgaaattcatggttattctgcgccatctaaagcagctcagctgatggctggcttagggtttctagaacatcaattacgtttaaacgttgctagtttttctggtggatggcgtatgcgtctaaatttggcgcgtacattgatgagtcgttctgacttactcttattggatgagccaactaaccacttagatttggatgcaattttatggttagaagattggctcaaagcttatgagggcaccctcattttaatctcgcatgaccgagatttcttagatgcaattacagaccatattcttcatattgagaatcaggaacttactctttacacgggtaactactccacatttgagaccactcgaagtgaacgtttagcacaacaacaacaagcttttgaaaaacagcaagaagcccgtgctcatttacaaaagttcattgatcgctttaaggctaaagccactaaagctcgtcaggcacaaagccgtattaagcaacttgaacgcatgcaacaacttgcacctgctcatgtagatacaccgtttacttttagtttccgtgaacctaccaaaatgagttcaccgttgctgaccttagaaaatgcgagcataggttatggcgataaaaaaattgctgaaaaaattaaacttcaaattacgccaaactcccgtattggcctacttggtatgaatggtgcgggtaaatcaacattgattaaaagcttggtgggtgatttaccattactggcaggtgaacgtaaagcttccgagctacttaacattggttactttgcgcagcaccaaatggacgctttagatggtcaagccagcccaatgcttcaactcgcacggatagccgataaacaaattagtgaagcaacattacgttcttttttaggtagttttggctttagtggcgaacgcatggatactccatgtgaaagcttctctgggggtgagcgtgctcgtttggccttagcacttattgtatggcagcgtccaaatgttttaattctggatgaaccaacgaaccatttagatcttgatatgcgtcatgcgcttagtatggccttacaagattttgagggtgcagtcgttctggtttctcacgaacgtcaacttattgccagcgtttgtgatgaactccttttggtacacggtggaaaatgtaccgagtttgaaggtgatttgcaggattatgctaaatggctacgtgaagcacgccagcaacaaatcaatgctcagactgctgtagcacaaaataattcatcttctgccgctccagctcccgctaaagtcgataaagaagcacagcgtaaagaagcagctcgccgtcgtgaacaaactcgaccaatccgtaaaaatattgaaaaggttgaatctcaaattgaaaagcttcagccacgtcttgctcaaatcgaagaagctttagcagatacttcactatatgaagctaatcgtaaggacgatttgcttaaactaatgaatgagcaaaccgaactcaaagctaagcttgaacaatatgaagagcaactcttagaactcatgatggaacttgaggaaatggaagcctcatttgaaaactaa

SEQ ID NO: 43832 - DNA, 1005 bp, Acinetobacter baumannii
atgaaaaaaagattggggatagtaagtgcagtcatttgctgtgctatggggacaacacacgcggggcaaaacgtatgtgtattcgatttattgggtaaatcaggtgaatcctacaaaatgatggaagaatgggcacttgcggcaaaaagttggcaagcggacattacattaattccatttcaagatgaagctctagtagatcgtaggctgcgtgagggtaaatgcgatgcagcttatatgacttcaatgcgagcacgaaactacaataaatttgcaggctcgattgatgcaattgggggcgtgacaagtaatgctattgctcaaaaggcgattagttatgttttggatcaacgtaataaacatcgcatgctaaccacgcaaaatggaacaaactatgaggtggttggaattgtccagattggactagcatacttatttgtaagagatagaaacctcaactcaattgagaaagtacgtgggactaagtttgctattttgcaatatgacgcagcccagaaaattatggttgaaagtgtaggtgcccagcctattccttctgagattaccgattttgtgaaaaagtttaatagtggccaagtcgaggcaattgctgcacctgcttatgcttataaaccgttagaaattggtaagggaattggagcaaatggagctatgtttacttttcctgtggtgaacgtcacaggggatttaattgcaagaagtgataagtttccggccaattttggaatgaagtctcgtgaatggtttattaaacagttgccacagaacttcgcaatggtaaaacggttagaaaccgggattcctcctaaaattaaattaaatttttcagccgaagataagttgaaatatcagaaaatattacgtgaaggtcgccttggcttaacaaaacaaggtgtatatgacgcgacaatgatgagtgtactcaagcgtgcacgatgcaccattgaacggacaaattttgaatgtacgcttactggagagtag

SEQ ID NO: 43833 - DNA, 1008 bp, Acinetobacter baumannii
atgaaaaaaatcgtacttgctatggctgccgcttctgttgttggtttttctgcttcagcgcaagcagcgagtaccgtgtgtgtattcgacctcttaggaaaagcaggcgactcatataaaatgatggaagaatgggctctagctgcaaaaggctggggtactgaaattaacttagttcctcgtcaggacgaggctgttgcagataatgattttaaagctggtaaatgtgatgccgtagcaatgacagctatgcgtgctcgccaatataacaaatttgccggatcaatcgactcgcttggcggcgttcctaataaccaaattgcacaacgtgctattacttatgtattagatgcacgtaatgctgcaaaaatgacaactaaccttggcggtaaaaaatacgaagttgctggtatctctccgttaggttcagcgttcattttcgtacgtgataaaaacatcaactcagttgaaaaagctgctggtaaaaaattcgctgtgttaggttatgacgatgcacaaaaaattatggtgcagcgcgtaggtgctcaggcagttctttctgatatttcaaactttgctgctaaatttaataatggtcaggtagatatggtaggtgcgcctgcttatgcttacaaaccattagaattgaacaaaggtttgggtgcaaacggtgtaatgtggaacttcccggtattacatgtaacggctgatttagtattgcgtgctgataaattcccagcaggctttggtcaaaagtctcgtgattggttcgtaaaacaattaccaaaaagctttgcaatgattaaccgtttagaagcacaaattccaggtaaatataaaatgaacctaagtgctgaagacaaactgaaatatcaaaaaatgttacgtgatggccgtatggatttaactaaacgcggtatttacgatgcaggtatgatgtctgtattgaaaaaagcacgttgttctgtagacaaagctaactttgaatgttcaatgcctggtgaataa

SEQ ID NO: 43834 - DNA, 1005 bp, Acinetobacter baumannii
atgcgattttccaaaacgcttttacttgcgatgggactcacaacaatttcatttgcagccgaggccaaacaaaccatatgtgtttttgattttgttggtaaaaatggcgatgtctatgcactcatgaaggactatcagcttgcagcgaaaaactggggagctgatatcgaactaaaagtaaaccagaatgaagcagtgattgctgaagattttaaagcgggcaaatgtgatggtattagtgtatcaggcatgcgcggacgtcaattcaactcatttacgggatcattagatgcaattggcgcgattccagatctcaaacttgctgttaaagtcatgcaaggtttagcaagccaaacctttagtaaatatatggtcaatggccgctatgaggtagtaggtgttattccggtaggagatgcttatcttttagtaaacgaccgtagtattaataccgtagcgaaagctgcgggtaaaaaaatcgccgtattagactacgatgaagcacaaaaaatcatggttcagcaggtgggtgcccaggcagtgagtgctgacgtgacgaactttggagctaaatttaataatcatcaggtggatattattggtgcgccagcagcagcttttaaacctttagagttacaaaaaggcttaggtacaaaaggggcaattgtaaactatccaattttacaggtgaccggaaatattattattcgtccagacaaattcccagctggttttggtcagaaatctagagagtgggtggctggtcagttaccgcgtgcttttactatcttgggtaaaatgaaagcggatattccgcaaaaatattggatggaagtaccagctgccgataaaccgggttatcaaaagctcatgcgtgagtctcgaattaaccttacacaacgcggggtgtatgataaacggatgatgaaactactatggcaattccgttgtaagcaagacgcgaaaaactttgaatgtggcttacaagatgagaattacaaataa

SEQ ID NO: 43835 - DNA, 336 bp, Acinetobacter baumannii
atgaatgcccaagctctagttttgacagataatgctgccaataaggtacgccaactccgtgatagtgaagggaatgacgatctcatgttacgtgtatatgtaaccggaggcgggtgttcagggttttcatacggcttcaatttcgccgaaagcgtaaatgaagatgatgctgaatttgtaaatggcgatgtaaagatgctggttgactcgctcagctatcaatacttagttggctcagtggttgattatgttgaaggccttgaaggttcacgctttattgtgcagaacccgaatgcgacaacaacctgtggttgtggttcttcattctcaatttaa

SEQ ID NO: 43836 - DNA, 846 bp, Acinetobacter baumannii
atggatctgaccaaacgtattcatcaatacacacgtggggcttggacattcgatgtcattgattcaggccctatagatggccctctcgtgattttattgcatggctttccagaaactgcccatagttgggagaagatttcggaattattgcatgagcatcaatttagaacatttgcgatccatcaacgtggttatagtctaaatgctagaccacaaagccgctttcattacgctttaagtgaactaactgaagatgtcgcagtttttattaagggacttggtcaaccagtttatttaattgggcacgattggggttctgtaattgcgtctagtgtagctatgaagtatccgcagtatattcaacatctcactttagtttccgtaccccatcaagctgcttttttaaaagcctgcttaagtagcaatcaactactaaaatcttattattttgcagtttttcagcttcctattttgcccgaacttttatttaagaaaatgcctaaagtaggacgtaagttccttaaatcatctggcatgaccgaacagcaaattgaaatattcgaaactgaatttataaaagaaaatagactggctacggcattaaactggtatcgtggctttttttgggaaaagcctgaaaatccttttaaagcaatagacgttcccactctttttatttggggtaagcatgatattgcagtaacagaaaaaagtgccaagttaaattcaggttattttaaaaataattataaggctatttttatggatgcctctcattggattccttatcaaaatgcacctgaactcgtacagtactttttagaatctatacatgatcaagcataa

SEQ ID NO: 43837 - DNA, 1128 bp, Acinetobacter baumannii
atgagcgcaatctatatcggcgtaatgactggcactagtatggatggtgtggatattgttgcggcttcatttgagccactacagcttcatgccacacttacagttccattcgaacccgagttacgtgatgagcttatggcattaactttacccgatgacaatgaaattgaccgcatgggtaaagctgatgttgctctagccaaaatgattggtcacgggattaattctcttattgaaaagcaccaattagatcgtagtcaaattaaagcgattgggtcgcatggacaaaccattcgtcatcgtccagagcatggttttacgctacaaattggcgatccaaacattattactgagatcactcaaattccggttgtttcagatttccgtcgtagagatatggcagcaggtggtcaaggcgctccattagtgcctgcatttcatcaggcattatttcaacatccaagtattcatcgggtgattttgaatttaggcggtattgccaatgtaagtatgctgccagctaacaatccggacggcgtttttggttttgatacgggacctgcgaatattttgatggatgcatggtgtcatcgccatacaggccatccatacgatgaaaatggcgattgggcagcttacggtcatcctattcgttcgttactcgaccgtctttatgctcatgagtatttttctaaagagccacctaaaagtacgggacgtgaagatttcaatattgattggctagatgatcagttaatcgattggcgtaatgatttaacttacgatgagttagaagatacacctgaaaatattcaagctaccttattaaaacttactgtacgtgccattcaaaaagcgatctatcgttctaatatggaaacaggtgaagtttatgtatgtggaggtggagcttataactcttatttgttagaacaattacgttggcgcttacgtaagcacaattggtcagttcaaaccactgatgttttaggactctcccctacttgggttgaggctacagcatttgcatggttagcaatgcgttttgtggatggtttaagtggtaatttacctgcggtaacaggagcttcagattttagaatcttaggcacgatcacggcggtataa

SEQ ID NO: 43838 - DNA, 1215 bp, Acinetobacter baumannii
atgtcaaatttcttgcccgccgaagaacagcttgccctcatccaacgaggcacgcacgaaattatttctgaagaagatttactgaaaaagcttaaagagaatcgtcctcttaaaattaaagctggttttgaccctacagctccagatttacatttaggacatacggttcttattaacaaactaaaaacgtttcaagatttgggtcatgaagttactttcttgattggcgactataccgccatgattggtgacccaacgggtaaaagtgcaactcgtccgccgttatcacgcgaacaagttgaagctaacgctaaaacttatcaagaacaagttttcaaaatcttagatccgaataaaacaaaagtacgttttaactcagagtggtttaaccaaaagtctgctgcggatcttattcagttggcaagccagcaaacagtatcacgtatgttagagcgtgatgacttcactaagcgttataacaaccatcagccaattgcgattcatgagttcttatatcctttagttcaaggctatgactctatcgcacttgaagcagacgttgagttaggtggtacagaccaaacctttaacttactcatgggtcgtacattacaaagccgttatggccaagaatcacaagtgtgtatcactgtaccaattctagaaggtttagatggcgtaaataaaatgtctaaatctttaggtaactatattggtgtttttgatgcgccaggtgcaatgtaccaaaaagtattatcaatgcctgactctttaatcgaacgttatttcgatttattaagttttaaatctctagatgagatcaaagctttattagatgaaatcgcggctggtcgtaatccacaagaagtaaaacgtattcttgcactcgagttggttgaacgcttccatgatgctgaagctgctgctaatgctcataagagtgctggtaaccgtattacagaaggtgaggtgccagcagatactcctgaagtaactatttcacgtggtgagtttggtggtgaaatctttattgccacgattcttcgcgtagcaggattaaatccaaatgcagctgctgcaaaagatgctgttgcgcgcggtgcagtaaaagtagactggaatgtagtagatgcaagtttctctgtaaaagaaaacgggacttttattattcagtctgggaaaaaagcaattgcgcgtgtaactttcactgactaa

SEQ ID NO: 43839 - DNA, 930 bp, Acinetobacter baumannii
atgggtagcttgcatataagctatgcagaaccagcttcagctcaacaagtaccaggatattaccatcatcaattcggtaattatcggataacttccttgctcgatggcactatttatctagatcctaaattgtttaaaaatttaagtcaggctgaaaaaactaaaattttaacgaaatatgctgctgtaaatgagaaggggattcagacttcagtaaatgcctttttggttgatgatggtaaaagtttgacgcttgttgacagtggagctgcgagttgttttggtccacagttaggttcaattgctaaaaatcttgaattagcgggctatcaacttgccaatgtgaaaactgttttattgacccacttacatccagaccatgtgtgcggtattgctcaaaatggaaaagccgtatttcctaatgcaacgatctatgctcatgaacgtgaagcagattattggttaaatccagcaaatgaaaaaactgtaccagcggataaaaaagaaaattatttaggtactgttaaaaatgtaaaagctgcacttgcaccttatcaagcaaaaaaagcattcaaaacctttaaagatggtgatgttattcaaggttttgaagtgatcaatacacaagggcacacaccgggacaccatagcttccgtttgaagagtaaagggcaacaaattgtctttgttggtgatattgtccactcacattctttacagtttgatgctccaaaaactggggtagattttgatgtaaattcagagcaggcaattaatactcgtttaaaaatgtttgctgaaatttcaaataagcaacaatgggtagctgccccgcatttaccgttcccaggaattggtcatgtgtataaagtgaatgctgagcagtatcagtggattcctttatattttaataacagtcttgataaataa

SEQ ID NO: 43840 - DNA, 375 bp, Acinetobacter baumannii
atggatagttattctccctataaaggtaaaagtggcctaaagcgcatcttgaacgctaccagttattcaatttcaggatttaaagctgcttaccaaaatgaagctgcatttcggcaaattgttttaattaatgttgtactcatccctgtcagctttttccttgatgtaactcgcggcgaacatgccctgatgatcattgtctgtttatttgccatcattgttgagcttttcaactctgccattgaagcagtggttgatcgagtttcactcgagaaacaccaactttccaaaaatgcaaaagatatgggtagtgccgctcagtttgttgcactttctattattgtcgcaacttggcttattattttatttggataa

SEQ ID NO: 43841 - DNA, 1635 bp, Acinetobacter baumannii
atgtcagctaaagacgtaaaatttggtgattcagctcgctcaaaaatgattgcaggggtaaacgtacttgcagatgcggttaaagtgactttaggtcctaaaggccgtaatgttgtgatcgaccgctctttcggtgcgccgcacattactaaagacggtgtaactgttgcaaaagaaatttcattaaaagacaagtttgaaaacatgggtgctcaacttgttcgtgaagtttcaagcaaaactaacgacatcgcaggtgacggtacaacaactgcaactgtacttgctcaagcaattttaaatgaaggtatcaaatcagtaactgctggtatgaacccaatggatttaaaacgcggtatcgacattgcagtaaaaactgtagttgaaaatatccgttctattgctaaaccagctgatgatttcaaagcaattgaacaagtaggttcaatctctgctaactctgatactactgttggtaaacttattgctcaagcaatggaaaaagtaggtaaagaaggcgtaatcactgtagaagaaggctctggcttcgaagacgcattagacgttgtagaaggtatgcagtttgaccgtggttatatctctccgtactttgcaaacaaacaagatactttaactgctgaacttgaaaatccgttcatccttcttgttgataaaaaaatcagcaacattcgtgaattgatttctgttttagaagcagttgctaaaactggtaaaccacttcttatcatcgctgaagatgttgaaggtgaagcgcttgcaactcttgttgtaaacaacatgcgcggtatcatcaaagtatgtgctgttaaagctcctggtttcggtgatcgtcgtaaagcaatgcttcaagacatcgcgatcttgactggtgcaacagttatttctgaagaagttggtatgtctttagaacaagcaactcttcaagatttaggtacagcgcacaaaatcactgtttctaaagaaaacacagttattgttgacggtgctggtgatgctgctgctatcgctgagcgtgttcaacaaatccgtgctcaaatcgaagaatctacttcagaatatgaccgtgaaaaattacaagaacgtgttgctaagttagcaggcggtgttgctgtaattaaaatcggtgcagcaactgaagttgaaatgaaagagaagaaagaccgcgtagacgacgcacttcacgcaactcgtgcagcagttgaagaaggtgttgttgctggtggtggtgttgctcttgttcgcgctgtaaatgctcttgaaggcttaaaaggcgctaacgaagatcaaacagctggtatcaacattttacgccgtgcgattgaagctccacttcgtcaaatcgttgcgaatgctggtgatgagccatctgtagttatcaacgctgttaagaatggtgagggtaacttcggttacaacgctgcaactggcgaatatggtgatatgttagaaatgggtatccttgacccagctaaagtaactcgttctgcacttgaacacgctgcttctgttgctggcttaatgttaactacagaatgtatgattactgacattcctgaagacaaaccagctgctccagatatgggcggtatgggtggtatgggcggaatgatgtaa

SEQ ID NO: 43842 - DNA, 291 bp, Acinetobacter baumannii
atgagcaacattcgtccattacatgatcgcgttgtgattcgtcgcgtagaagaagaaaccaaaactgctggcggtattttattgccaggttctgctgctgaaaaaccatctcaaggtgaagtaattgcagtaggcaatggtcaaatcactgataacggcgtacgtgctttggatgttaaagttggtgacaaggtgttatttggtacttatgcaggtacaacagttaaagtaaatggtgaagaactcttaattatgaaagagtcagacatcttagctgtattagaaggctaa

SEQ ID NO: 43843 - DNA, 759 bp, Acinetobacter baumannii
atgttactacatctgtctgatttacactttggggcagaaaaaaaagagtgtttagaggcaataagagatttttgtattcagcaacagcctgaagtgattgttgtgagcggcgatattactcaacgcgccaaatatgaacaattttttaaatgtcgacagtatttagatagcctcaatattccttatcttgtggtgcctggtaaccacgatatacctttgtatcatgtctggaaccgttttttttctccatttacccgttatcgatatttttttggtgaattagagccgactttagaaactgaaaatttttatattgttggggtgaatagtatacgtcgtcgttatcatacgcgtgggcatatttcgattgaacaaattcaagctacttatgagcgtttagacaggggacctaaaaataaaataaagctagttgtttttcatcaacccttttatacgccgcctgataataagcatggaataaaagattgtccggttctgggcaaaatcgctttagaaaagtggagtacaactggtctatttggaatgttacatgggcatctccataaaacagctatatatgatttaactcagatttattctttaaaaatagatcatcctatttttgatatacatgcaggtacagcaacttctactcgcttatatcatcataatccaaatagctttaatacaatttcaaatgaaggaaaaattcagcattattggtttaatgaacagttggctgaattcacttcatattga

SEQ ID NO: 43844 - DNA, 939 bp, Acinetobacter baumannii
atgcggcctttgaaacctctttcaatcatctataacgaaaaatcaggatttcatgcttcaaaacatgaagacgtctatgagcagctcatgactgtatttacagaatatggttttgaaatacaagtatttgaattaaatgaaaatacattatttgatgatttgataaataatgttattcatcgacattcacaaaatgaaaatacaggagtggttgttgcggcaggaggagatggtactttaaatgcggttgcgactaaacttaaaaacacttctattcccatgggaattctgcctttagggacttttaattatgttgctaaagttttagagattccgttagaccttttagaggcagcagaggttattgcaacaggtaaacctaggtcagtacatgtagcagccattaatgatcatatttatctaaataatgccagtttaggtttatatcctctttttatcaaaaaacgcgaactctacaataaatatttaggaagactgcctttacatgcctatacctcagctttagatgttttattgagagaaaataaatcaatgaagctttctataactgtagatggcaagaaatatccagttaaagcgccgcttattttctttggaaataaccaattgcaactatgtgatatgaagctcagaattgcagaatgtgcagcacagggaagagtcgctggagttgtaattacaaaaagtgataagctgagtttactaaatatgctttggcaatgggttcaaggtaaagttgaagatgcacaagatgtatatagtttttgtgctgatcatgtcattgttgaatgtgcaaagaaaaccaaactcacagtggccttagatggagaaatcatagagatgaaacctcctttaaatttcactgtagaaaaaaatgctttaaatattatggtgccgaatgttactacatctgtctga

SEQ ID NO: 43845 - DNA, 1833 bp, Acinetobacter baumannii
atgaccacagtgaacgcaccagaattcgttcgtcatcctaagcttatagcatgggttgaagaaattgcaaacttaaccaaaccagcaaaaatcgaatggtgtgacggaagcgaagaagagtatcaacgtctaatcgacttgatgatcgctaacggcaccatgcagaaattaaaccaagaaaaacatcctggttcttatcttgcaaattctgacccatctgacgttgcgcgtgttgaagatcgtacttacatctgctctcaaaataaagaagatgctggtgcgacaaacaactgggaagatccagctgttatgcgtgaaaaattaaatggtttatttgaaggttcaatgaaaggccgtaccatgtacgttgttcctttctctatgggtcctttaggtagccatattgctcacattggtatcgaattaactgactctccttatgtagctgttagcatgcgcaaaatggcacgtatgggtaaagcagtttatgacgtattaggtacagatggcgagtttgttccttgcgtacatacagtaggtgctccacttgctgaaggtcaaaaagatgttgcttggccttgtaacccagagaaatatatcgttcattacccagaaactcgcgaaatctggtctttcggttctggttacggcggtaacgcgttacttggtaaaaaatgtttagctcttcgtatcgcttctgtcatgggacgcgaacaaggttggttagctgaacacatgcttattcttggtgtaactaaccctcaaggtgaaaaacactacatcgctgctgcattcccgtctgcttgtggtaaaacaaactttgcaatgttaattccaccagcaggttatgaaggttggaaaatcgaaactgtaggtgacgatattgcttggattaaaccaggtgaagatggtcgcttatatgcgattaaccctgaagctggtttcttcggtgtagcacctggtacaaataccaaaactaacccgaactgtatggcaactcttcacaaagacgttatctatacaaacgtagcagtaactgacgatggtcaagtttggtgggaaggtctttctaaagaagttccagccaacctaactaactggaaaggtcaacctcacgtaaacggcgaaaaagcagcacatccaaatgctcgtttcactgttgcagcaggtcaatgtccatctatcgatgctgattgggaaaacccagcaggtgttccaatttctgcattcatcttcggtggtcgtcgtgcagatacagtacctttagtttctgaagctttcgactgggttgacggtgtatataaagcggcaactatgggttctgaaactactgctgctgctgttggtcaacaaggtattgttcgccgtgacccattcgcgatgcttccatttgctggctataacatggctgactactttgaccactggttaaaccttggtgcgaaagtaagtgaaaaagctgaagcttctggcaacaaattaccaaaaatcttcaacgtaaactggttccgtcgtgatgcggaaggcaacttcgtatggcctggttttggtcaaaacatgcgtgttcttgagtggatcattgatcgttgtgaaggccgtgcgaacgctgttgaaacacctattggttttgttccaacatatgaagacttgaattgggaaggtactgagttcactaaagaacaatttgacctcatcacaaatcaagataaagaccaatgggttactgaaattgaaagccacactgagttattcaataaacttggcgaacgcttacctaaggcattaaaagaacgtcaagcagctttacttgaagctgtaaaaactggcttctaa

SEQ ID NO: 43846 - DNA, 1518 bp, Acinetobacter baumannii
atgaaagtacaacctaatgattattcaaaaatatatgatcttgccgtaattggtggcggtattaatggtgttggtattgccaatgatgcagtagggcgcggattatcggtatttttatgtgaaaaagatgatttagccagccatacctcatctgctagcagcaaattaattcatggcggcctacgttatttagaatataaagaattcaggctggtcagagaagcattagcagagcgtgaagtattgctagctaaagcgccacatattattaaaccaatgcgttttattatgcctcatcgaccccatttacgccctgcatggctaattcgagcaggtctatttttttatgatcatttgggaaaacgagaaaaattattaggatcaaatctcatttatttcaaagaagacagccctttaaaaccagcgataacacgtggttttgaatattctgactgtactgtagatgatgcgcgtcttgtggtgttaaatgcactacaagctaaagagaaaggggcaaaagtcgttacacgtacacgttgtgttaaggcttatagacaacaggaattatggcatctggagttacaaagcggagctgagttctatcagatacgtgcacgagctttagtgaatgcggcgggaccttgggttgaagaaattattagtaaaaacataagtttaagttcaccttatcaaattaggcttatacaaggaagtcatattgttgtgccaaaattatatgactgccataaggcctttattatgcaaaacgaagatcgacggatcgtttttgcaattccttatttagaaaaatataccctcattggtacaacagatcaggaatacacaggtgacccacaaaaagtagagattactgatgtggaaattgattaccttttgacagtgacaaattcacattttaaaaagcagttgaagcgagctgatattgtaagtcagtactcgggtgtgcgtgctttatgtgatgatgagtcggataatccatctgcaattacacgcgactatactttggctctacaggcagaagataaaaccacaccattgctctcagtgtttgggggcaagattacaacttaccgaaagttagccgaggctgctttagagcatctggctccgttttttaatgacatggcagaggagtggactgcagatgagccattacctggcgccgaaaactggaccacactagagggtttaatcaatcagattaaaacacgtataagtggaatttctgactcacttgccaaccgttgggctcatgcatatggcacaagagtgtggaatatgcttaaagagcgaaatgctatagaacaattgggtcaacattttggccatgatttgtttgagtgtgaagtcagatatttgtgtgaatatgaatgggctcacacagcagaagatatactttggcgcagatctaaattaggtttggcatttgatgaaaaacaggtaaaagttttagaagcttatttatcagaacgtcgattaaaagatgatgccgcataa

SEQ ID NO: 43847 - DNA, 1509 bp, Acinetobacter baumannii
atgtcaaattgcccgaaaaaatatattgtcgcttttgatcagggaacaacaagctcaagagcaattgttttagatcatgatgcgaacgttgtcagtattgctcaaagagaatttacccagatttaccctcagccaggttgggttgagcatgatcctatggaaatttgggcaactcaaagtgctgtatgggtcgaagcattggctcaagctggcataaagagtgaacaagttgcggcaattggaattacaaaccaacgggaaaccactattgtctgggacaaaaaaacaggaaggcctatttacaatgcgattgtttggcaaagccgacaaacaacggaaatatgcaatcaattgtataaagcaggttggcaagaatatatccgtaagaccaccggtttagtcattgatccatatttctcggccacaaaaattaaatggattttggatcatgttgaaggcagccgtgagcgtgctgagcggggagagttattattcggtacggtggatacttggctcatttggaaactaactaatggtgccgtccatgtcactgattttaccaatgcatctcgaaccatgctgtttgatatcgaaaagcttgagtgggatgaaaagcttttacaagctttagacattcctagagcaatgttgccggaggttcgtagttcatctgaggtttatggatatacacataccattagtggacaagaagtagggatcccaattgccggaatcgcgggtgatcagcaggctgcgctttttggtcaaatgtgtgttgagtcgggacaggctaaaaatacctacggtaccggctgttttctactcatgaatacgggtaaaaagattgtccgttcagagcatggattacttacaactattgcctgtggtgcgagtggtgaggtgaactatgccttagagggcgccgtatttaacggtggttcttgcgtacagtggttacgcgatgaattaaaagttattaagaatgctaaggattccgagctttatgcaacacgtgtaaaggataataatggtgtatatgtagtacctgcttttaccggattaggagcaccgtattgggacccgacagctcgcggcgcaatttttggtctgacacgtggggctagtattgaacatattatccgcgcaactctagagtctatagcctttcaaactcgggatgttttagatgccatgcaacaagatgcagaagaagagcttcgtacactccgtgtcgatggaggagtaacggaaaataatttcttgatgcaatttcaggccgatattttaacgacaccggtagagcgtccaataatgaaagaaactacagcattgggtgcagctttcttagcagggctggccactggtttttggcaagatcttcatgagttaagaaataaatctgccatagaaaaagtatttgaaccgaaaatgccttatgaacaagctgaactcatttataaaggttggctaaaagcagttaagcgtagtcaaaattgggcagaggattga

SEQ ID NO: 43848 - DNA, 1320 bp, Acinetobacter baumannii
atggttgatcaaccttctaccgcaacaactccacattctaatttagatacaaaaacccgtctaaaatcaattttgggcggttctgccggtaaccttgtcgaatggtacgactggtatgtatatgccgcatttacgctctattttgctcatgcatttttcccaaaaggaagtcaaaccgcccaacttcttcaagctgccgctatttttgcagtgggtttccttatgcgtcccattggcgcatggattatggggatctattctgaccgtaaaggacgtaaagcgggccttacgctttccgttactttaatgtgtatcggttcgctactgattgctgttacaccttcctacgaaagtattggcgtatttgctccattgcttttggttattgcacgtttaattcaaggcttaagtgtaggcggtgaatatggcgcaagtgcaacgtatttaagtgaaatggcagaaaaagatcgacgtggttttttctcaagcttccaatatgtcactttaattgcaggacagcttacagctttatgcgtactactcatcttgcaaatgatacttaccgaagaacaactgcatgactggggatggcgtgttccgtttttcatcggagcccttttagctattgtggtgttccgtattcgtcgtggcttattggaaactcaatcctttaaaaacgctcaagcagaaacagatcagccgaaatcaggaatgtttgctttatttaaacattatcctaaagaggccttcactgtattattcctaactgctggtggtactttagctttttatacttacaccacctatttacagaaatatttagtgaatacttctggttttaccaagcctgaggctactcaaattaccactttagccttattcatctttatgtgcttacagccattggcaggtgccttatcagatcggattggccgtaaaccgcttatgatcgccttcggggtcacaggtgttttattcacttatattttgtttgatacacttgcaaacacgcataactactggactgctttctggctatgtttaggtggactggttatggtaaccggctacacatcaattaatgctgtagtgaaggctgaacttttccctgcacatattcgagctttaggtgtcgcattaccttatgcaattgcgaatactttatttggtggtacagccgagttttttgcattaagttttaaagaagccgggcacgaatcttggttctttatttacgtcagtatcatgattttcatttcattgctgatttatatcttcatgaaagacaccaagcatcattcaaaaattaaagaacattaa

SEQ ID NO: 43849 - DNA, 423 bp, Acinetobacter baumannii
atgaataaaagtattctatgtttggcattaagtagtatgttcattttaactgcctgtcagactacgcctcgacaatataatggttcaactggctaccagattgaaaaccaaacaaaaacttcagcgactttagcttacactttagctggtcgtagtaaccagcaacttgatgagcgtaaattgcaacgtgcttgtcaaaatgtgttaggtgctcagaaaatttataaattatcaattttaagcatcaatgaaattcctaatccagctaaagatgagcattacggaattcaactaggtgaaacccgcgcttcttttggcttatcaaatacacctagcttaaataatggtgaagattatgcgacacgccaagcacttgaagcacgtccaagtacattaaaagtcgttcgttatacttgttcataa

SEQ ID NO: 43850 - DNA, 669 bp, Acinetobacter baumannii
atgagctgcacctttcaattgaccaaagcccctgaacatttacttcaagccttacatgaagtcattcctcattgtgaattaatggcacaacagttgccagaaactccaatttctttatggttgattccacctgtttttccaactgatcgattggatgacgaagttattcgccgtatctggaatgacacgccgtattggattttctgttgggcatcaggcttggcgatggctcagtggatacttgcagagccgcaccatgttaaagataaagtggtgttagatttcggagcaggttctggtgtagtggcaattgctgcaaaaatggcaggagcaaaacgcgtaatctgctgtgatattgatcaggttagtctaaatgcttgccgtgaaaatgctttacttaatgatgtagaactcgaatatttagatgatttatataaggctgaacaagtcgatgttttacttgctgccgatgtgttatatgaccaatataatcgctttttcttagacgaatttttaaaatttgcaccagaagtatgggtagcagatagccgtgttaaaaattttagtcatccaaaatacgaaaaaattgaagaaagaagtgcaacaacttggccagatctggatgaagcgaaagaatttagaaatgtaagtttttataagacgctgtaa

SEQ ID NO: 43851 - DNA, 849 bp, Acinetobacter baumannii
gtggcattggttttagacggtcgtgcattagcaaagcaaattgaagaaaatttgttggtacgtgttgaagctttaaaagcgaaaacaggtcgtaccccaattttagcgactattttggttggggatgatggtgcttctgcaacttatgtacgtatgaaagggaatgcctgccgccgagtaggtatggattcattaaaaatcgaattaccacaagaaaccacaacagaacaattattagctgaaattgaaaagcttaatgccaatccagatgttcacggtattcttttacagcatccagttcctgcacaaattgatgagcgcgcatgttttgatgcgatctctttagcaaaagatgtagatggcgtaacttgccttggttttggccgtatggcaatgggtgaagctgcatatggttcagcgactcctgctggcattatgacgattcttaaagaaaacaatatcgaaattgctggtaaacacgcgattgtagttggccgttcagcaattttaggtaaaccaatggcaatgatgttgttgcaagcaaatgcgacagtaacgatttgccattcacgtacacaaaacttacctgagcttgtgaaacaagctgacattattgttggtgctgtaggtaaagctgaacttattcaaaaagactggattaaacaaggtgcagttgttgtagacgctggtttccatccgcgtgatggcggtggtgtaggcgatattcaattacaaggtattgaagaaattgcttctgcttatacaccagtaccgggtggtgttggtccaatgaccattacaactttgattcgtcaaactgtagaagctgctgaaaaagctttaggttaa

SEQ ID NO: 43852 - DNA, 1764 bp, Acinetobacter baumannii
atgtcagagaaaatttcacgccgagaattaattcaaaaaagtctactcggttttggggctttatctatacctgttgcttttacaggttgtaatgatggctcagatgatgaaagcccagaaatacaagcagattttcttcatggtgtcgcaagcggggacccactacaagataaagttattttgtggacacgagtaacaccgagagtctctggggtgcgcttaaaagttgtatgggaaatttcaaccgataatcagtttaaacaaaatttaaagacgggaatggttgaaacaagcaagactgatgactttacagtgaaagttgatgcagctgggttacaagcagatacggtgtactactaccgttttaaatttggtaataaagtttcaccagttgggcagacgaaaacattaccaacatccaccaataaagtgagctttgcagtatgttcttgttctaactatcctgcgggttacttttatgtttatcgtgaaatggcaaaacagaatgttgatgtcattattcacttgggtgactatatttatgaatatggggcagatggctatgcgacagaagatgcaatcaagctaggccgtaatttacctgccgataataataaagaaattattaaattagatgattaccgcaaacgttatgcgctttatcgtcaagataaagatttgaaagcagctcatcagcgccatccttttattgtgatttgggatgaccatgagttggcaaatgatgcttggcgtgagggggcggaaaaccatcaaagtaatgaaggggccttttcggaccgtaaattagctgctctacaggcttattttgaatggatgccaattcgtccagtttctagtacagatcatttaaatatttatcgccagtttaattttggctctcttgttcagttaaccatgctagatacgcgtattattgcgcgtgataagcagcttgcatatgcagactacatgacgactacaggtttggatattgcaaagtttcaggcagatttaactaatccggtgcgtactttgatggggtatatgcaaagagattggttggttgataaattaaagcaatctacagcaacatggaatgtagtagggcagcaagttttaatgagtaaaatgtggattccagctgagttgttggcgtctttagggcaaattacttcaggaggaacttcgcctgatgcgcttgctaagatgaatgcacaaattaccgagttggtcgctttaaaacttcgtttacaacaaaatgatccgacattaacagcccaagaaaaagcaagaattatgacggttgcgccatataatctcgatgcttgggatggttactatgctgagcgagagtttgtgtacgataaattggcagaatttaataaaaagatcattgtgttagccggggatacacataatgcatgggcatcttatttatatagtcagaaagggaaatatgttggagttgaattagcgaccagttctgtatcgtctccaggtttagaaaaatatttaagtattccactggctcagcttcaacagtttgaatttgcatttactacattaattgatgaattggtttattgtaatttaaatcaacgaggatatctgttggttactctagatcaggcgcaagttcattctgagtggagatttgtagattcaattaaaaatgctgaatatcaaatcgattcaagtagacaaaaagatattgtattggatctgaatttgatgccgttaaaacaaggtcaaaagacggcttaa

SEQ ID NO: 43853 - DNA, 366 bp, Acinetobacter baumannii
atgcctgatgaaaataatgccatgatcagaatattaatatttatatccgctctactcttttttatacgctttgcaaatgccgaagatatatttaacggtacaatcttgttcaaaaataatgattggcactttgtacgctgctctattactcaagatgactatctaattgaagcccctcaagagatatttactcaatttaaagagctacagcagcaacaaaaaaactattgggtcagcgtattagcagaagtaaatgaacagcagaatggaaatttaattttaaaaattgagaaaatagacgaagttcatttagacgagacatgtcatttattagaagctctcaaaaattttgaaaatcgagagtaa

SEQ ID NO: 43854 - DNA, 315 bp, Acinetobacter baumannii
atgtttgaagacttacttctcccaatgtttgatgatgaatattatccagatattttggtcgctgaactcaagcagcttattgagcaatttgctaaaaaagttcaaaaacctgctttagctgagcaagatatctatcgatatgctcatcaaactgtaaatgaaattaatgaaatgaagccacagttcgaagatctagactcatcgcttgatgatagtgctgctgattatattgctgaggcaatgatgatggtggtacaagatgcaggatatttagatctggaaatggaagagttggtgatgaatcgagagtggtga

SEQ ID NO: 43855 - DNA, 852 bp, Acinetobacter baumannii
atgcagttaatatctttaccaaagcagattttacagtgtagacagcttcaattagatttatctcagccccatgttatgggtatcttaaatgtcactcctgattctttcagtgatggcggcaaacacaaccaattagaccaagcggttgatcatgcacttagtatgattgagcaaggcgcgactattattgatattgggggggagtctacccgtcctggtgcttcagaagttgcagtagaagaagaagtgcgtcgtgtggtacctgtcgttgaagctttatctcaccataacgttattttatcgatcgacacaagtcagccagaagttattcgcgcagcaaaagcagcaggggcacatatctggaatgatgtccgtgccttaacacgtcccaatgctttaaaaactgccgtagaattagatataccggtagtaattatgcatatgcgcggtgaaccaacgacaatgaatcagttggatcagtacactgatgtaacactcgatgtgatgcaagagttgcaacagcgtattgatgaggctttggctgctggggtaaaaaagcacaatattattgttgatcctggatttggctttgcgaaaaatgctcagcaaaatttaaaactattaaaagaattttggaaacttaatgaacttggctatccaattttatccgggctttctcgtaaacgtttcataggtgaagctttacaaggcgctcctgcagatcaacgtgctgtgggaagtgtaactgggcatttgcttagtattcagcagggagcatccattgtaagagcgcatgatgtaaaggaaatgcatgaagcaattttagtttggaaagcgatgcagcaagcctaa

SEQ ID NO: 43856 - DNA, 1896 bp, Acinetobacter baumannii
ttgagcgattacttcaagaatgccgtattgtggctaataatacttggtgttctgattttaattttcagtaatatcagtgaccgcaataagccaactgcaatgaaatattcagattttgttgcagcggtgaatgctggccaaattaagcaagtcacgattgacggtttaaatattagtggtgaaaaaactaacggatctcagtttgaaactgttcgtccgcaagttgaagacactgaacttatgccaagcttaaacaagcaaaatgttgttgtagagggcacagcaccacaacgtcaaggcattttgatgcaacttctcattgctagtttccctgtactgttaatcattttgttattcatgttctttatgcgtaacatgggtggtggtgcaggcggcaaaaatggtccgatgagttttggtaagtcgaaggcaaaaatgctttctgaagaccaaatcaaagtgacttttgctgacgttgccggttgtgatgaagcgaaacaagaagttgtggaaattgtagatttcttaaaggatcctgcaaaattcaaacgcttgggcgctactattccacgtggtgtgcttatggttggtcctccaggtactggtaaaacgttattagccaaagcaattgctggtgaagcaaaagttccattctttagcatttctggttctgactttgttgagatgtttgtgggtgtgggtgcgtcccgtgtccgtgatatgtttgaacaagcaaaacgtcatgcgccatgtattatctttattgatgagattgatgcagtaggtcgtcaccgtggttcaggtacaggtggtggtcatgatgaacgtgagcaaaccttaaaccaaatgctcgtagagatggacggttttgaaggtaatgaaggcgtaattgttattgctgcgactaaccgtgttgacgtattggataaagcattattgcgtccaggccgtttcgaccgtcaagttatggttggtttacctgacatccgtggtcgtgaacaaattctgaatgtacatttgaaaaaattgccttcagttactggtgtagatgttaaagttttatctcgtggtacgcctggtttctctggtgctcagttggcaaaccttgtaaatgaagctgctttgtttgctgctcgccgtaataagaacactgtcgatatgcatgactttgaagatgcaaaagacaagatctatatgggtcctgaacgtaaatcaatggttctacgtgaagaagagcgtcgtgcaactgcttaccatgaagctggacatgcaattgttgctgagattttaccgggtactgaccctgtgcataaggtaacaattatgccgcgtggttgggctttaggtgtaacttggcagttacctgaacaagatcagattagccactataaagacaaaatgctaaatgaaattgcaattttgtttggtggacgtattgctgaagaagtcttcattcaacagcaatcgactggtgcttcaaatgacttcgaacgcgctacaaaaatggctcgtgcgatggtaacgaagtacggtatgtctgacaagatgggtgtgatggtttacgaagatgaaaaccaaaatggattcttcggtaacgtaggtagccgtacaatttctgaagcgactcaacaacaagttgatcaggaagtacgccgtattttagatgaacaatataaagttgctcgtgatatcttggaaaataataaagatatcgcacacgcaatggttaaagcgttgatggaatgggaaactattgatcgtgaccaaatccgtgacatcatggaaggccgcgaacctcaaccacctaaagtttatattgctgaaaatccggtatctgcgtttgagccaccaaaagatggtccatctactccgccgccattaccagcgatgaattaa

SEQ ID NO: 43857 - DNA, 651 bp, Acinetobacter baumannii
atggcaacacgcatcaccaaccaaaaattgtctaaaagtagtcgtgcgtggatgagggaacatctagacgatccttttgtaaaaaaagcacaaaaggaaggatatcgtgcacgagcagcgtataaacttcttgaaattcaagaaaaatataagttgatcaagccaggcatgacagtggtggacttgggagcagctcctgggagttggtcacaaatcgctgggaaactcgttggtagtaaaggattggttattgcttccgatattttacctatggatgctttgccagatgtcactttcttacaaggcgacttcagagaagaagctgtatttgaaaaattgttaaatattttaaacggaagacaagtagacattgtaatttctgatatggcccccaatacatcaggtaatagggctgttgatcaacctcgacagatttacttgtgtgaacttgctttagactttgctcagaaagtcttgggtccaaatggacagtttgttgttaaagtgttccaaggcgcaggatttgatgagtttcgtaaacaagtcgttgatagttttgatgtgttaaaaacagcaaaaccagcagcttctcgggcacgatctaaagaagtttttttggttggacaagggcgtaagaaagcattgcaataa

SEQ ID NO: 43858 - DNA, 324 bp, Acinetobacter baumannii
atggccgctttatctattcatgaacgtaaacgtttacgtcaaattggtcatgtgcttaatccggttgtcatgattggtggacaaggcttaacagacgctgttattgaagaaacgcttcgtgctttaaacgatcatgaactcatcaaggtaaaaattgctggtgaagaccgtgaagctcgtgccgcagtaattgatgcgattgtagaagcaactggtgctgaagctgtacagaaaattggtaaaattgttttactctataaaaaagcagctaagcaaaatcaacatttatctaaccttgttcgtcacgcacacttagcaaactaa

SEQ ID NO: 43859 - DNA, 537 bp, Acinetobacter baumannii
atggcaagttacgaactttcagcttttgatcgttttcatgctgtttctgttgttggcgcaattgaacagcaagccccatatacattaaatgtgggtttttggattcgtgatccaaaccaactgattatctggccccaagaagtcgccgctcatcctcgtcaggactttttgtgggaagagacttgttttgaaattttcattggcgtgcatgatgaagatttctaccgggaaattaatctttccccttctcaagcatggcagacttaccagtttgaagaatatcgctatccggaaagcatgcctcccctcgttgcttacgatatcgaattgaatcatctcaaacgtacccactatgggttaaatgtaagtcttgacttaagccagtttatgcaacagcaccgcttaaaatgggcaaacctttatctaggtttgactgctgttttaaaaacaaaagatggtatgcagcactatgcaatgcagcatagtggaaaacatgctgattttcacaataaacgtgattggctgcatgagttttaa

SEQ ID NO: 43860 - DNA, 588 bp, Acinetobacter baumannii
atgagcgataaccaagtttcaaaagacatagctgagaatacttcatcagtagcagagactgtaaaaacagaagtagctgaagctaaagaggccgtagccaaaacgacgactcgagctaaaaaagcggttagcactaaagctacacaggtaaaagaagttgtagctgaaaaaacagaacaggtcaaagaagtggctcacgaagcgacttcgcaagttaaagaagctattgcagaaacacaagagcaagtaaaagctgtaattaatgagaccgaagaaaagattgaagctgaaacacaagaattgaatcagaacattcacaatcaatttgctcagattaaacaagatattttacagcgtcttgatgtgattaaagctcagttcaatacttcacaagaaggattgaatgaattaaaaaatactttaaaagctgaaatcaatgcattaattgaagatctaaccaaagtgactaaggaacttaaaggtgacattagccaaatttctttaaaacacaaagactctttaactgaaagcttaaaacgcactaaaaataatgcggttgaagcttggaacaaagcaagagatcactaa

SEQ ID NO: 43861 - DNA, 1140 bp, Acinetobacter baumannii
ttgagcccccccgccattttagccctcgcagatggaacgatctttaaaggaacgtcaatcggcgcaacgggaagtacgactggagaagtcgtttttaacacagccatgacaggctatcaagaaattttgactgacccaagttatgcacaacaaattgtgacattaacttaccctcatattggtaacactggttgcaacgaagaagacgttgaatctggtcgtatccataaagtatgggcgaatggtttaattattcgtgaccttccactattacacagcaacttccgttctgagcaatcattaagtgaatatttgcaagcgcacaatgttgtcgcaattgctgatattgacacacgtaaacttactcgtattttacgtgataaaggtgcacaaaatggttgcatccttgccggcgaaaatattactgaagaagaagcaattgctaaagctcgcgcttttggtggtttaaatggtttagaccttgcaaaagagtgctgtgatccgacaggctttgaatggtctgaaggttcatgggtattaggtaaaggctttactcaacctgagttaaaataccatgtggttgcatacgattatggtgtcaaaaccaacatcttgcgtatgcttgcagaccgcggttgtaaactcactgttgtccctgctgaaactccggctgaaaaagtattagcacttaatccggatggcgtattcctttcaaacggccctggcgacccagctgcttgtgattacgctatcgaagctgtaaaaactattgttgaaaccacaacattacctgtatttggtatctgtttaggacaccaaatcttggcactcgcttctggtgcaaaaactgtaaaaatgaatcatggtcaccacggtgcgaaccaccctgtacaaaatcttgaagatggtacagtgatgattacatctcaaaaccatggttttgctgtagatgcagaaacattaccggctaacttaaaagcaacgcataaatcattgttcgatggcactctacaagggattcatcgtacagacaaaccagctttcagcttccaaggtcaccctgaagcaagcccaggtccacatgattgtgcacctttgttcgatcatttcatcgaacttattgaagcatctaaacagtaa

SEQ ID NO: 43862 - DNA, 3231 bp, Acinetobacter baumannii
atgcctaaacgtacggatattaaaagcatcttaattattggtgctggtccaattgtcattggtcaagcttgtgagtttgactattctggtgctcaagcatgtaaagcacttcgtgaagaaggctatcgtgttattttggttaactctaacccagcaaccattatgactgacccttcaatggctgatgcaacttatattgagccaattacttggcaaactgttgctcaaatcattgaaaaagagcgcccagatgcagtactccctactatgggtggacaaactgcacttaactgcgcacttgcacttgatgaaaatggcgtattagaaaaatacggcgtagaacttattggtgcaacaaaagaagcaattgaaaaagctgaagaccgtaaattgtttgatgaagcaatgcgcaaaatcggcttggaatgcccaaaagctgccattgctgaaacaatggaagaagcattggaaattcaatctcgctttggtttcccagtaattatccgtccgtcattcactatgggtggttcaggcggtggtattgcatataaccgcgaagaattccttgagatttgtgaacgtggtttcgacctctctcctactcaccaattattgatcgacgaatctttaattggttggaaagaatacgaaatggaagttgttcgtgacaaaaacgacaactgtattatcgtatgtgcgatcgaaaacttcgacccaatgggcgttcatacaggtgactcaatcactgtagcaccggctcaaaccttaactgacaaagaatatcaattgatgcgtaatgcttcagttgcagttcttcgtgaaattggtgttgagacaggtggttctaacgttcagttcggtattaacccgaaagacggccgtatggttgtgatcgagatgaacccacgtgtatctcgttcttctgcgcttgcgtctaaagcaactggtttcccaattgcaaaaatcgcagccaaacttgctgttggttacacccttgatgaattgaaaaatgacatcactggtggcgtaactcctgcaagctttgaaccatcaattgattacgttgtaacaaagattcctcgttttaacttcgagaaattcccacaagcagaacctgtattaaccactcagatgaaatctgttggtgaagtcatggctattggtcgtaacttccaggaatctgtacaaaaagcattacgtggtcttgaagttggcgtaagcggtttcgatgagaaaatcgaagctggtgcaacaaatgtaaaagaaactattctaaaagagcttaaagttcctggacctgaacgtatttggtacgtagcagatgcattccgtcacggtttctctttagatgatgtatttgaagcaactaaaattgaccgttggttcttgatccaaattcaagatattgtcaacacagaagctcaagtaaaaactttaggttttggtgatctcactgctgaaaatatccgttcgttcaaacgtaaaggtttatctgaccttcgtattgcgaacctcatgggtatttctcaaaagcaattccgtaagcaacgttggaacttgggtgtttaccctgtatacaaacgtgttgatacatgtgctgccgagtttgaatctggtacagcatatatgtactcgacttacgatgaagagtgtgaagctaacccatcaaatcgtgacaagatcatggttattggtggtggtccaaaccgtattggtcaaggtatcgaatttgactactgctgtgtacacgctgctttagcaatgcgtgaagacggttatgaaacaatcatggtgaactgtaaccctgaaactgtttctaccgactatgacacatctgatcgtctatacttcgaacctgtaacacttgaagacgttcttgaaatcgtacgtacagagaagcctaaaggcgtaatcgtacagtatggtggtcaaactccacttaaattggcacgtgctttagaagaagctggtactccaattatcggtacatctccagatgcaattgaccgtgcagaagaccgtgaacgtttccaacaaatgattcaacgtttacagcttcgtcaaccaaacaacagcattgtaaaatctgctgaagaaggtatttctgaagctgcgaaagttggctatccattagttgttcgcccatcttatgtattaggtggccgtgcaatggaaatcgtctataacgaagatgagcttaaacgttatcttcgtgaagcagtacaggcttctaatgaagcacctgttcttcttgaccacttccttgatgatgcaactgaagttgatgttgactgcgtatctgacggtaaagatgtcgtgattggcggtattatgcaacacatcgaacaagcaggtattcactcaggtgactctgcatgttctattcctccttactctctttctaaagagattcaggatgagatgcgtcgtcaaacaattgcgatggcaaaagaacttggtgtagttggtttaatgaacgttcagttcgcagtgaaaggcaacgatatttacgttcttgaagtaaacccacgtgcatcacgtactgttccattcgtatcgaaatgtattggtgaatctttagcaaaagtagctgctcgttgtatggcgggtcaatcacttgagtctcaaggttttactaaagaaattattccaaatcgtttcgcagtaaaagaagcagtattcccatttgcaaaattccctggcgtagacccaatgcttggtcctgagatgaaatctacaggtgaagtaatgggtgttggtcaaacctttggtgaagcattctataaggctgttttaggctcaaatgaccgcttaccaggcttgccaactgaaggtgaagtaaagcatgcattcttatctgttcgtgagtcagacaagaaatacatcgctgatattgctaagaaattagttgaatatggcttcaaacttgtagcaacaggtggaacatatcaggtacttaaagaagcaggtttagaatgtgaatctgtaaataaagtaactgaaggccgtccacatattgttgaccgcttgaaaaatggtgaaatacaccttattgtcaatactactgaaggcaaacaagctcaatatgactctgcaatgattcgtcgtgctgccctacaaggcaaagtgtattacacaacgactatcaatggtgcagaagcggtttgccaagcctttgctgtgaaattgccaatggatgtataccgcttgcaagatttaactgtaggttaa

SEQ ID NO: 43863 - DNA, 477 bp, Acinetobacter baumannii
atgcaacgttatccaatgacccctgaaggtaaaatcgccttagagaaagaattacaacatctgaaaactgttgaacgtccacgtattactcaagcgattgctgaagcacgtgaacatggggacttaaaagaaaatgcagaatatcatgctgctcgtgaacagcaaggtttctgtgaaggccgtatccaagatatcgaaggaaaattgggtgctgcacaagtcatcgatgttaaagacttagaacaaaacggtcgtgttgtattcggtgttacggtaacgattgaaaaccttgatactgaagaacgcaagacttataagattgttggtgatgatgaagctgattttaaaatcaataaaatttcagtaaattcgccaattgcacgtggccttttgggtaaaaatgaaggtgatgaagtaaaaattaccactcctcaaggcgaagtggaatacgaagttgtaagtgtagaatatatttaa

SEQ ID NO: 43864 - DNA, 588 bp, Acinetobacter baumannii
atgtctgttcgtgaacaaaagatggcggaaacccgcaagaaactgattgaagtagcacgtcgtgcatttgctgaatatggctatgcagatacttcaatggataagctcacggcagaagcagggttgacccgtggggcgctgtaccatcattttggcgataagcgtggtttatttgctgcagtggtcgatcaaattgattcacaaatggcagaatatgcccagcagcatcgagagcagcctgatgatctttgggaagggttactacttgaagggcagacctatatacaaaatgctttgaatcctgagtttcagcgtattgtgttacgtgatggacctgcagtgctgggcgatccagcgcattggccaagtcaaaatagatgtctgcagtctacccgtgagtgcgttgaacagctattggcagcagaacgaattaaaattgtagatcctgaagcggcagcagtgcttttaaatggcgctgccatgaacgctgcattatgggtggcctctagtgaatatcctgaacaagtacttcctgaagcattaaatgcttttcaaatctttgcatcaggttttttaaaagatgcatag

SEQ ID NO: 43865 - DNA, 393 bp, Acinetobacter baumannii
atgagaactgcaatatttcctcaagaccgtcatgcattatatgaacagcatggttattcagccgcaattcgatcgaaagatttactctttgtttcagggcaggttggtagccttgaagatggctcgcctgtacctgattttgaaaaacaggtaatccaagcttttaagaacttagcagagacactgaaagcagctggttgtactttcgatgatattattgatgtcaccacctttcatactgatcctgaacggcagtttgaaagtattatgaaagttaaaaaacagatctttacacaaaagccttatccaaactggaccgctgttggtgtaacttggctagcgggttttgattttgagattaaagtcattgcacgtattcctcataataattag

SEQ ID NO: 43866 - DNA, 633 bp, Acinetobacter baumannii
atggctgaaaagttaattggctcccctgttcgtcactggtgtgaatttgagtttatttccaaaactgtgaaaaatccaaatatccatattaaagggaattactcttactactcggcatattgggatcaaggttttgaacgctgtgtagtgcgatatctacatgacaagccttctactccagacaagccaattgatcagctctatattggtaattttgtttgttttggcgctgaatgcgtgattatgatgggtggtaaccaacttcatcggccagactggatatcgacatttccctttgacacccgaagttttttagccgctggtgacactataattgcagatggctgctggattggaagccgtgcaatgattatgcaaggtgtaaaaatcggtgaaggtgctgttgttgcaactggagctgtggtcactaaagatgtccccccctatgcaattgttggtggcgtacctgcaaaaattattaaataccgttttcctcaagagcaaatagaaaaactacttgctttaaaaatttatgatttagatgaaaaaaaagttttaaaaatgcgggaatatttacaaacggatgatatagatgcattaacagcatatcttaaaaaattacagagcgaataa

SEQ ID NO: 43867 - DNA, 438 bp, Acinetobacter baumannii
atgttatatcaacatattcttgtaccaattgacggttctgaaacttctatggttgctatgaaagaagcaatcaaaattgggaaagcattaaacagtaaaattacggttgtacaagttatggcacttgacccgattattgctgacctttacgttaagacggggcaaaccaatgaattgattgagcgtactagaacatatttgctagatattttagagcaagctaagcaacaatttttgcaagaaggacttagtgtagaaaccaaattacttgaaggttttgttgttcacgaagaaattattcaagctgcacaagagcttaatgctgatctgattgtgatgggttctcatggccgcacaggtgtacgaaaacttgtattaggaagtgttgcgcaaaaggtcttaggtgaaagtcatattccggttttaatagttcgttaa

SEQ ID NO: 43868 - DNA, 330 bp, Acinetobacter baumannii
atggattccattttgacaactcagtatgaactacatcgacaaattttagaagtcatcgctttgattccatatggaaaagttgcaacttatggccaagttgctcgtatggcaggtttacctaaacatgccagattagttgggtatgtgcttaaacatcttgatgcagatcatcaggtcccttggcaccgtgttattaattcgcaaggtaaaattagcctaagtaagtttaatgaaaagggcaaaaatattcagcagttaaagcttgaaacagagggaatctatttattaaatggcaaagtaaacttaaagcaatttgcttggcagccttaa

SEQ ID NO: 43869 - DNA, 717 bp, Acinetobacter baumannii
atgaaaaaaatattgctgttgatcagtggaactttactgtgtgtttcttgtactactcgtccccctctgctttcagaaagaggtccaagcatatctgcagatggtcggcctattgttcccgtcacttttgtttttactaccaatactcctcaggctacaaaatttgataattatcaacaaatgcgtaaggaaattaagattttaaataaatattatgtagatgataaaaataataagattttcaaatttaaattacaccgttatatcccttatgaagagttctcaaagttacattgtgatttgaaacagcaaattaaccagccttatcccatttctactgaaactattcctgccagtgtaaatacatgttttcctaagcgcactgcaagtaaagaagtcattgtttttatttatgatgcttactcaacaaaatggaaatttgaagatgtaacaagcagagcatttcgtaataatggcaaaccttttattttattagattggaaccgtctaaattataatattcaggctggtagtgtgcatgagatggggcatgtatttggtctaaaacatgtttgtgcaccgaaggctacaaaacgtactccaaccaatattatgacaagtgccgaatgtaaattaggcagtggtggcttaagaaatttagggtttactccagtacaactgcaaaccattttatcgacttacaaccaatatccttaa

SEQ ID NO: 43870 - DNA, 1725 bp, Acinetobacter baumannii
atgacttaccctctatttgaaattaagctgctaactgctcttgatcatgctcaatttgaagaggcaatttgggcatttgaaattgatggagacatttctacattattactgattgattatgcattagaacaattccatcaaaaaaaagttcaagctgatgaaatgtatcgggttcctgaacaaaaaattaagaaaattggtgaacaaaatttaggtctagaaaaaaatgaatcatatacatttgccgagctcttacaattcttaatttttactcaggcaaatgatgttaaagatgccttaagcaatatgctgttgggttctgttgagcaaacacaattgatcttgtctaaaagagcagaatattaccagttagctttaagagcacctaatcaattaaaaaatctatttttgttggtaaaacacatttatagctatccagccgagctgaaaaaacttttctttattagaacagtttcttttaaaaataaagtatatcaaccgattacgcctttgcttgctcatccggtactcacttcggttttatatatctcacatgactttagacagatttatatcacttattccgaatataaccggagcattggttttttctcttttctggatggtattcaccgtctggagcatttggttccttactaccattattttcaagaagggcatgtcgaggcaaaaaaatattcttctcaaacaggtattatcaatattcttggagatacctattttggtgaaatgtataccgaaaagcgtaagtctagagggcaaacagatgccttacagcaatatggatatcattattcatttgaaaaaatacagccctttttaggtaaaaatgacatcaacatcgctaactttgaagcagtattttctttagaaaatcaatcgccgttaaaagataaaaagccatttgttttaaaagcagatgctaaaaaaacattagaagaatttaagagcattcatctaaattatttggttttggcaaataaccatttgaaagattacggtgagcaaggattagcctatacattacaacagttggatcaggcgagtatttcttatattggcgctggactgaaccaaaaagatgctcacaattactttgaaatcacttttgagactaagcactatgcgatttttaatggttattggcatagagacatggcctatctggattatgacttttatgcgttaggatcaagaagtggagtagcttgcttaaatggcgttttacttgaacaaataatgcgttataagcaggctcatccagaacgcaaaattattgttatttgtcattggggtgtcgactttaagcctattacaaaagaccaaactaaactcgcgactattcttactcaagcaggagcggatctgatcgttggtcatggtgctcatactattcagccaatccagatcatcaatcaaaagcctgttgtttttaatataggcaatgcagtgtttaatagtgacggtgaatatgaacagcaaaatgctttgccatttggctgtatagctagacttgatttggcaaaagatttactccgtctttaccccatttacaccaataatttacaaacattttggcagccttatcctgtagatgctgaagatttctcaaaggccagtacttatatgacatctttactgacccctgagaattacatggcatcccaagataacttagggagatatcttgaagttaaattttaa

SEQ ID NO: 43871 - DNA, 1656 bp, Acinetobacter baumannii
gtggcggtatttttagacttcaaaagacagctcaagctttggttggaacatatcgttcaccatgtttcagaccttcaagaagaaactattttatttatatcatttggccctaaagatcacagatgtagcgtatggcatagtgaaaaaacagtgcttacacaagcaactctacaattatttaattttattgatgatcagttttcgccagatcaacttccagactacataaaaattgatgttgcgtacaatttagaaaagcaaagttggaaccaaatagagcagcaggttcatcaccaatttcacaataatcattaccgcagaggtattggatttgatgattcctgttcggtagcttttctggagcaagaaatatatggaaaagccattattcggggcttaagttatgacaagccgaacttttttgatgaaacaaatctgaactatgcaattaaacaaaaatatcgtgcaacaaagccggaaattaaacttaagtcactacaagaagtgtggactttcgatacctatgcaactttttatgaaaatggacaatttattaatttagcgagtcgctacgatgcaaatggtattagagccattgctagcaataaaaaacagcactttagagacctcattgaaaaaaatgcagcttttttacatagccagattcaagaaaatggcaaattcatttatggatattttcctgcttatgatcgtgatatacggaactataatacggtacgtcactgtacttcgctttacgcgcttttagagacttttgaagtacaagataaacctgaatattggcctaaaattgttgcagcaattcaatacgcacttactactttctataaagaaaaagacccaataactgcttttatgattgatggtaaagaaggggagctagaaattaaattaggtgcaaatgccgcagctattttattgttaacgaaatatcaagaaatcacaggaaaagatgattatttaaaatatgcagagaaacttgctcatgctattttagaattagtggatccggatggattaactactcatgtattaaattatccaaattatgatttaaaagaaaagttcagaatcatttattatgatggagaagcagcattagctttattaaggttatatcaaattaatcaggataaaagattattagacacagttaagttaatgtttgaaaattttattcataaaagatatgaaaaatatcatgatcactggttaagttattgtaccaatgagcttacaaaaatatgtcctgaagaaaaatattttatttttggcttaaataattatttaaaacattttatttttattcgaaatagaaaaacaacatatgccactttattagaaatgctaatggcagcctataaaatggtaaatcgtttaaaagagcaaggccataatgcactttttgaacaagcatatatgtctgagttaaaaaaactcattatatttcgagctgaatttcaaaccacaggttttttctatccggaaatagccatgtatatggctcgaccagataaaatattgcatgctttttatatacggcatgaccgctttagagtaagaattgatgatcaggaacacaacctttctggttatattgcctacgtaaaagatttcgaaggaggggagatatga

SEQ ID NO: 43872 - DNA, 5946 bp, Acinetobacter baumannii
gtgttcacaccggatggtacaggcacagcaccaagcatcagtgtggctgataatacttacacagaccttgcaggtaacttgggtacaggtgatgtacttgatggaactgatggttttgttgtagacattgttccaccaacacttgcaattacaactgatgatctggctcttgcagcaggtgaatcagcgaacattaccttcacattcagtgaggctgttgcaggctttgatgcgaatgatatcaccctagtaggcggtacattgagtgcattgactacgactgacaacatcacctggacagcagtgttcacaccggatggtacaggcacagcaccaagtattgccgtggctgatggcagctacacagatgttgcaggtaacttaggtacaggtgatgtacttgatggaactgatggtttcgttgtagacattgttgcaccggtagttggtttcacaaatgtaactactaatgatgatacaccaccattgactggtacgattgatgatcctactgcgacagttgtagtgactgtggatggcgtggattacccagcaaccaacaatggtgacggtacctggacgcttgcagacaatacacttccttcattaatcgatggtccgcataccgtaagcgtaactgcaaccgaccctgcgggtaatgtatcgcttccggcaactggtacggtaacgattagttcttctagtatcttggcctttgacaacactgaccatgcagttcttagtccgcaaccatctcttgtgggtgatgatgtaagtctaggtagtacttcttatttagtacttacatctgtagcaggcttagaccttcaacttggtggtaattctctaggatttactgtcgctgctggccatgaaggtgatgttactttccaatatagtggcttaatcgacgcagctgtactttctgattacaagttagtagttcagaagttcaatacaacaactaaccaatgggaatctatacatggtgatgctaattcatcattaattagcttgcacttgttaggtattggtacaggaaatgttcctggtgcagtccttgatggtttagatgcgggtcaataccgtgccttcttagcctacgacggactgttaggattgggcgtgttaggcactctttctgccactatggatgattatgatttgtctgtagcaggtggatatgaaattggtaatgctgaaggtaacgtgattactgatccagatccaacaacaggtcaagtcgatcaggtaactgcaaatacttatgtttcatcagtgaatggtcatccgattgatgctgatggagagacatttgcaggtacttacggaacaattactttctatcaagatggtagttatgtgtatgtaccaaatgcagatggttctggtgtaggtcaaactgatgtattcacatatacgttaactgactcagtaactggagcaacaggtcaagctaatcttaatatcgtgtttgattcgattcgtgcagcggataaccttgttgaggttgaactcaatccacaatatcaattggtgggtacagagactgattcagcattctatggcgttctattgaatgttggaaatattgttgacctacaactcctcacagtagatacggttgactttactatcggtgctggtcaggaaggggttgcaacatttaacttcaatagcttgattggtgcatctgctttaggtgactacaatgttgtgttgcaaaaatacaatgatgtgacaggacaatgggaagcagtgaatggtacaggtgatcgttcattactgaacttgaccttgcttggtaatacgccaactgcgcaaataggcgggcttacagagggtgaatatagagcattcttatcattcaatggcttggtaggcggagcagtagctgtaacattaaacggcagtgtagatgtctataacccagcggttattactggttacgatgtcgtagcagctcatggcaacctaatctctgatccaaatacgaatggtgatgttgatatcgctacacctaacagtattatcagtgaagtcaatggtgttgcagtaagtgcatctccaactgagattattggtactcacggtactttactcatctatgcaaatggtgattatacctatacgccaaatgctgatagtgctggattaggtcaggttgatcaatttacttataccttgttagacccagcttctaatacaacttcacaagctacgttctatgtacatctagatagtaaagttgtggatatgaattgggatgcagctgatccatcacaacctgctactgtaacgattacagcagtggatgacgctgtaaatgctgcaattgctgctgagcctcatctcatcgaagatgacagagcattgggtagtgcaacttatcttgcattgttatcgttggctggcatcaacctacaagctcctttaccattcgtgaatagtactgtggagttcaatgtaggtgctggtgaaactggaaccgcaacctttaaatacagcagtttaatcaatgaaggggcgctcggtgattaccaacttgtagtacagaaattcaatactgctacaaatcgttgggaatcaattaccggtagcagtgaagcttctttactgaacttaagtgtattgggtataggtgtgaatgcgacgccgggagtggttgttgaagggcttgacgaaggtcaataccgtgcctttatgacatacaacggcctctatggtaagagtatccttggtacattgtcaggtacgatggatgtttacgatccaaaccaaattgactttactggtttggcatctgaaggcaatgtcattactggtcttggcgtaggtacaaatgctgatgctgtaactggatatacaattgttgattcagttactgtaaacggtgtgactacgaatgttgatccaaatactggaacaattattcagggtcaatacggtacgcttcaaatattcgcgaatggtgattacatctatacgccgaataatacgaatgccaacctcggtctcgtcgatcacttcacttatacgttggctgatcctttgggcggcaatataagtgcaagtctagacttcactattggcaacagtacgccagtgattgccgtagatgaccttgctgtagctgttgttaatccagaatatctgcaaattggtaatgatgttgcggtaggtaatactacgtatctagcattattaacattgactgataattttgacttccaagctggcggccaaagcgttaacttcactttgactgatgcgacattaaatgatgtaacgtttaactacagtgcgcttatcagcgcaagcttgttagctgattatgttcttgtggtacaaaaatttgatactgcaacgaatcaatgggtagctgtaaatggcactggagatgcggacttactcagtctggcagcctttggtggaaattcagtgacattggaaggtctagctgctggtcaatatagagcctatatgacttatgctggtagtggtgttggagttagcttattaggtacattgtcagttcagaaagatgtatttgatgcgacaaatattacaggctacagcactcaagttgcagaaggtaatgttattcatgatgtcggcttaaatggacacgcagatactgcttctggttttagcacagtaactagcgttgaatttaacggcacagcatttgcggttaatgcaacaggtgtcacaaccattgtcggtgaccatggtacattgtcaatttatgctaatggtaactacagctatcaaccaaatggtgaggctgcaagccttggtcaagttgatcaatttacttacaccttgtcagatggtctaaatacatcgcaagcgaccttgtatctccatattgatagcgatgcagtcgacatgacttggaatacaagtgatccatcacaaccagctgtcatcacagttactcctgtagacgcgattgataacgttgtttctgctggtgtagatatcgttcctcaaggtgagcttggtgtagctgtaggttctgcaacttatctagcattggtgggcattacagagaacttaaatgtttccttgttaggaacaccaagtgttgcatttacaattgatgctggacacgaagctgatgtgaaattcgcatatgctccagtgctttcattatcattgtttaatgactataaagttgtattacagcaaaaaggtgctgatggtgcttggcataatattgacggtggctcaagtactggcttactcaatattggtttactaggtaacggtggaattggtgttactgttccagatctaggccaaggtgaataccgtgcatttatggtgtacaccggtttaggagtaggtatcttaggtacaatgagtgtagtgaaagatgactttgattacacagttgcgcctaccaatacagcggttgttgcagatggtaatgtattgactgatgacgtaactacgttaactactcaagttaccactgtgacatctgaagtagtgggtgctctaccacaaactgtcggaacagatacagttataaacggtgcatacggtacattgttgatttctacaaatggtcactacacctatacaccaaatacaactgatctgagcgcgattggtaaagtggattcattcacttatacaattcgtgatgtattaacaggggcaacagatacagcgacattacatgttcaggttggttcaccagacgtaacgatcgcatgggatgctgctaacccagcaaatgatggcgtagtacaattaactgctaatcctgatcatgtggttacaactacagacttctcaaatgctgctgatctaccagtagatgtggcgagccctgtggtttctgtaaacctcatcggttctaattcagtagtgtctgatcagtttgtagtaggagctggaactgttgctaatattgatctatcagcggtttatacagcacaacctctagcaagtttactaccgacagtaagttatgtgatccaaagctggaatggtacagcatgggtgaatacaatttactcaggttctcaaactgctctaggaagtgtggcaactattcaagcgggtagtgttgcattccaagacactgttgagcatttagctgcaggtacctaccgcgtacaatatacgctaacaggtgtttcacttggtgcgacttcactagatacaaatgtttctacaacgacagttcatctagatacttatcgttcagattggatcagcggaaatgtgttggcaggagacaacattggtggagtagcggatacaggcatcttgtctcatgaaggagctaaactccaagtttgggataatgcacaaaatgcttatgttgatgcagttggacaaacaatcaataccggtaacggtgtattgattatgcaatcaaatggtgaatatgagtaccgtccaaatgatgtgactacaaccacacaattggcgtctactgacagtattaactataagattgtgtccgtaactggtaatgttgaatctcaatctaccttaacgattgatttaacacatactgattacaatctgctttacacaagtacttctgcgaatgacacattcacaacaggtacgggttcagatactgtgatttaccaagtgttaaataacgttgctataggcaatggaggtaatactggtggtaatggcgtagatacttggactgacttccatgttggtaatgttgctacagacaaacaggctgatctgattgatatcagaggattactcgatggagcgcaaacagacgccaatattggagagtatttgaatgtcacagtaagtggtggtaatacaacaatccagattgaccgtgatgggttaacaggtctattccctgcaaataacttcactacattgttagtcttacaaggtgttactacaacagagactgaattacttaacaatggtcaaattctctattaa

SEQ ID NO: 43873 - DNA, 471 bp, Acinetobacter baumannii
atgaacgttcgcctgtgttatgccagccaacgaaatgaaaaaaatgaagatttgctacaagatttacgtgatattctgacagaagctcgtgatttcaacgatttaaacgggatttgtggggtgctttattatgccgataatgcattttttcaatgtctagaaggtgaacaagaggtcgttgaaagattatttgaaaaaattcaaaaagatcaaaggcattataatattaaatggttatgcacatactccattgatgaacactcttttcagcgttggtcaatgaaatacgtgcagcgtaatacaaatattgaaactttctttcttaacatgggagaaaatacctttaacccgcttttgctgaaccagcaaaacctcaaatttttcttaaatgaactcttaattgcagagcaaactaagatgaatacggttaaaaaagttggaatggtgaatcggggagtaaacccgttctag

SEQ ID NO: 43874 - DNA, 363 bp, Acinetobacter baumannii
atgaaaaaaatattatttaccacactcactggacttgttttattaactagtagtgcagcatttgcaagaacagatcccgctttacttaatcaagcagcaaaaaatgtagtcactgtttcaaaagctaaaactttagctgatgaaacaggggtaaccttaactggtactatcgttaagcatattgctggcgaccattatgaatttaaagacaaaacaggttcaatcgtgattgatgtcgatgatgatttggcaaatggttggcagttaaaggttggagataaagtgcgtattgtaggtgaggttgatacccaccgcgttaaaccgactgaaattgaagtattacaaattgaacgtgttaaataa

SEQ ID NO: 43875 - DNA, 645 bp, Acinetobacter baumannii
atgaaaataggtgttgtagttccagcgcataatgaagagcaacatttgccagcctgtttgcaatcaattcaggaggcgattgaaaaagtaccggatgaacaagtcgaggttatggttgtacttgatagttgtacggatcagtcgcgctcaattgtacagcgctacggagtaagctggattgaatgtaattatgcatgtgtcggaaaggcacgggacttaggtatccgccaacttattcaaaacggcgcaacttggctggcttgtacagatgctgatagtgtggtcagccctgactggttacgctgccagattttgcatcaacctacagatgcaatttgtggcattgtgactttagatgaccttagccgtttatcggttatgaaacaaaaaaaatatttatcgcattatcaggattgtatggatcatcaccatattcatggcgcaaatttaagttttagtgctgctgcttatatgcaagtaggcggttttgaacctgttccttgccatgaagatgtttcactcattcaaaaactgataaggcagtgctgtaatattacatggagcaatttagttcgggtaactaccagtagtcgactcgaaggaagagcgccggaaggcttatcaaaatttttagaaaatctttaa

SEQ ID NO: 43876 - DNA, 600 bp, Acinetobacter baumannii
gtgattcattctcgtgtgtattttgaagagttgtatcgtagtaataatgacccgtggggctatgactatcactggtatgaagcccgtaaaagacaaatctgccttgcattattaacacgaccacactatgaaaaagttttagaaattggttgttcaaatgggcatttaagtgtttatctggctcagcgcgctgctcatctgttatgtattgatgtgtcgaagcaagccgttcagctcgcatcccaacggttagaagcatttgaacatgtgactgttgaaaatagaaaaatacctgaagatttttatgaacaaaaatttgacctgattgtaattagcgaagtggcgtactacctcacattcgatgagttaggtgagtttattgaacagttaaagcaggccttaaacccggaaggtgaaattttgtgttgccattggcgacatgatattcaggattttgaattgaatgcccaaaaagtccatcaaagctttcaacaatcttttccatttcatcactatttaagtctgaacgatccggactttatggtcgatgtttggacggttaatccttcatcaatagctcagcgagaacaattacgatga

SEQ ID NO: 43877 - DNA, 795 bp, Acinetobacter baumannii
atgggaactttgaagcatcccttagtagaggaccgtatgatttcaggtgaaggcacacccgaattcatgtggcttgaggcacttaaaaaaaatcctttagatcgactgaatttaaagttgtttcagtctaaaagagtggtaattgttgctccgcatcctgatgacgaagtgctgggttgtggcggtttaatgcagcagctagtcgagcaaaactgccatattgtcattttggcagtcagtaatggaacacaaagccatcctcattcagtgaaatatactcctgaccaattgaacgatttacgtccgcaagaaacactggctgctttaaacactttaggtatttcagctttttctgaacggattggtttaaatctaatggatggtcaaattcatttacagactgatcaattgaatcaggcgcttagccaaatagttcagcccgaagatattttaatttgtagctatgcacttgatggccatccagatcatgaggctgtcgggaaaacagtacaagcttttgccgaagctcgggacttactatgtttgcatgtattgatttgggcatggcattgggcagagccttttgacacacgaattaactggtccaaagcaaaagcttatgccttaactgaaaaccagttaattaaaaaacatcaggcggttatgcaatttaaaacacaacttgaagccgatgagagcacaggaaattccgccgttttatcctcaagtgcgattagccgtcttttaatgccttatgaggtatatctgagtgattcattctcgtgtgtattttga

SEQ ID NO: 43878 - DNA, 975 bp, Acinetobacter baumannii
atgttgaatgaatttgaacatgctcaggccgaaaacaaaagtcagctccgccaagatttactctaccaattggtaagtttatctaaaagtttgccttatccagcttcaggtcatacctatcagcgatggcaattatttgctcaaattgcagggtatgatttaagtctcgctaaattatttgagtcacatcatgatgctttaagtattctaaatgaattgggttatcaagacgaaatcgatgatcatacttgggcggtatgggcagcagagggtgggccggcacctatacaggtccagaacaatcattgtaatggtataaaaacctggtgctcaggtgcagagtttattcaaaaagccctaatgagttataaggacaaagaaggccaagcacaactttgtatcgttgatttggctcatccctctgttcatgttgacttgagccactggcaagcagtcggtatgcagggaacccaaacagctcaagtgcattttgacaatactcctgttattcctatcggactgccaaattgctatttggagcgtccgggtttttggcatggtgctgctggtgttgcggcttgttggtatggtgccgcggtacgcttggttagcttcttacataaaagttgcacccttaacccaaacgcatttaaaaaaatgtatttaggggagttggctcaacagctctctgtaaccaaacagtattttcaatatattgccaagctcattgatgatgagcctgcgctcagccatgagcgtgaaatccgtatattacgtgcccaaacagaacaatgctgccagagtgttattcaactcgttggtaaagctttgggcgcgcgtccttattgtgaagagcctacattttcacagctcatcgctgatttaccagtatttatccgacagagccatgcggcttttgattatgagtctattgctgagctctgtttaccggagaaaagcttatgggaactttga

SEQ ID NO: 43879 - DNA, 234 bp, Acinetobacter baumannii
atgaatactttaaatattaatgatattaaaaaacatgcagacgttattgcttcttgtggcaccaaagtaggaactgtcgatcatcttgaaggtgaaaatcagttaaaactcaccaaagatgaaaatgatcaacatcatcttatccctacttcttggattggggaggtaaaagaagatcaagtcattttaaataaaaactcagaagaagttaaagaaaactggcaagcgatttaa

SEQ ID NO: 43880 - DNA, 1398 bp, Acinetobacter baumannii
atgaataatgatagaacaaaaaaattaggcgaaggactttcaaatcgccatatcacaatgattagtattggcggtgttattggtgctggtttatttgttggttcatcttctgcaattgccaaggccggcccagcggtgattcttgcgtacctgattaccagcattatggtatttctggttatgcgtatgttaggtgaaatggccgttttagaaccagacactggttcattttctacatatgcccgtaaagcaattggcccatgggcaggctttacaataggttggttatattggtggttttgggtacttgcgattccggtagaagccattgcaggagctgaaattttacattcgtggtttccgagcgtttcggtttctatctatgcattttgctttattgtgttcttaagcttagccaacttttttagtaccaaaagttttggtgagtttgagttctggttttctttggtcaaagtggtagccattattggtttcattattattggtattttggcaatttcaggtatttggcctttagctaaaaatgtcagtggtgttgccaatttatacaacaacgctggttttatgccgcacggtatgggaggaattttatctgccattttaattacggcattttcattctttggtgtggaaattgtttcgattgccgcagcagagtcatctaaccctaaacaaaaaattagacgtgccaccaatttggtgttgtaccgtattattctttttttcgtggtctcaatgtttattgcggtttcacttgtcgattggcgttcaccggacttacaaaagtacgggacattccaatacgttttaatgagcttaaacgtaccaggcactaaacttattattgatacggtcgtgtttatcgccgtggcgagctgtatgaatgcggcaatttatacgtcttctcgtatgttatttcgtttgggaacacgcaatgaagcaccgcaggcagtcactaaagtgaactatgccggtgtaccggcaattgcggtgttttcctcaacttttattggtttagtatgctgtgtcataaactatgtatttcctggaaaagtctttggcttattgctctcaagcacagggtcaattgctttactcgtgtacttggttattgcgttttcgcaactacgtttaagacataagctagaagcggctggagcggaaattccatttaaaatgtggttattcccatggctgacttggtttgtgattatcattattttaagtgtattggcttatatgttcttctcaccagcctatagttatgaaacgactctatctttaggtgtaaccttaggtgtggtgatttgcggtttatttgtgacccgaaagcgtaaagcaacccgttcggttgcgatcaatcagagtaatttataa

SEQ ID NO: 43881 - DNA, 1569 bp, Acinetobacter baumannii
atgacaaatggcctagaagattttagctatgacgaagtttcaactgaaaatagtacgcatagtgaacaagccaaaaaagtgctagggcatttcattcaaggaagaattgtatctaaaacggcaagaaaacagccagtttacaatcctgcgacgggtgaaattagtaaagaagtcgaaattgcagatgcacaaacggtaaatgaagcagttcaggcggccgaacaagcatttcctgcatggcgagatacaccggtcattaaacgtgcacgtgtcatgtttaagttcaaacaattattagagcaaaatgccgaaaagatttgcgctttgattgggcaagagcacggtaaaatttctcatgatgctcaaggcgaactgcaacgtggtattgaaaatgttgaatatgcttgcggcgcaccagagcttttaaaaggggagttttcaaaaaatgtcggaccagatatcgactcatggagtgagttccaaccgctaggtgttgtggctggaattacaccatttaacttccctgccatggtggcgttgtggatgttcccaatggcactggtttgcggtaactgctttattttaaaaccttctgaaaaagcaccttctgtggttttattccttgctgaacttttaaaacaggcaggtttacctgacggcgtgtttaatgtggtgaatggtgacaaagaggcggtagatgccttattgcatcatcctcgtattcaggcagtcagctttgtgggttcaacaccaattgctgaatatatttaccgtactgcaacatcaacaggtaaacgttgccaagcattaggcggtgcaaaaaatcatgcgattattatgcctgatgccgatattgataacgtagtgacttcattgttaggtgcagcttttggctcttctggcgaacgttgtatggcactttcggttgcggttgccattggtgatgaagttgccgatgtcgtgattgataagctgactcaagaaatgaaaaaattgaagttcggcaactatgcagatgcaagcaacgactttggaccacttattacccaagcacataaagacaaggtgcaagcctatattcaaagtgcagaacaacaaggcgcaaaaattgtggtcgatggccgcgatgcaaaaccggcaggctatgaaaaaggtttctttgttggaccaactttaattgatcaagtcacaccaaacatgaccagctaccaacaagaaatttttggtcctgtgttgcaagttatgcgtgtaaataccatgcaagaagcgatgcaactcattaatgaccatgaatatggtaacggtacttgtatctatacccgcgacggtgaggcagcacgctattttagcagtcatattcaagtcggtatggtgggtattaatgtgcctttaccagttcctgttgcttatcatagctttggtggctggaaacgttcgttatttggtgatttacatgcgtatggtccagatggtgtccgtttttacacacgccgtaaaaccattacacagcgttggccatctgctcaagtccgtgaagcaaaacagttctcaatgccaactttaaattaa

SEQ ID NO: 43882 - DNA, 1377 bp, Acinetobacter baumannii
atgtttgatacggataaattcagcgactctgagcatactttggatgcggttcaaactaataataatatgcatataaattatcaggcacactggatgcctttctctgcaaaccgaaactttgctaaagacccacgtatgattgtgggtgccaaagggtcttatctgattgatgattctggccgtgaaatattcgattcactttcaggcttatggacgtgtggtgcaggtcataccttgcctgaaattcaacaagcggtaagtgctcaattaggtcagctcgactactcaccagcgttccagtttggtcatccattgtcttttaagctggcagataaaattgttcagcatatgcctggaaaactacaacacgttttctttaccaactcaggttcggagtcggcagatacgtctataaaaatggcacgtgcctattggcgcattaaaggtaaaccaagtaaaaccaaattgattggtcgtgcccgtggctatcatggtgtgaacgttgcggggacaagtttaggtgggattggcggcaaccgtaaaatgtttggacaacttatggatgtagaccatttacctcatactttgcaacctgatttaacttttaccaaaggctgtgcagaaacaggcggggtagaacttgccaatgaaatgcttaagttaattgagctacacgatgcttcaaatattgcagccgtcattgtggaacctatttccggttctgcgggttgtattgtgccgccaacaggctatttacaacgtttaagagagatctgtgatgagcatgacatcttgttaatttttgatgaggtgattacaggttttgggcgtttaggaacgtggacggcggcagaatattttggggtaacaccagatattttgaactttgcgaaacaggtgaccaatggtgccattcctttaggtggagtggtggcaagccatgaaatttattctgcctttatgcaacaagacttaccagagcatgccattgaatttactcacggctatacctattcggcacatccagttgcttgtgctgccgctttagctgcgcttgaaattttagagaagaaaaacctgctggctcaatcggcagcgttggcaccaagttttgaaaaaatgctgcatggtttaaaaggcgcaccgcacattttagacattcgcaactgtggcttgattggtgctttgcagttagctccgcgtgatggtgatgccaccatccgaggctttgagcttggtatgaaactctggaaagaaggtttctatgttcgctttggtggcgacacgcttcagttcggtccaatgtttaatagtacagaagcagatattgaccgcttaatgaatgctgtgggcgatgcactttatcaagtgaattaa

SEQ ID NO: 43883 - DNA, 918 bp, Acinetobacter baumannii
atgaaacctaaaaaattaaatcaagttactgattttgatataaaacttctcaaaatatttaaaacggtttgcgactgtcacagctttacatctgccgaaagtattttaggtattagccgctctgcaattagtttgcatatgagtgatttagaaaatcgtttgggcattcggctatgtcagcgaggtcgtgctggatttgccctgaccgacgaagggcgggaaattttagaatatatcgaagtgcttacggcagcgattgaagacttccgctctaaagtcaaccaaatgcataaccgccttaagggtgagtttaatatcggcattattaataatcttgtgactatgcctagaggctatatcaccaacaccttgacccaacttgcagaggaacatgccgaagttattattaatattagtatgagcaccctttcagatattgagtgccgtgtgctcgataaccgtttacatgcaggcgttattccccttgtgatgcctttgtctggtttagactatttcgatttatatagtgaaagttcgtttttatactgcggcaaaaatcatcctttatttaaccaatgtagtagcatcaatttaaatgaattaaaaaaatggcaagctattcttcctaattatgccattacctcggaagcggtaaagttacatcaacttttagattgtaaagcgacagcaagtgaccgcgaaggtattgcctttctcattttaaccggaaaatttttaggttttttacctgaccactatgcaaaaaaatgggttgaagatggtgttatgcaacctgttttaaaagataaaatgcactacagcacccctatgtgcttaattactcataagggtaaaagtcacaataatattttaaaaacctttatggaaatgcttgagaagcgaatagctaacaattaa

SEQ ID NO: 43884 - DNA, 804 bp, Acinetobacter baumannii
atgctgaagcatgattttgcttctcatatagacaacttaaaatgtgcgacaaagcctagaagtgaagctttaggacggcatctatggacatgtactatagatgctgattcctactggttaaaatttcatttgccaaatgtacatgctcaaagtgagcaagattttttgcatgaattgcaattttatgaagatattacatataaaaaagcgaattggcttttgccatttaaaattattgagggcaggactatttgccaacaaacacaatttcgaggaaaagtattagttttaccggatacagattgttggtttgatgatttagatcaaaagcaaaatttaaaaaatataaatgagaaaatctatttggcacttgttaagttagcagagcttcatgagttaggatggattcatggtgatattaaaaaagaacattttcgaaagtttaagcaagagctttatttaattgactttgaaaaaacacgacttatttcaagccctgatccaataactgatgctacaccacggtatatggcgccagagctatttcatggtgccaataaaaccgttcaaagtgatttatatgcattgggaatcgtattgtatgaatggttaacgcaaactcgtttacaagcaaatagttaccatgagtgggcggtattgcactgtcaaaaattaaatgtggaattaccaagttcgttccaaattttcttgccactactttcaggcttgttacaaaaacagcagcaaaaccggttttcaaatgtacatgaagcgataaattgcttaaaagcgctcccaacctga

SEQ ID NO: 43885 - DNA, 1509 bp, Acinetobacter baumannii
atgtttgaaaaaatacgaagtgatatgaatccgcatcaggcttaccgtatcaaaaaattacaacgtcagttagacatggctgaatcttatgaagagtggaagtcttttgcattaaaactggatgaagaaactggggcacaagagtggaagttcgataatagttcgccttacttcgatgccgagctcatttcttatcgttacactttactgaaaagataccgtcagcaacatcgcactttagatttgatttatcttttaaaagaagggttgacctacgatattgcaaatattggccaccctatgttgtttgctgccacacatgtaggcacaaaaaaactaattgaagattatattgaagaagtcagccaaagcttagcttacattgcatctagtgaatgtattacattccaaagaaaagaaaaaatcgaattctttgaaaactgtgaaaaagcatatggacaacctgctcttatgttctcggggggagcaaccttaggcctttttcatactggtgtatgtaaggctttaattgaacaagatttaatgcctaaagtcctgtctggttcaagtgcgggcgccattatgactggcatgttgggaatttctgccagtgaagatatccaaaacttgctaaatggtgagcaattttttagtgatgcttttcactttagaaaacttcgtgaacttataaaagggaatggtgggattgccgatgttcactatttaaaaaaattcttaattgaaaatttaggtgatcttacttttgaagaagcattcaaaaaatcaggtttgaatattaatgttgctgttgcgccgtacgatgcaactgaaaaccctcgaattatgaatgcgattatgactccaaatgttttggtttggagtgcagtattggcttcttgtgctgtgccagttttatttccacctgtgcgtttaaccagtaagcgttatgatggtgaacatactccatatatggcaaatactaaatgggtagacggtagtgtacgtagcgatttcccacaagaaagaatggcaagactttataatttaaactacaccattgccagtcaagtgaatccgcatgttgtaccgtttatgcaagatgatgcgcgccgtttccgtaaagacgttttaagttggcctgaacgaattttaagacgccaaggtaaagtactttcaatggggctgatggactttacacgtcaaagattaggcgcaatttcacccgtaagaagactgctcgatcatggatatggcgtagtagggcagcgctattatggtgatgttaatattattgctaaatatagcttaaaacattatgcctatacgctacaaaacccacgcccacatttgtttaaacgtttacagcgagaaggcgagcgcgcgacttggccaaaaatctcttctattgaaacgcacgcgcgtattggtaaaacgattcagcactgtttagaagttttacgttttgaagaaaagaaacaacagccagaatcttattatgctgaagcatga

SEQ ID NO: 43886 - DNA, 882 bp, Acinetobacter baumannii
atggctaccattgatttacccgacaatttagttcaaaccttatcacttgtattaaatcagttacagcaggtcttgcctgaaccgaaacaagagaccgattttactgcccctgcttttagatgggaaaaccagcagcttaaagctatttatacacctaaaaatatttatcttgatgacttaaaaggcatcgaaagacaaaaagaaaagatcattcaaaatactttgcagtttttaaatggcttaccagcaaatgatgtacttttaacgggttcacgtggtacgggtaaatcctctattgttcgtgctttactcacggagtatgcacctcaaggattacgtttgattgaaattgaacgtgatgatttagcagacttaccgaaaattcaaaaaattattcaaaaccgacctgaaaaatacatcgtctattgtgatgatctagcatttaatgctgaagatgaaaattaccgtagtttaaaaagcgtattagatggttccttacagtcgggttcaacaaattttattatttatgcgaccagtaaccgtcgtcacttattacctgagttcatgcatgaaaacacccctgtaaccaaagtagatgtgcctcaatatactgagcttcatccgcaagaagcgattgaagaaaagatctctttgtctgaccgttttggtttgtggttatctttttatccaatggatcaaaacttatatttagaaatcgtagagcattatctagataaagcaaacatgccttttaatgatgaagttcgtgctgaaagcttgcgttggtgccaaatgcggggtcagcgctcgggtcgagctgcttatcagttttctaagcattggattggtttaaacgccttaaaagatttgtctaacaattaa

SEQ ID NO: 43887 - DNA, 1104 bp, Acinetobacter baumannii
atgaaaaaacaattgccaaaaatttctacaacaggtaaagcgcttgctaaaagtttattacttgcacaaggcgttttagaccaagcaaaaaaatattcaactcttccttttactcaaactcacatcatccgtccacgaattgacgaaaaatattatagctggacacactacggtatctttttcccacttttaccagagccgcatcgttacttaaatattatgattttaatcggtacaccaggtgcacttgcttttgatcatgatgacatcatcactggtaacccgagaaaaaccgctactttcttttcaagcacagctgctctggaacaagctttactgaaggcctatatcattcctgaagatacaaaaattaataaagatggaaccttaatagaactaggtcaggaaatttcaattcaaggaaaatttccacacatccatattaatggacattatgatgggtttgatttcgactttgatatcgatatcacttcacatgtttcatggtttataaaaacaccaatctatgatcattttagtttattggcaaagtttaaaggttttttaaactatcaagcaaaacacattgaaacccaaggactttgtacttacgaatatgcacgagcagtgggtcctcattccattacaaacaaacttatttctgatgcatataaactgccacttgatttttttacttatcaaattatcaatttaaacgaggccactcaacttcttcttaccaaagccgatattgcaggacaaacagctgcatacaccctgcatattagacatctggaccagccagctgaaatttacacagatgtaagctttgatattatttcgcatcaagttgatgacttcgtttcacctagtgggcaaaaaatgcgacttccaaaatatttttcatggatcgctcgaaatgatgctaagcaaattatcttaaacattcaggcagaaattgactgcccattccgctatggtcatgggcgaggttatgcaagtagctatatatttactggtcattattttggcaatgaagttcaaggccgtggatacatcgaatatattgatatcgaaaatccacaagcctttgaagatgaataa

SEQ ID NO: 43888 - DNA, 1011 bp, Acinetobacter baumannii
atgattgttttaggcttggaaacttcttgtgatgaaacagggttggcactttatgatagcgaactcggcttacggggacaggttctttatagccagataaaacttcatgccgaatatggtggtgtggttccagagttagcttctcgtgaccatgttcgtaagcttattcctttaatgaatcagctgcttgaacaaagtggtgttaagaaacaggaaattgatgcagtcgcatatacgcgtggcccgggtttaatgggagcgttaatgaccggagctttgtttggaagaactttagcattttctttaaataaaccggcaattggtgttcaccacatggaaggccatatgttggctcctttgctttcaagccaaccgcctgagtttccatttgttgcattgcttgtttcaggtggtcatacacaattgatggcagctcatggtattggtcaatatgagctattaggggagtcaattgatgatgcggcgggtgaagctttcgacaaagtcgcaaaaatgatgaatctgccgtatccaggtggaccaaatattgctaagttggcgttatctggtgatcctttagcatttgaatttccacgcccaatgcttcatcagggcttagacttttcttttagtggtttaaagacggcagtttctgttcagttgaaaaaattgaacggcgaaaaccgtgatgctgatattgctgcttcattccaagaagccattgtagataccttagtaaaaaaatctgtaaaagctttaaagcaaactggtcttaaacgtttagtaattgctggtggggtaagtgcaaatttacgattacgtgaacaattggaaacttcattggcgagaattaaagctcaggtttactatgcagaacctgctttatgtactgataatggtgcaatgattgcatttgcaggttatcagcgtttaaaagcaggtcagcatgatggtttagctgtaacgaccacaccaagatggccaatgactgaacttactattcctgagtaa

SEQ ID NO: 43889 - DNA, 216 bp, Acinetobacter baumannii
atgccacaagttaagttgaaagaaggcgaaccagttgacgtagctatccgtcgtttcaaacgttcatgcgaaaaagctggtgttttagctgacgttcgtaaacgcgaattctacgaaaaaccaactcaagaacgtaagcgcaaaaaagctgctgcagttaaacgctaccaaaagaaattggctcgcgaatctgtacgtactactcgcctttactaa

SEQ ID NO: 43890 - DNA, 447 bp, Acinetobacter baumannii
atgactactttaaaaaaccaaattactgatgcattaaaaacttctatgcgtgccaaagatatggcaacagtgacggttttgcgtagtctacaagcagcaattaagcaaatcgaagtcgatgagcgcatagagcttgacgacgctcaggttcttgcggtcattgaaaagcaaattaaacaacgtaaagaatcgatcaaagccttcgaaggtgctggtcgtgatgatttagctagtaaagaacaagccgaagctgaggttttatctcagtttctaccagaagctatgactgaggaagagcttgattctctcattgagcaaacgattgctgctcaagaagcaactagcatgaaagatatgggtaaggtgatgaattctctacgtccgatcatagccgggcgtgccgatcctgctcaagtttcagcaaaaattaaagctaaattagcttaa

SEQ ID NO: 43891 - DNA, 1437 bp, Acinetobacter baumannii
ttgaaatttttgccagttattttaagtttggctttgataacaaatgcctcttacgctaatccttttgaccccaagccagcttctggacaggttgaaattccaaatattggaagtggaatagggctgctcgaccaacaaaaagaaaaatttattggcgaaaaagtttttcgtgaagttcataagcaaatgccggttatacaggatgtatggctagaagatcagttttttcaagttttctctaatattttaagtgaaactcagctggggcagccgatcgccctggttgtaattaaagaccctcaaattaacgcatttgctgttccaggtgggttatttgcattaaatactggccttatctcatcggcacgaaatattgatgaaattgcgggggtaatggcccatgaaattgctcacgtttcgcaaaggcactttagtcgttcggaagaagcttttaaaggacaaacccttttaagcttggctggtttgttggcaggggtggctttagctgctcaggctggtggagacgctggtgccgctgttatgttgggtactcaagcagcacttcttgataaacagctcacctatagccgtaatcaagagcgtgaagcggatcgaattggtatgcaatatatgtatgccgctggttataacccgcaaagcatggcggattattttgaaacgatgcatagagcgacgagccgtgtaagttttttaccagatttttggctgactcaccctcttacatctgaacgtatgagtgaggctcgcttgagagcaaaccagatgcctaaagttaaaagtcgaatatatgatgtcgattttgaaattttaaaatggtataccatggtggttgctggagaagctactgaaaatcagttgcaaagtctggcatcgcaaaaaaatctggcaggcttattggctttgtcggctttctatcttaaacaaggggattatactcaagcccaagcaacgttggagcaggcgaaatcaagcggtaagccattagtcgccttaattcaaacagatatttatttaggccagaataaacttgatcaggcctataattcgattgctcccttgcaaatgacaatgcctgaaaataaagcttttagctacaaattggctgaggttttattgcgtcaaggtaaatatgctcaagttcaaactttggtgcagcgttttattaataaaaatgcccgagatattcaaggttggcaattattacaacaagccgccaatttagataaaaattcaccattaagagctgtgaatgtattgcgatatcgtgctgaagcacagtactggtctggtagtgaagaggatgcaattaaatcgatgttgcatgcacaacgtcttgcaaaaggtaatcaggccatgtcagccagaatagatagtcgattaaagcaaatgcaagatgagcgacgaatgaaaatttaa

SEQ ID NO: 43892 - DNA, 966 bp, Acinetobacter baumannii
atgaaaaaggttgtggtttttagccaaattgatgaggaaattttgtcacggttacagcaggattaccatgttgtcgtattgaaccctaaactgggtgatattaatgaacagatacgacaagaagtagtagatgctgatggcatgattggggctggtcgtttgctcaatgaaagtaatctttctcctgcccaaaaattaaaaattatttcttctgtgactgtaggttatgacaattatgatgttggttatttaaatcagaaaaaaatctggttagcaaacacacctcatgttctaactgaaacgacagcagatcttgcttttactttgttattaagtgcagccagaaaagttcctttgctagatcactggactaaacaaggtgagtggaaaagaacagttgggccacagcagtttggtctcgatgtttttggaaaaacattaggtattattgggcttggtaatattggtgctgcaattgcacgtcgtggcttttatggatttaacatgaatattgtttaccataatcgtcgcgagaaacctgagttagcggaacctttaaaagctcaatatctggggttggaagaattattacaacaatctgattttgtagtgacggctgttgatttaaatgcggaatctaaagctttaatgggtaaggctcaatttgagcttatgcaaaagcatgccatatttattaatattgcgcgtggctcagttgtcgatgagcaagccctaattgaagcattgcaaaatgaagttatttttgcggctggtttagacgtctatgagaaagaacctctgcaagaatctgcacttttcactttgccgaacgttgtcactttgcctcacgtaggttctgctactgctgaaacacgtaagaaaatggcaaatttagcttataaaaacttggtggaagcactagaggacaagacgcctagatatttagtgaatcctaattttgtgtaa

SEQ ID NO: 43893 - DNA, 651 bp, Acinetobacter baumannii
atgattgggcagcaaagaaatatactggcaactttaggaatagacgtatggattactagaacacaagtgtgccaaaaaaataatgcccatactttgtggcgagatcaggttgttgaacctcatgagtcaattaccgtacctaccatagatgttcctgcttttgagcaaaagaacactcagccacaggtgcttgaaattcctaaagtggtggaagagccaccaatagtagttgcagaagtttcgcagccagagatacttgtagaaaaacctaaagtcattgagcaagagacaattactccatttgagttacaggcttattgtcttgaaaaatgtgtaatttttgttgatgtaacggctttggaaacagaagaaaaacaactttgggcaaatatacaaaaggcgaaggtgggccaatattctgaattaagatggcctttccctctggcagcctatcaagatcaacgaggggtaggttcttatattcaaggtttcttagatgctgtagcagcagagaaaaagattttatgtttgggtaaatgtacctatattcaacatgcaaatattattcatttagctagtttaaaagaaatgttagataagcctcttcttaagaaaagattgtggcaacttatgcaagataacaatgagtag

SEQ ID NO: 43894 - DNA, 1890 bp, Acinetobacter baumannii
ttgaaagaagtaagccactatttaatcgaaaataaaaatatggcatggtccatcactatgtgtttggttgctgtgcttttaactatttttattttaaatctaattttaggtttacttgttcatttctttgattatagcgagccgatttggtggcatgctttaagtccatattttattgctcttttgctttttattatggtttggtctgtggtgaccgaactttatattttgcgtaaaggtggccattcacttgccaagcagttgaaagctcgtcgtttggtaaaaggtgaaagtacaccagaagaacatgccgcattaaaaattacagaacatctggcacaaacattttccctgaacgttccaacactttatgttttacctgatgaagtaggtgttaatgcattaacggcaggttttcactcgaatgatattgtaattattttaacttggggtgccttacagaaccttgatgagctagagctatatggcttattgggtcatgaatttaaccagattttatcgggtgaggcagtagaaaatactaaactaaaaattttatatagtggtttgactacttttagtcagtgggggagtaagctcgccaaacaagggtttaagcgctacagtccgggttataagcataagttcgagactgtatttgtagccgtaggtggtgtgatttggttggcgggaagtttaggtgttttaatcactcgttttattaaatatttaacattaagtggtcgtacatttcgtaatgaccaaaaaaccatgcggttattaaaaaatagcactaatacccaaactttattgcgtatttacgttcaccattctggttcgcagattcatagtgcttattctgaatcgattgcacatatgtgttttgcgaattcacttagcccgcaaagttggatgaatattcacccaagtattcgtgaacgtatttatgagcttaacccaactttattacaagatttgcaattagaaaatttaaagaaacttcgaaatcgtcctttatttagtttgttccatgtactagaagaatctgagactgaaatttatacgccgtggtcatctccacaacctttgcctttgttgcgtctttctccaatcagttttgctttgaatgatgcaattaagccgttaagcagtgatatccgtcgtaataaaaagcggcctgaacttattcaacgtgcattacaaactgcgactggttcacgtgaggtgatggttgctattttaatgattcgtcaatatcgagaatttattccacaagatgcgccagtaagccatgcaattgtggatgccttacttaatcttgatgggcgtattcatattcagatatttcatgatgcatgtaaaaatattggtcatatgcctgccagtattgctcgtcaatttttgactaaactggcccttattattcaggaagatggggaaattggattacttgatgcacttctactcgagcgtgttaagtacgagttaaacttgatgccacttcatttgccgacagcatttgaagaggtaaaacctcaaattgttcgtttaattgatgcattacttcatgtgcaacaaatcaatagtccgaatcagttagaggttcgcgaacgtatcttacgttctttgcttaatcctgatgaaatgcatatttatgatgaaatttcggatgaacctttagacttggcagaaattttaaatgatattgctgggttattgctgcgtgaccgcttaagtatattggcaattgctgaaatgtgcttgtggagtgatcgtattattactcaagatgaacttgatgtgcttgagttgctctattggcgatttggttttgagtctgatgaaattgtagagcaaatgcagaagaaaaatagcgttatgattatttaa

SEQ ID NO: 43895 - DNA, 1542 bp, Acinetobacter baumannii
atgtgtggagttgttggtatagccggtaaatcgccagtgaaccaaatgttgtttgatgcattaacgatgttgcaacatcgtgggcaagatgcagctggaatagtaacctgccatgaaggccgtcttttccttcgtaaggataacggtatggtacgtgatgtttttcatactcgtcatatgagagcattacttggtaattatggtattggtcatgtgcgctatccaactgccggttcttcgagcagtgcggaagctcaaccattttatgtgaactcaccttacggtattacgcttgcacataatggtaacttgacgaatgcagaagaaattcatgatgacctgttcaaaacagatttgcgtcacatgaatacggactctgattcagaagttcttttaaacgtctttgctcatgaattgcaaaagataggaactttaaatcctacaccggaagatattttccataccgtttcacgtgtacatgagcgctgccaaggtgcttatggtgtagtggcaatgattactggtcacggcttagttggtttccgtgatccaaatggtatccgtccgcttatttacggttctcgtgtaactgagcaaggcgagatggaatatatcattgcatctgaatctgtagcgattacggcgcttggctttaaaattgagcgtgatattgctccgggtgaagcaattttcattaatgctgacggcgagttatttacaaagcaatgtgctgcagatccaaaataccgtccatgtatttttgaatatgtttattttgctcgtccagatgcaattattgatggtatttcggtttataaagctcgcttaaaaatgggtgagaaattagcgcataaaattttgcgtgactggggtgaagaccatgatattgacgtggttatcccaattccagatacaagccgtacctcagctttagagttggcaaatattcttggcgtgaagttccgtgaaggttttatgaaaaaccgttatatcggtcgtaccttcattatgccaggtcaacaacagcgtaaaaaatctgtacgtcagaaattaaaccctgttgagttagagtttaaaggcaagaacgttctattagtggatgactcaattgtgcgtggtacaacgtgtaatgagatcattcagatggcgcgtgactcaggtgcgaaaaaagtatactttgcttcagctgcaccgaaagtgatgtatccgaacgtatatggtatcgatatgcctgctaaaactgagcttattgcttcagagcgcagcgtagaagaaattcaggaaattattggtgctgatcgtttaattttccaagatttggaagatttgaagaacgctgtacgtacaagtaaagtgcctacattaaccgagtttgattgctctgtttttgatggtatctatgtaactggtggaattgatgcagactatctgaataatttggagcagaaacgtaatgattctgcgaaaaagaaaaaagatggttatattgatgtcaatattgatgcagcatcagtagatttgaccggtattaaagaagaatag

SEQ ID NO: 43896 - DNA, 588 bp, Acinetobacter baumannii
atgaacaccattgatatcatcattctgatacttttgctcattggggggctaaacggtttgcgacaaggatttataaaagcctttgcgaacttggtaggatggatttttgcattaattatgggtgcaaaatatgctgttcttctagctccgtcaatgtcaggtttaagtcaggatccggtggttcaaaagatcgcggctttcgcttttattgcacttttaattatcgttttaacttggatcgtcactgcatttttaaatggcctcttgaaaagtttgaagttggggccattaaatcgtttagcaggtggtgcttttggttcgttgaaaggtttattggttgttcttattaccatgcagggtgttggtccttgggtagaaagttcgcctcattggaaacaatccaaatttatccagtttttattgccttatgcacctttagcgacagagctttctaaagatgcagcaagtgaggcatttcatcagataacatctgggggcggtgtaacgcgcacttctccaaaaccaatggacgagtcggaggaaacagaacttcgacctgaccattcaacaaaaaatcctttttattaa

SEQ ID NO: 43897 - DNA, 1005 bp, Acinetobacter baumannii
atgttatattcacttgctcgcccgatgttgtttagtttagcaccagagcgtgcccatgaattaacattatccatgcttgataaagcgcataagctaggcatgatgcgccagaccgtagaagcaaagccaactacatgtatgggaatcgaatttcctaatccggtagggttggcagccggtcttgataaaaatggtgctcatattgatgcattagctgggttgggtttcggtttcattgaaattggtacaattacacctcgcccacaatctggtaacccaaaaccacgtttattccgtattcctgaagctaaagctattattaaccgcatgggttttaataatgatggcgttgataagctaatcgagaatgttaaagcatcaaaatttagaggcattttagggattaatattggtaaaaatgctgatacacctgtcgaaaaagccgttgatgattatttgatttgtcttgagaaagtttataactacgcttcatacattacggttaatatttcgtctccaaatactaaaaatttgcgtagtttgcaaagtggtgatgcattaactgaattattgcaaaccttaaaagcacgtcaacttgagttggcagagcaatataatcactatgtacctttagttcttaaagtcgctccagacttaacagctgaagatgttgaatttatttcggcacaattattagattttaaaattgatggtcttattgtgacgaacacgaccttatcgagagaaggggtagagaaccttccttacggtaatgagtcaggtggtttgtcgggtgcacctgtatttgaaaaaagtacggaatgtttacgtttatttgctcaaacattaaaaggacaaattcctttaattggtgtgggcggtattttgtcgggtgaacaagctgcagcgaaacaacaggctggagcaacgcttgtacaaatttatagtggtctgatttatacgggaccaacgcttgtgaagcaatgtgttgaagccatgacttaa

SEQ ID NO: 43898 - DNA, 480 bp, Acinetobacter baumannii
atgaaaatgttagctcagttgcaaaaccgctttgatcagtggattgaacaaattgttcaatatttagatcgcttaactgtccgtgaacgtattatggtggtctttactactatttttgttgtagtcgtcattgttggatattcactttggaaaatgcattccttagcagaacaacagcaaaaacgtttaaatgatttaaaagatttgatggtgtggatgcagagtaatgcagtcacgatgaagcctgccaatgagcttgaactagataagtctggaaaaatacaacgagtagctcagcaacaaggtttaactgtgtcttcccagcaaaatggagaacagttacaaattgttgtaacacatcagaattatgcaattttggctaactttttaacacaacttgcacagatgggcttaagtattcaaaagatggaaatggtttccagtgaaggtcagattaaattaacagcgacagttcaataa

SEQ ID NO: 43899 - DNA, 1140 bp, Acinetobacter baumannii
atgctgtacatatggatgtctgaaaccaatggagtttggcattggtctaacggagaaaactggttgcaggctgcaagtctcgatcaattaatacaagacttgcaaatacatcaaggaaaagaagctacggtcttttttccgagtcgtcatgctcaaatgcttcagcaaacgatggcaaagtcccattacaaacagcttggcgctgatggggttaaatatctacttgaagagtttgtgactttaccgattgatcacatgaaagtggttcaccattttcatgcggatcagttaactgttttgggtgttgctcaggggatggtagagacatggcaacattctttagctttgttaccaaccaaacttgtggctttgttgccagattttctagttttacctgaaccacaagctcagcaagttattctgtgtaatattggtcatcagcttttggtgcgtgagaataagtggttaggtaattccattgatgacttggggctttttttagagttccagtcagccgaaacacattatcaatatagcggtttaacagcagagcaactagagagcttagaagctgcctcaagcgcagagcaacgttctgagtttgtttatcaatttcagcctttagataaaactaagcagcatccttttaatgttttgccaaaatcaaaagggcaagaacgtactttttctaattattggaaaacttgtgccgccgttgttctagcaattattgtcgtgcagtttagctatgatttattgcgttgggtaaaattgaaaaaggtggcagatcagactgctgaacaggcaattgagcaatataaatattggtttggtccatctagtcgtgtgactgaacaaaatattaaaggacaattcgaaagtcatttaagaatgagccagcaaggtgatacccaggcactttctctgttaagccgggttgggcctattttaatgcaaagacagattttagctcagcaactcaattatgatgcttcaatcttaacaatggcattaaaagcaaaatcagcagatgatttgcaagctttaacccaacaacttaatcaacaaggttttaaagctgagttaggtaatgttcaagctgatggtagtggtgcgattggggtggtgaaaatacaataa

SEQ ID NO: 43900 - DNA, 456 bp, Acinetobacter baumannii
atgcaactgacattagttcgtcatggggaagctgctccgccagtaaatggtaatgatattaaacgtccccttactgcgcgtggacatgcacaggctgagcaaacggcaacctttttaaaagatattgtaaaaccagatatttttgttgttagtcctttgctgcgtgctcaggaaacgttggcgcatatccagacctattttaaagatgtgccagtgttgttatgcgacaaaattaagcctgacgatgatgcaaaagaagcgattgaatggctatctcaaattccttatgagtcgattgtggttgtttgccatatgaatgtggtagggcatattgcagagttacttactcatgaaaatttcaatccatttgcacttgctgaagcaagaatttatgatcaagctgttattgcaaatggtttatcaacacaaaaaaatagttttatacccacaatataa

SEQ ID NO: 43901 - DNA, 1074 bp, Acinetobacter baumannii
atggctgaatttaagtttacagatttggtggaacctgttgcggtcgataaaaaaacggcattacgtattaccgttttagggggcggtagctttggtacagctatggcaaatttagctgctcgtaatggctgcgataccatgatctggattcgtgatgccgaaacagcagaagaaattaataaaacccatattaataaacgttatttaccagacttcactttagaatcttcattacgtgcagtttctgatcttgagcaagcggtatgtgatcgagatattattttagttgcaattccaagccactcattccgtgacgttttaaaacaaatagcgccttatattactgcacaagctgtggtgtctttaaccaaaggtgttgaagctaaaacatttagcttcatgagtgatattattcgtgaagaattaccagaagtgccgtatggcgtattgtcaggaccaaatcttgctaaagaaattatggcaggtatgccttctggtactgtaattgcaagtgattctgaactcgtccgttatgccgtacagcatgcacttcatagtgcgttattccgtgtttttggtagcgatgatgtacatggagttgagttaggcggtgcccttaagaatatttatgccgttgctatgggaattggggcagcatataaaattggtgaaaataccaagagtatgattttaacgcgtgctttggctgaaatgagccgtttcgcggtaaaacaaggtgcaaacccacttacgttcttaggtttatctggagtaggtgatttatttgcgacttgtaatagtccattaagccgtaattatcaaattggttatgcgctaggttctggtaaaacgcttgaacaagcgagtaaagaattaggtcaaactgcagaaggtattaacacgattgttcaggtgcgtggcaaggcacaagaactagacgtatatatgccaattaccaatgctttatatgaggtcatttttgaaggcgctccaccattaaatattgcactttctcttatgaaaaatggacaccgtagtgatgtcgagtttgttttacctcatcatgaagtctga

SEQ ID NO: 43902 - DNA, 576 bp, Acinetobacter baumannii
atgacggattcagcaatacaaataattcaccaaaatattcatcagcgtcagtctattggccaattagttgagccagccccaaatacagaccagttagagttggcttttcaggcagctttaacagctccagatcatcatagacttaagccaacacgttttgtaattgtgtcaggtgaccaacgtgctgcttttggtgaagttctggcaaaagcattggtcgatttgggtgagtctgatcctgcacagcttgaacgtgtgaagcaacatccttttcgagctccgctacttattttagctcttacgcagttacaagatcatccgaaagtcccacacttcgaacaaattttgagtacaggcgcagcagtacaaaatcttttgttatctttacaagctcaagggttctcgaccatgtggcgtagtggtgccgttgtcgaatcaaactggttaaaacagcatttaggtctgcaaccgcatgatttgatttcaggtattatttatgtcggcacagcagctaaagcaattgcaccgcgtgcaaatattgatagtaaagaattcgtaaaagtttggcaggcttaa

SEQ ID NO: 43903 - DNA, 381 bp, Acinetobacter baumannii
atgaaaaaaataattttagcgagcgcaatgagcggtgttgttttattactaggtgcttgtgcaaccacacctaaaaacactttagcgattcaaaaagaaaataatcagtttgaagtgactggaattggcaaaaccaatttaattgcaaagaataatgcggttactgcggcacaaaaaacatgctcaaagagtacaacgccagttattgttgatgaaaaaacgtcttatcacggggtcttaaaagatgtggtaagtgaaaagactggtcaaatggtagaagctgctgcgggtgtcatcggtactttaacgggtaaaaatgcatctttagcaaaagatgatgactatcaaacaacgcttaccttctattgtaaaataaattaa

SEQ ID NO: 43904 - DNA, 1152 bp, Acinetobacter baumannii
atgacatctggttttgaaaccttgaatttacatccgcaacttaaaaaggcgattgatgctttagggtttactcaaatgaccccaattcagcaaaaggttttaaaatatacattagccgggcatgatgcaattgggcgagcacagacaggaacaggtaagactgctgcctttctgattagtgtaattaatgatttgctcaataatccggttcaggagcaacgcttccgtggtgagcctcgtgctttaatcttagcacctactcgtgagttggcattgcagattgaaagtgatgcaaaatctctcacaaaattttctaatttacacctagtgaccctattaggtggcgttgatttcgataagcagaagaagcaacttgatgctaattttgtcgatatcatggttgccacaccagggcgtttaattgattttgtagaacaaaaagaagtttggctcgatcaaattgaatttttagtgattgatgaagctgaccgtttattggatatgggctttattccttcggtaaaacgtattgtgcgttattcaccacgtaaggaacaacgacaaaccttaatgttctctgcaacatttagttatgatgtcttgaacttggcaagacagtggttatttgaaccagtaactgttgaaattgaacctgaacaaaagaccaataatgatgtcgaacaacgtgtttacgttgtggctaaacaggataaatatcgtcttttacaagatattttacgtgaagagccaattgataaagttatgatctttgccaatcgccgtgatcaggtacgtcgtctttacgaccatttgaaaaaagatggatacaaagtggggatgctatctggtgaaattgctcaagataaacgtttaaaaatgttggagcagtttaagcaaggcaagcataacatcatgatcgcaaccgatgttgctggtcgtggtattcatgtagacggcgtatcacatgtagtgaattttacattgcctgagcagtctgatgattatgtccatcgtattggtcgtacaggtcgtgcaggggcacaaggggtaagtattagtttcttatctgaagatgatgctttctatttacccgaaattgaaaaagcaattggtaagaaattgcctctaacccgactagatggttattgctaa

SEQ ID NO: 43905 - DNA, 213 bp, Acinetobacter baumannii
atgacagctcgtgaacaaggcgtagtaaagtggtttaatgacactaaaggctttggttttattcaacgtaacggcggcgacgatgtattcgttcacttccgtgcaatcgtaggtgacggtcaccgttctctacgtgacggtcaacgtgtagaatttagcgttgtacaaggtcaaaaaggttttcaagctgaaaatgttcagcctttagactaa

SEQ ID NO: 43906 - DNA, 246 bp, Acinetobacter baumannii
atgagcactacttcttccgctacgacgcctattgaaattaatgcccttggccaaccttgtccaatgccattattaatgttgaaacgtgaacttaaaaaattatcgggaaaacaactattcttattaaaatcatctgacccgcatagtgaaattgatgtaacacgttattgccaattacatcattttacgtgtcaaaccatgcagatttcagaaagagaatttcactatttaattgaaactcaataa

SEQ ID NO: 43907 - DNA, 867 bp, Acinetobacter baumannii
atgagtgacagcagcaatcaattgatgcccctgtcattgtctgcgcccggtgtaaaccttggtgcatatatcagtactgtcaatcagattcctattttaacggctgagcaagaaaaagagcttgctgagcgttattattatgaccaagatcttgatgccgcaaaaatgctggtaatgtcgcatttacgcttcgtcgttcacattgcgcgcagctatgcaggttatggcctacctcaaggtgaccttattcaagaaggtaacttaggcttaatgaaagccgtaaaacgttttgacccaaatatgggcgtacgtcttgtatcttttgccgtccactggattaaggcagaaattcacgaatatgttattcgtaactggcgtattgtaaaaattgcaacaaccaaagctcagcgtaaacttttcttcaatttacgcagcttaaagaaatcgagtaaaaagctcacattagaagaagcacaatctattgcaaacgacttaaatgttactccagaacaagttttggaaatggaaggccgtttaacagcatatgatgctgcttttgaagctcaaggcgatgacgatgatgacaccccgcacactgcgccagtgttatatcttgaagataatcgttatgaccctgctcgtttagtagaaaatgaggattgggaagaacaaagtacatctgctttgcatgacgcaatgaaccagctagatgaccgttcacgtaatattttgcagcgccgttggttagatgacgataaatctaccctccatgagcttgctgctgaatataatgtttctgccgaacgtattcgtcagcttgaaaagaatgcgatggaaaaaattaaagtcgcaatgtctgcaagctaa

SEQ ID NO: 43908 - DNA, 366 bp, Acinetobacter baumannii
atgtggattgccatttcagcccttaatcttgctttcgcagtcatgttgggtgcttttggagcacatggtcttaaagctcacgcgagtcctgaacaacttgcttggtggcagactgcaaccgactactttttttatcatgcgcttggattgttagcgcttggtattttaagcaaggttcttcctcatttcccaatcaagttatctttcttgcttattcagattggcattctgttcttttgtggttcgctttatatcatggcattgggtttaccgcggatattaggcgcaattacgccaataggtggagctttgatgattgctggatggctaatcttggcttggaatgctttcaaatacgcaaaataa

SEQ ID NO: 43909 - DNA, 198 bp, Acinetobacter baumannii
atgcaaatttatttaaatggcgaattaacggacacgcctagccaaaacctgttgcaactcattcaggaactggcacttgaaggaaaacgttttgctgttgaacacaatcagcaaatcgtgcctaaaagcaaattagagcaaattacgattgctcaacatgaccgtatcgaaattattcacgctgttggcggcggctaa

SEQ ID NO: 43910 - DNA, 786 bp, Acinetobacter baumannii
atgcaagacacccctctcattattggttcacgttcttttcaatctcgtttattggtaggaacagggaaatataaagacttaaatgaaacggatttagccattcaggctagtggtgcagaaatcgtaactgtcgcaatccgccgtgtgaatattggacaaaatccagatcaaccgaatttactttctgtcattccaccagaaaaatatacaatcttgccaaatactgcaggttgttttgacgctgacagcgcagtacgcacgtgtatgctagcgcgcgagctactggatggtcataacctagtaaaacttgaagtgttgggtgatgaaaaaaccttatatccaaatgtaaccgagactttaaaagccgctcgcactttgattgatgacggttttgagattatggtctatacctctgatgacccaatcattgctcaagaacttgaaagtatgggctgtgttgcaattatgcctttaggtagtttgattggttcaggcctaggtattttaaacccgcataccatttcaattattaaagaaaatgcaaaagtaccggttttagtagatgcaggtgttggtacagcaagtgacgctgcgattgcgatggaacttggttgtgatggcgtattgatgaacacagcgattgcagctgctcaaaatcctattttgatggcttctgcaatgaagaaagctgttgaagcaggacgtgaagcatttttagctgggcgtatgccacgcaaacgcatggcaaatgcaagttcaccagaaacaggttatttctttaaataa

SEQ ID NO: 43911 - DNA, 624 bp, Acinetobacter baumannii
atgctgatgcaactttacttattaaaactggaacttttttggtttgagctgcatcagcattatcatttttctgaaccgcagaaaattttaaatgaacttgttgctgcttatagtgaaaagcagcgagcctaccacaccgtacaacatttatatgaatgtttgagtttaattgagacgattcagtccgaattaaatgatccgtatgctgttgcattggctctctggttccatgatgtagtctacgaacctcaagcgctagataatgaacttaaaagtgccgagttatttgagcaattaatggctcaagatttacagctcgatacaatgcagaaaataaagcgttggattcttgcgactcaaaagcatgcaccaaccgatgaaacagatttgcaatttttgttagatatcgatttagctattttggcagcaacacctgaacgttttatccagtatgaacagcaaattcagcaggagtattcttgggttgatccagaagtatattcaattaagcgaaaagaagttttaatgaatttttatcagtctgagcggctttatcaaactgcatatttccaaaagaattttgagttaaacgccaagcaaaatttaaagaaaatattggaatag

SEQ ID NO: 43912 - DNA, 774 bp, Acinetobacter baumannii
atgcttgctttaatttctcctgcaaaaactttagattatgaaacagcgttacctacagatgagtttactcagccgcgcttgttagaaaactccgcacaattaattgatgtttgtcgcaaactttctgcttcggaaattgcgaatttaatgagtgtcagtgaaaaaattgccacacttaatgctgatcgttttagagactggaagccagaatttgatttttcaaatgctcgtcaggcaatttatgcatttaaaggagatgtttatactggtttagatgcttatcacttaaaagataaagatattgattttgctcagcagcatttgcgtatgctctctggtttatatggtttattgcgtcctttagatttaatgatgccttatcgtttagagatgggtactaaattaaaaaatacgcgcggtcacaatttgtatgaattttgggatgatattatcaccaatcagattaatgaagacttggcagcaattaaatctgaattgctggtaaatctggcttcagatgaatattacaaatctgtcaatgaaaagaaaattaaggctgaaattgtgaagcctgttttccttgaccagaaaaatagcaaatataaagtcattagtttctatgcgaaaaaagcacgtggtttgatggctcgttttattattgaaaaccaattaaataaagctgaggatcttaaagcttttaatactgaaggttactactttgatgctgataactcatcggcaaaagagttggtgtttaaacgtgatgaacaataa

SEQ ID NO: 43913 - DNA, 633 bp, Acinetobacter baumannii
atgtctgagcaaattttcatccagggtccagtaggtaaaattgaacttttcgttgaccgccctgaaggtgaaatcaaaggctttgccgttgtttgtcaccctcacccattacaaggtggaacccctcaacataaagtccctgctcttttaacccaaatctttaatgaatatggctgtattgtttaccgtcctagtttccgtggtttaggcggcagtgaaggtgttcatgatgaaggtcatggagaaactgaagatattttagctgtgattgagcatgttcgtaagcttcatgcaggtttgccattttatgcaggtggctttagctttggctcacatgttttggcaaaatgtcatgcgcagcttagccctgaattacagccggtacagttaattttatgtggtttaccaacagctactgttgtgggattacgtcactataaaacacctgaaattcaaggtgatattctactcattcatggtgagcaagatgacattaccttactttcagatgcaattgagtgggcaaaaccacaaaagcatccaattacgattttgccgggcgccaaccacttctttacaggttatttaaaacagcttcgccaaatcattacacgttttattattatgaaataa

SEQ ID NO: 43914 - DNA, 1602 bp, Acinetobacter baumannii
atgaaagatgcaaagaaaacagtcgttattggctttgtcggttctacacttgatcaggggagaaagccagatcgatggcaacgttggcgtcctacgattagcctgttaatgcatgaagatttgcttgtagatgaattggtgcttttacatgatcgacaacatcataatttagttaaatctatagcagcagatgctaaagagatttctccacaaacacaggtttctggacataaggtcagtataaaagatccttgggattttgctgaagtttatggtgcactctatgactttgtaaaaacctatccgtttgatgttgaaaaaaataactatttactgcatatcacgacaggaacgcatgttgctcaaatttgttggtacttattggtagatgcacattatttaccagctcaactcattcaaagttcacctaaccaacacaagacatcagaaggtgaatatagaattattgatttagacttatctcgatacgatgttttaaaacagcgcttcgatgatgagcaaaagcaaaattggcaacaacttaaagccaatatctctactcataataaagcgtttaatcagcttattgaggaggttgagttagtcgcaacccgatctagcgcgcctattttaattatgggggcaacaggggttggtaagtctcatttggcaaaacaaatttttcagttaaagaaagataaatttcaattaagtggccgttttattgatgttaactgtgcaaccttacgtggtgatagtgccatgtcgaccttatttggtcatataaaaggtgcatttacgggagccgctgcctctcgtgctggtttattaaaaagtgctgaccaaggtattttatttttagatgaaattggtgaattaggacttgatgaacaagctatgctgctaaaagctttagaagataaaagcttttttcctgttggaagtgataaagaaatccaggccgactttcagctaattgcaggtactaaccgtgatttacgtaatgaagttcaagctggtcgattccgtgaagatttatgggcccgtttgaatacatggacattcttcttgccaaatttaaaagaccgtgtagaagatattgcacccaatattgattttgagctacagcgttttgctgcaattcatcaaagacaattacgttttcaacgtgatgccttagaaatatatttaaaatttgctaaatcagcagatgcatcgtggcaagggaattttagagatttagcagcgagcgtaactcggttggcaactttatctcaaggtgagttaattcgtcgtgatgctgtagaaaaagaaattcaacgtctaaagcagctttggcttattcaggatgaatcttacaatgataaagatgcagatattctgttgagctatttaagtcctgagcagctggaacaaatagatgaatttgatcagattcaattacgaggtgtactcaaagtctgcgaaaattcaaaatcaatggcagaggcaggaagacaactcttttcagtatcacgccaacaacgtaatacaacaaatgatagcgaccgagtgaaaaaatatttagcgcgttttggattaagttggaataattttcaataa

SEQ ID NO: 43915 - DNA, 975 bp, Acinetobacter baumannii
atgcttcattttacttttttaggcacgtcttcaggtgtaccgaccctgacacgtaatgtttcaggattagcagttcgtaacagcaaaaataaggactggattttaattgatgctggcgaagggacacagcatcgcattcaacaagccaaactttcactacaaaacctaattgccatttgtattacacatgttcacggcgaccattgttatggtctagttggtttattggcaagtgcaggcatgaatgcccgtagtaaacccttaatcgtgattgcaccgaaagaaattcagcaatggtttgaaatcactgcccagcttacagatttatatttgccctattcccttcaatttattgatgtaaatgaagcaatgcagccacaacagatcactgacgaattcattgttcaggcacaccctctaagccatcgtgttccaagttttgcttttagcatttatatcaaatctattcagaagaagttagataccaaagctctaactcagcttggcgtacctcaaggagatatgtggggccatttgaaacgaggctacaatattgaatttgagggacaaactttaaaagctcaagactttatcaaaattcaaaatcaccaagttcatgcaattataggtggtgataacgaccaaccagaactattagttgatgcttgcaaagatgctcaactccttattcacgaatcgacttacttgcaaacggttttagataaagtcggcaaaggtccaatgcatagctcagcaaaaatggtggctgaatttgcagaacagcaatctttaagcaatttaattctgacgcattttagcccccgacatcaggataaagctgggcagcaagctattactgaagaagttcgtcagttttataaaggtcatttttatttagcaaatgattttgatgaatttactttaagtgaagctggacagcttttaaaagtcgataaaaacgagaagacccattaa

SEQ ID NO: 43916 - DNA, 207 bp, Acinetobacter baumannii
gtgtcttctacagattttgaactagatgataactacggcgatgatgatgatgtcggttttgatgagtcatcaggcaaaatcagtgcaaaagaatcgttggaaaaacgtagattaattgatgatctattggcacagcgccgtttagagcgtgagttaaaagatttcgattatgatttagacgatgatgatcttgatgacgaagactaa

SEQ ID NO: 43917 - DNA, 1887 bp, Acinetobacter baumannii
atgagcgatatgcattcccctacttctcaagtagcggctctgattagccgaggcaaagaacaaggttacttaacttacgctgaggttaacgatcatctgccggactcgattactgaaagcgaacagattgaagacatcatccagatgcttcaagacgttggtattcctgtacacgagcgtgcacctgaatctgacgataccatgttcggcgaatcagctgatgcaactgatgaagttgctgaagaagaagctgctgccgtacttgcatctgttgaaaatgagcctggacgtacgacagaccctgtacgtatgtacatgcgtgaaatgggtacagtagaactgttaacccgtgaaggtgaaatcagcattgctaaacgtattgaagaaggcattcgtgatgtcttgaactcaatcgcttactggccaaatgctgttgaagttgtattaaaagaatataatgattttttaactggcgaacgccgtcttgccgatatcttatctggttatttagaccctgaaactgatgaagatattcctgaagttttagaagacgttgaagaacttgaggaagaagacgaatcatctacaaagtcaacgaaagaagttaagcttgatgatgacgatgaagaagaagagtctgaaggtgatgatgattctgaaggtgattcaggtccagaccctgaagttgcaaaagttcgttttgctgaattagaagctgcatgggctcaaactaaagctgtcatcgaaaaacatggccgtaatagccctgaagcaaatgaagctcttgagtctttagcaactgtatttatgatgtttaaatttactccacgtttatttgacatcatttcagaaatgattcgcggaactcatgaacaaattcgtgccaatgaacgtgaaattatgcgttatgcagtacgtcgtggccgtatggaccgtaaccagttccgtacatctttcccgaaacaggaatctaatcctgcttggttagatgaacaaattgctaaagctccagctgaaatcaaggctcacttggaaaaagtgcgtcctgatgttttagccttccagcaaaaaattgcagatatcgaaaaagagcttggcctaaacgttagtgaaattaaagatatttctaaacgtatggcaattggtgaagccaaagctcgtcgtgcgaaaaaagaaatggtagaggccaaccttcgtttggtaatttcgattgcgaaaaaatataccaaccgtggtttacagttccttgacttgattcaagaagggaacattggtttgatgaaagccgtagacaagtttgaataccgtcgtggttataaattctcgacttatgcgacttggtggattcgtcaggcaattacccgttctattgccgatcaggctcgtacgattcgtattcctgtacacatgattgaaacgattaacaaaattaaccgtgtatcgcgtcaattattacaggaaatgggccgtgaacctactcctgaagagttaggcgaacgcttagaaatggatgaggttaaagttcgtaaggttcttaaaattgcgaaagaaccaatttcaatggaaactccaatcggtgatgatgaagattcgcatcttggggattttattgaagaccagaacatcacttctccaattgatgctgcgacttcagaaggcttaaaagaagcaacacgtgaagttttagaaaacttaactgaacgtgaagcaaaagtattgaagatgcgttttggtattgatatgccaaccgatcatactttagaagaagtaggtaagcagtttgatgtaacacgtgagcgtattcgtcagattgaagcgaaagcattgcgtaaattacgtcacccttctcgttctgaacacttgcgttctttcctagagaatgactaa

SEQ ID NO: 43918 - DNA, 288 bp, Acinetobacter baumannii
atgttagaccgcactccatctcgcgaactccgtgaagacctttgggtatttccaatggactatccaattaaactcattggcgatgcgggtgaagaattacgtatagctgtcgttgatattctagtgaaacattttcctgactttgaccaaacaacgttaaaagtacaagaatcacgtacaggcaaataccattcattaaccgcgcaattacgctttgatgaattggaacaagtgcatgctttgtatgcagacttggctgcttgtccgcaaataagaactgcgctttaa

SEQ ID NO: 43919 - DNA, 654 bp, Acinetobacter baumannii
atgagccttgataaacccactttgattattcgtcagtggaacgatttacaagattatcaaagcaaattcgaatcgatgaagaacctgaccaatcaacgtgatgaaaatacagcagacgagctgtggttactccagcatcatgaagtactaactcaaggtcaggctggaaaaccagaacatattctgattccatcaaacattcctgtggtacaaactgaccgtggtggacaagtgacatggcatggtcctggtcaactcgtcgcttactttatgtttgaccttaatcgtctgaaatggaatgtacgcacattggtcagttttgctgaacaatttatgatagatgttttaaagaaatataacattgaagcatatgcaaaacctgatgcaccaggcgtttatgtggatggcagaaagattggttcattaggcttcaaaattcgccgtggacgtagttatcacggtttagccctaaacttggactgtgctctaactggttttcaaaccatcaacccatgtggttatgcagggctagaaatggtccgcatacaagatttagtgactccatatccatcatttgaacaactttgtcaggactttattgagtatattaaagctactgggtactttaatgacccagaagtcaaaattgaataa

SEQ ID NO: 43920 - DNA, 534 bp, Acinetobacter baumannii
gtgatttcgacaaaagctgtaaagcccactctgcaacttgcctacgttaagctcatgatggacgttgttggtcgaggcttagtcatggcgagtcaagtagatagtgaaatacaagaggaagtgtctaaatttcctgttcactttgtactttcaatgaatgtcttcccaaatggaccagcattttttgcacgagtgacagaagataaacaattagaactgctaaaaagagcggaaaaaaagcctgatttaaccattacgtttaagcatgtaactcatgcttttttggttttctcttttcaggaaagtactgctcaagcctttgcaaatgaccgtatgattgctgatggtgatgtatccgcagcaattcgtttagtccgctgcctcaataaaatggagtctctcattttaccgaaattggtggcttcactcgctgttaaagaatacccaactgaacttaccctaaaagaaaaattcaaccaagctgcaaatatttatttaaaagtagctaagtcttacttcaagcggagcgcataa

SEQ ID NO: 43921 - DNA, 1185 bp, Acinetobacter baumannii
atggctaaaccatattacgaattcttttgtcctgtaaaagtcattgccggtaatgctgctttagaacatattccgtttgaacttgcgactttaggtgcaaaacgccctcttatcattaccgataaaggtgttcgtgcaaatggcttgttaaaccctattgaagctgcttttagcacaactgatgcagtcattggtcatgtttttgatgatgttccaccagactcaagccttgaagttgttcgacttgccgcggaagcttatcgcacaaataaatgtgatgcgattattgctgtggggggtggttctgttatcgatacctctaaagcaactaacattttagtatcagaaggtggagatgatcttcttcaatattctggtgcacacaacctaccaaaaccattaaaaccatttttcgtcatcccgactacatcaggtacgggatctgaagtgaccatggttgctgttgtgtctgatacacaaaagaatgttaaattggcatttgcttcatattacttaatgccacatgctgcgattttagatccacgcatgacattaactttaccacctcacttaactgcaatgacgggtatggatgcattaacacattgtgttgaagcatacacctgtatggcagccaacccgcttagcgatgcctatgcaagtgcaggtattaaaaagattagcgaaaatctatttaatgtcttagaaaatccaaatgactcacaaggtcgtttagaacttgcacaagcttctacaatggcaggtatcgcattctctaactcgatggtaggtcttgtacactcattaggacatgcattaggtgcagttgctcacctgccccacgggctgtgcatgaacttattcttaccttatgtgcttgagtacaataaacaagtcaatggtcagaaaattggcgagttgctattaccacttgcaggtgccgatatttatgcccagactcctgctacccagcgtgcagacagagcaatcgcaactattttagcaatgcgtgatcgtttatttagcttaaccaaattaccacgtaccttacgtgaaacaggtaaagttactgaagcacagcttgatgaagtggcagagaaagcactaaatgatggctcaattatttataatcctaaagaagcaagcttaaaagatctaagagagatcttacaaaaagcttggtaa

SEQ ID NO: 43922 - DNA, 1386 bp, Acinetobacter baumannii
ttgacaaacttatctgggactaaaccaacagctaaacttcaaaagaatcttgtgctttggcacatcattattattggtttagcttatattcagccattaactttatttgatacttttggtttagtatcagaacgaagtggtggtcatgtacctacttcttatatctttgccttagttgcaattttattgacgtcgatcagttatggacacatgatcaaacgctatccttcttcaggatcagcatatacctacgcccaaaagtcaattcaccctaatgttggttttatggtgggttggtcatcttggctagactatttactttcaccactcgtcaatatcattttggccgatatttatttaagagctttgtttccagaagtaaataattggctatgggttattggcttaactgcattaatgactgtgattaacttatttggcgcacgctttgtcgcgcgttttaacagcacaattgtagttattcaacttggtgttattttttactttgtttatcaagtatatattctccttacccaaggcgtatatgctgatggtacgcttaatcccgataaagccgaattatggtcattaactcctttttggaatgatatgacttctattagtgctttgattggtggtgcaacagtactgtgcttttcttttacaggttttgatgctttatcttcacttgcagaagaaactaaagatgctgaaaaaacgcttccaaaagcgattttctcaacagcattgctcgcaggtattatttttattgtaagcacttactttatccagttgtatttccctagcaacccaaacatctattttaaaccgttagatgaatcacaacctgttatggttgcagcaattggcagcattgcatttaaaacattagttttatattttgctgtagttgcagtaatggcatccggtatttcagcacatgctggtgtatctcgcttaatgtatgtaatgggccgtgatggggttatcaataaaaagctgtttggtcatattagcccaagattgcatactccgacttacaacattcttattgttggtgtggttgcattatctgctggctttttagaccttgagcatattgttaacttaattagtttcggggccttaactgcttttagttttgtaaacttctcggtgatttcgcgctacgcgctgagagatggtaaaaacaaatctatcaaagatattattaattacattattgtaccaacgcttggctttgctagtgtgttcttaatgtggttagaaattgacaagcttgctttgcaaattggcttagcttgggcagtgtttggggtaggttatcttgcctataaaaccaaaggctttaaatataatgctcctcaacataatgagcatgaataa

SEQ ID NO: 43923 - DNA, 561 bp, Acinetobacter baumannii
atgtctaattctaatattgcggttgtatatttctcgggttatggccacactaaagtagtggctgaaacttttgctaatgaaattaatgctcaacttatccagattaatcaggaaggtaatatcactgaccaagattgggaaacattgaataatgcaaaaggcattgtgtttggtgcgccgacttatatgggtacagcaccatggcaatttaaaaaatttgctgatgcaacttcaaaggtttggttcacacgtggttggcaagataaagtttttgcaggctttacgaatagtgcaagtttaaatggggataaacaagttacgcttatccaactgcaaactttagcatcacagcatggtggtatttgggtgagtctgggcttattgccagcgaataccaaagatgcaacacgtgaagatgtaaataatttaggcggttcggtagggcttttagttcaatcgccttcggatgcaagtgtagatgaagtcccaacaggggatttggaaacagctaaagtttatgcaaaacgtgtacaagccattgtaaataaaatatatggttaa

SEQ ID NO: 43924 - DNA, 381 bp, Acinetobacter baumannii
atgaatgaatgtctaaaatataatatttttcaacaacattgccctgctcgactgttttttgaaaaaattgcagacaaatgggttttactcatcttaaatattcttgagcatgaaactcagcacttcaacttacttaaaaaaaatattgaagggatttcacctaaagtcttgtctcagaagttaaaaatgttagagagagacggttttatcgaacgaaaaattcaggatacttcccctattcgtgtcgattattccctcaccccacttgggcaaaatgtagctgctatggcgtatcagttaaaagagtgggctgaaactaatattgagcaagttttagcagcccaaatcatctatgacgaaaaaatactagaacaagcttaa

SEQ ID NO: 43925 - DNA, 474 bp, Acinetobacter baumannii
gtgattcatgttgttctatacgagcctgagattcctgctaacacaggtaatattattcgtctatgcgcgaatacaggcgctcaattgcatttagttaagcctttaggctttgaacttgatgataaaaagcttaaacgtgcagggcttgattatcatgaatgggcaagaatgcaaatttgggacaacatagagctttgtcttgcggacttaaaagcaaaaggtgttgagcatgtttttcctttaactacgaaaggttctgctacgcctcatacagttgatttaaatagacctgtggctttattgatggggccagaaacacgtggcttgcctgaacatgttcgtctgatgttccctcaagaacaatggattcgtttaccaatggcagaaaactcaagaagtttaaacttatctaatgcaactgccgtaattgtatatgaagcatggcgtcagcaaggctttaaaaaattaggttaa

SEQ ID NO: 43926 - DNA, 1374 bp, Acinetobacter baumannii
gtggatatttttccaatctctttgaagttgcagcagcaacgttgtctgattgtgggcggagggcatattgctttacgcaaggcaactttattagctaaagcaggagcaataattgatgttgttgctcctgcaattgaagatcagcttctgcaattaattacaacaacaggcggtgtgtcgtttattgaagcttttgctgaaaagtttttaagtacaccctatcgtttagttattgcagcgaccaatgatgcagaagtaaataaaacagtttttgagcagtgtgaagcgcgcaatttacttgtaaatagcgtcgatgatattccacattgccgttttatggtgcctgcaattattgatcgatctccattaattgtttcagtggcttcaaatggaacatctcctgttctatctcgtcaaatccgtacgcagttagaaacctctattccacacggcatgggcaagttagctgagttttcaggaaaatggcgcaatcaggttaaagaaaaaatttctaatccagatgagcgccgtatattttgggagaacttgtatgcaagccctttaaaagaacaagtttttaatgacaatctagatgttgccgatagcatgcttgaacaagcattgcaggagtggaaagcacctaaaggcgaggtttatttggtgggggcaggtccaggtgatcctgaactcattactttaaaagctttacgtttaatgcagcaagctgatgtggtcatttatgaccgtcttgtttctgcacctattttagaattgtgccgtcgagacgcaacaaaaatatatgttggtaaagcgcgttctaaccatagtgttcctcaagaaggtattaatgcattattggttgactacgcgaaaaaaggtaaacgtgtttgtcgtttaaaagggggagacccttttatttttggccgtggtggcgaagagatccaagagttattccaagctggtgtgccatttcaggtagttccgggtattacagcagcgtcaggttgttcggcttatgcaggtattccgcttacccatcgtgattatgcccagagtgtccgctttcttacaggccatctaaaagaaggttctcctgagttaccgtggaatgagctggtatacgaaaaccagacattagtactgtatatggggttggtgggattagagcgtatttgtgagcagctgattgctcatgggcaacgtccagatatgccagttgcattaatttcaaagggtacgacacctgaacagaaggttgtggtggggtcacttgctgatattgcatctaaagtgacagaacatcaaattcatgcgccgacactcacaattattggtgaggttgtacgtttgcgtgaacagttacagtggaattag

SEQ ID NO: 43927 - DNA, 1272 bp, Acinetobacter baumannii
atgatcgaccctaagttactcagaaataatattgaagtcgttaatgcagctttggcaaaacgtggtgttcagttagatgttcaagaatgggcatctttagagactcgccgtaaagacttgcaatcaaaaactgaaaagttacaggcagagcgaaatgccggtgctaaacaagtgggtcagattaaaaaatccggtggtgatgcttctgaaatcatggcacgtatgcaagccattggtgatgaaattaaagctgccgaagttgctttatcagagctacaaaacgagattgagcaaaaagcgcttagcattcctaacttgccggacgaatctgtaccagctggtaaagatgaaaatgataacgttgaaatctcaaaatggggtacacctcgtcagttcgattttgaaatcaaagatcatactgatttaggtgagtggatgggcggactggagtttgaaactgccactaaactcacaggctcacgttttagtgtgttgaagggacctttagcgcgtctacaacgtgctttaactcagttcatgctcgatacccatactttaaagaatggttataccgaagcgtatgtgccttatttggtaaatgctgattcattacgtggaacaggtcagttaccaaaatttgaagaagatttatttaaacttcaaggtgaaaaagaatactacctcatccctacagcagaagttccagtcactaactttgtccgtgatgaaattattgatgcagaccgtttaccattaaaatatgcggctcatacaccatgtttccgtagtgaagcgggttcttatggtcgtgatacacgtggtttaattcgtcagcaccaatttgataaagttgaaatggtgcaaatcgttaagcctgaaacctctatgcaggcacttgaagagcttactgcacatgctgagggcattttacaggcgcttggtttgccttaccgcaaaattttgctctgtggtggtgatatgggcttcggtgcgactaaaacttatgatttagaagtttgggttccaagtcaaaatacttaccgtgaaatttcaagctgctctaatatgggtgatttccaggcacgtcgtatgaaagcacgctaccgtatggatcagaagaagaccgaattggtgcacactctaaatggttcaggccttgctgttgggcgtactttacttgcagtaatggaaaactaccaacgcgaagacggttcaattgagattccagaagtattacgcccatatatgggtggtgcaacgtttattgattaa

SEQ ID NO: 43928 - DNA, 789 bp, Acinetobacter baumannii
atgcaactttacgataaaaaaattattttcattcttccaatgttagctgccatggttgcggtgagcggttgtcagccaaaatctacggctaaagatgaacaactggcttctagtgcttcagtaaaagagcaaaagcaagctgaagtccctgtcattcaagcaaaagttgttcctgtaaagctgccaaaacctaaagtttgtcttgaagacggctgcactgaatatgattttcagaccgtacaaaccaatcaaaaatggattaatgattattttacgaaccgtataaagaaagcagatccgaatgcttttgcaaatttggctgataaacctgttgaggtaccggaaggggagccgagctcaagtcagagtgcaatctatgtccgttatttagggcaaaattataaccttgcaacctttgcattccagacatattcatactctgcgggggcagcacatggtatgtcacatcaagagtttgtaaattttgacttgctaaataaaaagcacattaccgttgaagaacttattaagccagatgttgaaaaacagttagttgatgcactttttgatgcaaatactaattggcttcaagagcacaatattagccgtgaaaaactgcaattaagtgataatttctactatggtgcaaatgggattgtttttgtctatccaatttatgaattagcttcttatgcagaaggtatgtctgaattaaccttgccatattttgaagcagctaaatatattaaacctgagtatttaccgagtgtaccgaactataacttataa

SEQ ID NO: 43929 - DNA, 696 bp, Acinetobacter baumannii
atgaatatgcttcgtaaaaccatgtgtgctattacactcagcgcctcagtgcttgctcctgtaatgagtactacagcgttcgctgcacccgtagcagcaccggagcaacaggcaattgggaacctggtaaatcagttatcaggcttacagcgtttgactgccgattttgaacagacaacgaaagcgaatacaaaaactgtagcacagaaaaaaggcttaagtgctcagcatatgaaccagacatttaaaggttcaatgaaagttgaacgtccggggaaattttattgggaaactgtaagtccctctaagcaaactattgtaacaagtggaaaaacagtctggatttatgaccctgatctacaacaggctgtgcgccaaagcctagatgatcaggtcgctgatacacctgctttattactctctggtaatactaaccaaatcatgaagtcttaccgggtaactcagccagataaatctaagttatatttcactttattccctaaaaaagaagatggagctttccaaagcttaacgattagttttggtgccaacaaagcacctacactcatggtattgcaagattctttaggtcaaacgacttatgttcgtttcaagaatgttaaagtaaatgcttcaattccagcttcaactttcaattttacgcctccgaaaggtaccgatatcattgatcaataa

SEQ ID NO: 43930 - DNA, 258 bp, Acinetobacter baumannii
atggcaactaaaaaagccggtggatcgacgaagaacggtcgtgattcaaacccaaaaatgttaggtgttaaagtttacggtggccaaactgtaactgctggtaacatcatcgttcgtcaacgtggtactgaattccacgctggtgcaaatgttggtatgggccgtgaccatactttatttgctactgctgacggcgtagtaaaattcgaagtgaaaggtcaatttggccgtcgctacgtaaaagttgaaactgtttaa

SEQ ID NO: 43931 - DNA, 312 bp, Acinetobacter baumannii
atgtacgcagtaatccaaagcggtggtaaacagcaccgtgtagttgagggtgaaacccttaaagttgaattattgaaggctgaatctggcgcaactattacatttgatgatgtattaatggttgtaaacggtgacaacattcaaatcggtgctccagttgtagctggcgctaaagtaactgcagaagtgattggtcatggtcgtcacgacaaaatccgcatcatcaaaatgcgtcgtcgtaaacactaccgtaaacaacaaggtcaccgtcaatggttcactgagttgaaaattactggtatttcaggctaa

SEQ ID NO: 43932 - DNA, 978 bp, Acinetobacter baumannii
atggtcatcgattttaagcaagacattctcgctcctgttgctacagactttgctgcgatggatcacttgattaatgaaggaattagctcaaaagtcggcttggtcatgtcagtgagtaaacatgtagttgaagctggcggcaaacgtatgcgcccaatcatgtgtttacttgcagcacgcgcttgcgacctcgacaatatgcaaaatgcacagcgtctggcagctattattgaaatgcttcataccgcaactttagtgcatgatgatgtagttgatgaatctggacttcgccgtggtcgccctactgcaaatgcaacatggaacaatcaaacggccgtattggttggtgacttccttattgcccgcgcttttgaccttttggttgatttaaacaacatgaccttattaaaagacttctcaacaggtacatgtgaaattgctgaaggtgaggtattacagctccaatctcagcatcaaccggatacaaccgaagaaacatatttaaaaattattcacgggaaaacttctcgtttatttgaacttgcaaccgaaggtgcggctattttggcaggacaagaagcttaccgcgaacctttaagattatttgcaggtcatttcggaaatgcattccagattattgacgatattttagactacacttcagatgctgaaacattaggtaaaaatattggtgatgatttaatggaaggtaaaccgactttaccgttaatttcagcattagcacattcaaccggtgaagagcatgccattatcagacgcagtattgcgactggtggtgttgaccaattacctaaagtgattgaaattgtgcaaaagtctggtgctttagactattgccagcgccgtgcccaagaagaaacagaagcagcactgcaagccttatcaatcttgcctgatacaccttatcgtcaagcgttgattaatttaactcggcttgcattacatcgaatacagtag

SEQ ID NO: 43933 - DNA, 2061 bp, Acinetobacter baumannii
atgcatataaatttttcagaacatttttttaaaatccagaaacagcttgaaaaccctcaagctgttattgacgaaaatattctcattgacctagtcaatgctttacggccatccgatcctcaagatacggatgaaatagagcaaaaaatacaagcctttattgatagcctattacttactcctaccgctccagcccttttacaaacctttttattacgcctcattaatcaatataagcaagtcagcttatatgcagatagcggtattttgtctttagatggtttctggaaccagcttgggcaaagacttggcggccattttctgccacttattgaagatgcaagccagctaaaaattctgattggaaaaattttctatttagaaagtgattcaatctggttaaacaatgtcgatgacaaggattgggcaactttgttcggacttattgggcaaagtaacagtaatgtcgatgaaaagcatgccattcagcgagaaatgattaaggcaattactgtcttatcttaccgtattagtggtatcggtctttatcctgaatttattaacgctcaacctgaattaaccgaatatgaatcgccatttttggtacaaaaccgtgaaattattgagtttatagagaagtacaaaaaacaggatatttctagcaacgacattgctgtgcttccacctcctgatgcctctcaagcatttgtaatgctagagcagtgtcgagacgtcgttttaaaaatacgccgagcgaccaaaagaatcggtgtaagtttaagtttgacctatcttttgtctttacttgaacagtgtttagatcggattgaattattactctatctagttgtagacgatagcgagggacgctacgtttctttaggaaacttaatttcagacttaactaaagcccattatagtgaaaaaagtgtccgctcgttactcagcacgaccagtgagcttattgcctttcaagtcacagagaatgcaagccgtactggcgaacattatgtaagtacagacaccaaaggcttttggggcatgtataaagccgctgctggtgcaggtgtgattattgcctgtatggcctcattaaaaattcttgctgcacgtataactatggctccgctcatgcaagcctttacgttcagtatgaactattcacttggctttattctgattcatgtattgcactttactgttgcaacaaaacaacccgcaatgacagctgccgcacttgcagccacagttcagcaacgtaaaggctctaaaacggcacaaattgcagaattagctgcacttattatcaatattattcgaactcagtttattgctattttgggtaatatctcgattgcaattcctactgctgctcttattacctttgcttggcagttctatcttgatgagcctttattaactcataccaaggcaacttatctattacacagcctaaacccttttacctcattagccgttccgcatgcagcgattgctggggtgtgtttgtttttatctggcctaattgcgggctacttcgacaacatggcagtttatagaaaagtagggccccgtttaaaagcacatcgacgtttacggaacttatttggacaagaacgcctgaaccgttttgcagaatatattgaacgtaatttaggggcgctcgcaggtaatttcctatttggcgtaatgttaggaagtatgggaacaattggctttattttgggcctacctctagatattcgtcacattgcctttgcgtcagcgaacttcattcagggtttaatgactattaatggtagtcctgatattggcttgattatagtttcatttttaggcgtactctgtattggtctcaccaacttatttgtgagtttcacactcactattattgtggcattacgtgcacgtcgagttcgctttgaacaatggaagccattagccaaactggtcatgacccattttcttacacgaccaagtgacttcttctggccaccgaaacagcctttagaattagaagaaaatgcgcaagccaatagtggaaaaaaagcagaacattaa

SEQ ID NO: 43934 - DNA, 627 bp, Acinetobacter baumannii
atgccctatctattgctttgtattggttgcgtttttttaggattaggtgttcttggtctttttgtaccaagtcttcaatctttggacttgctcaccgttcaaacattgagtcaccatcgtttagattatcttaatactataaccacctttcttgcacgcgtaggcggcatgccttttgtatgttttttatcctttctagtatgtatatatttagcatggtataaaaaatatattactgttattttcattagcttgggggttattggcagtatcaccatgggttggctgctcaagtggtgtgttaaccggcctagacctcctgaggcatatcatattgttgaaagttacggtgcatcgttcccaagtgcacatagtgtttatgcatcaacactggcttgtctggcaatgattatgttatgccataagcacaacattaactctccttatattgttttgatctcctgtctttggtttgtgtgtatggggctttcaagaatatatgcaggagttcatttcccaacagacgtactcgctggttggggcattggttttatttggattgcactgctttggctctggttattacaaacacaaagtaggttaagtagaaaacaaatatatttttag

SEQ ID NO: 43935 - DNA, 1251 bp, Acinetobacter baumannii
atgatgtcggctaagctttgggcaccagcccttactgcttgcgcattagcaacaagtatcgcgcttgttggttgtagcaaaggctccgatgagaaacagcaagctgctgctgctcagaaaatgccgcctgcagaagtaggtgttattgttgctcaaccacaaagtgttgaacaaagcgttgagctttcaggccgtacttcagcatatcaaatttctgaagttcgtcctcagacaagtggcgtgattttaaaacgcttatttgctgaaggaagctatgttcgtgaaggtcaggcgctttatgagctcgactctagaacgaaccgtgcaacgttagaaaatgcaaaagcatcactcctacaacaacaggcaaatctagcttcactacgtaccaagttaaatcgttataaacaacttgtttctagtaatgctgtgtctaaacaggaatatgatgacttacttggtcaagtcaatgttgcagaagcacaagttgcagcagctaaggctcaagtaacaaatgcaaatgtagatcttggttattctacaattcgctctcctatttctggccaatctggtcgttcttcagtaacggctggtgctttggttactgcaaaccagactgacccgttggtaacgattcaacagttagatcctatctatgttgatattaatcagtctagtgctgagttattgcgtttacgtcaacaactaagcaaaggcagtttaaataacagtaacaacacgaaagtaaaattaaagcttgaagatggttctacctatccaatcgaagggcaacttgctttctctgacgcttctgtaaaccaagatacaggaacaattacattacgtgccgtattctctaacccgaatcatttattgcttccgggtatgtataccactgcgcaaattgttcagggcgttgttccaaatgcttacctgattcctcaagctgccattactcgtttacctacagggcaagctgtagcgatgcttgttaatgctaaagggattgttgagagccgtcctgttgaaacctctggtgttcaaggacaaaattggattgtgactaacggcttaaaagccggcgataaagtcattgttgatggtgttgccaaagttaaagaagggcaagaagtatcagcaaaaccttatcaagctcaaccagcaaactctcaaggtgcagcaccaaatgctgcgaaaccggctcaatcaggtaaacctcaagcagaacagaaagcagcttcaaatgcataa

SEQ ID NO: 43936 - DNA, 3177 bp, Acinetobacter baumannii
atggcacaattttttattcatcgccccatatttgcgtgggtgattgcattagtcattatgttggcgggtattcttacgctaacaaaaatgcctattgcacaatatccaacgattgcaccaccaaccgtaacgattgctgcgacttatcctggtgcatcggctgaaacagttgaaaatactgtaacccagatcattgaacaacaaatgaatggtcttgatggcttacgttatatttcatctaacagtgctggtaatggtcaggcatctattcaattaaactttgaacaaggtgttgaccctgatattgcacaggttcaagttcaaaacaaattgcaatctgcaactgcgcttttacctgaagatgtacaacgtcaaggtgtaacagttactaaatctggtgcgagcttcttgcaagttattgcattctattcaccagataacaacctgtcagactctgacattaaagactacgtaaactcgtcaattaaagaaccgcttagccgtgttgccggtgttggtgaggtacaggtcttcggtggctcatacgcaatgcgtatctggcttgatccagctaaattaacaagctaccaacttactcctagtgatattgcaactgccttacaagcgcagaactcgcaagttgctgtaggtcagttaggtggtgctccggctgtacaaggtcaagttcttaacgcaacagtaaatgcacaaagcttattgcagactcctgaacagtttaaaaatatcttcttaaagaacacagcatcaggtgctgaggttcgattaaaagatgttgctcgcgtagaattaggttcggataactatcaatttgactcgaagtttaacggtaaaccggcagctggtcttgcaattaaaattgcaacaggtgctaacgcactcgacacagccgaagcagttgaacaacgtttatctgaactacgtaagaactatccaacaggtcttgcagataaactggcttatgacacgactccatttatccgtctttcaattgaaagtgtagtacacacattaattgaagccgtgattttggtattcattgtcatgttcctattcttacaaaactggcgtgcaacgattattccaacgcttgcagttccagtagttgtattaggtacatttgcggtcattaatatctttggcttctcaattaacaccttaaccatgttcgctatggtattggcaatcggtcttctggtcgacgacgccattgttgtagtcgaaaacgttgaacgtgtgatgagtgaagaccataccgatccggttaccgccacttctcgctcaatgcagcagatttctggtgcgttagtaggtattaccagcgtattgacagcggtattcgtaccaatggctttctttggtggtacaacaggtgtaatttaccgccagttctcgattacccttgtaactgcaatggttctgtcgttaattgtagcgttgacgttcacaccggcactttgtgcaactatcttgaaacagcatgatcctaataaagaaccaagcaataatatctttgcgcgtttctttagaagctttaacaatggttttgaccgcatgtcgcatagctaccaaaatggtgttagccgcatgcttaaaggcaaaatcttctctggcgtgctctatgctgttgtagttgcccttttagtcttcttgttccaaaaactcccgtcttcattcttaccagaagaagatcagggtgtggtcatgacacttgtacaattaccaccaaatgcaacgcttgaccgtaccggtaaagtgattgacaccatgactaacttctttatgaatgaaaaagacaccgtggaatctattttcactgtttctggtttctcattcacaggtgttggtcaaaacgctggtattggcttcgttaagttgaaagactggagcaaacgtacgacaccagaaactcaaattggttcattgattcagcgtggtatggcattaaatatgatcattaaagatgcatcatatgttatgccgttacagcttccagcaatgcctgaacttggtgtaactgccggatttaacttgcagcttaaagattcaagtggtcaaggccatgagaaactgatcgcagctcgtaacacgattttaggtttggcatcacaagataaacgtcttgtaggtgtgcgtccaaatggtcaggaagatactcctcaatatcaaattaatgtagatcaggctcaagctggtgctatgggcgttagtattgccgaaatcaacaatacaatgcgtattgcatggggtggctcatacattaacgatttcgttgaccgtggtcgtgtgaaaaaagtttatgttcaaggtgatgcgggcagccgtatgatgcctgaagacttaaacaaatggtatgtacgtaataacaaaggtgagatggttccattctcggcgtttgctacaggcgaatggacgtatggttctccacgtctcgaacgttataacggtgtgtcatcagttaacattcaaggtacacctgcacctggcgtgagctctggtgatgccatgaaagcaatggaaaaaattattggtaagttgccttctatgggcttacaaggtttcgactatgaatggacaggcttatcacttgaagaacgtgagtctggtgctcaagcgccgttcttatacgcactttcattgttaatcgtattcctttgcttggctgcactatatgaaagctggtcaattccgttctcggttttacttgtggtaccacttggtgtcattggtgcaatcgtattgacctacttgggcatgattattaaaggagatccaaatctctcaaataacatttacttccaagtagcgattattgcggttatcggtctttctgcaaaaaatgcgatcttgattgttgaattcgcaaaagaattgcaggaaaaaggtgaagatctacttgatgcaaccttacatgctgcaaaaatgcgtttacgtccaattatcatgaccacccttgccttcggtttcggtgtacttccacttgcactttcaacaggtgccggtgcaggaagtcagcactctgtaggctttggtgtacttggtggcgtactcagcgcgacgttcttaggtatcttctttatccctgtattctatgtgtggattcgtagtatctttaagtacaaaccaaaaaccataaacactcaggagcataaatcgtga

SEQ ID NO: 43937 - DNA, 1455 bp, Acinetobacter baumannii
atgcaaaaagtatggtctatttcaggtcgtagcattgcggtatctgcacttgcgcttgctttggcagcttgtcaaagcatgcgcggcccagaaccagtcgtgaaaaccgatataccacaaagctatgcatataacagcgcttctggtacgtctattgctgaacagggttataaacagttctttgctgacccgcgtttgcttgaagtgattgatttggctcttgccaataaccgtgacttacgtacagcaacgctcaatattgaacgtgctcaacagcaatatcagattacacagaacaaccagcttccaacaatcggagcaagtggtagtgcaattcgtcaggtttctcaaagccgtgatccgaataatccctactctacttatcaagtaggtttgggtgtaactgcttatgagctagatttctggggtcgtgttcgtagcctcaaagatgctgctttagatagttatcttgcaacacaaagtgctcgtgattcgactcaaatcagtctgattagccaagttgctcaagcatggttaaattattcgtttgcaacagcaaacttaagactggcagagcaaacgcttaaagcacagttagattcttacaatctcaacaaaaaacgttttgatgtaggtattgacagtgaagttccattacgtcaagcacagatttctgtagaaactgcgcgtaatgatgtagcgaactacaaaactcaaattgctcaagcacaaaacttgttgaacttgcttgtaggccaacctgttccacaaaacttgttacctacacaacctgtaaaacgcattgctcaacaaaatgtgtttactgccggtttaccaagtgacttgttaaataaccgtccggatgtaaaagctgctgaatacaacttaagcgctgcgggtgcgaatatcggtgctgcaaaagcacgtttattcccaaccattagcttaacgggttcggctggttatgcatcaactgacttaagtgatctatttaagtctggtggttttgtatggtcagttggtccaagcttagatttaccaatctttgactggggtacacgccgtgccaatgtaaaaatttctgaaactgatcagaaaattgcattgtctgattatgaaaaatcagttcagtcggcgttccgtgaagttaatgacgcgcttgcaactcgtgccaacattggtgagcgtttaacagcacaacaacgtctagtagaagcgactaaccgcaactacacactttcaaatgcccgcttccgtgctggtattgatagttacttgactgttcttgatgcgcagcgttcttcatatgcagctgaacaaggtttgttattgcttcaacaagcaaacttaaacaaccaaatcgagttatacaaaactctaggtggcggtttaaaagcaaatacttcagatacagtggtacatcaaccatctagtgctgaacttaaaaagcaataa

SEQ ID NO: 43938 - DNA, 351 bp, Acinetobacter baumannii
atgttattaagtaatttagaaagtgttccaggccaccaaattttaaagcagcttgatgtcgtttacggaagcactgttcgtagtaagcatgtgggtcgtgacttgatggcaagtttaaagaatattgtaggtggtgaacttacgggttataccgaattattagaagaatctcgccaagaggctatgcaacgtatgattgctaaagcccagcaacttggtgccaatgcaattgttggtattcgtttttctacctcaaatattgcccaaggtgcttctgaattatttgtatatggcacagcagtagttgtgcagcctcaaacacctcatctacccgatccatttagtgcatag

SEQ ID NO: 43939 - DNA, 435 bp, Acinetobacter baumannii
atggacaatcttatttttcagcttgttatttttctcattcttttcagtattggttgggcttttggccgccatattgaacgaaaacatttaaatgaacttctagaaaaagagcaacaatttgcccatatcagaattgataccaatcgttttgccacaagcgaccagttgggtcattttattagcagtaatgtggttatttcgcatgactactttaaatatgtactggcctctataaaaaatattttaggtggtcggctgaccagttatgaaagtattgttgaacgtgctcgccgcgaggcgattgtacgactaaaacaacaagctcaaagtgtcggtgccaatcacattatgggagttcggctgagtacaaccgaactgggtatgcaaggtggaatggtagaggtatttgcctatggaacagcagtcaaagattaa

SEQ ID NO: 43940 - DNA, 435 bp, Acinetobacter baumannii
atggatcaagactaccatcgtattttagaggtcattacgcgttttcaattggtttttgaccagaaaaattgggatgcgtttgatgagttgttggccgatcaacttgaggtggattatttgcagtttagaggggagcctttatgcgtggtgtcttgtcatgaatataaaggttcacggcaacaagctttgtcacatttgcggctacagcacaatttaagcaatcctcttattcggattgaacaagaccaagcatggttagaatgtaattatcaaatttatcgtttttcggaaaatgattattttcattcttttggtcgctattattttactttggcaaaacaacagggcatatggaaaattaccggaatttgccaacacttaactaaaaatattggcaatccgcgtatacatttttctgctatggggcagtgttaa

SEQ ID NO: 43941 - DNA, 807 bp, Acinetobacter baumannii
atggccaaacttgatactttgcaaaataaagtggtgtggattacgggagcctcttccggtttaggtaaagctttagctggtgagtttgctttgcaaggtgctcaagtgattttaacttcgcgtcgctttgaagagttagaagaagttcgcgttggtttactccatccggatcagcacttgtcggtagttgcagacattaccaatcaagagcaagttcaagaggcttatgagcagattttaaaagcaaaaggacgaattgactggcttattaataatgcgggtttaagtcaacgtgctcttattcaagacaccacaatggcaacagaacgggccattatggaagtcgattatttctcacaagtcgcgttaactaaaaccgtattaccgaccatgctaaaacaaaagtctggccgagtcgtatttgtctctagtgtagcagggcttttaggtacgcagtaccgtgccagttattcggctgctaaagctgctattcatatgtgggccaacagtttacgtgctgaagttgccgatcagggtgttgaagtttcggttattttcccaggctttgtaaaaactaatgtttcgtttaatgcactaaatggtgcagggcaacctcaaggccaccaagatgaagcaatcgaaaatggactagaggccgatgtttttgcagaacagtcagttaaggcattaatgcaaggacaggaatatattgtagtgggcggtactaaagaaaaattaggagtgatggtttcccgtatgtcaccgaaactactctataaaatgatccggaaaacaaaagtgaaataa

SEQ ID NO: 43942 - DNA, 678 bp, Acinetobacter baumannii
atgagctacaaagtttttttaaagatttccgattcaacctatacccaatttgcttcaattcgagagaaattacatgctggggtaagagaaagccagtcgaaagtattgggggatgttctatccgatttgtcgtgtgaaattattgagcaagttttctctgtattgttaaaggatgagcaagacaactctactatgactcaaaaacagcggtatgagtccgagaaagttcttcagcaaattttagatactttccgaaaatatatgccttggtcagtctcttttttcggtaatgaacgacttttacctttagttgattatatgacctcactcatgaaagaacgtgagcaagaggtttatattacatacccgatcacacctcaacttgtacaacaggcccaaacgctgacggaacaaatacatgagggcaatatgcaaagcgtagaaaaagcctttcagaccttaattcaaattgtggatttaggtgtaacaagcctagtacgtgaacctaaaaaacgtttaaaatttaatttggttgtcgataaaaccctaaatggggtcattaatatgacaacgcatttgggctataaacgtttggaaaaattggggacgcaggttgatcagaccacagcaactcactatatcaaccactttttggccttcatgcatcaagcagcataa

SEQ ID NO: 43943 - DNA, 2880 bp, Acinetobacter baumannii
atgactgacgctcaaaccgctcaaaatattgccaccacctacgatccaaccgagatcgaaaagaagtggtacaaaacgtgggaagaacaaggttacttcaaaccttctggtcacggtgaatcattctgtatcatgattccaccaccaaacgtcactggtagtttgcacatgggccatggctttaacaatgccattatggatgccctcacccgttataaccgtatgatgggtaaaaacactttgtggcaaccgggtactgaccatgctggtattgcaactcaaatggtggttgagcgtcaacttggcttacaaggtgtaactcgtcacgacttaggccgtgaaaagttcatcgaaaaagtttgggaatggaaagagcaatctggcggcacaattaccaaacaaattcgtcgcttaggttcgtctgtagactggtcacgtgaacgcttcacgatggatgaaggtttatcaaacgcagtgaaagaagttttcgttcgattacacgaagacggtttaatttaccgaggtaagcgcctagtaaactgggaccctaaacttcaaactgcgctttctgaccttgaagtagaaagcaaagaagaaaaaggttcactttggcactttaaatatttctttgaagataaatcagttaaaactcaagatggcaaagactatttagttgttgcaacgactcgtcccgaaactttacttggtgatactgctgttgctgttcaccctgaagatgagcgttatgcgcaccttgttggtaaaaatattgtattgccaatcactggtcgtttaattccaatcgttgctgacgactacgttgaaaaagactttggtacgggctgtgtaaaaatcacccctgctcacgactttaacgactatgagttaggtaaacgcaatagcttgccaattatcaatatcttcaacaaaaatgccgaagttttaggtgagtttgaatatattgccaaagctggtgaacaaatttctaaaaccattactgcacctgcagactacgctggtttagagcgcttcgaagcacgtaaaaaattagttgctcaagcggaagctgaaggctggttagaccaaatccaaccgtatgacttaaaagcgccacgcggtgaccgttcaggtgtgatcattgaaccattattgactgaccaatggtacgtaaaaattgcacctcttgctgagcctgcaattgaagcggttcaagatggtcgtattaagtttgttccagagcagtacagcaacatgtacatggcatggatgcgtgacattcaagactggtgtatttcacgtcagctttggtggggacaccgtattccagcttggtacgatgcggatggcaacatctatgttggccgtagcgaagaagaagttcgcgcgaaaaataacatcacggctgatgttgagcttaaacaagacgaagacgtacttgatacatggttctcatctgcactttggacattctcaactttaggctggccagaacaaactccagaactcaaaactttccacccgactgatgtgttggtgactggttttgacattatcttcttctgggttgcccgtatgatcatgatgaccatgcacttcatgaaaaatgaagatggttcatctcaaattccatttaagacggtttacgttcacggcttggtacgtgatggtgaaggtcagaaaatgtcgaagtctaaaggtaacgttcttgacccattagacttgattgacggtattgatttagaaagcttagtcgcaaaacgtacgactggcctcatgaacccgaaagatgctgcgaagattgaaaaatcaacgcgtaaagaattcccagaaggcattaatgcttacggtactgacgcagttcgtttcacgttctgtgcccttgcaaacactggtcgtgacatcaagttcgacttaaaacgtgttgaaggttaccgtaacttctgtaacaaaatctggaatgcaacacgtttcgttctgatgaatgttgaaggccaaactgttggtaccgacgctcgtcctgatctttgggaacttccagaacaatggattatcagccgtctgcaaaaagctgaagctgctgtacaccaagcgtttgcaacttaccgtttagaccttgctgctcaagcgatttatgactttatctggaatgaatactgcgactggtacgttgagttaactaaaccagttctgaacgatgcagaagtttcagaagagcgtaaagctgaagtacgccgtgtattacttgctgtgatggaagcctctttacgtttggctcatccattaatgccatatttgacagaagaaatctggcaaacacttgcaccaatgcttggtcaaggcggcccaaccattatgactgctcaataccctattcctgagcaagcaaaaatcaatgaacaagctgaagcagatatgcaatggcttcaaggtttgattggtgcggtacgtaacattcgcggtgaaatgggcttaggtaatgcgcgtttattaccagtattacttcaaaacatttctaatgctgaacgtgagcaaattactcgtattgaagcgttgttcaaagcattggctaaagttgaaagtattgagttcttaggtaaagatcaagaaccaccgctttcttcttcaagtgttgtaggtcatgcatcggtatttgtaccaatgaagggcttaattgatcctaaagctgagcttgctcgtttgcaaaaagacttggataaaatccaaaagcaacacgatcaaattgcaaataaacttgcaaatgaaggctttgtatctaaagcaccagcagcggttgttgaaggtgaaaaagcgaagcttgctgagtttgctgcgcagttagataaagttaaagcgaatatggagcaaattgctgcgctttaa

SEQ ID NO: 43944 - DNA, 585 bp, Acinetobacter baumannii
atgaatgaaaaatttattcaattatcaaaagaacttaaacatagacctattttagagaaggctttaggttattttcctaacttacctttagttgctatcgattgtggctgtggcgctggcaatgaatctgcttatctactctcaaagggatttaatgttcatgcttttgatatttcaattgatgcgcaaaaagtctgtactgagcgattcaaagatgactctaaatttattttctatcatgaatcttttgaagactttaatttcccgtctgcaagcttaattattgcttcatcaagtctgttcttttgtaacccaagttatttttatagcgtaattaaacgaatgataaatgctctttctgaaggtggaattcttgtagttgatttattgggaatttatgatgagtgggttattagagaacctacaaaatttataggatttacttatcaagatatagctgatttattcttatgtgattttaatctgctgtttcataaagaaattaatgaaaatttacctttattggaaggttatataaaaacatggcatcttcatatgctgattctacagaaaagtgatttttaa

SEQ ID NO: 43945 - DNA, 1017 bp, Acinetobacter baumannii
atgtcctttgatctcaaagtgagcttgcagcaaaggtctgaaccatctgcacagcagaaaaaactgaatcgcctgattgataaaatagaacagcaaaaagttagtctgagcacatggcaaaatgcacaagctgagattcaacagtacattcggcaaaaactgatgcctgtatatagcgatttgcatgaagtgctatttcagcagttagagcaactttggaatatgctgcatagccatgagttttccaaagcagacatgcaacaactagacgaaaaaattgcccagcttgcacaaatgttgaagcgctccaaaatgctatctgctgaacagttggagctagtgaagcagatcgatactttttatcagcagcatgcaggggaatcggtaaaaaagaataaaaaagctcagccaatagaatttgaatatgaagaaagtgctgatcaaggctcagagttcgaagaagactttgaaaagtatacagccgagcaacaacaactgagagaacaagccaaacggcaaagacagcaacagaaacgtgaacaagctgagcaaatggcagcgcagtcactcaaaacagtttatttaaaaattgccgcgatgattcacccagaccgtgagcaagatgaaaccaaaaaagaagaaaaaactgagatgttccaacaagcaagtcaggcctacgaaaagcaggatttgttttatttactcaaactccagttacagcttgaacagaataaagggctaggtgctaaagacttatctgccgagcagttgcggttttataaactggctttagatgcacaaagtcagcagcttgaaagccaaattgctgagattttggattcttttcaattagccaagaatgtaaaagcagagcatgtacatattagtgatgtgtataaagctatagatgctgattgtgctgagttaaaacaacagttgaagtgggaaaaagagcgtttaaagcatatgaaaaaggtgagtggggtggaaatgctgttggggcatggggtgctttaa

SEQ ID NO: 43946 - DNA, 906 bp, Acinetobacter baumannii
atgaatagtattgttttatctctttttcctttagttgcattaattgcatcgggatacttatttaaaaaatatcgtttttttagcgatgagttttgggctggggcagagaagctgaattattatattttatttccagctttgctttttagtacgctatcgaccgcaaaaattgatttacaaagcttgagtacagccattattgcgatgttaattgtggttttagcagtgaccgcttttttatacatacttcgaatgttttggcacataccacccgcacgttttggtgtgcatgtacaaagtatggttcgctttaatacctatattggtttggctttagtcacttcgctttttaaaagtgaaggaatggcaattctggcaattttattggcgctttgcattccgcttgtgaatgttatttcggtgcttgctctaacctctaaagaacacatggcaattaaacctgttttgattgcactccttaaaaaccctttaattgcatcgtgtgtggtcggggcagcagtcaatgcactgcatatcccgatttgggaaggctttactcagtttattaagcttttttcagtgtcgagtttgccactaggtttgttatgtgttggcgcagctttgcagtttatgcaaattaaaaaagacattgtggtattagcggcagacacgtttgcacgacttttagcagtacctgctttagcttacgcggtctgtacgtggtttggtttaccaagcttgcaaacacaaattttagtcattttctttgcgctaccgactgcttctgcttcatacattttaaccaaagttttgggtggtgatagtcagcttatggcagccgtgattagctttcaaaccttatgtgctgccgtgactttgccattagtgatttggtggatttcttaa

SEQ ID NO: 43947 - DNA, 885 bp, Acinetobacter baumannii
atgacatttacccagcttgaaatttttgcactcattgctgaactgaaaagctttacagctaccgcagaaaagctgggaatttcacagtcagcagtttcccatgcacttaaatcattagaacaacaatggggcattaacctgatttcaagatcccagagtgatattgagctgactacgacaggtcagcagctacttactcatgtaaaagaactattaagtatttcggacactttagaaaaagaagtggctgccattcatggtttaaatgaaggaacattacgtattggttcttttggagcttcatcctctatttatctattgcctgaaattttagaagcctttcggcaacgctaccctaaaatcgaaatttatatcgatgaaggtgaagataaagaagttgctcagtggttattagagcgacgcatcgaagttggttttttgattatgccagatgagcgttttgatacatttcccttaattgaagatcgttttgtggccctaattccgagtggttacccgctcgcgcagcaactctatattgatccagcacagctagaaaattgttctttcattatgacaatggcgggtagtcgacatcaggtcgaattaattttaaaaaattttaatgtcaaaccagatatcaaattttatgtttcacaaattctaagtattgtcagtatggtccacaaccagttagggatttcgattgtctctgatatggtgatcaccaaagagctactctcgctttatccaaacgtagttaaacgcccatttaaaccaaaccttaaacgttctattggtcttgcagtaaaaaataagaaacacatcagtccagccgtaaaagcatttattgaagttgctcaagaggtttggtctgatcattaa

SEQ ID NO: 43948 - DNA, 1188 bp, Acinetobacter baumannii
atgcaaaatgtagatctgtttttcttattacttggtgcagttttggttcttgccatgcacgcaggttttgcattcttggaacttggtacagttcgccacaaaaatcaggtgaacgcgcttagtaaaattctgactgactttgccctctccgcaatcgcatatttctttgttggctactacatttcgtatggccagcacttcttccatgaaggtacggttttatccaatgaccatggctataacctcatgcgttgctttttcttactcacttttgctgcggccattcctgccatcatttctggcggtattgcagaacgcgcaaaaatgcgttcacaagcgattgccacactcgcattggttgcactggtttatccgttctttgagggaatggtctggaatggcaactacggtctgcaaaagtggttagaaacaacttttggcgcagcttttcatgactttgcgggttcagtcgtagttcatgccatgggcggttggatagcacttgctgctgtcattttattgggcgcacgttctggccgttataagaaagatggtcgtgtaagtgctcacccaccttcttctattccatttttggcgcttggttcatggattttgatcgtaggctggtttggctttaatgtgatgagtgctcagcgtgttgatgcaatctctggtctcgttgcgattaattcacttatggcaatggtcggcggaacgattacagcaaatgcgattgggaaaaatgaccctggtttcttacacaacggtccacttgcaggtttagtcgctatttgtgcaggttctgacattgttcatccagtcagtgctcttgtgattggtggtgcagcgggtgctatgttcgtgtatctattcacctatacccaaaacaaactcaaagttgatgacgttcttggtgtctggccgctacatggtgtatgcggtgcatttggtggtattgccgtaggtatttttggtcaaaaatggctaggtggtttaggcggcgtatcattcctctctcagctcatcggtacagcactcgcgattgccattgcactggctggcggtttcattgtttatggcatccttaaagcgaccattggcattcgcctatctcaagaagatgagttctgtggtgcagacttatctattcataagatctcagcaaactctgaagaaggtatgttttaa

SEQ ID NO: 43949 - DNA, 600 bp, Acinetobacter baumannii
atgtacctcatccaaccttggattgattcaacaggtcattttttcaatcgggacaattggtatcttgaaagacttaatcatgaaattgtaaaacaaatcatcaccgccgtttatgttatcttttttggtttatggcttgcgtcatttaaattaaaaaaattaaaaccttttcgctggcaatatggctatatgttttttgtcagtatgctcggtagcagtatagttggcctaataaagtcgcaatctgctcacgcctgcccttggaatatggttcaccctaatactttaggaagctatatttgggatttcagtgctaaacatggccattgttttccaggtggtcatgcaagtgcaggttttattttaatgacaggttattttgtttatcgtcttgaacaacctaaacgtgcttacttttatttattctccggtattttattaggtttcatgatgggttgggcgcaaatgatgcgaggagcacatttcctaagccataacttatggacaggctgggtcgtttgggcaataaatattttattttatgcgatttgtattcatcgttttgagttcgaaaaacaagtgaaacaagagcttacgtaa

SEQ ID NO: 43950 - DNA, 1335 bp, Acinetobacter baumannii
gtgcattattcattaaaaaaacgactgatttggggcacctcaattttcagtgtcatcttaggttgtattttaatttttagtgcttataaggttgcacttcaagaagtcgatgaaattctagatactcaaatgaagtatttagcggaaagaacagctgagcaccctttaaaaactgtaagcagtaagtttgattttcataaaacttaccacgaagaagatctgtttatcgatatctgggcttataaggatcaggcccatttgtctcatcatttacatttgctggttccacctgttgagcaagcgggattttattctcataaaaccgctcaaggtatagtcagaacttatgttttacctttgaaggattatcagattcaggtcagtcagcaagagagggttcgtgaagctttcgcttgggagcttgcgggcagtatgtttattccgtatttaattattttaccttttgcaatatttgccttagcagccattattcgtcgtggtttaaaaccaatagatgattttaaaaatgagttaaaagaacgcgattccgaagaactcacaccaattgaagtacatgattatcctcaagagcttttacctactattgacgaaatgaaccgtctttttgagcgcatttctaaagcgcaaaatgaacagaagcaatttattgccgatgctgctcatgaattacgaacacctgtgactgcattgaacttacaaaccaagattttgctaagccagtttcctgagcatgaatcattgcaaaacttaagcaagggtttggcgcgtattcagcatttggtgactcagcttttagcattggcaaagcaagatgtaactttaagtatggtcgagcctactggttattttcaactcaatgatgtggcattaaattgtgtggagcagttggtcaacttggctatgcaaaaagaaatcgatttaggttttgttagaaatgaacccattgaaatgcatagtattgaacctactgtacattcgattatttttaatttaattgataatgcaattaagtacaccccgcatcagggtgttattaatatttcagtttataccgatccagatcactacgcatgtattcaaattgaagatagcggtgcaggaatagaccctgaaaattacgataaagtccttaagcgtttttatcgcgtgcatcaccatcttgaggtgggaagtggtctaggtttatctattgtagatcgtgcaactcaaaggcttggtgggactttaactctcgataagagcttagagcttggcggtctttctgtattagtgaaattacctaaagtcttacatttacatgaaacaagagcgtga

SEQ ID NO: 43951 - DNA, 675 bp, Acinetobacter baumannii
atgacaaaaatcttgatgattgaagatgattttatgattgcagaatcaacgatcacgttgctgcaatatcatcaatttgaggtggaatgggtcaataacggtttagatggtttggctcaattggcgaagactaaatttgatcttattcttttggatttaggattgcctatgatggatggtatgcaagttttaaagcagatccgtcaaagagcagcaacaccagtattaattatttctgctcgagatcaattacaaaaccgtgtcgatggtttaaatttgggtgcagatgattatttaattaaaccttatgagtttgatgagttgcttgcccgtattcatgccttactacgccgtagtggagtagaagctcaacttgcgagtcaagatcaactattagaaagtggtgatctggttttaaatgttgaacagcatattgcgacgtttaaaggccaacgcattgatttatcaaatcgtgaatgggcaatcttaattccacttatgactcacccaaataaaatcttttctaaagccaacttagaagataagttatatgattttgatagtgatgtgaccagtaatactattgaagtatatgttcaccatttaagagcgaagctgggtaaagattttatccgaaccatccgaggactgggctaccgtttggggcaatcataa

SEQ ID NO: 43952 - DNA, 462 bp, Acinetobacter baumannii
atggctttaatacaaggtaacttttcaattatgaaaaaaatattaatctgttcactattatcttttattagttcagtagttttagcgactccaattactttgcagcacgccaagaccggctatgtaaattcaggaatctgttccgccgtggtagatataacgattcaagattttcttggaaacaatgacaagctttatctggatcttgtggcaaaggataaagcggggaaaataaaaggaacctctgtagatatcattacttatgatgatgttcagaacctttctggtaaagcatttggtaaagtatttatagagtctgaagatatgtgtgaggcagatcgtagttggacaattcatgttaagcgtgcagtattagttgttgatggtaaacgtcaggacttattgaaaacgaagcaagtaatgattgatgattttcaacctatgaaaattgttgctaagtaa

SEQ ID NO: 43953 - DNA, 468 bp, Acinetobacter baumannii
atgttatacatcttattagccgcagtctttttagttttaatagttattatatttattgtccataaggttaaaagcaaacaagttttgattttcgatacaccaaaagatttaacggcatttattcgtagaaaatatagctctcaaatcaagcataatcaacctatccacggatttgttcttgagaatgcttcaatagaaagaacacttcaagaatccgttatgggagatttagggcgctctgcagtggatgtacaagtaaatattattactcaagatggattccaagaagtaagtgcaccatgtggaaatataaaagctgaatttaaaaagggtgactttgtaattgttctaccaattcataatgaacgtcatggcttttggcattacgtaactgttgcaaagttacagcctatttatgatggtaagaagaaaagctggataataatagaaaattatctccaaaattga

SEQ ID NO: 43954 - DNA, 2526 bp, Acinetobacter baumannii
atgaaagaacaatgcaaacaagcggtagctaaagcacttggcaagcaatcccttacagcacaagaagcaacagatattgaagcacgtattaatgaaacgatgcgcaatcttgcacgcaaagatattaataaatggcgcaatctttctgactctgaaaaaatcacagaagcatctaagcaagttgcaattgacattcaagaacaattaaaacgcaaacataaaattgctgcgaataacattcttacacagtcaaaaaatttcactaagcttgatcaccctaagctctcatcaatggaagtaattgatcgtatggttgccgcgcatggtgatatgtcaggtatcacatcagttgattctctggctcgtgcaatatcatcaatctatgaaggacgtttaacagaattctataccaatattaaaggaggcttgggggtttacacagatccgaagctagtaagaaatatcatccgagagcgttttggtgaaaacactggtgatgcattagcaaaaaagatcagtgacaagatgggtgaagtttttgaagacatgcgcgagcgattcaaccgcaacggtggtgacattggaagactagaaaattgggttgtgcctcagactcatggtctagaaaaaattgctaaggctgggaaggagcaatgggtaagtgatgtgcttccagatcaagatactagaatgtttgtgcatgagaacggcgattactactcacagcaagaaatacgttcattgcttgaatatgcatatgatacgttatctagtgatggtgcaaacaagattgaggttggtaaacaagcaacaggtgctggaacttcaaaagtaactaaccgacattctgaaagtcgaatcttacattttaaggatgctgatgcatggttaagatatcagaataaatatggcagcatgcagtttgtagacttggtaaatgctcatatcaaaggcttatcaaaagatattgcattggtcgaaaaccttggaagtaacccgaaaaccgctttaaaaattttgatggatgctgctgcaaaaaaagattgggaaaagggaattgatgagaataaaaccaaaagtagtcgcaagcggattgaaactatgtttgatgagttcagtggtggtaactcgccacagtcgcaagttcttgcaaatttaggtacttcatatcgctcaatgaatattttctctatgcttggaggaactaccatcgcatcgactactgatcaggcaaccattgctaaaacagctcatgtgcatggtctttcatatcgtaaggcttttggagagttgattagacaacttaacccagccaataaagcagatcgggaactagcgcatagtttaggattagcgactgaggaaatgttgggatcgattgctcgatggtcagatgatggattgacttccacgcatggcatgactgcaaaactggctcgtatctctagtgggatagcgactcaggttatgcgagcatcttttctaaatgcacttacagcagcatcaaaagttgggttcactaaactccttatggagaaatacggccgcttaagccgttctaaagcttggaatgacctagatgtacaagaccgtgaattactttcaaatacgggcttagatgagcgagcatggcaggttttccaattggctgaaccagtcgtggaccgcaaaggtaatcaactcatgtcagcgcgttctatctatgaaattcccgatgaaaagttagtagcgtttggtgaccctaaacaagttaaagatcaggtggcctcacaacttcaagcacatttactagatgagcagggcatggcagtaattgaagcagggcttcgtgaaaagactctaataaatgtaggtgctagaggaacgattacaggtgagatctttagagggattgtgcagtttaaatcgttctctgctgcattcttaatgcgtcatgggagccgcacaatggcccaagaaggcttaaaaggtaaggcggcatatgcaattccattatttgtgatgactacattacttggcgggttggtagttcaattaaaagagttgcttaacggtaatgacccccaaaccatgtgggatagtgacaaccctaaaaaagcaagtaacttctttattaggtctgccgtacagggtggcgggttatcattcttaggcgatattttagttgctggtactgatacttcggggcgagatgcacactcatttgtagctggtccactaggaagtgattttgagtcactattaagcctgactgttggcaacataacacaatacaatgaaggcaagaacaccaatttcggcaatgaagcctttaggtttgtgaaaggtaaagttccagcgcaaaatttatggtatacaaaagcagccataaaccgcatggtatttgatgagatgcaagacaccattgcacccgggtatcgtgagaaggctttacggaaagcagaacgtcaacaagatcgtgagcgtttctggggtgatgacgttaatgatattagagcacctgactttgagagggtagtgcagtaa

SEQ ID NO: 43955 - DNA, 453 bp, Acinetobacter baumannii
atgggatctaaaaagaagttttttgaaccgattacaggaaccaatattaaccgggctattgatctatgtaaaagcactccagaaaaattgaaaaaatttcaggaagatattcgttatctagattctaatcagctttttcagaagcaatttattcatcagttattagttatagtaaatgaccttgaagaattaaatcagttgctattaattatggcgaagccaaaagatatatattactcctctttaaggacagcattagcttggatcaacaatatatcgaatgctttaattattacggggtattatctcgatcctgagaataaatataagcgtctattgaacaagaattcgtttggttttgaaataaatttaattttaaagaaagtggactctgtaaaacaaattttagaacgtataagtaagggagatcccgttaataggagaattcattga

SEQ ID NO: 43956 - DNA, 303 bp, Acinetobacter baumannii
atgaatatatttgctgagttatgctgcttctccacacctaaaaatcttttttttaataagagattgctaaactatttagctccagacctcaacagaatgattgtagatttgaaaaatctggggtggacacttgagaaaatagcctttgtattaccaatatcaggggcttcctcagtcagagaatggatctgtggaagtgtcatgaaatatgacaacggcgctgcctttgttgaactttggatgcatttgactaataaaacagaaaaagaaatacctcgaattaatcgttaccttatagcttag

SEQ ID NO: 43957 - DNA, 189 bp, Acinetobacter baumannii
atggatttgatttctagcccaaagattgattatggatatagtcaaatttcttactggtttaagcacagtgagcttttctttagaaaaacaactaaaggtacattaaaaattatttcacgcttagaacgcaaatctgagcgatatgtggaagctcaaaattatgcaaatgatatacaagctgccagctaa

SEQ ID NO: 43958 - DNA, 189 bp, Acinetobacter baumannii
atgaatattgatagacgagttcgagcaaaagaatttatgaatcttcttgctgtgggtcgaaccaaattttatagcttgctcaaggatggtcatattcctgagccggttagagttacagaaaaagatgttttctggtatgagtcagttgtaaaaaaagcagtagaaaagtttaaagataattccgagtag

SEQ ID NO: 43959 - DNA, 294 bp, Acinetobacter baumannii
atgtttaagcaaaaatatatcattaccgtagagtccgaaacaccgccccaaatttgcttaggagattcaatatacggcgccacggttatttccttagaaatagagcaatatcccgatctcgtagatctggcctggctcactaaacgctttccaatgtctagacaaactctagcagccaaacttgaaattcttaatttaggtggaccgcgcaagaaactttatgatcccaatgttgttatccccttccttaaaatggatataaaaaatagaagaggtaggcctaggaaaaattaa

SEQ ID NO: 43960 - DNA, 486 bp, Acinetobacter baumannii
atgtcttatataattaaactgatctcagaaaactgctacatcattcctgatgatgaaggttggctgaccactactgaatcacaaaaagaagcaattgaattaggcttatttgatgactttgaatcagcagatgaaacagctcaaggctttagtggcgggatgaccagaggggttgattatataattcaaactatctccaccgatccttatcatgtagtagaaatcattattcctgaagaaattgctccaaaactaaaagacatcaatagatttatcaagaatggtaatgcacacgtattccttactaatgtgacaactgcaaatgatgctatggatggatttacccgctacggtgtttcaactggcacaaatgcagtcctttataaagctgatcaatacgaagctcgtaaagaagcaatttcacaatacctaaatgatcgctttgggattcaatgggaaattaagctattaccagtacagcattaa

SEQ ID NO: 43961 - DNA, 1035 bp, Acinetobacter baumannii
atgaacaatgttcaaaaatttgttattaacaacgaagaccaggccattgaattgcttgatgcgatattgaataataaaattaacactgatcacgtaaatttagagtttgatggctggccaacctatcacatgcatgttgaaggtgaaaagtatcatcaaacaatcacaccttcaattatgaatggttttttggatcttcaatcaggtatttataaatcatatgctctgattaaatatgatactgaagctacgcaatgtttaactaaagctgaacgtcaagatttagaaatagaagtaaaggttgaagatggctcttcgtcatttgatattaatttaaccgaaattggtcttaaacttgtagagagtaccgctggtaaaatgagcccaacgcaagctgttgttataattctatcttgcttagttttatactttgggaaaaattttcttcagcaaattctaactgcaaaaaaagaagctcgtgaagcggaattagatcaacaaaaaaatgcagatgatcgaaaagagcgactcgaaacaattaaaattctcaccgagcagaatgaaaaatttgtagaagtaatggctaaagccaatcaatttgattcacgtatacaaaaaatgaaacaacatgctgcagaaactaatgcttctattttaaaaagcgtacaagatgcggaccaagccgaaattcaaaatgctgtttcaataccaggtgatgtagcaaaagagctttctattaccccaaaatctagatgggagccaattcggattgacgattggtatcgagtacttgaagttgattcatcgaatgcagccagccgaaagattcgattacaaagagtttcggataataaagaattgatgagtgttttagaaaacgattctcttgaccagaagaatttacagctcattcaacaagccgaatggaaatatgcaaaaatattcttaaaaattcaaactctaaccctaaatggaagatataaagaatctagaattattggtgctgagaatatcgatgaaaccgaagatgaataa

SEQ ID NO: 43962 - DNA, 537 bp, Acinetobacter baumannii
gtggatgtagagataaaaaaacaatcagaaccaaattatgattccgataaatttaaatttttatacgaatataaaaagtatcatttagatatgttacgtgatgactataaagatttagagaataaggcaactaagtatttaacttttgtaactttaattcttaccatggcatcaatttttctgcgtgattatttgactcttcctgtatctgaaaaaggtctatggtattactcatctttagttctactgattatgtttgtgattgcaatttcaccagtattaagatggttatttctgtgtataaaaataaataagcttggagatttgccgaaagaggggatgaagccgtattttttagaaaatataaaggaaactgtgtatattggtacagcagatcgtttagatcaaattattgaaagctataaaagagtaaatatggaaaaagctgcttttttaaaaaaggcttttgatgaaatcaagtggagttcattgatcttcattgcatttgtaatagtatttttgattaataagttttga

SEQ ID NO: 43963 - DNA, 876 bp, Acinetobacter baumannii
atgaataccccagcaacaaatgataaaaatccaactccagatttagctgaagataatgcgttcttcccatcaccatattcactgagtcaatatacttctcctaaaacagattacgatggcacaacctatccaacgccgtatgcgggcaataaaaaggttttaatgattgcaactgatgaacgttatatccagatgcaaaacggtaagttcttttctaccggaaaccatccagtagaaatgcttttgccaatgttccatttagataatgccggatttgaaattgatgttgcgacactttcaggtaatccagccaaacttgaaatgtgggcaatgccaaagcaagaacaggtggtattagatactttccagaaatatgcagataaattaaaaaatccgttaaaacttgccgatattttagaaaacgtagtcggtgaaaactctccatatgcggctgtatttattccgggtgggcatggtgtgttagcgaagattccgcatagccttgaagtgaagaaagttcttaaatgggcagttgagcaagacaaatttattattacgttatgtcatggtccagcttcgttactggctgccgcagtagatgaacagcctgagaattatatttttaaagattatcaaatttgtgtattccctgattcgttagataagggagcgaatattgatattggttacatgcctggagctttaccgtggttagtcggtgaaaaccttgaaaagctcggcgtgaagattttgaatactggcattactggtcaatgtcatcgagaccgtaaattgttaacgggcgatagtccgcttgcttctaataatttaggcaaacttgcagctgaaacattgctggctgaagtgaaggattaa

SEQ ID NO: 43964 - DNA, 999 bp, Acinetobacter baumannii
atgaatcttccgacaaccatgaaaattgttgaaattacggttcctggcggacctgaggttttaaaacttcaagattcaaatgttccggtacctcaagctgatgaagttttaattgaggttaaagctgctggaattaaccgccctgacgtcttacagcgtatggggttatatccaatgcctaaaggggttactcaaatccctggacttgaagtcgctggagtagtggttgctgtgggtgagcaagtgcaacagtttaaagtcggggacaaggtttgtgctttaaccaatggtggcgggtatgcagaatactgtgcggtaactgcaactcaagtattgccaatacctgagaatttatcatttactcaagctgctgcgattccagaaacattctttacggtttgggcaaatctttttgatattggccgtttaaagaaagatgaaactgccctgattcatggcggtgcaagtgggatcggaaccactgctttagcgatttgccatgctttaggtattaaaacttttgctactgttggtagtgaagataaagttgaagcactctctgatttaaccacagcaattaattataaaacccaagattttgagcaggaaattttgaaccatactcaagaacaaggtgttgatgttattttggacattgtgggtggctcttattttcagaaaaacttaaatctattaaaacgtgatggccgacttgtcattattggctttatgggaggtcgaattgcaaaagaatttgatttacaaaaactgattttaaaacgcgcaacgattacaggctcaacgatgcgagcgcgtaatagccaagaaaaagcacagatcgctcagtcattacatgaacatgtatggccgttattggagcaaggcaagtgtttaccacaaatctataaaacctatgctttttcagatgtacaaagtgctcatgcatgtatggagcagggcgaccatattggaaagatcgttttagagatgaatgcttaa

SEQ ID NO: 43965 - DNA, 894 bp, Acinetobacter baumannii
atgcaacagaatgacttgacgaaaagtttggtagaggcttttttgtatttggctcctcaagaggggttatatcccactcatatttcaaatatcaccctgatgagggtagatcattccacacagccggttgccgtattgcaagagccttccattgttttagtcattcagggtgtaaaacgggcttatattggaaaagatatttttaagtttcaacaaggccagtgtttatttatctcaattgctattccttttgattgcgatacgttggttgagcgtgaaccaatgcttgcaattgcgattaaatttgaacctcaaatgatggctgagctggcgactaaaatggataaagagcaccgaccacttatagaagattttgataacaaagagataaaactgagctgtggtttaaatattattgaaatgaactcggttatatctgatgttgctttacgcttgttgaacttacttcgttccaagcaagatactgcaatcttaggagagcaggtgaaacgcgaacttatttatcgggttttacaagccggtggtagtgattttatccagaacctttcggctattatgagccgaagtggagtgatttatacgatttgtgaaattattcaaagagattattatcgtaacttaacggttcaggagttggctaaacaggcaggaatgagcgtttcgctttttcatcaagcttttaagaaagttaccaactattctccattacagtacatcaaaattactcgattacataaggctcgtgatctaatcctaaataaccaaatgggcgttgcagaagctgcctatgaggtaggatatgtgagtgcctcacagtttagtcgagagtttaagcggctgtttggagttccacctaaattatcaacaaactaa

SEQ ID NO: 43966 - DNA, 819 bp, Acinetobacter baumannii
atggaaaattttgaagttataaaagcactgtttctaggctttgttgaaggcttaactgaatttttacctatttcgagtactggtcatttaattttatttggtcatattatcgatttccattcagatggtggtcgtgtctttgaagtagtgatccagttaggtgctattctggcagtgtgttggttatatcgtcagaaaatcattaacttaatcaaaggtttttttagtggtgatgtcgagtcacgccattttgccattagtgtcttaattgcttttttcccggcagtgattattggcgttttagctgtagactttattaaaagtgttttatttagcccaattgtagttgcgattgctctgattgtcggcgcgcttattattttctgggttgaatctaaacaatttgaacataaaacggatgatgcgaccaagatcacgtttaaacaggcgcttttagttggtctggctcaatgtgttgcgatgattcctggaacctctcgttctggtgcgacaattgtaggcgggatgtttgcaggcttgtctcgtaaagctgcaacagagttttcgtttttccttgcaatgccgaccatgctaggtgcagcaacatttgacctaattaaaaatgctgatgtgttgacttcagacaatatggttaatattggagtgggttttgttgcggcatttattgctgctttattggttgtaaaagcactcgtactcttcgttgagcgtcatacattacgtgtatttgcgtggtatcgaattgtattaggtgtaattatcctaattgctgctatgttctttaacttatctgcttaa

SEQ ID NO: 43967 - DNA, 801 bp, Acinetobacter baumannii
atgaaaaataccaaaattaacgcacgtcatcttattatcgacctctttctttcttccgcttatcctcagctcagtatcaaacaaattttggttgcagctaaactttttaacttaagtgaaaatggtattcgagttgcgacaacacgcttgttaaatgaaggtatgatccagagcgtagaacgcggaatctatcaactttctccatctgcaaaagattgggcgaaagttattctcaatcgtaaaaatggaattaaacaaactaaagaatggcagcagcattatcttgccgtgtttacaggaaccttaggccgcatagaccgaacagcactaaaaaaacgggaacgtgcacttcgtcaatttggttttaaagagctggaaactggtatttacatccgcccagacaatttagcttatagctttgaaaaaacctgtgatgagcttgttttagcagggctagagaaagaagcaaaaatttgtattattcagcatttcgactcaacaacgcttaagcaaattttttctttatgggataccaaacaactcgaaaaaaattatgaaatgtatagccgagatattacgcactggcttgaaaattatgctcactcccctttaaacgatgcagcagtcaaggcacttcttttaggaagggaaacaattgccttactcatgaatgacccattattacccgcgccatttgtaaatgaatctgctcgtaatcaatttgctcaagatgtacagcaactagatgcaattggccagaaactttggaaaaaaatatatgaacaggaattaaatttatag

SEQ ID NO: 43968 - DNA, 993 bp, Acinetobacter baumannii
atgaatgcacaggtgagtgttaccgatctatttagcagagaagaaatacaagagcttacagaaccttcagatgcatatggcgcttgggccgttgctagcacatgggctgttattggaggaacatttgccagcttaattatgatgtgggattacttaccgagttgggggaaattattagcatgtatgcttgctctagctgttttagctggccgtcagttatgcctcgcaattttaatgcacgatgcatcccataaaagtttattcaaaaataagaaaataaatgatttcgttggagattggttatgtgctcgcccaatctggaacgacctacaaaaatatcgtgtacaccatgttcgtcatcacgccaaaacatctacaccggatgacccagatctttctttagttgcaggctttcctgtcagtaaaaaatctcttactcgtaaattcttacgcgacttaaccggtataacaggattaaagtttagcttaggccgtgtgttgatggaccttgatgtcatgaaatggactgtagccaatgatcaaatctggttagaccgtagtgataaaaatttcgttgactatgcaaagagtattgcaaaaaacagtacaggcgctattgcaaccaacctattactttatggtgttttaaaagcatgtggtcaacaacgtttttattggttatggcctttggcttatttgactccatttccattatttttaagaattcgttcaatggcagaacatgcaggtatgcaaaccagcaatactgctttaactaacactcgtaccacacgtgcaagttggattgcgagaagctttgtggcccctattcatgtcaattaccacatggaacatcatttaatggcgtctgttccatattttaaattaccgcgtatgcacaaaatattaagagaacgtgggcatgtgcccactccaccgagctattttgaagtaattcatacactttcatcaaaacaagagttaacaaattaa

SEQ ID NO: 43969 - DNA, 1035 bp, Acinetobacter baumannii
atgactccagaattacccggaacttatattaatttattagcagagatcgttaagcgcagaggtgtctcttgtgagcagtttttagagggtagtggagtaacaccggaacaattaaaaaaaccgtattggtatgttgagtttaataccttaaataacttacttgagcatgcgattcaactcactcatgagccagcattagcgggttatttggcattggaaatgaaagcttcttgttatggttctgttggtatggcagccatggtggctgcaaatcttggagaggctttaaaaatatttgaacaatttattggttcgcgttgtgatgcatttaaacccgagttaaagcaagagcaaaatgatgtttactggtctattcatcaacctttaaaaagctttcaattaagttcagatgcgactatttttttgttgttaggttttattcacatcgcaaaacatctaacaggattatctgctttaggtacagtgcaattgaatatgcccgaaccaataggtttttcaaaaataaaagataaattaggcgtaagttttttatttgaccaaaaacataatatttggatttttccaaaagaatatttaatgcagcctgtactcacggctgatcctatgctggcacctttactgaaagcacagtgtaaaaaagatattgataaattgaagttacgaagtgggtggaaagcagaaattagccaagtaataaaaaaattattgatcaatagtcagggggaaatattaaaagttaagcaagttgcccaaatgatgaatatgtcagaacgtagcctacagcggtatttagcaatagagaatacaagcttctcagcattagttgatttaactcgaaagcaatatgcacaagaacttttgcaaaatagtttaatgtcaattgaatctgtggcattaagtttaggctatgccgatacatcccatttcacccgcgcttttaaacgctggatgggagtgacaccgaagtattatcaaactcagttaaaactaaaaaatttagagatacgtgaataa

SEQ ID NO: 43970 - DNA, 699 bp, Acinetobacter baumannii
atgaatatcctgattgttcatgctcatccagaacctctgtcttttacaacttccctaaaaacgacagcacagcaaacctttaaaaaattgggccatcaagtagaaatttccgatttatatgcaatgcagtttaatcctgttgcctctaaggaagattttttagaactcaatcaacctgattattttaactatgcattagaacagcgaaatgccacaaaacaacaacttttggctactgatattcaagcagaaattgacaaagtaaaacgcgcagatctaattatcttgaactttccactttattggacttctgttccagcaattttaaaaggctggattgatcgtgtatttgtctctggacttttttatggtggtaagcggttttacaaccatggtggcatggcaggtaaaaaagcaatgctctgtttaacactcggtggtagaacacatatgtttggggaaaattctattcacggaccaattgaacattatctatcaccgattcaacgcggtactttggcttatactggctttgaagttcttcccccattcattgcctaccatgtaccttacattagccaagaagcgcgtgaaactattcttgaggactatgtcacgtatctcactcaccttgaccaacttgaacctttaaaatttcctaaacttgaagaatttgatgaaaagttatatcccctctaa

SEQ ID NO: 43971 - DNA, 1512 bp, Acinetobacter baumannii
atgaaattaaaacatctgagcactgcaatgattttagcaacgctgcctgcaactggggtttttgcagcagctttagatcgctctggacagtcaatgtctgcgttcttccaacctggtaattactttgaagcaggtatttctgttctagatcctgatgtagctggtaaagaagctggatctagtgccacacgtcgtgatattggcgatatggcgaatgactactacttcccaagtgctgcattaaaattacaaattaatgaccaattttctttcggtctactctacgatcaaccatttggagcagatgcagaatattcaggtaataacgtattcgtttcgaatccaggcagtgatactattttaagtcaaaaggcattaggtgacttagcaaccagctcaattcagaagttagttcaagcatctggatcagcatttacaccagctcttatagaggtgacgaaggttactggcggtgaccctacaaaaccaactcaaacagagattttaggtgcattacaacaagttgctgccggaggaaatacaactgtaggtgcaggactgacagcactacaaaaaacccaagctgctattaacgcagcaaataattatttaggtactggtggaactaaagttaaagttgatacacaaaacttatcttttgtatttggttatcaaccaactaaaaacttcaatttctacgcaggtcctgtattacaaacagttaaaggtaatgtaagtttacgaggtcaagcttatagtctttataatggttatgatgcaaatattaaagaaactacaggtgctggttggttagcaggtgctgcttatcagattcctgaaatcgcacttagagcatctgtaacttatcgttctgaaattgatcacaaagtaaatattgatgaaaatttatctatattaaatttccctggtcttacttcagtattggctggtttagacgttccagcatctaaacttcaagcaattaattcatctggtaaaactacaatcacaacaccacagtctgttaaccttgattttcagacaggtatcatggcggatacagttgcgtttgccaatgtacgctgggtgaattggaaagatttctcaattcaaccatataaatttggcaaagtctcagaagctgtaggtggtcttattgggcgtccaaatggcttcaacctagttgaatattctgatgaccaatggtctgtgaacgctggtgtaggccgtaaacttaatgataaatgggctggtaatgtttctgtaggttgggactctggtgcaggtaatcctgtaacaacattaggaccaacagaaggttactggaacgtaggtttaggtgttcaatatagccctactccacaaactttcatcgctggtggcgtaaaatacttctggttgggtgatgccaaagctcaaacaggcgcgcaagcaggtagcgatgaatatgttgcagacttctctgataacaatgctatcgcttacggtttaaaacttggttataaattctaa

SEQ ID NO: 43972 - DNA, 618 bp, Acinetobacter baumannii
atggaaatcgtatgcctagatcttgaaggagttttagttcctgaaatttggatcaatttcgcaaaaaaaacagggattaaagaactagaagcaacaactcgtgatattccggattatgatgttttaatgactcagcgtctgaatatcctaaaacaacacggtttaggcttaaaagacatccaagaagttattgccgagatggggccactaccaggtgcaaaagagtttgttgaatgggtgagcaatcattttcaactggtcattttgtcggatactttctatgagtttgctcatcctttaatgaagcaattaggctggccaacaattttctgtcataaattagagacagatgaaaatggtatgattaccgcttataaacttcgccaacctgaccaaaaacgtgagtcggttaaagcactacatggtttgaatttccgtgtgattgcagcaggtgattcatataatgatacaacgatgcttggtgaagccgaccatggtttcttgtttgatgcgcctgcaaatgttattgcggagtttccgcagtttcctgcaatcaatggttatgatgcattaaaagaagcaatccgttctgtttcacagcgcaatattcctgcttaa

SEQ ID NO: 43973 - DNA, 735 bp, Acinetobacter baumannii
atgaccgttattccgactattgatatcgttgatgctctcgcggctgaatatgcagctaaaagtccgcgcgagattctagaacttgcattaagtcaacaaggtgagatcgcaatttcgttctctggagcagaagatgtagtcttaattgatatggcttcacgtttaggtaaacctttccgtgtttttagtcttgatacaggccgtctacaccctgaaacttatcaatttattgaaactgttcgtaagcactacaatattaatatcgagatttgtttccctgatgcggaagctgtgcaaagcatggtgaatgaaaaaggcttatttagtttctttaaagatggacatcaagaatgctgtggcattcgaaaagttcaacctttacgtaagaaactagcgaccttagatggctggattacaggtcagcgtaaagatcagagccctggtacacgtactgaaattccagtggtacaagctgatgcaggcttctctggtccgggtaagcaacttattaagtataatccgcttgcgaactggtctagcgccgatgtgtggagttatatccgcatgatggaaattccatataaccctctacacgagcgtggttttgtttcgattggttgtgagccatgtacacgtccagtacttccaaatcaacatgaacgtgaaggtcgttggtggtgggaagaagcaacacaaaaagaatgtggcttacatgcaggtaacttgaaaaaatag

SEQ ID NO: 43974 - DNA, 1386 bp, Acinetobacter baumannii
atgcgtccattacaccctattgattttatttttctatcactagaaaaaagacaacaaccgatgcatgttggcggattgtttttatttgaaatacctgaaaatgcccctgaaactttcgttcatgatttagtagaagaaatacgccaatctaaaagtattcctgttccacccttcaataaccgtttaaatggtctattttgggatgaagatgaagagttcgatatcgaccaccattttcgccatattgccttgcctcatcctggtcgaattcgtgaattactggtttatatttcccagcagcacagctctttaattgatcgtgcaaaaccactttggacgtgtgacattattgaagggatcgaaggcaatcgtttcgcgatgtactttaagattcatcatgccatggttgatggtgttgcaggcatgcgcttaattgagaagtcgctgtcaaaaacaccacaagaaaaacatgtggttccactttggtgtgtagaaagtaaaagaacaaaacgcttaaaagtaccaaaaccaagcacaagtaagatcaaaagtattttaggtggtatcaaatcacagcttgaggtgacccctaaagtcatgcaggaattatcacaaaccatttttaaagaaatgggtaaaaatcctgattacgtctccacctttcaggctccggtttcaattttaaatcaacgtgtaagtgcttcacgtcggtttgcagcccaatcttttgaattaagccgtcttagaaaaatttctaaagcacttggtgtaacgatcaatgacgtcgtacttgctgtgtgttctggggcattacgtgaatatctgattagtcacaacagcctgcctaaaaagcctcttattgccatggttcctgcttccctacgcacagatgactctgacgtgagcaatcgtattaccatgattttggctaatttaggaacccataaagaccagcctctagagcggctcgagatcattcgtcgtagtatgcaaaattcaaagcaacgctttagccgcatgaccgcgaatgagattttaaactatagcgctgttgtttatggtccagctggacttaacatcatgtctgggatgcttcctaagcgtcaggcattcaatttagtgatttccaatgtacctggcccacgtgagccgctttattggaatggtgcgaaattagatgcactctaccctgcttctattgtcatggacgggcaagcgctcaatattacaatgacaagctatctggataagcttgaagtaggtttaacagcatgtcgaaatgctttacctaaaatgcaaaaccttttaacgcatcttgaagatgagattcaacggtttgaagaaattattggagagaaacagctgaaacatcattcagcgagttag

SEQ ID NO: 43975 - DNA, 174 bp, Acinetobacter baumannii
atgaatgtaagtgaaaacttaattagcaacggtcttaaacatgttttagaaagcacgccagtcaatagttgctatatgttgaatgaccaaggtaaagaagtaccaatcacaactgcaatgattcgttcagtatgtcatcagttacttaaccagtgccgcgcaattaaaaaataa

SEQ ID NO: 43976 - DNA, 1455 bp, Acinetobacter baumannii
atgtcagaagaactacttattaatgtcacacctatggagtgtcgggtggcattaatcgaaaatggaactgttaatgagctgtatgttgaacgtacagttaaacgtggacttgtcggcaatatctacaaaggtaaagttgtacgtgtgcttccgggtatgcaagcggcctttgttgatattggtttatccagaacggcctttttgcatattaatgatatggtttggccacgttcacagccaactccaaatgtgtttgaactacttcatccagggcagattcttaccgttcaggtgatgaaggatatgctcggtactaaaggcgctcgcctgagcacagatctttcaattccttctcgctatttagttcttatgccatatggtaaccatattggtgtttctcagcgcattgagtctgaagaagagcgtgatcggctacgtaatattattgagagcattcaggcggagcataatttacccggtagcgtaattgttcgtactgctgctgaaggggtagatgaagccgaaattgcacaagatatgtgctacctcagtaagttatgggaatatattcagcgtaagcaagttgatgtggcagtaccttccttaatttttgaagaactaccgctaccgcaacgaattatccgtgatctggcaagtgaagaaaccgcaaagatttatgtcgattcgagagagattcatggaaaactacgtgagtttgtagatgagtttgttccgaatatgcaaagtcgcctgattcattacccaggtgagcgtccattatttgatctttacaacgttgaagaagatatccaaaaagcgctgcaaacacgcgttgctttaaagtctggcggttatttaatgattgaccagactgaggcgatgaccacaatagatgtcaatacaggctcttatgtcggtggccgtagccttgaagacactgtctttaagaccaacatggaagcgactcaggtgattgcgcgtcagcttagactacgaaatctaggcggcattatcattattgattttattgacatgcaagaagcgattcatcgtgaagaagtgatgcgtcaatttgaaaaaatgcttgaacgtgatcatgccaagaccaaaatcacacaggtttctgaacttggtctggtagaaatgacacgtaaacgtacacgtgaatcattagaacacttgttatgtgaatcgtgtccaacgtgtcaggggcgtggttttgtcaaaactgcagagacagtgtgttacgaaatatttcgagagatattacgctacacccgtgcatttgagtctacgagtggctttactgtcgttgctcatccatccgtgattgaccgattattaacagcagaagcacctgcagtggcggatttagagcattttatcaacagagttattaaatttcaggtcgaaaatttatatacgcaagagcaatacgatatcattttaagttaa

SEQ ID NO: 43977 - DNA, 561 bp, Acinetobacter baumannii
atggcgcaattagttttagcttctagttctccgcgtcggagagagttgttgcaacaactgggcttaaattttgaaatctatagccctgatattgatgaatctgttcatgaaggtgagctggtacatcaatatgtagagcgtttagcgagagaaaaagcccaggctgtattaaacatttttccagattcagtgattattgcagcagatacgagtcttggtctggatagtcagattattggtaaacctgactcaaagcagcatgcctttgacatctggaaacaattatctggtcgttggcatgatgtattttccggaatttgtattgcaacacagcaacaaatcttaagtcaggtggtgcagacccaagttgagtttgcatctttaactacgcaagatatggaagattactgggccacaggagaacctgtagggaaggccggtgcatatgcaattcaaggaattgcttcacaatatattcccaaaattcaaggaagttatagtaatgtggtagggcttcctttgtacgaattttcacagttattcaaaagagtgaagacataa

SEQ ID NO: 43978 - DNA, 492 bp, Acinetobacter baumannii
atgccgatcgctaagttgaaacgtgagaagcgtaaagatccattatggggaattattctctctataatcgtggggtctgtcctcatgatctatccactatcttacgacatctcgggctggcgaccattgttcatgcttatgatcatgttgttttgggttgtttgccagccaacatggtgtggggtgtggttcgcatttggaatggggatttttacagatctattgcttgatgcacctttaggattaaatgcactgagttttgttattgtcacgtttattacccgatttttaatacgcgaacgccgtattttgacttttggtaatttatggacaattgctacattggtgattattgctcacttagcgtttatgtgggtgactcaaacgatggggggcattcatttttcgattgctcgacattggcaaccattgatgacaagtatcttaacctggcctgttgtctattattgtttagcaaaatggcgcaattag

SEQ ID NO: 43979 - DNA, 858 bp, Acinetobacter baumannii
gtgcaaccgaatattttttcaagacagccgccatctttccgctcgttcattattgcggtcattacatgcttggtggtgctgttctttgattggcgcatgccttatgtaattcagccagcaagggatgtcttgtacgctgcatataatccaatttatgcacttgcaagttatccggtactgtcgagagaatggctgaatcaacaaactaaatctgaaacacaactgcgccgtgaaaacactgcaatgcaggctgagctattacaggctcaggtccgcttgcagaagctgtctgaattatctgctgaaaatacccgcttacgtggtttactcgatacaccattaattattgatggccgtatggaaattgcggaagtgattgggacagatgccgatccgcttcgtcatattatcattatcaaccgtggtgcaatggatcatcttaaagttggtcaaacggttttagatgataaagggattatggggcaaattatcaatgtatatcctcatagttcacgtgtgatgctgctttctgacaaagagcattctctatctgttcgtttagagcgtacagggatgcgtgcaattgtctcgggtactggtgatttaggtcgtttgaaaatggaatatgtgccaacgagtgcaaatattcaggtcggcgataaagtattaagttcaggcttaggtgagcattttccagcaggttatgccgtgggtacggtggctaaaatccgtcgccataattcaggtgagtttgctgaaattgatgttacaccagcagcacaattagcaactggacatcatgttgttgtacttttctctgactcattagcgaaggagcaaccatatgccgatcgctaa

SEQ ID NO: 43980 - DNA, 1041 bp, Acinetobacter baumannii
gtgattctaaaacgactaattggcttgttttcgccggatctagccattgatttaggtacagcaaatacacttatttatgcaccaggccgcggcattatattaaatgaaccaacagttgtggcaattcgtcacagtggttcacaaaaaattgttgctgctgtagggctagatgctaagcaaatgctaggccgtacacctgcgaatatttctgcaattcgtccaatgaaagacggtgtaattgcagattttgaagtgactgaaaccatgttgaatcagtttattggtaaagttcacgaaaaacgtttgttcccacctgcacctcgtgtagttgtatgtgtaccatgtaaatcaactttggtcgagcgccgtgcaattcgcgaagccgtatttaatgcgggtgctcgtgatgtacgcctaattgaagagccaatggctgctgcaattggtgctggcatgccagttgaacaagcatgtggttctatggttgtggatgttggtggtggtacaactgaaattgcaattatttcattgcaaggttgtgtctatgctgattctttacgtattggtggcgatgtatttgatgagcaaattatcaattatgttcgtaaagctcacggttgcgtaattggtgaaaccacagctgaaattattaaaaaagaagttggtatggctgtttctgatggtacgacattagaaattgaagtacgtggccgtaaccttgcagaaggtgtacctcgtgcaattaccgtaacttctgacgaaattactcaagcaatttctgacccgttacaaagtattgtaagcgcggtgaaatctgcacttgaacaaactcctcctgaactttcttctgatattgctgagcgcggtattgtgttgacaggtggtggggcgttacttcgtaaccttgataaattattagctcaagaaactggtttgccagttgttgttgctgaagaccctcttacttgtgtaacccgtggtggtggtaaagtattggagttcttcgacaacccgaaccatgacatgcttttcgtcggttaa

SEQ ID NO: 43981 - DNA, 315 bp, Acinetobacter baumannii
atgtctacatcggatgcacagcattcagcagatttaaatgcacaaacagtttcagcaatcgccaatcttgctcgattgtcgctcaatgatacgcaatctgctgaatatgctcaaagtctaaataaaattttaggcatgatggaaaccttaaaaggcattgatacggaaggcgtagaacctttaaagagtccttttgacaatcctcaacctttacgtgctgatgtggtaactgaaagcaatcatcgggacgaataccaagcagttgcacctgcaactcaagatggtttgtatcttgttcctcgcgtgattgaataa

SEQ ID NO: 43982 - DNA, 1479 bp, Acinetobacter baumannii
atgactgatttacatcgcttatcaattcgcgaacttgctgaaggcttaagccaagcgaagttttcatctcgcgaattgactgaacattatttaaaacgtattgctaaaatcgacccgcaagttaagagctatgtgacggttacttcagaacaggcacttcgcgaagccgatgctgccgatgctgcattaaaagctggcaatgcaactgctttaacgggtattcctcttgcccacaaagacatcttttgtaccaaaggtattaaaaccactgctggttcaaaaatgctcgataacttcatttcaccttacgatgcaaccgttgttgaaaaaactaaagcagctggtctggttactttaggtaaagtgaacatggatgagtttgcgatgggctcaacttctgagagttcatatgtcggtgcaacgagtaatccttgggcacttgaccatgttcctggcggttcatctggtggttctgctgcagctgtagcagctgatttagcaccatttgctacaggtaccgatacaggtggctcaattcgccaacctgcttctttctgtggtttaacaggcttaaaaccaacttatggtcgtgtatctcgtttcgggatcattgcttatgcatcatcattagaccaagcaggtccaatggcacgctctgctgaagactgtgcttacctaatgaatgtaattgcaggtcacgatgctaaagactcaacttcggttaaaaaagaagtcgatgattacgttgcaaacttaaacggcacatctgtaaaaggcttacgcattggtattcctaaacaatactttaacgttgcaggtttagatgcggacgtaaaagcacgtgttgaagagtctttgaaaaagcttgaagaaatgggcgcaacgcttgttgaaatcgacctcaacatgactgaagcttatgtaccaacgtattacctcatcgcgccagcggaagcatcttctaacttgtcacgttatgacggtgttcgctacggttaccgctgtgaaaacccagctgacttgatggatctttacaaacgttcgcgttcagaaggtttcggtccagaaattcaacgccgtattttaattggtacatacgcgctttctgcgggttattacgatgcttactatgtaaaagcacaaaaagtacgtcgtttaattcaacaagacttcttaaaagcttttgaaaatgtagatgtaattgcagcacctgctgcaccaacaactgcctacaaaatcggtgcatctttagaccctgttgaaatgtacttaggtgatatctataccatcgcagtgaacttagcaggcttaccagcgattaatgctcctgttggttttgataaagacaacttaccagtaggtttacagttaatcggtaattactggtcagaatcacaattgttgtcgattgttcaccaataccaacaaaacactgactggcacaccaaacgtgcggcaattgctgaggagaatgcataa

SEQ ID NO: 43983 - DNA, 1470 bp, Acinetobacter baumannii
atggctgaagctcaaaagttgaaattgattgacggttgggaagtcgttattggtattgagattcatactcagcttgcaaccaattctaaaattttctcaggttcatcaactgaatttggtcaagacccaaatacacaagcgagccttgtagacttggcgatgccgggtgtattgccggttttaaatgaaaaagtggttgaactcgcaattcgttttggcttagggattgatgcttacatcgaccaagcttcagtatttgcacgtaaaaactacttctatcctgactctccaaaaggctatcaaattagccaaatggataacccgattgtgggcttgggccatatcgatattcaacttgaagatggtacgactaaacgcattggcgtaactcgtgctcaccttgaagaagatgcaggtaagtctgtgcacgatcaatttgaaggtatgtctggcattgacttaaaccgtgctggtacgcctttgcttgaaatcgtttctgaaccagacatgcgttcggttgaagaagcagttgcctacatcaaagcaattcacacactagtacgttggttaggtatttctgacggtaacatggctgaaggttcattccgtgcggactgtaacgtgtctttacgtcgtccgggacagccattcggtacacgctgtgaacttaaaaacctcaactcattccgtttcattgagcaagcgatcaatgtggaaattgaacgccaaatggaaattttggaatggggcggcgaaattgaccaagaaactcgtttgttcgatccaaataaaatggaaacgcgttctatgcgttctaaagaagaagcgaatgactaccgctacttccctgatccagacttgttaccagtaattattccagatgagcaaattgaggccatcaaggcaactatgcctgagttgccagcagcacgccgtgcacgctttattgcagactttggcgtaactgaatacgacgcacacgtacttacgctctcacgcgaaatggcggacttctatgaagctgttgttgctgcggctggtggtgcgaagcaaggtaaaattgctgcaaactgggtaatgggtgaattctctggtgctttaaataaagcgggcttagagttaacagactcacctgtttctgctgaacagcttggcggcatgattgcacgtattgttgacaacaccattagcggtaaaattgctaaacaagtctttggctttatgtgggaatcggaaggtaaatctgccgatgacattattgcggaaaaaggcttaaagcaagaaaccgacactggcgcaattgaagcaatcattaaagatgtacttgcagccaatgaaaaaatggttgaagaatacaagtctggtaaagagaaagcctttaacggacttgttggtcaagtcatgaaagcttctaagggtaaagctaaccctgctcaagtaaatgaattaatgaaaaaattgatcggttaa

SEQ ID NO: 43984 - DNA, 579 bp, Acinetobacter baumannii
atgtctaaaaagattttaatgttggtcggtgactatgcagaagactatgaaactatggttcctttccagttcttaactggtttaggttataccgtgcatgctgtttgcccaaataaaaaaaacggcgaacatattgcaaccgctattcatgattttgaaggcgaacaaacttatagcgaaaaacgtggccacaacttcgcgattaactatgattttgatgccattaataccgaagactatgtaggtctagttattccgggtggccgtgcaccagagtatttacgcatgaatgaacgtgttgtcgaaattgtacgtgaattcgatagagtgaaaaaaccaattgcagccgtatgccacggtgctcagttactcgctgcggcagatgtgttaaaagaccgcctctgctcggcttatccagcatgtgcagccgaagtaaaattggcaggtggacaatacgcagatattgctgtgactgaagcagttacagatggtcatttggtgactgctccggcttggcctgcacatccagcttggttagcacaatttgtgaaagttttaggcgctaagattagtatctaa

SEQ ID NO: 43985 - DNA, 519 bp, Acinetobacter baumannii
atgtcacgtcatctttatgctattgctcgccgtaagttttcacatctgagccgttcaatatgtgtggcggcgactgtactgggcgcaacacaaattgcgatggctggtccaacagttgatcagctcagtgattgtttagttaaagcaacaacagcttcagataaaactacggtgctccaatggacatttacagctttagcggctcatccagatttaaaagcatttagtaatgtaacgcctgagcaaaaagaccagttagatcaaaaactggctcaggttttacagcggataattgtagagcaatgttctgctcagaccaaagctgtaattcaggctgaaggtgtgaaggcagttggggaggctttccaacagttaggtcaaagtgcgggtgaagatattgttaaagacccagccgttaaacagcagttgcagggcacattacgctatatcgatttaaataaattggtgacaacgtttttaacaccagaaatttggaataaattaggaattacaagataa

SEQ ID NO: 43986 - DNA, 1068 bp, Acinetobacter baumannii
atgaaaaatatactttcaatttgttgtttggcagtgataagttcttatagtcttgctcaagatataaaaggtatttcattttctcatcaagagtgggaaatctcttgcagtaatacgggcacctgtaaggccgcaggatatcaaaacgaagaaaatggtgataatcctgcttcaattttattaacacgtaaagcaggcccaaaacaacctgtacagattgaatttgctttgtccgactatgaacaaagcatacctgcaaaccagcttaaaaatatccatttttatataaatggcaaagatttaggtatggtgggtgtagatggtactgagctgccaattatgggtaagctaaacagctcgcaagtcaatgctctactacagcagtcgaaacagaagactgaaatagtatttaaaaatgcgcagcataaatggaaaatttccgatgctggaatgactgccgtattattaaagatggatgattttcagaagcgtatagggactattggtgctttggtcaaaaagggcagtgccaatgaaaatcaagtgcttatgcctgaaccaaaactagttgtgaagcgtattaagacttcaaccaaaccttatttaactttacagcctaaaaataaacagtaccaagcaatacaccgtagtttgatggctgctaaaccgaatccgaaagaagacggcttttgtgaaggtatttatggtggtaacagtgatggagtcgaaccacagaaaattgagctatataaactaaccaataagaaagttctggcgactacattgtgttggagaggggcttataacgaagggtatggggcatgggtactcgatgggtctttaaacggtaaggccgcgtttgtaactgagtccgcctcagattttgatagcggtattatgagtagtgctcaaaagggacgaggcattggagattgctgggcaagtgaagaatgggtatgggacggcaagagttttgtgcatactaaggatatgtggacgggtatgtgtaaaggcttggcagcaggtggagtgtgggagcttgatcgcattgaatcagtcataaagtaa

SEQ ID NO: 43987 - DNA, 750 bp, Acinetobacter baumannii
atgaaaaaactaaattttttattatgggcaacattagtcagcctaaattcaactgcttatgcagaagtaaaaagctttactcctcatttcccaaaattttatagctctgctacaacccgcaaagcagacaatcaattctatgctcttggagaggcaaaatttttaaacggcgttgcagtccctttttatggcgttacgacacaaaacccaatagaagatggtttacttaaaagttttgaaaaatgcacgcctaaaagctgtagttttaattttaaacttgatgctcaacatgccaagcaattaaagcttcttgcattacctgaagtaggtgtagtacttgttccacgtaactggcaagatattcaagcaaatgcaggcgcaaatggaactggttttgctctaatcatgagtccagatcaaaagcaagcgataaagctttatgactcttctttttgcgttggatgtggattacccaatgcaacgctttattttcctgaactattaaaagaaagtcttgaaaatgaatatggtggttttaaagaccctaaaaaccttatcaatattgttcatccctctaaaaaagtcgctttttttagctaccaaattcctcaagtgaacaataaaacccatggtattgccaagtatgatgatgaagacacttttaactataaagagattcaagtcaccttagataagtcgcagcagtttctagttggccctatccttaatttttataacgcaacccattaa

SEQ ID NO: 43988 - DNA, 2049 bp, Acinetobacter baumannii
ttgaaatctattttacttaaaagtgctcttacgattgcacttatgtcttctgctaatttggtacatgcggaattagtaacaacttctcaaatcaaaaaaatatcaggtatagatcaacaatatattgattcttctattagtgaaaagaacgatttttatgctcatgtaaatggtatttggttaaaaaatactgaaatcccagctgataaagcaaattggggggcttttaatcagctccgtgagttatcaatcagtcaagtacatgggattgtagaagagctatctagaaaaaaatgggcggatggtagtttagaacagaaaatagctactttatatgcgagctttatggatgaaaaaggtattgaaaagcaaggtattatccccctacaagctgagctaaatcaaattgatagcttgaaaaataagaaacaaatagcagttttaatggcccattttgctcgtattaatgttaatagcccgattggcttaggcattgaacaggatatgaaaaaatctaccgaaatggtggccggattggagcaaagtggtttgggtctacctgaccgcgattattatttaaaagatgataaaaaatttattgaaactcgtgcacagtatttaaagtacattgaaaaaactttatcacttgcaggagattcacaagccgcgcaacatgctcaggaaatcttaaaacttgaaactcagttagcacgaatacagtggagcaatgtacaaaaccgtgatcttgcaaaacgctacaataaatacaaactcgcagatttgtataaattgacccccgattttgattggcaaggttatctaactgcaactgaattaaaaggaaaaattgatactattcaggtaaatcagccagattactttcagggcttaaatacaattattcaagatacacctttagatatatggaaagcttattttaaattgcatttgatcaataatttttctccattactaaatagcgcttttgtagataataaatttgatttttataacaagacacttcgagatattactgaacaagaagcacgttggaagcgtggtgtacagcttgttgataaggtgctgggagatggtatcggcaaactttatgttgaaaaatactttcccgctgagaaaaaacaacagatggaattattggttcaaaatctaattcgtgcttatgaccaaagcattacagaattggactggatgagtcctgcaacgaaaatacaagctcgtaaaaagctttctcacatgtcaataaaaatcgggtatccaaaaaagtggcgtgattattctgacctgcacatcgctaaaaatgatttagttgggaatataattcgcgcaagtgaatttagataccaatatgaacttaataaattgggtaagccggttgatcgtgatgaatggtatatgaaaccacaaacggtgaatgcctattacaatccatcattgaatgaaattgtatttccagcagcgatattacaaccacctttttttaatataaacgcagacgatgcagtaaattatggtggtataggtgctgtgattggccatgaaattagtcatggctttgatgatcagggtagccagtttgatgaattgggcaatatgagaaactggtggaatgctgaagatcaccagcattttaaagctaaaacacaagcgttgattgaacaatataaccgttatgaaccgattgctggttatcatgttaatggtgaattgacattaggtgaaaatattgcagataactctgggttagcaattgcctataaggcctatcaaattgcattaggcggtaagcccgcccctgtaattgatggacaaactggggagcaacgtttttatatggggtgggctcaagtttggcgtgcgaaaacccgcgaagctcaagcgattatctatttaaaaactgatcctcactctcctgataaagtacgtggtaatggagctttaatgaatcaaaaaccattttatgaggcttttaaaataaacgaagatgatcagatgtatttaccaccagagaaacgggtaactatttggtaa

SEQ ID NO: 43989 - DNA, 885 bp, Acinetobacter baumannii
atgaaaattatatttatccatgggatgaatcagcagaattacacagcacatcgtttaaaagagcactggctaaaagtatttaaactgggcttaaaacaattgcactgtagagttaatttaagagatctacatatacatatgccattttatggcgatttaatgacgaagtatcaattatccaatcaacttgatcttaatacgttacttccaaaaacttttaattttcatttacccatccatttacatcatcagccatcaacccccaaggaacatactccttttataccccatctccctctttcacccgatcaaccagcacaaagcttatcagagcgtttatatttaacttcacagatggtgaaagatcgcgttcttaaggaaatggtggttcttttaaataattttccaaaattacatgaaagtttaattcagcaattcttgattgaaacttatatgtacttatctaatcctgattttatgtatgaggttcatcaaagaattttaaaacaaatgcatgatgatgaagattgtattgtagtcgcccactctttgggttccgtgattgcctatcatttattatcagatccttcttatcagttttcagtacagcgctttattaccttagcatcccctctttctttccgcgtcatacaaagcaaacttcccactcccattgaacgtcctaaatgtttaaagggcgactggtataacttttattctaaagatgactttttaaccgcttttccattaagtgaagcaccttttaattttactccccccattattaatcaagagatttttacttttgccaaccaacctcatgaaattgtcggctacttacaacatcatgctgtggtaaaaacaattattgagcctttccaataa

SEQ ID NO: 43990 - DNA, 1419 bp, Acinetobacter baumannii
atgcagccatctgacaaacaactagatgctcagcatcagaacagtactgcacctttaaaaagagccatgagtacccgccaccttgtcatgttatcgctaggtggagcaatcggtactggtttatttttgggttcaggggaagtcatttcacaaactggacctattggcgcaattattgcctatattcttgggggtgcaattgcttacatggtcatgctctgtttaggcgagctggctgtacatatgcccgtttcgggttctttcggtgcatacgctcgaaagtacattagtccaagtacaggctacatgatttcatggatgtactggctaacatggacagcaacgctaggaaccgagtttaccgccgctgctctacttatgcaggaatggtttccacaaatttcaatgtggatctggacacttatttttgcagtaactattttcgggttaaatatcagctcaacccgagtatttgccgagtcagagttctggctagcgctagttaaggtcattaccgtcattgcttttattgtgcttggattattagcaatttttggtttaattcctttccacggcgctcaaactgctccattgtttagtaatttaaccgcccaaggttggttcccacacggttttcttcctattttcaccactatgctcattgttaactttgctttctctggaacagagttaattggtgtagctgctggcgaaactaaagatcctgctcagaatgtccctaaagcgattaatgctgcaatctggcgtcttctgattttctttgtgggcactattattgtaattagtgcattacttcctttccaacttgctggtttaggtggtgataacgtaagtaatagtcctttcgttaccgtatttaattacatcggtattccatatgcagatgacatcatccgttttgttattattactgcactactctcagccgcaaactcgggattatatgcagcttcacgtatgatgtggtctttatcggagcaaaaactccttccgggtgtatttgcaacactttcaaaaagcggaacacctattgttgctttagttgtaacgatgttcggcgcaattccaggcttattatcagagcaatttgctcctgaaaccatctttaaaaacttgttaggtgttgcagcttttaccatggttattgtctggatgagtatttgtttaagccagttcaatttccgtcgtcaatggtaccgttccgggcatacaattagcgatttaaaatatgcagcaccgttattccctatcgttccaattttaggttttcttttctgctttattacctgtttaagtatggcagcagatcctgaaatgcgtgctggctttataggttgtttaatttttactgccttgtgctatctcagctactttattttctatcgaaataaagcttaa

SEQ ID NO: 43991 - DNA, 1509 bp, Acinetobacter baumannii
atgaaagttcgtactcgtattgcaccttctcctaccggtttcccacatgttggtactgcctacatcgccctattcaatatgtgttttgcgaaacagcatggcggggaattcattctaagaatcgaagatacagaccagcttcgctctacgccagaatctgaaaaaatgattttagattctctacgctggttaggcttaaattggtctgaaggtccggatgtaggtggtcctcatgctccttaccgccaatcagagcgcatgggaatttataagcaatacgcgttagaacttgttgaaaaaggtcatgctttttattgttttgctacagcagaagaacttgaccaaatgcgtgccgagcagcaagctcgtggcgaaacaccaaaatacgatggtcgtggtttaaagctgtctcaagaagaagtagctcgacgtcttgaagcgggtgaacctcatgttatccgtatgaaagtgcctgaagaaggcgtgtgtaaatttaacgacttactccgtggggaagttgaaattccttgggcacaagtcgatatgcaagtgcttcttaaaacagatggtttaccaacctaccatttagctaacgttgttgatgaccatttaatggaaatcacgcatgtattgcgtggagaagaatggcttccatctgcaccgaagcatcaattgctttaccaatactttggttgggaaatgccaacgctttgccatatgccattgcttcgtaatccggataaatcgaagttatctaaacgtaaaaacccgacctcaattaactactaccgtgatatcggcgttttaccagaagccttactcaactatttaggccgtatgggttggtcaatgccggatgaaagagaagttttcacattacaagacatgatggataactttgatattcaacgcgtatcactaggtggaccaatttttgacgttgaaaaactcaattggttaaatggtcaatggattaaagggttaaccccaggacaactattagaccgtttattgacatggaaaagtgatcgcagcactttagaagacattgctgccgctattcaaccacgtattaatttactttctgaagctgtaaattgggctggtttctactttaaccatatgccacaaattacggctgaaatgtttgaaagtaaaaaattgactcaagagcaagttcgtcaaagtttacaattcgcaatttggcgtcttgaaagtcagtttacttggaataacgacacagttagtcaaactttaatggatttggcaaatcagatgggcattaaattacgtgacttcatgccaacgttctttattgcaattgctggctcaacaagttcaacaccagttatgcagtcaatggttacgcttggccctgacttaacctttgctcgcttacgacatgcgctagaaattgtaggtgcaccgagtaaaaaagaggtaaaaaactgggaaaagcttaatgaaagtttaaaattgccgaaaaatgaagcaactagcgaagcttaa

SEQ ID NO: 43992 - DNA, 300 bp, Acinetobacter baumannii
atgaaaattcattatggaaaagctttaagcttgggtttggtgcttagttttgcatcgcaactatctacagcagccgtactgaaagatacaccaagtaaaagtctttcagataaacagtcttcacttattgaaaaagctttagatcagcaaaaacgtaacactattgtacttccatcaacagatgatgagttaaaagtacttaatactatccgtgttacaccaactcaaaactttcttgcagcacagcatgaacgtttttcacgttttgttcaggcaatcttccagccacacacttcttaa

SEQ ID NO: 43993 - DNA, 1002 bp, Acinetobacter baumannii
atgaaaagaatagcaagaattgcagtcgctacatatatggggttggcagtaagtgctgtgcaggcggcgactacatttttaaatgtttcttatgacccaactcgagagttttatcaggaatataatcaggcatttggtaagttctggaaacaacgtaccggacaggatgtggattttaaacaatcccatgggggctcaggaaaacaggctcgcgctgtagcaactggtcttgaggcagatgtggtgaccttagccttagccaatgatattgatgaaattgtaaaagcaggctttatccagccaaactggcaaaaagaattccctaataattctgcaccgtatacctctacagttgtgtttttagtaagaaaaggcaatccaaaaaatattcgtgattggaatgatttaactaaacctggtgttgaaattattacgcctaatccaaaaacgggtggggcaccgcgttggatttatctttctgcatggggatatgctttaaagcagccgggtggaaatgacgctaaagccaaagagctggttaaaaaactttatcacaacgttaaggtgttagattcgggagcgcgaggctcgcttactacatttgctgagcgtggaattggagatgttctactttcttgggaaaatgaagcactattggcaacgaaaggtctcgataaagataaatatgaaattgtttacccatcaatttcaattttggcagaaccatctgttgctattgttgacaaaacagtcgacaaagacggtaaccgtactttggcaaaaggttatctcaactttttatactcacctttaggtcaagagttggctgctaaacactatttccgtcctcgcaatcctcaagttgctgctaaatatgcagcacaattcccaaaaattaaattatttacgatcaatgatgtttttggcggttgggcaaaagcccagaaaacccattttgccaatggagccatctttgatcagatttatgatggaaagcagtag

SEQ ID NO: 43994 - DNA, 924 bp, Acinetobacter baumannii
atgtcgcatatttctgtcttactttttgagaccgttgaaagcttattggcagatcgcacaactggggtgtatatcgatgcaacctttggacgaggtgggcatacgcgcttgttattgtcgaaactcgatgaaaacgcccgagtatatgcttttgataaagaccctcaagctctggaagttgcggctgctttagcacaagaagatccaagatttaccattattcatgcaagttttgctgatattaaggaaaaaatgcaggaaattggggtgcaaagtgtcgatggaattatggcagacttaggtgtgtcctctcctcaactcgaccaggctgaacgcggctttagttttatgcaagatggcccgttagatatgcgcatggataactctaaaggattgactgctgccgaatggttacttgaggtagaagaggaagatttggcaaatatcatttatcaatatggtgaagaaagatatagtcgccgtattgctagagcaattaaacaggccggaaaattggatactacggcgcaattggctgaaatagtaaaaacagcccatccaaaatgggaaaagcataaacatccggcgacacgtacgtttcaggcaatccgtattgctattaacaaagaactagatgatattgaagtatttttaccgcaagctgtagacttgcttaaaccaaaagggcgtttgtctgtgatcagcttccattcgcttgaagatcggttgatcaaacagtttattcaaaaagaatcaactctagcagaagattctggttgggggatgcctcaacagcaggttgatacgagaagattaaagaaaatttcacgggttcgtgcgagtgaagaagaagtaaaagcgaatccacgttcacgtagtgcatggcttcgggttgctgaacgcttggaacaaaaaggcgcgtaa

SEQ ID NO: 43995 - DNA, 333 bp, Acinetobacter baumannii
atgaaaagcagtgatgaaatcgaaaccacagaaaataaagtggtcaaaaaagttgtggtatatgcagtcatggtggcattggtttttatcagtgccatgatggtggtatttcaagtatttgaataccgtcatgattatagagagttaagctcttatatgcgtgaacgtgatgacctcaatgctgaatgggggcgtttattgattgagcaacaaacatttggtgcgactgctcaaattggtacacgtgctgtgacacaattacgaatgttttcgccacctgctgcagaaacggtggtaatttctttaccgatgacctcagagcaaaataagtaa

SEQ ID NO: 43996 - DNA, 1833 bp, Acinetobacter baumannii
atggtagataagcgaacaaagcaaacacgaaaaaaacagcagtctatttcggaaaaaccaagtcttgcctttgatatgtggcggttttatctgctctgggcggtagtgctactgtgttttgtggtattaattgcacgtgcattttatgttcaagtcattaataaagactttttgcaaaataaggccaatgccaatattttgcgtactgaacgtatagaggctatgcgtggagtgattagtgatcgccacggtgtacctttagcgattagtagtccaatcatgaaaatcgtgattgatccgcgtgattattttgagaccaagcatttatatgatcaaattacggctgaactaaaacaagatccaaacaaccgtaaattaaaacgccaattgccagataaaaatttaaatcttgatgaacttgccgacgtggtgggtgttgatcgtgctgatcttaaaaaacagatgaatgcgcgtccgcgttcccgctatctggttttgaaaaaagaagtacctcctcagcaagctgacctcattatgaaaggtaatttccaaggggtgtatgcagaaaaaacttataaacgttattacccgcaacctcagccaaatgcccaaattattggtttgaccaatagtgaaggtcaaggtatcgaaggcttggaaatgcagttgaataagcaactgtcaggtgtagacggtgagcaaaaaattattcgcgataagcgtggtaaccgtttaaaagtttctgaggtaattcgtgagggtgaaccaggtgaaaatatcactttaagtatcgactcacgtttgcagtacattatgtaccgtgaattaacagctgcaggtgtggctaacaatgcgcgttcagcaacagcaattgcagttgatgttaaaacgggtgaaattctggcaatgaccagttggccatcttataacccgaatgataagaatggcttatcaaataaagatgctatgcgtaaccgtggtgcgatcgatatgttcgagccaggttcaaccatgaaaccttttactatttctgcagctttagaaactggtcaatatacgccaaatacgattgtaaatacctctcctggctcaatgcgtttaggctggcatactattcgtgatacccataactatggggctttgaccgtaagtggtgtcattattaagtcttcaaacgtgggttctgcaaaaattgcattatcacttccgaaagaaactttgccgagcttctttaatcgtgttggttttggtaagcgttctgcagtaaggttccctggggaaagttcaggtctggttttacctgttaataaattaaactcttctcaaatcgggactatggcatatggttatggcttaaacgcgacaatccttcaattggctcaaggttatgccatgcttgcaaatcatggtgtcaaaatgccattaagcttgcataaactagatcagccacctaaaggtgagcaagttttaaatccgaaaattgccgatcaagttttgttaatgcttgagcaagtgactatgccgggtggtactgcaaaacaagccaatattcctggttatagggtaggtggtaaaacaggtaccgcacataaattgcgtgcagatggtaaaggatattcaaataatgagtatcgtgccttatttgcgggcgtcgcaccaattagtgatccacgtttagccgttattgtagtggtggaaaacccacaaggtcgctattacggtggtttggttgccgctccagtttttgctcgtattatgcaagagtcgttgcgcttaatgaatgtgccgcttgataagccacttaatactccagaaaatcctattcgcaggtaa

SEQ ID NO: 43997 - DNA, 1500 bp, Acinetobacter baumannii
atgactgtttcttttcaagaaattcatccaatcgaaattgatgctcaatggcctcaacagccatttcacggctttagtttagatagtcgtaaagttgaaacgggccaaatttttattgctttgacaagttatagccagcctgaaaaaacgcgtacatttgctgaagcggctttagcaaatggagcgttggctgtcattagcgaaaccgaattaggtgtagcaaatgaatgggtatgtcctgatgtgcgtcagcgcatgggagagtggcaaaaacgttatttgcaacaagctgatgtagtaaaacctctacgggttattgctgtaacaggaacaaatggtaaaacaacaatttctcgtttaattgctgagttaattagttcacaacagcagcgctgtgcagtgatggggacaacagggaatggtattttaccgaacttaacgccttctacgcatactactctcgacgctctacagttacaaaatgcgctacatgactatgctaaacaggaagcaacttttgcttctttagaagcaagttcacatggtcttgaacaagggcgattaaatggttgcgatattgaaattgctgtttatagcaacttaagtcgtgaccatctggattatcacggcactttagaagcttatgcagaagcgaaggcgcgtttatttcagtttaattcgttaaaagtcgctgttattaatttagatgatgcgcatgctgacttgatgattaagtctgcccaaaataatccagcacaacctaaaattttgacttactcactaactcaaaatacagctgattattacattaccgatttaagctatagcttggcgggtgcaacttttaatttagtaagtcagcaaggttcatttgcggtagaaagcccattattaggtcatttcaatgttgaaaatttaattgccgcactcatcgctgctgagcaagctggtttcgatttacaggcattggttaattttgttcctaaactaattggtgcaccaggccgaatgcaagttattcgtgatgatgagcgattatttgtagtggattatgcgcataccccagatgcattgattcaagtgcttaaaacattaaagcgtcatgtttcgaatcagctttgggcggtgtttggatgtggtggtgaccgtgaccgtggtaagcgtccactcatgactcaagcagctttggatggcgcaaatcctgttattctgacttcagataatccaagaacagaagaccctgaacaaatttttgctgacatgaagcaaggaatcgatttttcagggcatcgtatgcatgaaattcatgaccgccgtgaagcaattaaatttgttgcagagcaagctcaagctggtgacattgtagtgattgccggtaaaggacatgaaaattatcaagaaattaatggtgtgcgtcactggtttgatgatgtggttgaagtgcgttccgcgattgatgcccaacatcatacggtagatgctgcttaccctgcacaatag

SEQ ID NO: 43998 - DNA, 1401 bp, Acinetobacter baumannii
atgcatacttcaaccaccagtaccgtgcctttggaaccgtggacagctcaacaattacaacaggcaacacagggttactggcataaagaccagatccctcaaactgaaattaaacgtattttgactgactcgcgtcatgcagaaagtggggatgcctttttagcactaaaaggtgaacgtttcgacgcgcataattttgtcgcgcaagtggctgcaaatggttgccaagtcgctattgtcgagcggcctatagatgcagaaattgctcagcttgtagttgccgatacccgtttggctttagggcagcttggtgcgtatcgtcgtgaacaaaatgctcaattgaaagtaattgctttaacgggcagtagtggtaaaaccaccaccaaagaaatgctaggaagtattttgtctcgtttagcacctacattgattacccgaggtaatttaaataatgaccttggtgtgccgatgatgttgcttgagcttcgaaaggaacatcaatatgcggtgatggaacttggtgcaaatcatcaaggtgaaattgattacacatcaaaacttgttcaaccgcatgttgctggcattttaaatattggaactgctcatttgggtgagttcggcgggcgtgatggcatttgccgcgctaaatcagaaatctatcgtcatattttacctcagggcgttgctattgtgccgcaacaagatgactttaccgctgagattcgtgaagcagccaaaagccatcaaatcatgagctttggtgctggtggtgatgtctttgctacagagattgaattgttgccacaatctgccaatttccagttacatacgcctcaaggttcaagttttgtaagactgccgtttgcgggtgagcacaatgtgcaaaacgcaactgcagcagtagcatttgctttggcgttaggtgttagcttggaagatatcgtaaaaggtctagagcaagcacaaggtgcaaaaggtcgtttgaattttattcaaaaagcgcctcatttatttattgatgatacttataacgccaatccaacatctatgcgtgctgcggcacaagtattacttcagcaaaatggcattaaagtcatggtgatgggggatattggggagttaggtgatagtagttggcaagaacatcacgatctaggtcgcgatcttgctgagcttcctttagaccatattattgcagttgggcagtttgcctcagcagctctcgaaggcgcaggtcttcattctactaaattgaaagcatttcagactcaagctgaggcgcttccatttttaatcaatctaatccaaacacatcaaccccagtccatgagtttcctgtttaaaggttctcgctttactcatatggaaacgttgatggctgatttgatggagaaactttaa

SEQ ID NO: 43999 - DNA, 1119 bp, Acinetobacter baumannii
atgctgttatggttgtttgaacaacttgcgggctatcacagttcgtttcaggttgttcgttatttaacattacgttctttactcagtgtattaacgtcactgaccattggtttggttctcggaccaatcatgattcgtaaattacaagcgttaaaatacggtcaggcagtaagttcgtttgctcctgaaaatcatgctaagaagatgggtacaccgaccatgggtgggattttaattctgctctcaattggtattagtactttattgtgggctgatttatctaacccttatgtttggattgtacttggtgtaatggttgtgttcggtgcggttggctgggcagatgactggattaaaattcgctataaagataatgcaggtctacctgcccgtaagaagtttttctggacttctgtcgcatcgctgggtgctggtattgcgttatatttaattgctacccaacaatctaatgcagaatacacagcaaatatgctggatttattgattcctttctttaagaatctttcaattccgctttctattgttcctttaggtttagcatttattgtatttacctatttagtaattaatggtgcctctaatgcggttaaccttactgatggattagatggtttagccattatgccagtagttatggtagcgacgggcttaggcgtatttgcgtatttatctggtgatattcgttttgccaactatttgcatattccttatgtgaaatacacttcagaacttgtggtgatctgttctgccatgattggtgcgggtttggcatttctttggtataacgcacatccggcgcaagtctttatgggtgatgtgggcgctttagctctaggtgcaatgcttggaaccattgccgttatggttcgccaagaaatcgtattcgcaattatgggcggtgttttcgttatggaggcggtatcggtattcctgcaaatcggctcattacgaatgcggaataaacgcgtatttttgatggcacctttgcaccatcactatgaaaaacaaggctggaaagaaacccaagtagtcatccgtttctggattattacgattatgctggttgttttaggcctaatgaccttaaaattgcgctag

SEQ ID NO: 44000 - DNA, 333 bp, Acinetobacter baumannii
atgacaaaagttgctggtctagaccaattatctgtaattaatcaaaaagtagttggagagggcgaagtcttacctcaagttgtgcttaaagatggaagtcaggtgcaaacgggaactgtcgcgacgatgctgcataatattgaactctataatgcggggcaaagagggcaaattgaagaagagttgaagatcgcaattccaactttagttaaagtgggcttgtttgatttgtttgaagtagatgaatggattaagggaacaaatgcaggccgtacatttgttggaatacacgctaaggcttatttacaacaaaaagaacaagagaataattaa

SEQ ID NO: 44001 - DNA, 825 bp, Acinetobacter baumannii
gtgactacgcaaaatttaatgtgccctgtgtgtcgtcaacgacttgagctggtaagcaaaacatggcggtgtgaacagggccatagctatgacattgcaaagcaaggttatgtgaacttacatgttgtacagcacaaacatagtaaaaatccgggagatactcctgaggctgtagatgcgcgccgtgcttttttacaaggtggctattatcaacctttacagcaagcagtagttcatttgctgaaagatcttaaagctaaaatggtacttgatattggctgtggcgagggctattacaccagtgcaatgcaacaggtcgttgaacagtgtataggtgtagatattgcaaaaaatgcagtacaacgcgcagcaaagttaaatgacaaagtgacatgggtggttggtacaggagcaactttacctgtcatcgatcaaagcatggatgtgtgtacgagtctttttagcccgattccccaaacggaaattctgcgtgttttaaaagatgatggttatttaattgttgtgactccggcaaccgatcatttgtatgcgatgcgtgaggcgttgtttgaacaggttaatcctcacacaccacagaaatttgttgaacaactacaagatttatttgagttgaaagaacagcaagttattgatgctgctttagtacttgaccagcaagctttaaaaaatcttattgctatgactccctatgcttataaggcatctccagaacgtcgtatgcaactagaacagaaagcacacttacaagtgaccgcatcttttcaaatttatctttttcaaaagcgtaataaaaaagccatctaa

SEQ ID NO: 44002 - DNA, 2556 bp, Acinetobacter baumannii
atgaaaaagctatccagtttgggcttcgtgcgtccaatttttttgatcattattattatcttagtctcacttccgatgggattctatggcatgtatctctatattgccccaacgcttccggaaatgagttcactaaaaaaagcaccgcttttaaaaccattgcaagtctatacagccgacaatcaactcattgctgaatacggtggcaaactttctattccggttgaatacaaacaaattcctcctaattttattcatgcatttctagcagcagaagattcttctttctttgaacatagcggcattagttttaaaggtttaggccgtgctttgagtgaaagtgtgactggttctgatgtacaaactggtggttcaaccatcacgatgcaggtcgcaaagaactattatttaagtccagaaagaacattaaaacgcaaactaacagaaatctttttggctagaaaaattgagcaaaacttatctaaagaagacatcttaagcctctatgtaaataagattttcttaggtaaaaatgcttacggtatcgcagcagctgcaaagatttactacaacaaaagcattaatgagctcagcattgcccaaatggccatgattgccggcttgcctaaagcaccatctaaatataatccagttgttaaccctgagcgtgcacttgaacgtcgcaactggattttaggccgaatgcttcaacttggttatatttctcaagcggaatatcaaaaggccgttgcagagccaatcaatttgaatatgcccaaccgtgacctaaataatattcacccctacgcaggtgaaatggtccgctcagagcttgtaaaacattttggtgaacaagcaattgattctggttataaagtctacacaacaattaatgcgaaacgccaagcgattgcggaaaaagctgtgcaggacggtcttgaagcttatgaccgtcgtcatggctggcgtggtgcagaagcacatgataagccattaagcgaatttagagcatatgccaacacttatccggcgcaagttaccaaggtaaatagcagctcttttgaagcattaatgcaagatggctcaacagtaaccgtgcaatggtccggcatgtcatgggcccgtccctatcgcaatgcaaatagcgtaggtgcagcgccttctcgtgcatctcaaattgttaaagttaaagatattgttcgtttacgcccaaatgaagctaaaactgcgtggtcactagttcaagtaccaaaagttcaaggtcagctcattgcaattaacccaaacgatggctcaattgaagcaattgtaggtggttataatttctatcaatcaaaatttaaccgtgctttacaaggctggcgtcagccaggttctaccatcaaaccattcctctatgctttagcattagaacgtggcatgacaccttatagtatggtgaatgatagccctattacgattggcaagtggacaccgaagaactctgatggtcgctacctaggcatgatcccattacgtcgtgctttgtatttgtctcgtaatacggtttcagtaagactcttacaaactgtaggaattgaacgtactcgccaattattcatggattttggtttacaagaggatcaaattccacgtaactacaccattgctttaggtacgcctcaagtattaccaattcaaatggcaactggttatgcaacatttgcaaacggtggttaccgtgttcaaccgcattttattcagcgtattgaagatgcatacggtaaagtcatttacgaagccaagccagaatatgcatgtattccatgtattaatgctcctgagacaactgacgatgcacaggtaactactccagatgatcaagttgttgaagtcacaaataaagagctagagcagaaagaaaaggcaaccaaacaacttaaccttaaacagacggacaaaaataacagtcaatatcgtcaagctcagcgcattttaaaatcaagctctgcttatgacatggcaaatatcttacgtgacgtaattgagcatggtacaggtcgtgctgcacttaaaattggccgtagtgatttaggaggtaaaacaggtacgactaacgatgcaaaagatgcatggtttgcaggttttaatggcaagttagtaactgtaacatgggttggttttgaccagccgactacacttggtcgccgtgagtatggtggtattgctgcactaccaatctggattaactttatgggtcaagcattgcaaggtacaccggctgcttgggttcgtttagaaaaagatgctcaggcacctatttctcgcgataagcaagaagtcacaactgaagtaggcgataagaaaacatatcgtgctgcccctccattagcacgtccactctatcgtcctgcaccaccgcaacctaaaaccaccaataatgacttcgatgacttacctggtgaggaaattgtgattccttccaagacaacccctccaacaatgaaaccttcgcaaggggcagcgccgaagcgtgaaaaagatgaattagaaaacttgattaatcaaattgaataa

SEQ ID NO: 44003 - DNA, 1059 bp, Acinetobacter baumannii
gtgctcaggttatatcgtaaacctaataaggggttaatgggtgtcgatattagttcgacttctgttaagttgttagagctctctgtcaagaacggtaaatattgggtagaaagctatgctttgatgcctttacccgaaaacagtgtagttgaaaaaaatatcttaaatccagaagcagttgcagaggctttggaacgggcgatgaatttagcaaatccccaaaccactcatgctgcaattgctgttccgacatcgacggttattcataaaactatcgaaatggatgcagatatgagcgatgacgaacgcgaagttcagattcgtgtagatgcggagcagtatataccgttccctttagatgaggtgagccttgattttgaggttttgccggatcgtcttgcgaatccaaatcgtgtaaatgtgctcttggtcgccacaagaacagaaaacgttgaaacacgcgttgaagtgcttgaattggcagatttaaatcctaaattggctgatgtcgaaagttacgcggttgagcgcgcttttagcgtgtttgctgatagcttaccgatgggtgcaaataccatagggattttagatatcggccataccatgacgacattatctgtcatgcaaaatggcaagattatttatacacgagagcaggttttcggcggaaaacaacttacgcttgaaattcaaagtcgttatggtttgtctttagaagaagcaagcagagcgaaaaaagatcgttctttaccagatgattatgaaattgaagtgctagacccatttctagatgcggtagttcagcaggcggcccgctcactacaatttttcttttcttcatcccaatttaacgaaatagaccatattttgctcgctggtggaaatgcgaatattccaggccttgccaagcttttgcagcaaaaattaggttatcgtgtcacgattgccaacccgtttttacaaatgggcttttctcctcaagtcgacgttcaaaaaattgaaaatgatgcctcatctttaatggtggcatgtggcttggctttaaggagttttgattaa

SEQ ID NO: 44004 - DNA, 642 bp, Acinetobacter baumannii
atggcaacaattaatttactgccttggcgcgaagagctgagggagcaacgaaaaaaacaatttataacgttatgttttggggtggttgttttggggattacaaccgtatttgggggatggttttattttgaccataaattagatgatcaagagcaagcgaatcagctcattatgagcacaaatcagaaccttgatcagcaattaaaaacattaaacggcttacaggaacagcgtgatgccattattgaacgcatgaagttgattcaaggtttgcagagtcaacgtccagtagtggtaagacttgttgatgagttagttcgagtcacaccatcagctatgtatttaacgaaatttagccgaaccggagataagtttacgattgaaggtaaagctgaaagtccaaatacagtagccgaactactccgtaatcttgaagcatctccttggtatcgtaatgcttttatgaactctttcttggctaatgaagagaaaaaagataaggctgcaagttctcttcttcctagggtggaagaccactatggtagttttgttgtgactgtcgatttgggggaaatgggcgtgaccacaacggatgattctgctaagccatctacaggtgaaagtgtgggggctgctaaatga

SEQ ID NO: 44005 - DNA, 741 bp, Acinetobacter baumannii
atgagtcaagacgaacttcaagaattgtcattagaacaattatctgcaaagaaaaagaaatttaatctcgataaattccttcagcaatttaatacgctggatatgaacaactacggtagttggccaatatctgtaaaaattacgtgttggatttttattttctttgctgtgttagctttggggtatttcattgttattcaaccgaaattacaagctattgataatgctcaagctcaggaaagcaatttattaaacgaatttcgtgaaaaagactcgaaattacgtaacctgcaacagtatcaggtacagcttcaagagatgcaggcaaatttcaaccagcaactagagcagttaccaaaagaaactgagattccgagtttagttgaagatatcaacttaacaggagtgaactctggattgaaatttaaaaatattcgcttggaagatgaagtaaagcaggaaatttttattgagcaaccaattgccatagaagcgaccggggactatcacgcatttggagcttttgtaagtagtatcgctgctttgcctcgtattgtaaccatgcacgattttactgttgatgtatcgccagctaaagataacaagtctgatattcctgtgctgaactattccattaaagcaaaaacataccgatacgtaggggcaacagatacatcggagcaaacaggcaaagctccagcagcatctgcttcaacgaacactactgttcagccgaaatag

SEQ ID NO: 44006 - DNA, 528 bp, Acinetobacter baumannii
atgaaaattaagcaaattactctttatgttttggcgtgtgctgtgcttgtcggttgtgattcaagaattgatgcagtaaatcaggaaatggccaatattcgtaatcagccgccactccctattgaaccagcaccgatttttactcctgtaccacaatttaattacgctgctcatcaattaaaaagcccatttatgccaagttctctagctgccgagctcaagattatggcggggaaacgggtttatccgaatttctcacgtgcgccgcaaccactcgaaagttatgcacttgaagctttaaatatgaaagggagcatgcgtaataatcgagggcagatattggccctgatccagacaccggatcagcagattgaacgggtacaagtgggtaactatatgggtatgaatcagggccgtattacccatattagtccaacccagattgatctggttgaaatcgtaccagatggtcgagaaggctatgtcgaaagaccaagaaccttggttttgattgggcctgcaccctaa

SEQ ID NO: 44007 - DNA, 2166 bp, Acinetobacter baumannii
atgaatcacgtattccgtcagttttctatgggggctgtagctattgcgattatgcaggctgcatttgcacaggtcagcatgaccaacattgtaccaatgcaaattgcaggtcagggcacagaaattagagtcatgtttaatggcttgccaccacaaccacaagcttaccaacttgaaaatccttcacgtttaatccttgattttgataaggcacagcaaggtttaaaacagtctaaaattagtgttgcaactaatgaggcaagttctgtagatgttacttcagatgaccagcgctcacgtttaactgtaaacctaaaagatgctggagcatttacaacacgagtcgaaggcaatactttcattttaaaaaataattctgctcaaacaagtaataagccgctacctgtggtctcagcacaaccacagggagtttcaaatattggctttcagcgtggtagtcagggagaaggcctggttgttgtagatcttttaggaaataatacgcctgtagatgttcagcagcagggtagtaaagtcgttataagaacaataggtacaaaaatcccgacacatttagcacgtcgcttaaatgtaaatgattttgcaacccccgtttcaagtatcgatgcttataatgataaaggggttggtgtaataactatccagtcctctggtagctatgaatatatggcctatcaggcggagaataagctcacgatcagtttgaaacgtccccaagataaaaatgttacctctttatataaaacgccaaattattcaggaaataaactttcattagacttccaagatattgaagtacgccgtgtgttgcaattacttgctgattttacaggcatcaatatggtagctgccgatagtgtacaaggtaatatcacactacgtttaaaagatgtaccttgggatcaggctcttgatattattttaaaaactaaaaatcttgataaacgccgtaatggcaatgtgatttggattgctccagttgcagaattgattaaagcggaagaagaagaagcgaaagctgttgcacaaagtgtcaaacttgcacccttacagactgagtatattcaactgaagtatgctaaagctggcgatattatgggtctcattacacaaggctcaaataatagtaatggcttacaacatacttctggtggagggacctcaacttcaaccaatttaaatactggagttgatagtctaggcaataatgtgggtagtttgcttagcccgcgtggcactattactcaagatgaccgaactaatactcttattattaacgatactgctcagtcaattgatcaaattcgtaaaatgattgacttgcttgatgtgcaagttaaacaggttatggttgaagcacgtattgtgagagcctctacgtcatttaccaaagaacttggtgtgaagtggggcattctgtcgcaaggtattaccaataacaacaatttgctggttggcggtagtgaaacaactttatggaatttacgcgaacctaaaaaagatgaaactacaggtgggtataaatatacgattgagcgcccagataacttaaacgtggatttaggggtttctaatcctgcaggaagtattgcttttggcttgattagtatgtctgactttatgttagatcttgaattgtctgctttacaagcggatggttatggtgaggttatttctacccctaaagtcatgactgccgataaacaaacagcaaaagttgcaactggtcaacaagttccatatcaatctacaactaactctgcagcaggttcaactgctacaacatcttttaaagatgctttgctgagtttaaatgtgacaccaagtattacacctgatggtaagattcaaatgaagttggatatttctaaggattctgtagcgggtgcggctccaaatggagagttgattttaaataaaaataatatcaacaccaatgtattggtagataatggcgaaactgtcattttgggtggtgtttttgagcaaacgactatgaattcacaaaccaaagttcctttctttggtgatattcctgtcgttgggcgtttatttagaaaagatgtaaagtctgatgataaacaagagttgctgattttcgttacaccacgaattgttaatgacactttagcgagaaatcattaa

SEQ ID NO: 44008 - DNA, 570 bp, Acinetobacter baumannii
atgaaagcaattgaaataggtggcgccttgccaagcaaagcgtttgaaaccctaccaaatatttatttggtagggcccatgggggcaggaaaaacaaccgttggacgtcatttagcagaactattagggcgtgaatttttagatagtgatcatgaaattgagcgcaagacaggggccactattccctggatttttgaaaaagaaggagaagtcggctttcgtacgcgtgaaactgtcgttttaaatgagcttacttcacgtaaggcattagtgcttgccacaggtggcggtgctattactcaggcgcctaatcgggagtttttaaagcaacgtggaatcgttgtttatctatatactcctgtcgaattacaactacaaagaacctatcgcgataaaaatagacctttattacaagttgaaaatcctgaacaaaaattgcgggatttattaaagatcagagatcctctgtatcgtgaagttgcacactatacgattgaaacgaatcaaggtgctgcacgtgatcttgcccaaaagattttgcaacttattctatcgaacaagttaaaatag

SEQ ID NO: 44009 - DNA, 1083 bp, Acinetobacter baumannii
atgcaaactttacatgttgaattaggcgaacgccgttatcctattttcattggtagccaacttgacccgaaacaattactagagccttatattcatggtcaacaggtcatgattgtgagtaatgttacggttgcgcctttatatttaagccactatcaggaagctttggaaagtctaggtaaaacggttgcgacctgtattttacctgatggcgaaaagtataaagatattcagcatttaaacttaatttttgatgcattgcttgaagctggttttaaccgcgattgtacggttttagctttaggtggtggcgtcattggtgatatggctggttttgcttctgcttgtttccaacgtggcgtttactttgtacaggttcctacaaccctgctttcacaagtagactcaagtgttggtgggaaaacaggtattaatcatccgcttggcaagaatatgttaggtgcttttcagcaaccacaagtcgttttagctgacatggcacaattgaatacattgccagaacgtgagctttctgctggtttagccgaagtaattaaatatgcacttttgggtgatgaagatttcctggtttggcttgaagaaaatatggatggcctagttgcaagagatgctgaccttttagcagaggctgtttatcggtcatgtgctcacaaagcccgtattgttgccaacgatgagaaagagcaaggggaacgtgctttacttaacttaggccatacttttggccatgcgattgagtcgtatctaggttatgggacttggttgcatggtgaagctgtcgcaactggaatggtgatggcggcagatttatcacaacgtttgggctggatctcaaatgaagatgtggcacgtacaaaaaaaatcattcaacgtgcgaatttgccgatatcatgtccacaaattccattggatgatttccttggatatatggctcatgacaaaaaagttcttaatgggcaattacgtttggtgttgttaaaacaactcgggcaagctgtaattactaaagactttgatgttgaacttatgaaacaagctattttggcgaatcaacacggataa

SEQ ID NO: 44010 - DNA, 876 bp, Acinetobacter baumannii
atgactgtatcacgtacactttggcagaatgttcaacaatatatctggttggttggtggtattgtctgcttattccttgcttttattttttgggtcataactgataataaaaaactggttgaggttgaaaagtcagctgattccgatgcacccgtacaaattcagccagagaaagttgcaaccactcctaacttaggtgctttagctgacgaggttcgtccactggatttaacaacacgaactgtggcgtcaggtgaacatgagcctgagtttcgtggtacaaaatttattaatgaaaataaaaaacaatggacgcttgagttattcagagcttctgatgaagacatcattaaaaactttttaaaaagtcgtactgatcgtaataagtttatttatttccgcttaagcggagaacaacaagcagaacagtatgtgttggcttacggaacattcaaacgttcagaagatgcggttcagcaattaacacagattaatttgcagttacctgattcggttaaacctcagccacagcagttctcaagttatgccccactggtaaatgatttgggggcagatgagatgaaaggtggcaataatcagttatatgaagttagattgcgtccagcagctttgcctagaattgatgaatctttattaatgtcaactccagcgagtggtaccctaaacactcagccaaaacctgctagtactaactcggctacaaaaactactattgtacgtcgtgatgcggcaggaaatgtggttgatgtacaacaatcgaattctaatattgatcagccaaataaacctgcacagacacgggttaatgagaatcaacccaaaaatgctacaaatgagggcacaagagggaactaa

SEQ ID NO: 44011 - DNA, 4482 bp, Acinetobacter baumannii
atgcacatgccatcgcctaatactgtagctcccgctcaaggtttatatcagcctgatgagtttaaggataactgtggttttggactgattgcccatatgaagggtgaatcaagtcatcatctagtagaaaccgcgattcacagtttaagttgcatgacgcaccgtggtggtattgccgcagatggcaagacgggagatggttgcggcttattattggcgatgccaaagcaatttttccgtgatgaagcaaaaaaactgagtgatattacactgagtgaaatttttgctgtgggtacggtatttttaaatattgatccagcattagcacagcactctaaaaatattttaacgaaagaaattgagtcagaaggtttacgtgtacttgcttggcgtatcgttccaacaaacaacgatgcattgggtgaaatcgcgcttcaatctttacctgcttttgagcaagtcatcgtcaactgcccaatgggcgtaactgaggttgaatttaaccgtaagttattcttggcgcgtcgccgtgcggaacaacaactccaaaatgatccgttattttacgtgactacgctttgctcgacagttattagctataaaggcttaatgatgcctgcggcgattgccgagttttatacagacttggcagatgagcgtttaaaatcacatatcgtggtattccaccaacgtttctctacaaatacattaccgcgttggccattagctcagccattccgttatcttgcgcataatggtgaaatcaacacaattacagcaaaccgtaactgggcattggcgcgtactcctaaatttgaaaacccattattaccaggtttgactgagcttaacccgattgtaaaccgtacaggttcggactcttcaagtttagataatatgcttgagattctggtgggcggtggtatggatttattccgtgctttacgtatgctcgtgccaccagcttggcagaacgttgaaactttagatgcagacttgcgtgcattctatgagttcaactcaaaacatatggaagcttgggatggtccggcaggcctcgttattcaagatggtcgtcatgcgatttgtatgcttgaccgtaatggtttacgtcctgcgcgttgggttattaccaaaaatgattacattaccttggcatctgaaattggtgtttggggctatgagccagaagatgtagtatcaaaaggtcgtgtaggtcctggtcaaatcttggttgttgatacccttacaggtaaagtgcttgatactaaagatgttagcaatcacttgaaaaacatgcgtccgtaccgtgagtggttgcgtgaccatgcgattcgcttaaatgcaaacccggaacttgaagaacaacttgttgataaaggtttaactggcgatgcattaaaagcggctcaaaaaatgtttatggtgacatttgaagagcgcgatcagttgttacgtccaatcgctgagagcggccaggaagctgtgggttctatgggtgacgatacaccaatggctgtattgtctcgtcaagtacgtcatgtgaccgattacttccgtcaacagtttgcacaggtgacaaacccgccaattgacccattacgtgagtcaattgttatgtcacttgaaacctgtttgggtcgtgagcagaacgtattcgaacaaggtcctgagcatgctgatcgtatcatcatctctagcccggttttatcaaattcaaaaatgcagcaaattcgtagcattgaacgtgcgggttatgaggcggttgatattgatctgaactatgctgaaaccgaaggtttacaagctgcgattactcgtatttgtgaagaatctgcacaagctgttcgtgatggtaagaccttaattgttttaactgataaaaacattcgtcaaggttatttacctgcaaatgctgcgcttgcaacaggtgcggtacaccatcacctcataaaaactggtttgcgtactgatgcaaacattatggttgaaaccggttttgcacgtgatccacatcaatttgcggtgttactcggttttggtgctactgccatttacccataccttgcatatgatgtaatcaatgatttgattgctaaaggtgagcttttaggtgatccaatccatgcacaggcaaacttccgtaaaggtatcgagaaaggcttattaaaagttctttcaaagatgggtatctcgacagtagcttcttaccgtggtggtcagttatttgaagcagttggtttatcttctgaagttgtagatcaatgtttcttaggtgttcctagtcgtatccaaggtgcaacatttgttgatcttgaaaatgaccagaaaaaattagcggctacagcttggtctaaccgtaaaccaattgatcaaggtggtttgctgaaattcgtatttggtaaagaataccacgcgtttaacccagacgtgattaactcgctacataaggcagttcgttctggcaaatacgaagactttaaagaatatgccgagttagtgaataaccgtccgatcgcgactattcgtgacttatttaagttaaaaacaaccaatccaattccggttgagcaagttgaatcggttgaagctatcttacctcgtttcgactcggcaggtatgtcattaggcgcgctttctccagaagcccatgaagcaattgcaattgccatgaataccattggtggtcgctcaaactctggtgagggtggtgaagatcctgcgcgttacggcacaattcgtaactcgaaaatcaagcaaattgcatctggtcgttttggtgtaacacctgcatatttaacttctgctgaagtcttgcaaattaaagttgctcaaggtgcaaaaccgggtgaaggtggtcagttgccaggtggtaaagtgaatggcttgattgcacgtttacgttactctgttccgggcgtgacacttatttcacctccgccgcatcatgacatttactcaattgaagatttgtcgcaactgatttttgacttgaaacaagttaacccgaaagcaatggtatctgtgaagttagtatctgagccgggtgtaggtacaattgctgcaggtgttgctaaagcatatgcagactttattaccatttcaggttatgacggtggtactgctgcgtctccgctttcatcaattcaccatgcaggttcgccatgggagcttggcttgagtgaagcgcatcaggcacttcgtgtaaatgacttgcgtggcaaagtacgtgtacaaactgacggtggtttaaagactggtcttgatgttattaaggcggctattttaggtgctgaaagtttcggttttggttctacaccaatgatcgcattaggttgtaaatacctacgtatttgccacttaaacaactgtgcgaccggtgttgcgactcaacaagatcatttacgtcaagagcactatattggcgaaccacaaatgctcattaatttcttccactttattgcagaagaaacgcgtgaatggttggcagctcttggtgtagcttcacttaaagacttaattggccgtgtagatttacttgaagtcttaccgggtgaaacagagaaacatgctcatcttgatttaagtgcattattaacttctcatcctgctgctgaaggtaaagcacagtattgtgaagtagaaggtaatgcaccgtttgacaagggcgtattggctgaaagaatggtcgaagaaatgcttcctgcaatcgagtcaagcgctggtggtcaattcaattttaatgtcgtgaactgtgaccgttcaattggtgcacgtgtatcgggtgagattgctcgtcgctatggcaacttgggtatggaagcacatccggttgtaatgaacctaacaggtactgctggtcagtcacttggtgtttggaatgctggtggtttgcacatccgtcttgaaggtgatgcaaatgactatgtaggtaaaggtatggctggtggtcgtatttcgatcttcccaccaaaaggttcacctttccagacacaaaatacagcaattattggtaatacttgtttgtatggcgcaactggcggtaagttatttgctgcaggtacagcaggtgagcgtttcgcagttcgtaactctggtgcgttcgctgttattgagggtgcaggcgaccactgctgtgaatatatgactggtggtgttgtgactgtgcttggaaaagtgggtcataacttcggtgcaggtatgacaggcggttttgcttacgtgcttgacctcgataatgactttgtagattactacaaccacgagttaattgacttaacccgtatttcaaccgaatctatggaagatcataaagaattcttattgcgtattattgacgagcacatcaaggaaacaggtagtgcttgggcttacaaaatccgcaacgagtttgacttctacagccgtaaattctggcttgtaaaaccaaaagctgctaacttgcaatcgcttttgaaaactacacaagctgacccacaataa

SEQ ID NO: 44012 - DNA, 1422 bp, Acinetobacter baumannii
atggcagaacgcctaaataatgactttcaatttctggatgtaccacgtcaagatccagagaaaaaagatattactgtccgcaaagcagagtttgtggaaatttataaaccttttacttcggaaactgtaactaatcagacgcaccgttgtttaggttgtggtaacccatattgcgaatggaaatgtcctgtacataactacattccaaactggctaaaactcattgctgaaggccaaattttccaggctgctgagctttgccatcaaacaaatactttacctgaggtatgtggtcgtgtatgtccgcaggaccgtttgtgtgaaggtgcttgtaccttaaatgatggctttggtgcagtaaccattggtaatgctgaaaaatatatcaatgacacagcttttgctttgggttggcgcccagatatgtcacatgtgaagtggacaggtaaaaaagttgcaatcattggcgcaggtccagcaggcctaggctgtgccgacattttagctcgtggtggtgttaaaccggtggtatttgacaagcgtcctgagattggtggcttactaacatttggtattccagaattcaagatggaaaaagatgtcatgaaacgccgccgtgaaattttcacaggcatgggcattgaattccgcttaaatactgaaattggtaaagatgtcacgattgatgaattacttgctgaatatgatgcagtattcatggggatgggaacttatacctacatgaaaggtggtttccctggtgaagatcttgacggtgtttatgatgcgcttgatttcttaatctctaacgtgaaccgttgtcagggatgggaaaaggacccaagtgaatacattagcatggatggtaagaaagttattgttcttggtggtggtgataccgcaatggactgtaaccgtacttcattacgtcaaggtgcccacgacgtaacatgtgcataccgccgtgatgaaagtaatatgccgggttctgcacgtgaagtaaaaaatgcgtatgaagaaggcgtaaagttcttatttaaccgtcaaccaatcgagattgttggcgaaaatggtaaggtaacaggcgtaaaagtggtaacgacacaaatgggtgaaccagatagtcgtggccgccgtagccctgagccaattccgggttctgaagaagttttacctgctgatgcagttttgctagcgttcggtttccgtccaagccctgctgactggtttgatagtgtgaatattaatcttgatggttctggtcgtgttgttgcacctgaacagcaggaatttaaattccagacttcaaacccaaaaatctttgctggtggtgatatggtacgtggttcagaccttgtagttacagcaatctgggaaggtcgccaagctgctgaaggtattttagattaccttggtgtttaa

SEQ ID NO: 44013 - DNA, 888 bp, Acinetobacter baumannii
atgaacatcgcaggcatgacggcagaaaaatcatatttaaatcgtcgaaaagcgttgggtattacagtacgtcgccttgagtttaatcctcaagctatcaaacgctattattttgcaaattcgcctttaatgtcccattttttaactgcactctcttcaacatttcccgtaggagaacagttttttgtaaatagcgtgcgtaatgtacgtgacaaagtttccgaccctcaattacaggctcagattgcggcatttattgggcaagaagcaatgcattcgaaagcacatggagagttcaatgaggcttggcgtcgtgatgactataatctggatcgctttcaaaactggttgaatgagcgtgacaaatatttaagaacaatttctcctaagctgcagctagcactgacatgtgcatttgagcattttacggctttgctggggggatatattttacagcatccagaacttctaaaaactttggatcaagatgcgctaaagctttgggtttggcatgctatagaagaaattgagcatcgttcagttgcattcgatgtctatcaacaggtatatggtgatgaccgtattcgtcgtttactcatgcggagtgtcactacagggtttgcaagtcttgctttttatggcactacacggctattttggcaagataaatggaagagcttatctaaaatcggaggtaacttatttgggctatatttgcttgctaaaatgcttatacagctaactcctgaatattttgcttattacaaaaaagacttccacccgagtcaaaaagattatagccatatggtcgattattggaaaagttatttggctgatgaatatcaaatgacaagtttccaagaggaaaaaaatccaagaccaagctaa

SEQ ID NO: 44014 - DNA, 591 bp, Acinetobacter baumannii
atgaaaacgtttaaacaacttgctatcgcgacaacacttgccagtaccttactattttcaggctgtggctataatactttacaggttaaagatgaagctgtaacagcggcttggtctgaagtacaaaaccaatatcaacgtcgtgccgatctagttccaaatctggtaaatgttgtaaaaggttatgctaaacatgaagaacaggttttaacagaagtcactcaagcacgtgccaatgttgcaggcttgaaggttgataaagaagtattagaagacccagcattacttgaaaaatatcaacaggcacaaagccagttaactggggcattatctcgacttattgccgtttcagaaaactatccggatttaaaagccaatacccaattccaagaattgcaagttcagcttgagggaacagaaaatcgaattgctgttgcccgtaatcgttatattacaactgttcaggactataacgcttatgttcgtcagttcccacaagcagtaacagcaaaagtgattggcatgcatcctaaagccaatttctctgcagaagcatctgctcagcaggctccaaaagtttcttttgattaa

SEQ ID NO: 44015 - DNA, 1080 bp, Acinetobacter baumannii
atgagaaatactatattgcttcagcctaagcaaattagggtattcgttattaccttaattgttctctgctgtggtgttctgtttcagaatgcggcttggagtgagaataatattgccactgctaccgatgaaacggatacggtagtggcaggcaaaattattcaacagcagcaagctcaagcatctaagcctcaaataaattctcaggcagcttcgagtgtcacacctcaaacgcaagttgcaaatgatatggctgatggtgaatcgattcgcggtttaccaacattaaatcaacctgtcattgatcaagctaacgttttgagtgaaaccgaaaaacaacagcttagccagaaaatcttaaatctgtaccagcaaggtaaagcacaaataggtattgtgattgtaccgactacaggtcaagaagatatttttgattatgctttgcgagtaggtgaaaaatggcaactcggttcgagtaaacgagataatggcttacttatcgcagttgcaattaatgaccatagaatacagattctaactggatacggtttagaaggagtattacctgatattgttgcaagtcgaattattcgaaatcaaattaccccttattttaaacaagcccaatatgctcaaggactaaatgcaggacttgatgaaattggaagaattttaaatttagatccggaagttgctcagcaagctgctcaagatttaaaagaacgccaacatcaagctgccgaagaacaacaagcgaaacaaactacgcttacaatggctttatttattcttgttgctggggttgtgggatcatttattgttggtcgaccacttagcgcgtcaacagcaggagttgcggcagcggtagctggtttcgtaaatggtgctggcgtagtaatgagtttactactgggttttggtattttctttttactcataacttcaattgcccaactgattttacaggctattctgagcggagctggtggcggtggacgcggaggaggctttggcggtggtggcggaggctacggcggcggtggacgttttggcggtggaggtgcttcaggctcatggtaa

SEQ ID NO: 44016 - DNA, 561 bp, Acinetobacter baumannii
atggtaacaacatcagaaacaacccaaattattactcagccaaaaattgaggaatatgtagagccaagtttaaaacgttggtttaagcatttttgttatttaccagcaagtagcaaatatttctccaaacaagataaacaagctattgctgaggctgtacagcaagcagagcatgggcatgttggcgaaatacaggttgtcatagaaggccatatcccatgttcacaagcgtatagacaaaatacccgtttaagagcccagcaattatttgcagaactgggtgtttgggatacagagctcaatagtggtgtattgctctatttaaatttgtgtgaacgtacagtagaaatcatctttgatcgtgggattagaaatgcaactactgaacaaatatggcagcagatttgtaagtcgattgtagagcagcttcaacaaaagcaatatcagaaagcggtagttacaggagttcagcaaattggagaagtgatgtcacgcttttacgatgaaaacatgccagatcaattaaatgaattaggtaacgcacctatcattattaattaa

SEQ ID NO: 44017 - DNA, 267 bp, Acinetobacter baumannii; identical to SEQ ID NO: 43415

SEQ ID NO: 44018 - DNA, 1230 bp, Acinetobacter baumannii
atgggtgcattacaaggaattcgggttttagatttaagtcgtgtgcttgcagggccttggtgtgggcaaatcttggcagaccttggcgcggaagtgattaaaattgaacgtcctcgagtaggtgatgacacccgtatgtgggggccaccttggatgcccgatcaagatggaaacatgacccgtgaatctggttatttccagtgtaccaaccgtaataaatattcggttgcagtagacataaccacacccgaaggtcaggccttaatttatgaaattgccaagactgccgacgtggtaattgaaaattataagacagggtctttggctaaatatggtttggactacgcgtcattaagtgagttgaacccgaacattgtttattgctcgattactgggtttgggcaagatggcccacgtgcagaagagcccggttatgattttattattcaaggtatgtctggcttaatgagcattactggtgagcctgatgatgtggctggtggtggtgcacaaaaggttggcgtggctgtggtagatattcaaactggtctatattccaccattgccattcaggccgcattgattgcacgctcacacacaggacgcggtcagtatattgatatgtcactccttgatgtgcaggtcgcggcactggcaaatcagggaatgaattatttagcttcaggtaaagccccgcagcgtatgggcaatcaacacccaagtattgtgccgtatcaaacttttaaagctaaagataaagaatttattattgcttgcggtaacgacaaacagtttaaagatttgtgtattgcgattggttatccagagctactcgaaaatgaaaagtttgtgcgcaaccaagaccgcgtaaaatatcgaaatgaactgatacctttattgtcggaacactttttgcgaaaaactgctaaagaatgggtcgacatgattcatgcgttaaaagtaccagtaggtgttatcaactctattgaagatgctttagctgaaccacaaattgtatatcgcaacttggtggtgaacattcctcatcgtttaaatgaaaacttccaaaccattggctcaccaatcaaactgtctgatactcccgttgaatatcatcatgcaccgccagagcttggtgaacatactgctcaaatcttatcgagatttaaaacagcagaagagcttgctgcattaaaagagaagggcattattgatgggaaaattgcttaa

SEQ ID NO: 44019 - DNA, 1323 bp, Acinetobacter baumannii
atgaacaatgacgttcaagtaatatcgaaagaattaagaaatacatttccaagcaatcttggaacatacgaaaggattggacctcatacatggaaatgggcgttgttatttgcctattttgcaatggtagtcgatggcattgatattatgctgctgtcttatagcttgactagtttaaaggcagagtttggattaactacctttcaagcgggtgccttaggcagtgcttccttggcaggtatggggattggcggtattttgggtggctgggcatgtgacaagtttggtcgtgtaagaaccattgccaactcggtgactttcttttctgtagcgacttgtttattgggctttacgcaaagcttcgagcaatttatggctttacgttttattggtgctttgggtattggagcactctatatggcctgtaataccttaatggctgaatatgtgccaaccacgtaccgtacaacggtattgggcacgttacagacgggtcagactgtaggttatattgcggcaacccttttagcaggggcaattattccagatcatggctggcgtgttttattcttcctgaccgtggtgcctgcttttgttaatattttcctgcaacggtttgtaccagagccaaaatcttggcagcttaccaaaattgaaagcttgcaaggtaacagacagcctaaagaaagagtagtagctgaaaagccaaaaagtagcagcatttataagcaaatctttaataactttaagcaccgtaaaatgtttttgttgtggatgacgacagcattcttcttacagtttggttattacggcattaacaactggatgccaagttatttagaaacagaagtgcatatgaactttaaaaacttaaccagttatatggtgggttcatatacagcaatgattctaggaaaaattttagcagggtatcttgctgacaaatttaaccgccgtgctgtttttgtgtttggaacaatagccagcgcagtgttcttgccaatcattattttcttcaatactcctgacaatattttgtatttattgatcacttttggcttcttatatggcattccatatggtgtaaacgcgacctatatggctgaaagtttttcaaccgatgtgcgcggaacagccattggcggtgcttacaacattggtcgtgtcggggcagcgattgcaccagctaccattggtttcttggcatcgggcggtacgtttaccatggcctttattgtgatgggtgctgcgtattttgttgcgggtgtattgccaggcttatttattaaagatcgtcaatacgatccgcaaagacaatcataa

SEQ ID NO: 44020 - DNA, 1221 bp, Acinetobacter baumannii
atgaatcacatggtgacaacaaaaaaagcaaaagttcaatttaactggcaagacccatttttaattgagcaacagcttagcccagatgagcgcatgattcgtgatgcggctcatgcctattgtcaagaacgtttgcaaccacgtgtacttgaacaatttcgtcatgaaacaacagatccatctattttccgtgaaatgggagagcttggcttacttggcccaaccattcctgagcaatatggcggcgcgggtttgaactatgtgagttatggtttggttgcgcgtgaaattgaatatgtcgactcgggctaccgctctatggcgagcgtgcaaagctcattggtcatggttccgattcatgaatttggtactgaagagcaaaagcagaagtacttacctaaactggctactggtgaatacattggttgttttggtttgaccgaacctgaccatggttcagatccgggcagtatgattacccgtgctaaaaaagttgaaggtggttaccgtttaactggcgcaaaaatgtggattaccaatagcccgattgccgatgtatttgtcgtctgggcaaaagaagtttctgctgaaggcaatgtcggtgatattcgtggcttcattttagaaaagggctgggaaggcctatctgcgccagctattcatggcaaggtcggtttacgtgcctcgattacgggtgaaatcgtgatggataacgtttttgtacctgaagaaaatgcattccctgaaattcgaggcttaaaaggcccatttacctgtctaaacagtgctcgttatggcattgcatggggtgcaatgggtgctgccgagttctgttggcatacagcacatcaatacaccatggaccgcaaacaatttggtcgcccgttggctgcaaatcaattgattcaaaagaagctggcagatatgcaaactgaaattgctttgggtttacaggcagctttacgttttggccgcatgaaagatgaaggcattgcatcagttgagggtacatctctaattaagcgtaacaactgtggaaaggcgcttgatattgcccgcatggcacgtgacatgatgggtggaaacggcattagtgacgagtttggtgtggcacgccatttggtcaatcttgaagtcgtaaatacctacgagggtacacatgacgttcatgccttgattttaggtcgtgcacaaactggcattgccgcatttagtaactaa

SEQ ID NO: 44021 - DNA, 948 bp, Acinetobacter baumannii
atgcgaagaagtatcccgtccattcagggtctaatttgctttgaaagtgcagcgaaacatctaagttatacctatgctgcgcaagagttatgtattacccaaagtgcagtctcgcgccaaattcagcagttagaagatttcttgggtgttgaactctttatacgtactcggcatggcgttgaactcaccattgcaggtcagcagtattttaaaagcattaaaccctatttattgggtttagagaaatgtacagccgatgtgatttctcataagggtttaggtggcacactaaaattaggtgtggttcctacctttgcaacgcgatggttattacccaagctccatcttttaaatcaaaaacaccctgaaattacagtacatttagaaaccagtaccaaaccttttttatttaacgataatatttttgacgctgctatttttgcaggaacgcagcagcaaattgaccattggcccggcatacaagcacattatttaatggatgaagaaattgtacctgtgtgctcaccaagactaatcgaaaagtattttccagatgctgtgatgattaatgaaaatacctatgatttaagcccagaagatttattaaaaatccctctgctacaacaaaccactcgacctagcatttggcaagaatggtttcttactcatcacatgcagcacccgaagccttttgatggacagcgccatgagttattttcgatgcttgccgttgctgccagtcatgacatgggaatggctctaattccgcaaatgttgattgagtctgaactacaaaaaaaagaactggtgattgtttccaataagaaactaaaaggtagccgaaagtactacctcatccattcgagccaagacatctcaccgactattcaaaaatttgttgagtggatttaccaagaactagaacaactaaagactaatacgaattag

SEQ ID NO: 44022 - DNA, 1176 bp, Acinetobacter baumannii
atgaagtcggtactttgtcatcaagcaacattgcaagtagtagaccaaccgaacttaacacctgcaaaaggacaggttttattggaagtggtgcgatgtgggatctgtggttcagatttacatatgcagcaccactgcgaccacatgcatgatttggctgcacgtgtcgggtttaatggtttagccaagtctacagacccatttgtactaggacatgagttttgcggcaaggttttagactacggtccaaaaacacgccataaatttaaagccgacacactcgtttgtgcaatgccgcttttgaatgtagatcagcatggttatttgtctacgggactttcgccaaatgcttcgggcggttatgccgagcaagtattggctcaatcaagcttgatgtttgaagtaccgaatggtctagatgcggatagtgctgccatgaccgaacctatggcggttgcattgcatgctgttcgccgtagccgtgtaaaaacaagtgaacctgcgattgtgattggctgtggtcctgtcgggctaggtgtcatattaatgcttaaagctgctggggttaaaaccgtagttgccagtgacttttctccaaaccgacgtaagcttgccgagcaatgtggtgcggatattgtggtagaccctaaagagacatcgccatttgccaactggaaagaatttggtttacttggcaatgtttcggatgccattaacatgggcatgggactgtttgataaattacaagcgacacgcttaccttggtggcatggatggcgcatgattgataaattgggcgctctgccaaaacgtcctgttatttttgagtgtgtgggcgtaccgggcgttttgcagcaaattattgaaggtgcacctttgttttctcgaattgttggggtgggtgtatgcatgcaaagtgacaaaatagaaccagcacttgcgattaataaagagctagaaattcagtttgtgttgggctatacaccacttgagtttagagatgcgctgcacatgattgcagaaggtaaagtgaactgttcaccgctcattaccggtgttgttggcctagaaggcgtaactaatgcatttgaagcattacgtgaccctgaacagcacgccaaaatcttgattgaccctaaacgtagcggttcagatattcaattgatgagtcattaa

SEQ ID NO: 44023 - DNA, 1020 bp, Acinetobacter baumannii
atgcaaacagataagaagaaatctatgattacaaaaacgctcccgcttacagatatacaccgccaccttgatggcaacatccgcattcaaaccattttagagttggggcaacaataccatttagatttgcctgcttacgacattgaatctttacgaccacacgtacaagtgatggataaccaacccgacttattaagttttttatccaagctcgattggggcgtaaaagtattagccagtttagatgcctgtaaacgtattgcttttgaaaacatgcaagatgcagcacagcaaggactagactatgtagaactacgtttttcaccgggttatatgggaatgacccatcaacttccacttgaaggcgtagttgaagctgtgattgctggagtaaaagaaggtagtcaggcgtacggcgtaaaagcgaatttaattggtattatgagtcgtacttttggtcaagaagcctgcgaaaaagaattaaatgccctacttgcccataaaaatgatattaaagcactggatcttgctggagatgagcttggatttccgggcaatttatttattgatcactttaaaaaagcacgtgatgcaggttggcatattaccgtacatgcaggcgaagctgctggccccgaaagtatttggcaagccattgaagaattaggtgccgaacggattggacatggtgttaaagcagttcaagatttaaaacttttagattatttggcaaaacatcagattggtattgaatcttgcctcacctcaaatattcaaaccaacacagtgccttctttagcagagcatccattaaagacttttttagaacatggtgtgcttgccactattaatacggatgaccctgctgtagaaggtattgagatacagcatgaatatttaactgctgccccactagcaggtttaagtcctgagcaaatttatacagctcaagaaaatggacttaaaatcgcatttttatcagaacaagaaaaagatgagttaagacagaaatatcaatag

SEQ ID NO: 44024 - DNA, 1065 bp, Acinetobacter baumannii
atgagtgatgcgactttaattgccaacgatgcaaaaaacattgtacaagcgcatttagaccgtttaggtgagccaaaagacaaccgcctaagtgaagaagcaaaacaacaaaagtttgcacagatcgaagcagagctcaaaaaacgtgatgctgtccttgttgctcactactattgcgatccagatgtacaagaacttgccgagaaaacaggtggatgcgtttctgactctttagaaatggcccgttttggacgagatcatgcagcctctacactggttgtggctggcgttaagtttatgggcgaaacagcaaaaattctgtctcctgaaaaaacaattctgatgccgacacttgaagcaacctgttcacttgacttaggttgtccagtcgatgagttcacggcattttgtgatcagcaccctgaccacaccgtagtggtttatgccaatacatcggctgctgttaaagctcgtgcggattgggtggtgacttcaagctgcgcagttgaaattgttgagcatctagatagcttaggcgaaaaaattatttgggcaccagatcagcacttaggccgttatattcaaaagaaaaccggcgctgatatgttgctttgggatggcgcatgtattgtgcatgaagaattccgtgcacgtggcattgctaacatgaaagcactgtacccagatgcggctgtattggtgcatcctgagtcaccagagtcggtggtagaaattgccgatgcggtaggtagtacttctcaattgattaaagctgcgcagactttgccaaatgaaagactcattgtggcaacggaccgtggcattttctacaaaatgcagcaagcagtaccagataagattttggttgaagccccaacagcgggtgagggcgcaacttgtcgttcatgtgcacactgtccgtggatggccatgaatgaacttgatggaattttagaagttttacaaaaaggtgatcaagaaatacacgttgacctagcacttgctgaacgtgccaaaatgcctttagatcgaatgttagcctttagtgcatcattaaaacgttaa

SEQ ID NO: 44025 - DNA, 1221 bp, Acinetobacter baumannii
atggctgtcggtgacgtaacaatgccacaaatgcatgtggtaaaaggtgtaaaaattggctcaacagaagcatatgtacgttacccaaaccgacgagatctagtcatttttgaatttgcagaaggttcaaatgttgcaggtgtatttacgcaaaatgcattctgtgcggcacctgttcatgtctctaaagcccatcttgccgaaggtaatccgcgctatttagtgattaatacaggtaatgccaatgctggtactggtcctacaggtttgaaaaatgctcaggatacttgtgcaaagttagcggagcttgctggtgttaacagtttcgaagtacttccattttctacaggtgtgattggtgagcagcttccgatggaacgtttactcgctggcttacaacctgcattaaatagcgtacaagactctgcatggagtgatgcggcatctggcattatgacaacagacacagtgcctaaaggcgcatctgaacaatttgagcttgatggcattacttataccatgacaggtattagtaaaggcgctggaatgattcgcccgaacatggcaaccatgctgagctttgtggcaacagatgcgcctattcgccgtgatttagtacaaaagctattaaagactacagttgagcattcatttaaccgtattaccattgatggtgatacctcaacaaatgactcttgtatttttgtagcaactggtcaggctggtggtgctgaaattacatcggaaagcgatgtacgctacgctaaagtgttagaagtacttgctcgtgtaatgaaccgtttagcacagttaattgtccgtgatggagaaggtgcaaccaagtttattactgttgctgttgaaggcggtgcaaatactcaagaatgttgtgacattgcttatagcattgcgcattcaccacttgttaaaactgcactttttgcatcggatccgaactggggacgcattttagctgcaatcggctatgctggagtgaaagacttagacgtgtctaaaattcaggtatggttagacgacgtgcaaatctgtaaagatggtggcgcagccgaggactataccgaggaagcaggtgctcgtgtaatggcacaaaccgaaattaccattcgtgttgacttaggccgtggacaagccaaagacacggtatatacgtgtgacttatcttacgactatgtcaagattaatgcagattaccgttcgtaa

SEQ ID NO: 44026 - DNA, 480 bp, Acinetobacter baumannii
atgttgctgtcttataagtatatcaattcgcctgttgggcaattaaaactggttgcgaatgaaaatgctttggtggcagtactttgggacaatgaaaatccaaaacgtgttcgattggctgagctggtcgaacaacttgagcatccagttttattaaagaccgaacaacaattacaagaatattttgaaggcaaacgccgtgaatttacattgccattagattttgaagggactgcatttcaaaaacaggtctgggcggcattactgacgattccgtatggtgaaacaagaagttataaagatattgccgttcagatcgggaatgaaaaagcagtgcgagcagtgggtgctgcaaatggcaaaaatccgatttcaattattgcaccttgtcaccgagtcattggtgcgggcggcgctttggttggttttgctggtggtcttgataagaaagatattttattaagattagagcaaaaataa

SEQ ID NO: 44027 - DNA, 321 bp, Acinetobacter baumannii
atggcttgggctattttaattttagcaggtgtatttgaagtgatttgggcatattctatgaaaatgtctgaaggttttacacgcttaacacctagtattattaccgtagtttttatgattttgagtgtagttctactttcaatttcaatgaaaactttaccccttggtactgcttatacggtttggacaggcattggtgcaattggatcatttttagttggtattttctttcttcatgagcctattggtgcgatgagaatgattgccgctgtactgattgtatcaggactggttctaatgaaaatttcgtctccatcctaa

SEQ ID NO: 44028 - DNA, 996 bp, Acinetobacter baumannii
atgccattggtttatactgatggcattgttttttgtgtcagttatggtgcaaagatggctttagaaaaacaagagaatcaaataaatgtaaataaaagctgttctggctgtgggtgctcaaatgtagcagctcaggacttttctgtggcaagtgaacctagggtaaataaaacccaatgggtgagttattatcatattccccgtatggattgtgcagccgaagaacaaatggtaagaatggctttagcttcttatgctgagcatattcaagaactttattttgatttgcccgcccgccacttagcggtgtatcacagtactcaagatgaaaagattacgcagtgcctgcaacgtctaggtttaggagccgaattacaacaaactcaaccacattatgagcctgttgaaaaacccaaaaaggttcgaccaagttcctcaactaatgcagcacaaaaacaggtcctacaatggctgttactgattaatggggtcatgtttgtcattgagttaatggcaggcatcattgcctcctccacagggttaattgctgactcgctcgatatgtttgccgatgctgcaatttatggcattgcattatttgtggtaggtaaaaaccttgacgctcaattaaaggctgcacatctttccggatggtttcagtttggtttagccataatcgttttaattgatgtgctgcgccgttttatatatggcagtgaaccagtttcaattttaatgattttaattgggggattagcgcttgcggccaacattagttgtctttatttaatgagcgaccataaagagagcggggcacatatgaaggcgagttatatattttctgcaaatgatgtcatcgtaaacttaggtgtcattgttgcgggaatattggttgccatgacaggctcgcgttatcctgatttaattattggattgattattgttttgttcgttttaaatggtgcacgaaaaattttacagttaaaaaatgaataa

SEQ ID NO: 44029 - DNA, 756 bp, Acinetobacter baumannii
atgcgcatcactaagttattttctcaaatgatatgttgcggtgctttctcgggtatatctgtatttgcttttgctcaagagcctttaactcatgatcatttacgtgaacatggcggacagatctatcaagcaacaaaaattgatactggctggactcaaaatgaagaaggagaaggtagtttttcttctgaattagaaacttgggtgggaacggatgaaaataaattgttcattaaagcccacgttgaaaaagcagagtcagaagatgccaattatggcggttcagtactttatagtcgaaatgtagctgactattgggatgtacaggccggggtaaactatgaacgtttgcaacgagaagatgaaaagcaagatcgctgggctggtgtagtgggcttacatggcatggcaccttacttttttgaaaccgatgcttatctgtatgtaggtgaagatcagttatggaagttaagcctagagacagaaagagatttgctttttactcaaaagttgattggtaagccctatttaaaagcagatgttgttttacaagatgaatctcggtatgccagtaaaacaggcctgtcgagtttacaagctggctttcaaacccgttatgaaatcaataaaaaggtcatgccatttgttgatgtcggttatggttatgaaaaaggtttaaaacaaaccgcttggcaaactggaaccgactcagaacatggttggtattatggagctgggttaacactaaaattctaa

SEQ ID NO: 44030 - DNA, 1935 bp, Acinetobacter baumannii
atgtctcataaaacgattagcagcctcgtcgctgtatttggtctattggtttcaccatggactcttgcggcaattaaggaatatcaccttaatattaatgaacaacaagtcaatgttacgggcaaaccccttaaacgaattaccgtaaatggaaaatttacagcaccactccttgagtttgaagagggggatgaggctgttattcacgtccataatcaattaaagaatcaagatacctctttacactggcatgggttgttactgccggggttaatggatggtgtgccggcttttaataattttaaagggattgctccaaatggagattttgtttaccgctttaaggtgaaacaaaatggcacatattggtatcacgcccatagtaaaggccaagaacaagacggtttatatgggccgcttgtgatttacccaaaaggcaaaataccagttgcggcgcatgaaaaaactgatcgtgattatgtagtgatgctttcagatttccatgattcttctagcgatagcattatgaagaatttgaagaaatctgctgagtattatcaaaaccgccgtgaaaccgtatctgatattttgaagcaagttaaaacacaaggcttaaaagcaacttggcaagatcgttcaatgtggaatcagatgcggatgttaaaaaccgatatgtctgatgtgacgggttataccttcttagttaacggcaagacacctcagcaaaactggacaggtaactttaaagctggtgataaggttcgattgcgatttattaatgcatcagcaatgtcattttttgatgtcagaattccaaatttgaaaatgacagttgtaagtgcagatgggcagccagtcaaacctgttgcaattgacgagtttcgtattggtacagctgaaacctacgatgtcattgtggaacctaaacagccaaattatcagattgaagcagagtctattgaccgtagtggttttgctatcggtactttgcacaatgaaaatacgcaggctgtgggaccagtccaaatgccaacaccacgtccacgtgctttattgaccatggatgatatgggcatgagtcatggtggtggaagtaatgaacatgctggccatcaaatgaacatgcaacatgacatgtcggccatgcctgaaatgaaaaaagagacgactcaggctaatcatgatcacacaatgatgaatatggatcatgacatgaaaaatatgtcatctgacgggcatgatcattccatgatgcacatgacgcatgatatgtcagcgatgtctgaaatgaaccatgatatgcaggcaatgtcagctagcgagcatgaccacgctatgatgaatatgaatcatgagatgcctgctcaatctgagaataagcctaaaaaggatgaaccagtttatggctgggcaaatgcttcaacgccagctggtatgaaagcactgcaatatagcgatttgcaatctttaacacctcagccagatacccgtgcgcccgaacgagaattagtcattcgtttaggtggcaacatggagcgttatatctggaccattaatggcaagaaatttagtgataccacaccattacaagttaagtatggtgaacgcatacgcttgaagtttgtgaatgacagtatgatggctcatccaatgcatttacatggcatgtttatgcaattggaaaatggtcaacaagctgaaaacttaccaaataaacataccattattgttccacccggaaagactgttactgcgttattgacagccgatgctttgggagaatgggcgattcattgccatctgctctatcacatgagtgctggaatgatgaataaattaattgttgctcaagtcaacgatgggcaacaacccgctcagtcccagccaactgttcaatctgaaaatgagaaaggagctagtcatgcgcatcactaa

SEQ ID NO: 44031 - DNA, 399 bp, Acinetobacter baumannii
atgatgacactgcaacacttacgcaagtatgcttggtttgtgttcctgatgactttagttattgggtggagtggtgtgtctattgctcagacacctatgcagcatgatcttcatactatgccgtgtcatagtgagcaaatgaaacatcactctatgcatattcaagctgatgagcagacaacgtgtcatcaatctatggctcaggtttctcaccaacatggtgaacactgccaagactgtaatccggtccattgtcagatggtaaatctggctttacagcaagctgtaccagatattgaatcatcatttattcctattccatctcaatttagtagtatttatcaggcacagcatttagccggatactggcaagaaatcttacgtccaccaaaagcttaa

SEQ ID NO: 44032 - DNA, 822 bp, Acinetobacter baumannii
atgacagtaaaaattttagcggtagatatggatgggacttttcttaattctaagaagcagtacaacaaagcacgttttttaaaacagtatgaacaactaaaacaaaataatatccgttttgtagtcgctagtggtaaccagcttgcaaagcttgttacgtattttccagaaattaatcatgagattgcttttattgccgaaaatggtgctcatgttgtagatgcggggcaagagttagcttttgctcatttaagcaaagagcaattcattgagattttaaatgcgattgacccagtgtatacctctaaaatggtgatctgcggaaaacagagcgcatatgtgcatagcagtatgaacgcggaagattatgctaaagtcgctcgctattttgaaaagctgacggttatagatgacttttatgcactagatgacttggtgtgtaaaattacttttactgcgcaggaaaatgaaagttttacgatttttgagcattttcagaagcaaagttttgtaaaagataaggttttggtaccagtctcaagtggctttaattttatcgatttgattcttccggaccagcacaaagcacatggtttgaagctattattgcaaaaatggcaggttcaacccgatcaagtcgttgcgattggtgataacaataatgatatccagatgattaaagcagtaggttatgggtttgcagtcgaaaatgcagttgaagccttaaaagccgttgctccttacacaactgcaaataatgagcaagaaggtgcattacaggtaattgatttggttcttcagcatcaacctccatttgcttaa

SEQ ID NO: 44033 - DNA, 687 bp, Acinetobacter baumannii
atgtccaagccttatttgattgctccttctattttatctgccgattttgctcgtttaggcgaagatgtagacaaagtgttagctgcaggtgccgatgtagtgcattttgatgtgatggataatcactatgttccaaatttaacttttggtgcaggtgtgtgtaaggctttaaaaaattatggaattacagctcctgttgatgtgcatttaatggtatctccagttgaccgtattattggtgatttcctagaagcaggtgcagatatcattacgtttcacccagaagcttctcatcacattgaccgttcattacagcttattaagtctggtggtgctaaagcaggattagtttttaacccagcaacaccattgcattatctagactatgtacttgataaagttgaccaaattttattaatgagtgtaaacccaggttttggtgggcaaaagttcattccaatgactttagaaaaattacgtgaagcgcgtaaaattattgatgcaagtggccgtgatatccgtttagaagtagacggtggagttggtcctgcaaatatccgtgaaattgcagaagctggtgctgatatgttcgttgctgggtcggcaatttttggtcaaccagattataaagttgtgattgatcaaatgcgtgcagagcttgcaaaagtcggtagtgtagacgcttaa

SEQ ID NO: 44034 - DNA, 273 bp, Acinetobacter baumannii
atgaaaagcacaactcatctattaacaaatgatggaaaacgcattgcaaaacgtctagttaatcattggaaacataagtttgaagtacaagaaactgaacaagattttaaaatcttaatgcctaccgcaaccattacgcttgcaccagaaacagagcagttaaatgttgctattgatagtcagttagatgaccacaaccacttagaaaaagttgttcttgatcatctaaaccgcatggctcaacaagaatttcaggtggaatggcagcactaa

SEQ ID NO: 44035 - DNA, 846 bp, Acinetobacter baumannii
atgcaactcctgcaaaaaaaccgctgctttgaaggtgagcagcgcatttatcagtttgattctcaattattaaaaggctctactaagtttggggtgtatttgccgcctgctgctttagaaggtaaaccttgctcaactttgttttacttagcgggtttaacatgtactgaagaaacttttgccattaaggcacatgcacagcatatggctgcccagcttagtcttatattgattacacctgatacttcacctcgtggtgaacaagttgcagtaggtgaccattgggatttaggtcaaggcgcgggtttttatattaatgcgacgcaagcgccttggtctgagcattatcagatggaaagctatttaatcgatgagttatatccacttattttaaaaagttttccagtcaatgctcaacaggtcggtatctttgggcattcgatgggaggacatggcgccttaactttagcttttaaatatcctgagaagtttaagtcagtgtctgcatttgcaccgatttgcgcgccaaccgaatgtgcatggggtgaaaaagcatttagccattatttaggtacagaccgcgatagctggttggctcatgatgccacggctttagtctcaaaaaatggtgcggtatttaatgaaattttggtggatcaggggttagatgaccaattttatgaacaacttcaccctgaaaaatttaaacaagcatgtttaaaggcaggacagcctttaactttaagacaacatgctggctatgatcatggctattattttatccagacctttatggatgagcatttgcagtttcatgcaatccagttggaaaaagtcgctggctaa

SEQ ID NO: 44036 - DNA, 1452 bp, Acinetobacter baumannii
atgattgatctcaaaccttccattaacttttggcatgattttaaaagtaaccagcttgccggaatgtggttatttttggggtcaagacgttccttacagatcgtacatccctctattcttcagctcattgtttggggagtattaggtgggtgtaccaactcactttatagttggcttgttgccggtcaaattggcgacttcaactcacaaggtctaattggatacgcactttggccttttattgcgcttattgttggtattttcttatcacagcgtattaatcagccgcgtttaatgttggttccagccttattgtggttggttttagataccaatattttattaatacagtgtttaattcaatatttgggatctaatggttatctaaactttattccggatgctatttataacggtattttacctggtttgtttgtagcactttttgtgtggcaaagtttggcggtcatttgggtgttctcacgtgagcttaagtggccttggtgggagcgggcattggttatggttgcgaccattgcgaccatggtggtttggcaactttcagtaaaagatcagcctatttggaaagtggaagattctccacctacttttgccgaagatgctttttatgcacaaagtaaattacttcatgatgctttagagcaagttcaatatggtgagttagctaaaagtcattggtatttcttgggtgttgcaggcgatagttatcaagacgtttttaaatcggaagtggttcgtattaaagaacaatttgatacgcgttttggtacagtcgggcgttcaatgatgctggtcaataatccggatacccgaaccgaaatcccgattgcatctaaaaccagtatagagttggccttacgccgtatgggccagcaaatgaaccgtgatagtgatgtgttatttttatatatgacatcgcacggtgaacaaaaccattttgaaattgaaaatgcacctctagatttggggcaagtcgatccgaaatggttacgtgaaacgctcgataaagcggggatacgttggcgtgtgattgtcatttctgcttgttactcaggaagttttattccggcgttacagtcacctgatactttaattattacggcatctgctgcggataaaacttcgttcggttgtaataacgaagctgactatacttattttggacgagctttctttgatttagcgatgcgtgagcagtcttctatgaaagattcatttaatgctgctaagcaaaccgtaaccaaatgggaagtagctcaaggtatagaaccttcagagccacaatggatgattggtaagaatatggaacttatgctacctcagttggaaaaatatctttttcctcaaccaaatacaggtagtgtaaatattgctcagacacaaacagaggctaaaaacgatgcaactcctgcaaaaaaaccgctgctttga

SEQ ID NO: 44037 - DNA, 792 bp, Acinetobacter baumannii
atgcacatatattttgaagtagattttcaagaacaagcacagcactaccaagctgtgctttattctagaggcgtgactgtcgatttacagcctattgaaaaacttaatgcccgttttttacgtttaaatcctgacttggctctttgtgtagatgaaaacggactttggttatctgctaatggcatgaaaatgcagcctgactggaaagctgaaattccgcgtttaaaacgagcaactcttaaatcggaaatgattgctcgtgcttgtcagttaggtgaaaagcccgtactggtcgatgctacagcgggcttaggtcatgacagcttacttatggcttatctaggtgcccaaatccagctcgttgagcgtcatccgattttatttactttacttgaagattcaaaagctcaggcacagcatgatccctttttaagccaatttatggatcgtatccaactgatcttcgctgactctgcaagctatttacagcaattagatcaagaagaaaaaacagttgatgtggtctaccttgacccgatgttcccacagcgcgatcaaaatcaacaagcaattaaaaaacaagcccaagtcaaaaagcagatgcagcttttgcatttacttttacccgaagatggagaaatggatttgggtgatcatttgcttgagctagccaaaaaagttgcaaagcgagtgattgtaaaacgtccacgacatgctatttttttagcaaatcaagaaccagcccatcagtggcagggggatgcttgtcgttttgatgcttactttcagtaa

SEQ ID NO: 44038 - DNA, 666 bp, Acinetobacter baumannii
atgaaactgctggcgttggaaactgcaaacgagcaatgttccatttcattaatcgatgaaacccaagaactctttttccaactcgatacgcgagcgaaagcacaaacccagaccattttgccaatgattgagcaaggattacaacaaactggacttgacgtagctggtttagatgcaattgcctttagtcgagggcccggttcttttagtggtgttcgaattaatgcagcagttgctcaagctttagcttggtcacaagatttaccagtaattccagtttctaccttacaggctctcgcacaagcggcttaccgacttaaaggtttagaacaggtgactgcggtactcgatgcacgtatgaatgaagtttacattgcaagttttgttctagatgagcaaggcatcatgcagtgtatagatgaagaaaaattaatgaactacgagcaagcggctgcctatgcaaagcattgcctaatcggttcgggcgctaagctccttcaaactgatgcagaatatcaaacaatcactgccactgcacaagacattgcttcgattgcacgtgtgtatgcagcgcaaaagcagtgggttgatgctgaacatgctttaccagtttacttgcgtgatgatgcatggaaaaaaattgcggatcagggcaaagcaaattaa

SEQ ID NO: 44039 - DNA, 531 bp, Acinetobacter baumannii
atgatgtatagctatcaaggtcaccacccaaaagccttacatgagccatgggatggctggattgctccaaccgcaacgcttattggacaagtagaactaggccgtcaggtcagtatttggtttggtgctgtagtgcgtgccgataattgtgtcgttcggattggtaatttttctaatattcaagaaaattcggtattacatactgatgcgggccttgagctaaatattggcgaatatgtcactgttgggcataaagtcatgttgcatggttgtacaattggcgataacagtttgattggtatgaacgccgtcattttaaatcgagctgtgattggtaagaactgtattattggtgctaatgctttaataccggaaggtaaagtgattccagataactcggtggtaatgggctcacctggcaaaattgtaaaaactttagatgaagaaggcgcagcaaaaatacgcttgagcgcactacattatgctgaacactttaaaagctatgccgatttgaaagaattccacttttaa

SEQ ID NO: 44040 - DNA, 618 bp, Acinetobacter baumannii
atggaagagcacttgctaacacaaaagttacagcaaagattgcgcttttccacccgcatacaagaagcacaagctgcggtacttattgcgattacgaatgaaaataatcctaaggtactgcttacacgccgttcaatacatatgaacaaccatgcgggggaagtttcttttcctggtggcaagcgtgaccctagtgatactagtaatattgttgtagcgctaagagaagctcaagaagagacggctttaaatccgtttgatgtgcagttgttaggcgatttgccgatgcaacgtgcaagaagtggcttgtctgtaaaaccgattgttgggcttattcctcctgaggtaactttaattcctcagcccactgaaattgatcgaattttctttgtgcctttacagcaacttatagagacgcgtccgacgccatatgaagtgcgatatgctcatcaatctttatacttcccaagcttgcagattgataatgaaattatttggggtctcacagcgcgaatgttaattgccttatttaaatatggtttaggctaccaaaaagaatggccatttctactgaatgcaccaacgtttggaatgccaaaattttctcataaaaaataa

SEQ ID NO: 44041 - DNA, 558 bp, Acinetobacter baumannii
atgataattatgagtttctgtgtagcgtgtgggcataaaaccgaacaaaaaattcctttaggtgatcataaagtacgccgtgtttgtactcattgtggaaatattcactatgaaaaccccaaagtaatctgcggtgccttagcgttatgggaagacaaagtattactttgtcgtcgcgcgattgaacctcgttatggcttatggactttgcctgctggttatatggaattgttcgaaactatggaacaaggtgcggcgcgtgaaactcgtgaagaggcagaagccgagattgaaatagaacaactttattgcatgtacaatattccccgtattgggcaaatttatgtgttgttcaaagctcagcttaaagatggccttttcggtgctggcgaagaaagtatcgaatgtcgactgtttgaagaacatgaaatcccatggggtgaacttgcttttcctagtgttgaacacacattaagacattattttgaagaccgtaaacaacaagtttttccaacacatctagagacgttaggaactcgtttagaccatacaggctaa

SEQ ID NO: 44042 - DNA, 936 bp, Acinetobacter baumannii
atgaatattaatgcgcaaaatgcttggcttcatccaattagtagagaaatccaatctaatactcctcttcgtttaagcacattagataatcctaatgaagatatgcaaatttaccaaggtaaactatttaatgattatgctatcgcaggtagtgaagttgcgtataaaagtttaactaatttgagtactggaaatcctcaacactatggccgttggcgacaaaatctgggtggagaaagctataacggtggggtggacatttataaaggaaataaaattagtttcttagaaagcagtgtttttaaaacctcaggcaatgtgaaaactggtgaatcttatatttttccactttatgcaaccttaactttcaattttgagcaaacaggggcacaacctgtaaatttaggtattgtcattgatgaacatggcgatattagaactgatattaagccaaatgctacaatcactgatatgtcaggacaatgtgctaccgttgcagacagtaatttaattgatagtctaggtgtacaacaataccgtattggttcaactgctgcgactattaataatcctataaactctgatcgttcagtttatattcgtatgattttagcaaatccaaaatttgcaaatattgatggggcaattgttggattgtcatttattggggtttctgcaggaactgcaaaactaaatttatataatttactggcaaataaaatagataataatagtattaatcttaataatggtgcaaaagggttggctagttggtataaccctcatgcagctacacaagcgagttataatgcacttgaaaatgtaactccaactgatgaagagaaagcgctagcacaacgtatagctggtacagtaacaattaaacttgctgatcagtctattcctgcatgtaaagcaattaaaattaaatcttaa

SEQ ID NO: 44043 - DNA, 1389 bp, Acinetobacter baumannii
atgccacctcttccaaactctcacatgtttaaaatgtctcatttaaagaaaaaaatctctttagaaagctattactccgctgccgatattttaaaaaaattagaagagttaactggacttgtatatcttcaagatgataacaatcctgttattggttttttgccaaaaaattatttgatcgttcaaaataaccaaaactttttattcactaaaactgatttaaataaatataagttttcatcttatatagaaaatcttttagattttacacaattccaatctcaagaactaaaaaatagcaatagagaaaaaataagttttaagggtggatatattggttttattagttatgacttttctgcacatcaatttataaataatcaatcacataaacaaccgtctttatttataggttcctattattcttttattaaaaaaataaataatgaatggtatttttttagcgatgaaaataatgcttttgaaatttttaactatctttcagctctactcaataaaccttctagcaaactacaaaaaaataattttaaactagaacaaaatattcatcctcgctggtctaagaatacatacttaactgcttttcacaaaatacaagaatatattaaggcaggagattgttatcaaattaaccttactcaagaattcaaagcgaattttactggttcattattaaataaagcagatgagctatggaatttaaccaatgcaccatattctggttatttaaaattaacagaatttgagttgttaagttgctctcctgaattatttattgaatttaatgtagataagcaaattaaaaccagacccattaaaggtacaatgcctcgttatgagaataaaaagcaggatttactttcaaaacaaactttaaaaaattctaaaaaagatcaagcagaaaatgtgatgatcgttgatctattacgtaatgatttgagcatttatgccaatacaggttcggtaaaaacaacaaaactattcgaaattgagagcttcaatcaagttcatcatatggtgagtgagattacggctacacttaaaaatgatattaatcctatgcagatgttactcactgcattaccaggaggttcaattacaggagctcctaaaattcgggcaatgcaaattattgaagagctagaaggcgcacctcggggagcatattgcggcactttaggatattttaatttcgatggtactggacgctggaatattttaattcgtagttttcaacaatatcaaaaccagctctctatttgggcaggcggcggtattactattgcttcagaggctgaggctgaatatcaggaaagccttgataaaatctctgctatgctgaacttgatgaacagcacagcagaataa

SEQ ID NO: 44044 - DNA, 1086 bp, Acinetobacter baumannii
atgactgtatctacagcacaaatgcgtttttggagtcctgaggttcgtgaattagagccgtatgtgccaggtgaacaacctaaaatccagaatctattaaagttaaataccaatgaaaacccgtatccaccatcaccaaaagtagtagaagcagttcaagcggtgttacatgaacaagccgatgtgctgcgtctatatccagatccggatgcgacagcgttaaagcaagcaattgcgaaacaacagaatattgatgtatctcaagtttttgtaggtaacggttctgatgaggtattggctcatatctttaaagcattttttcttcaagatgaaccaatcctgtatccggacatcacttatagtttctatccagtttatagccaattttttggcacaaaaacaaaagaaattcctctcaatgagaatttcgaaattgatgtgcgagattatacccagccaaatggtggggttattattaccaacccaaatgcaccaaccagtattgcgctcagcttggcagaaatcgaacaagtattacaggcaaatccggaccgcgtggttgtgattgatgaagcttatgttgatttcggtgctgagtcagctgtaagtttgataaaccgctatgaaaatcttgtggtatgccaaacgacttcaaaatcccgttctttagcaggcctacgagtcgggtttgcgattgctcagtctcatttgattgcagcacttgagactgtaaaaaatagttttaattcatatccaattgatcgctttgctattgcagcagcagtagcttcttttgaagatcaggtttattttgaagagcagtgtcaaaaagttataacaagtcgagagaaacttgttcgtgatttaactgtacttggttttaacgttttgccatcgaaagcgaattttatttttgctacgcattcacagcatgatgctgggcaacttgcacaaaaattacgtgagcagggcattattgttcgttacttcaataagcctcgcattaatcagtttttacgtatcacggttggaactgatgagcaaaacgcgcgtttagttcaaactttgaagcaagatattctttaa

SEQ ID NO: 44045 - DNA, 1290 bp, Acinetobacter baumannii
atgcgacgtttatcgactcaagatcagaacttcaaacaggtttttgccgagcttttagcttttgaaaccgttaatgatcctaatttagttcaaacagtagatcaaattattgctgatgttcgtcagcatggtgatgatcatgttttaaaacttactcaacagttcgatcgacatccagcgcatcaattttccgatctagaattgtctcaacaacaacttaaagctgcttttgatggtttaaatcaagagattcgtgaagccctgcaacttgcagctgatcgtattcgtacttttcatgaagctcaaaaacaagatagctggacttatgtagatgatttgggtaataccctaggacaaaaagtgacgccacttgatcgtgttggtatttatgtaccaggcggacttgcatcttatccttcatctgtacttatgaatgcggtaccagcacatgtggccggtgtacctgaaattattatggttgtgccagcgccaaatggtgaactaaatccactcgttttagctgccgcctatctagcaggtgttagccgagtatttaccattggtggggcacaagctgttgctgctttagcttatggtactcaaactgttccacgtgttgataaaattacgggtcctggaaaccgatttgtggcagctgctaaacgtgctgtatttggtcaggtgggtatcgacatgattgctggaccttctgaaatattagtttatgcagaaggtgtgaataatgctgaatggttagcgatggatgtattatctcaggctgaacatgacacagtagctcaagctattttcattactccagatgaagcattattagaagcagtagagtctgcaattgagaaacatttaaatgaattgcctaaagctgagattgcgcgtacatcgattgaaaatcgtggtgcattagttttggtaaaagaccgtgctgaagcagttgatttgattaatcaggttgcaccagagcatttggaactatgtcttgatgatgctgaagcgatgagccaagatattcgtcatgcaggggcaatttttatggggcgctatacacctgaagcaattggtgattattgtgctggcccaaaccacgtattaccgacatcaggcacagctcgtttctcttcgccacttggtgtatatgattttcaaaagcgctctagtttgatcatgtgttcaaaagatggcgttaagactttggctaaaacagctgatgtacttgctgttcaagaaaatctcgatgcccatgcacgctcggcgcgttatcgttatcaataa

SEQ ID NO: 44046 - DNA, 684 bp, Acinetobacter baumannii
atgaatgatgtaagaaacgatgatcctaattttaacgtaatgggtaattttgatcatggtttgaccttggcactgagtaaaggacgtattttaaaagaaactttacctttacttgctacagccggtattaacttgcttgaagacccggaaaaatcgcgtaagttgatttttccaaccacacataagcaggttcgtattttaattttacgtgcatctgatgtgccaacttatgttgagaatggtgcagctgacttaggtgtagctggtaaagatgtacttatggaacatggcgctcagcatgtctatgagttattggacctgcagattgcgaaatgtaaattaatgactgctggtaaagtaggaatggaacgcccaaaaggtcgtttaaaaattgccactaagtatgtcaatcttacacgtcaatattatgcgagcttaggcgagcaggtggatgttattaaactttatggttctatggagttagcgccattagttggtttgggtgattatattgttgacgtagtggatactggaaatactttacgagcaaatggtcttgagccattagaagaaatttgcaaagtatcttcacgtcttattgtcaataaagcgagctttaagcgtaaacaggttttattgaacccaatcatttcccaacttgaacaagctgttcaatcacgttaa

SEQ ID NO: 44047 - DNA, 1257 bp, Acinetobacter baumannii
atggataaatttttaatcacgggcggtgttaagctcgaaggggaagtacgcatttctggtgctaaaaatgcggctttaccgttacttgcggcaatgattcttgctgactctccaattacattaaccaacgttccaaatcttaaagatgtaaatactttggtgaaattaattggtggactgggtgtcacaattagttatgaaaatgacacggttaaggcggatacttctactttagataaccagtttgctccttatgagcttgtcaaaacaatgcgtgcatctattttggtattagggccattattagcgcgttacggaaatgccaaggtttcattacctggcggatgtgctattggctctcgtccagtagatcaacacttaaaagccctagaagcattgggtgcacatatcgaagttgaaaatggttatgtacatgccactgttgatggtcgtctgaaaggcggcgaagtggtttttgatatggttaccgttggtggtaccgaaaatattttaatggcagctgctttggcagacggtgtaaccacaatccgtaatgctgcacgtgaacctgaaattactgatcttgcacaaatgcttattaaaatgggcgcaaaaattgaaggtttagatacggatacattggttgttactggtgtagaaagtctacatggctgtgaatatgcagttgttgcagaccgcatcgaaacaggttcttacttagctgctgctgcgattactggtggacgtgtaaaaaccacccatacagatccttcattgcttgaggctgttttagataagtttgaagaaatgggtgctgaagttacccgtggcgatgactggattgaattggatatgttgggtaagcgtcctaaagcagtaagttttagaacactacctcacccagaatttccgactgacatgcaagcacaaattatggctgtaaatgcaattggtcgtgggtttgcaacgatttccgagaccatttttgaaaatcgtttcatgcatgttcctgaattgtcacgtatgggtgctaatattcaggtcgaaggccatgatgcagttgtgacgggtgttgaaaaattacaagcagcacctgtaatggcaacagatttacgtgcttcattctctttggttttagcggctttggttgctgaaggtgatacattaattgaccgtatctaccatattgaccgtggttatgagcatgtagaagaaaaacttcaaggtttaggtgccaaaattaagcgagtaagttaa

SEQ ID NO: 44048 - DNA, 252 bp, Acinetobacter baumannii
atgaatagtgaacagctcactcaaattttaaaagaagcttttcctgaggcggaagtagtggtgagcggacaggctggaaaatttgacctccgtattgtggatgatcaatttgaaggtaagcgtactgttgcccgccaacaagcagtttatgcaccattaaatacttatattgcaagtggcgaagttcatgccgtaacaattcgtgcgatgaccaaagatgaatggcgcaaagcaagccttttcggagcttaa

SEQ ID NO: 44049 - DNA, 339 bp, Acinetobacter baumannii
atgcaaataacgattcgtggacatcatttagcaattacaccagctatagaagaaaatattaaagcaaaatttaatcagttaacgaaacatcttgatcaggtgaatagtatgcagattaaattaacgaaagatcatcagattgataagcgctcacataagggtagctctaatcatgtggctgaagcgatagttcgattacctggaattgagctgtttgctcaagcaacagcggatgatatgtatacttcaataaaaaaactgactgaaaaattaaaaaaacaattgttaaaatatcggaaaatgcaatgtacgtattctcaagttgctgtttctatttaa

SEQ ID NO: 44050 - DNA, 1449 bp, Acinetobacter baumannii
atgaaattatctgttggattgaaagttgcgaattcattatcgttaacgcctcaattgcagcaggcaatccgtttactacaactttctagcctagagttagagcaagaaattcaaattcaattagatagtaatccattacttgaaaaagtagaagatgaatcactagcagaaagtttatctactttagaacacaaagaaactgatgatcttacaacagagttgaatgctgatcacttacctgatgacttgcctgttgatactgaatgggatgacatttatacacatcaatccactgctttgggtactcctgagttcgaagagcgtgaagataatcgccaagttcacctgacgcttaaagaacatattttggagcaagtgaacttgctgcatttttcaaaaatagatcagttgattgcttattgcatagttgatgctttagatgataaaggttttctggatgctgaattagaagagattattttggcagtacagcatttattaagtgagatggatatagatgaggaagtggaagaggatgaagttttagtagttttaaaacatattcaacgtcttgatccaattggtattggagctcgtaatttagctgaatgtttaaaagttcagttggagttcttgcctcgagaaactgaatatttgaaagaagccagaagtctacttcaatattacgaattactgattgcgaatgatcttaataaattattgaagcaaacagggctttccaaagaacaattaaaatttgcagttgatttattaaaaacattaaagccttatccaggcatggattttgaaaagcaagaatcagaatatcaaattcctgacgtagtcgttgccaagaaggacttgcattggcaagttcagttaaatcctgatgtgatgccaaaattaagaatcaattctttttattcgagtatgattcgtagggcagatcaaagtgatgataatttatacctacgtaatcaaatgcttgaggctaaaaattttataaaaagtattgatgaacggcacaaaacattattaaaagttgcgacttgtattgttgagcatcaaaaagcatttcttgaaataggtcccgaagcaatgaaacccttagtactaagggatgttgcagaagaagtagaattacatgagtcgaccgtttctcgcgttaccacaaataagtatatgcttactccacgtggactttttgagttgaaatacttcttttctagtcatgtggggacaaccacaggaggtgaggcttcttctaccgcaattcgggcgatgattaaaaagttagtttctaatgaaaatccgcgtaaacctttgtctgataatgcaattgctgctttattgaaagaagagggaatagaagtagctagaaggactgtagcaaaatatagagaatcgttacatattccatcgtcatccgagagaaaagtcttgatctaa

SEQ ID NO: 44051 - DNA, 150 bp, Acinetobacter baumannii
gtgaatgaccgcaacgaaaccaatgtaaaaggtgtatttgctgcaggtgactgtaccactgtaccttacaagcagatcattattgctacaggtgaaggcgctaaagcatcactctctgcgtttgattacattattcgttctgggcaataa

SEQ ID NO: 44052 - DNA, 345 bp, Acinetobacter baumannii
atgaataaattacttgttgctttaggtcttgctgcgactgttgcccttgttggttgtaataaagataaagctccagaaactggcgcgactacaggtgaacacttagaaaatgctgctcaacaagcaacagcagatatcaaatctgctggtgatcaagctgctagcgatattgcaactgcaacagacaacgcttcagctaaaattgatgctgctgctgaccacgctgctgatgcgactgctaaagctgcagctgaaacagaagctactgcacgtaaagcgactgctgatacagctcaagctgttgaaaatgcagctgctgatgtgaaaaaagatgctcaacactaa

SEQ ID NO: 44053 - DNA, 612 bp, Acinetobacter baumannii
atgaaattatattattcgccaggcgcatgttctttagctgcacatattattttaaatgaaattaatgttgattttgatttagaacgagtaaatttaaaaacacataaaacagaaaaaggtgcagattattatgaaattaacccaaagggatatgtaccagctttagaaattaatccgggcttaattttaactgaaaacgtagcgattttacctttccttgctcagcacgaccctaaacaagatttgattcctccttcgggcttaggccgtgcgaaagtattagaatggttgggctatttaaattctgaattgcatgatgcatacgcggtattttttggggcgccgttaacaaatgatgaaaaaacaaaagcttatgctgaaatcgaccgtcttttaaaatatatcgataattatttggctgagtcggattatgactatttggtaaatgataattttggtccagcagatgcgtatttatttgttttaacaaattggtcaaactcaattgagcatgatttaacgccatataaacatattattgccttacgtaataaagttgcagaacgtcagtcagtacaaattgcaatgcgtgatgaaggtttaatttcataa

SEQ ID NO: 44054 - DNA, 2439 bp, Acinetobacter baumannii
atgaaaacttttcaattaaaaacactttcggtttttttaagtgcattaggtgcattttcatatagttctgttgctcaggcacagctcatgtttagccagtatgttgatggtagcagtaataaaaaagggttggaaatttataacccggatggtactaccgttaacttggctgattatgaaattcaacaatttaataatggtggaactgcgaaaacagctaccttccgtttacaaggtacacttgcaagtaaacaaaaatttttggtggggcgttcagagttacagacagaacttggcaataaagtaaatcaagtggctgcattgtcttttaatggggatgatgcagttgtgcttgtttataaaggcacacctgtagatcgttttggccgtattggggagcgaccagaggcaggttggggaactgctgtttcaagcttgggaaatagctttaaacgtattgaaactgaaaatccagctttgagtattgatccgacagcggtatttgatttggaccattcatggacagcatgggcaaaccgaaatgattttacaaatctatcaggtactactactcagcctcctattgaaacggtcagctgttcaagctcagatacaccaattgccgatttagcaacatcagcacaaaaccagacttataccgtgcgtggggtaattactgccgactatcgttatgcaaatggtttctcaggtttttatgttcaaacacctgatacgaaagcacgtgcaaatgtgagcaatgccatttttgtttatattccgaatagtagtacggtgaaaggtggacaaattggtgatgaggttattttacgtggccgtttaaccagctatcaaaatcagctacagattgaccaattacaacaagatattcaaacctgtaatagcaatatggcaaatcaggttcagccaattagccttgaactaccattttcgagcttaacaggcggttcaacccattctccgcagcgttatcaaggcatgttggtgaaattgcctcagactttaacggtgagtgagaattataattatggtcgttatggtgaactatctttaagtttaggtcgcttatatattccaaccaatttatatccagcgctatctcctgaagctaaagctctagctcagaaaaatttattatctaaaattatttttgatgatggttataacaaccaaaaccgtacgccatggttacctacaaattttagtgctgccaatacattgcgttcaggctatcagcttaaaaatgtcgaagggattttagaatatcgttttaacggttggcgcgtacaaccagtgcttggacgtacgcaaccagaagttattactcaaatcaacccgcgtcaaaatgttattacgaaaaatgccaatcatattcgtgtagcttcatttaatgtcttgaactatgacaatggtgcaacaggtttcccaacagagcgtggtgcaaacacacaagcagagtttgataaacagcaccgtaaaattgtgagtgcactcaaatcgattgatgctgacgtttacggtttaatggaaattgccaacaatggctatggcccaaacagcgcgattgctcatttaacgagtgcactaggtccagactggaaatatgttattcctgaaaatctggaccgtttaggtagcgatgttattgctgttgcgattatttataacagcaagcgtgtgaagcctttaaataaagctgttgtgcttgatttaggggataaaaacagaacgaccttagctcaaactttccaagctgttcgtggtaataaaacatttaccgttattccaaaccatttgaaatcaaaaggatgtagtggagtagatgccaactcttctgatgcagatcaaaatgatggtcagggatgctggaatccaacccgcgtaaaagcagttgatcaaattgtgcagtggctagcaaaaaatccaacgcaagtgcctaagcaaaatgctttactcgttggagacatgaacagttatgcaaaagaggcgccgattttggcatttgaaaaagccaattataaagtcttactcaatgacgctaaagttgggcaaggcgctcaggcgtacagttatgtttttggtgtggcaagtgatgcaaatggtaatggtggagcgggtaatttggatcatgctattgctgatgcagatttatatccaaaagtagttcgtacttttgcttggcatattaatgctgacgagccgacggttctagattacaacgaagaatataaaactgatgagcaaaaagctttgttctatggtgaagatgcctatcgttcttcggaccatgaccctgtgattgtcgatctagatttaaatggtaaagactcgaatcagccaaatgataaccagaaaagtccaattttcgatttcttatctcaattaatggaatggattagccagctttttaaacgtagttaa

SEQ ID NO: 44055 - DNA, 717 bp, Acinetobacter baumannii
atgtcgatcgatcagttagaaacgcaaattgcagaattggacaatttgcctgaacaccgtgaaattgtgacgtttatgcgtcgttcagccccactcaatacgtctcaacgcacggctttagaacaacatcgcgatttaattttggaatatcccgtgggtgacttacgtcagcacttcgagcatccagagcgccctttaactgttgaaatcggtttcggtatgggccgttctttagtgcttatggctaaagcgaaccctgaacgcaactatgtgggtattgaggttcatgtaccgggcattgctcaatgtgtctatgaagcaggtatggcagagcttaaaaatttacgtgtactcgatgctgacgcaattcaagttttacgtgaaatgcctgacaacagtatcaactgcgtacaactttacttcccagacccttggcaaaagaaacgtcatttcaaacgccgcttcgttattcatgaacgtatgcaattggttgaacaaaaacttgagcttggtggcacattccacgctgcaacagactgggaaccgtatgctgagtggatgttagatgttttagacaaccgtccaaaccttgaaaacttggctggtaaaggcaacagctatcctcgaccagaatggcgcccagtaactaagtttgaacgccgtggcattgagtcaggtcataagattaatgattttatctttaagaagattaagtaa

SEQ ID NO: 44056 - DNA, 627 bp, Acinetobacter baumannii
atgttaaaaatcttagggcgtgataattctattaatgttcgcaaagtcttatggctatgtgacgaattaaatcttacatatgagagagaagattggggcataggtttccgctccgctcaatctcctgaatttttgcaattaaatcctaatggtcaaattccagtgattttagatggtgacttagtcctttggcagtcgaatagcattatacgttatctagcaaatgcttatgataaagaccatatactctacccaactcaagctaagcaaagagctattattgaccagtggattgattggcaagctatagaactgaataacagttggacttatgcatttatgtcgctcattcgacattcagcccttcatcaagatccgaatttgttacaacaaggtattgatcagtggaataaacaaatgcagattctcgatcaacaacttgcaaaaactcaagcctatgttgcaggtactgagtttaccctagccgatataccaattgggctgtctgtacaacgctggaaagcaactccttttgaccatccagcgcttaaacatgttgaccaatattttgaacgtttaaatcagcgtaaaggctttttaaaatggggcaataacggtcaaccttaa

SEQ ID NO: 44057 - DNA, 780 bp, Acinetobacter baumannii
atgaaaattagtttgttagggagtgggcgtgttgccttccatttggcaaaggcactgttggctcaaggtcatcacatcgcacaagtctatgcacgtgattttgagaaaaccaagaagtttgcagagcaaattcaagcgaaagcatgtcagtctcttcaagagtttcaaccaagcgatttaattattctagctgtttcagacagtgctattactgaacttgcaacgcaggtacatgagatattcccagaaacgcttatggtccatacctcgggtagcacagacattcaagtcatcagtaatattcatgaaaaagcaggggtgttttatcctttgcaaacgttcagtcttgaaagagacgttgattggcaagccacaccattatttgtagaggcgaccaataaagacgatttagtcatactttctgatttagcaaatagcctaagtaagcgtgtatatcaatatacctccaaacaacgtttaactttgcatttggcagccgtgtttgcctgtaattttagtaattattgttttgatatggcaaagcaagttgtagatgcagagcaggtcgactttggcttgctttacccattaattctggaaacagcaaaaaaagctactgaaaatgatccaaagcaaatgcaaacaggacctgcaatgcgaggagatcagaatatcttggtaatgcatcaaagcttattagcccaagcaaatcgagatgatttaaaacaggtttatcaacttttaagtgatggcatcgtaaagcgccatcactcatcttaa

SEQ ID NO: 44058 - DNA, 1416 bp, Acinetobacter baumannii
atgtcgataaaccctatagaactgcttaaagaaaaagtatcttcaacaatattaaataatcaggatggatacctcggcgaaaaaacaaatgctttatctaagttttatccaattctactttcattattagctgctaaacctgatcttataggacaattgaaaaacagtttggctccgtcattatccgatcttttttctcataatgagcaaattaagaatactgtgcttacccatttaagtggtacagcaccaaataatgaaatcgaaaataccctcaatagcgcattaaaaccgagccttaatgcaatttctgacgttgccggaaatgatcaacaaagtattgtgaactatttacgtcagcatgctgaaacgatccgttcatatttaccaggatgggccgtgggcttattagctccattaggtattggagctggtttatcttctgtaacatcatcgacagcaccgccacttgcagcagcaacagagactacgggaaaatctcgtggttttttacccattattgcgctcattattctcgggttattaattgcttggttgtggcgctcttgccagcataaagaagctacacctgcacctgaaactaaagctgcaagcggtgtagaggccgcggctgctccagctactttaactttaagcaccgatgataaaggtgctgtgagccagtgtcaggctggaattggcgatcaaggtttcttggcgactttacaaactcaagttaaacaagtcttttcagctactaaagattgtgatgttgatacaagtcaaacttatgcggctgcttttaccgataaggatgctttagcaggcgtgttgggtgcattaaaaggtattccaaacgcttctttagaatgggtgggtgacaagattacattgaaagcaggtgatgctgcagcgttagaagcgttaactgctaaagtaaaagcacttgttccacataccgaagttgttgccgcagcgccagaaacagctgaacagtctgtaagcaatagtttaagtgcttcacaaacagccttaactgcaattgacccgaacaatgtagatgtaaacgcactagttaaagcacttaatttacaaattattaactttgcgagtggctcaagtgacatacctgcagataacaaagctattcttgatcaagcagcaacccttttaaataaagtgtctggtgttaaattagatgtaggtggtcacaccgactcaacagggaatgccgctgctaataaagcgctttctcaacgacgtgctcaagcagtagtagattatttagtttctaaaggagtggatgcttctaaactggttgctaaaggccatggttcagaacagccagttgcagacaatacgactgaagaaggacgctttaaaaaccgtcgtattgagttttcagtagctcaataa

SEQ ID NO: 44059 - DNA, 1236 bp, Acinetobacter baumannii
atgagtattgtaaaaattgaaaatgtacgtgtgttagacccaatccaaaaaacagacagcgtacaaactgtatatattcaagacggtaagctcgttgccccaatcgatcaggttgaacaaactattgatggtcagggtaaatggttaatgccaactatggttgatttgtgtgcacgtttgcgtgaaccaggtcagcagcagcatggaacgttgaaatcagaaggtaaagctgcacgtgctaatggtattttgcacgtcattacgccgccagactcaaagccgattgtacaggacaatggtgcgcttattcatggcttaattgaaaaagcttggcatgatggtggtattcacatgcatatcatcggtgcccagactcaaggcctaaatggtaagcaaccagcaaatatggccggccttaaaaagggtggctgtactgctgtttcaaatgcgaatgctgcttttgaaaatgacgatgttgttgttcgtacattagagtacgccgcgggtcttggtttaaccgtcgttttctatgctgaagagccacaacttgctaaagatggctgtgctcatgaaggttttattgcatcacgtcaaggtttaccaatgattcctgcaattgcagaaaccgtagcgattgcaaaatatctgcttatgattgaagcgacaggtgttaaagctcactttggtttattgtcttgtggcgcttcggtcgaattaattcgtgctgcaaaagcaaaaggtttaccggttactgccgatgtagcaatgcatcagttacatttaactgagcaactaattgatggcttcaattcacttgcacatgttcgtccaccattacgttctgagcaagataaagagcttttacgccaaggtttaaaacaaggtgtaattgatgcaatctgtacccaccacgagcctttaagcagttcagctaaaatggctccatttgcagagacgcaaccgggtattactgcatttgatacttatgtggctttaggtattcagctcattaatgaaggtctatttgaacctttagaatgggtaactaaagtgacaagtgctcctgcacaggtagcaaatatgacagctcgttggcaagccgaagcagggtgggtgttagtagatcctgagttaagctggactgtaagtaaagacactattttatctcaaggaaaaaatacccctttactgggtcaaaagcttacaggtaaagtcttacagacttttgctgtttaa

SEQ ID NO: 44060 - DNA, 1017 bp, Acinetobacter baumannii
atgcatattgcagcgttgcatcaaccgagccaggttcagctcaatcaagacggaaatttaaaacattttttaacgattgagggcctttcaaaagaaaacctcactaagattttagataccgcgcaaagctttttagatgataataataatttaattaaccgcccgcttttagaaggtcggacggttatgaatctcttctttgaaaactccacccgtactcgtactacttttgaagcagcagcaaaacgtttgtctgccaatgtattgaacattgatattgcacgttcaagcacgtcaaaaggtgagactttacgagatacgctttggaacctcgaagcaatggctgccgatatttttgttgtacgtcattcatcttcaggtgctgcacatttcattgctaaagatgtatgtccgaaagtcgcaattattaatgccggagatggacgtcatgctcatccaacgcaagcgatgctcgatatgctcactattcgccgtgagacgaaaaaaccatttgaagacttgagtgttgccattattggtgacattaaacactctcgcgttgcgcgttcagatgtagctgcacttcaaacactcggatgtaaagatatccgtgtgattgctccgaatacgttattgccagttggtttttcagaatatggcgaccatgttcgtttgttcaataacatggacgaaggcattaccggttgtgatgtgattattgctttacgtattcaaaatgaacgtatcgattcaccagcattatcttcgcaatctgaattttacagaatgtacggtttaaacaaagagcgccttagcttggcgaaaccggactgtattgttatgcatccgggaccaatgaaccgtggtgtagaaattgattcgagtattgccgacggtgaacagtcagtgattttaaaacaggtcactaacggtattgcagttcgtatggctgtgctagcgttgtctatgcaagggcaactccaagaacaaggtttaattgaagcgattgcgttgtaa

SEQ ID NO: 44061 - DNA, 345 bp, Acinetobacter baumannii
atgaaagatatgatggggaatggttttatagcgaatgcagaagctttcacactagctactcaaatttatgtgcgtatgcgcagagtaacgggaagggtgatagatgcaatgtacgttgttcaaaataaagactatgcgaaatatgtaattgcactggcactagaagcagaagatgacgaattaaaacgctgtgttgaacgattaatggtattgactgattcaataccagagcagtctaaaaaagaaatgacagtaagtattcaaactagtgaagaatcagaaatcacagccgaagacatttatcgggcacaagttccacatcattatattggtgctttaaggtaa

SEQ ID NO: 44062 - DNA, 2205 bp, Acinetobacter baumannii
atgaatacctctttacgtttaaaccactattggattacttgtgctgatggtttagaaaccctcttacaagaagaaatagaacagcttggcaccaaagtgacagaacgtaaagcaggacgtttaatcattgaaggaacgcttgaacatgcttaccgtatttgcatgtggtcacgtcttgcttcacgtgttttacttccaattcatacttatgaacttgaacgtacccacgatgcgcgtgatgtagcagaagagctttatgaaggtgcaattagttttgattggtctcttatttttgcaccacaaagtacctttgcaattcgcttacatgcagagcgtgaaattaaggtaaatacgcagtttgcaacccttcgtgtaaaagacggcgttgttgattcctttatggaagctgtaggtcgccgcccaagtattgataccaaacaaccggaaattacattatatgtgcttgcgggcaaaaccgagcatacatattgcctagacttatctggtgattcattacataaacgcggctaccgtcgtttcatgacagatgcgccaattaaagaaaacctcgcagcagcaattttacaaaaagccaagcttcaggaacgtaacccggaaatcgtacttgacccaatgtgtggttcaggcacatttattattgaagcgttaatgattttaactgatcgtgcgccgggtcttgtacgtcgttttggttttaatggctggcatggtcatgaccgtgaactttggctttcactcaaagcggaagcagcagagcgccatgaaaaagcacttgaacaaccgttacctaagtttcatgcatacgatgctgactgggaagctgtaaaagcaacacgcgaaaacattattgcagcaggttttgaaaagctactaggcgatattcaaattgaagagcgtactttagcagactggccagatttcggtgctgaaaataaaactgcttttatcgttaccaaccctccatatggtgagcgcttaggtgacaaagcttctaaccgttctctttacttaggcttatctgccctcttacaaaagaacttcccaaatcaatatgcagcaattattgccgcacaaattgaacaagccgatgttttagcatttgaagcaccagaaacattacgcttaatgaatggtaaattaccgatttatgttcgtttcggtacagttaaacctgaaaaagtcactcaaccattcttagcaaactggcaagctcaacctgttgaaatggaagaagctcaagactttgctaaccgtttgcaaaagaacatgtctgccttgaaaaagtgggcaaccaaagaaaatatctattgcttacgtttatacgatgcagacctccctgactttaaccttgctgtagacttatacggcgaccgtttacatgttcaggaatatgcaccacctaaaaagattgatcctgaaaaagcaaaaaaacgtttcaacttagcgcttgctgctattcgtgcggtaacaggattaaatcgcgatgcaatctttattaaaacacgtgcgcgtcaaactggtacaaatcagtacaccaaacaaagtacagccaataaacgtttcatcgtgcaagaaggtaaagctaaaattttagtgaacctgactgactaccttgatactggtttgttccttgaccaccgtcaaatgcgtttacgtattgctcaagaagcacgtggtaagcacttcttaaatctttatagttatacatcgacagccagcttacacgcggccttaggcggcgctgcaagtacaaccagtgtagatttatctaatacttacttgagctggtcaaaagaaaacttcgttttaaacggtttaacggtagatcatgcagacgaacagcatatgttctttgcaagtgactgttttgaatggttaaaagaaggtcatgaacaatatgatcttatttttattgacccgccaacattctctaactctaaaaagttccacggtacttttgatgtgcagcgcgatcacgtctctttgattaaacgtgcaatgaaccgcttaacaagtgaaggtacactttacttctcaaataactatcgtggttttgagatggatgaagagatcgaggctttatatgacgttgaagaaattacttctgaaacgattggacccgattttaaacgtaatcaaaaaatccaccgtgcatggaaaattcagcatccagggctaaactaa

SEQ ID NO: 44063 - DNA, 420 bp, Acinetobacter baumannii
atgatgaacaataagcaagggtgtgtgctgggaattttaagttgtatagtggtattaccgacgaatctatgggctgcacagcctatgaatgaaagtgcgcttgcaactcaaacaggagcagtaacggcagctctacccgtaattattgcaaaagctcaagatgatgcgaagaagccagaaatagagcaacgtcaagttcggcaaacactaggggataactatttacaacaggttcgatggaattcactgcgcacaagtgtgttatcgccttatcaagaacaaaagcaaaatcaggtcattgatggaaaagagaagaaaaagttagaaatggttgctctgccagaaagagctgatcgttttacgcgttatgattttgagtcaaagaatgtacatggtgaagttatcattaccgtgaagtaa

SEQ ID NO: 44064 - DNA, 489 bp, Acinetobacter baumannii
atgctccagcaatgctgtcagttattagaagaccgtttacttaaagttgcatttattgaaagtgcgagttcaggttacttaaccagtcagttttcgattcataaaaatagtggtgctgatattttactgggtgggttagtcagttatgaccccagtattaaaatcagtgttttaaaagttgatccaaagttaattgaaacctacacagcagaatcgccacaagtaactgaagaaatgtgcaggcttggtcaaaccctatttcaacaagctgacattgttgtgagctgcacaggtttattaaaacctggcggaagtgaaaccacggaaaaacctgtaggtactttctttatttgtatttcttatctaggacgtatttatcattatcattattttttatcaggtcatgccgaacaaaaacttaaaactctcacacagaaagtagcagattcaattattgcgcttatatcttcaaatcagcataaaagttaa

SEQ ID NO: 44065 - DNA, 2580 bp, Acinetobacter baumannii
atgcgatttgaaaaatttacgaaccgcttgcagcaagccctctcagatgctcaatccttagcgatgggtaaagaccatacagctatagcaggtattcatattttgagtactttattggaagagccgtccaatattagtttgttgcaacaagcaggtgcacggttacctgaacttaaacaaaagctagagcaggctttaaaagatgctccgactattgctaacccgacgggcgatgtcaatttaaacccagaagcagttaaagcactcaacttggcagatcgatacgcgcaaaaagctggcgatgaatttttgtcaactgactgggttttattgggcttggcagaaactggtgaaacaaaaaatattttaagtgccgtaggtgtaactcccgacagcttacgcaaagtaattgaaaatattcgaggtagtgacaaagtcatgagtaataatcacgaagaccaacgtgactcacttaataaatatacgattgatttaaccgagcgggctttatcggggaaacttgatccggtgattgggcgtgatgatgagatccgccgtaccattcaggtcttgtcacgccgtactaaaaataacccagtactcattggtgaacctggggtaggtaaaaccgctattgttgaaggtttggcacaacgtattgttaatggtgaagtaccagaaggcttaaagaataaacgtgttttatcgttagatttaggttcattgcttgctggtgctaagtatcgtggtgagtttgaagaacgtttaaaagctgttttaaaagatttggcgaaacacgaaggcgaaatcatcttattcattgacgagttacatacactcgttggtgctggtaaaggtgacggcgcgatggatgcaggtaatatgttaaaacctgcgttggctcgtggtgagttgcgctgtgtgggtgcaacaaccttagatgaatatcgccaatacattgaaaaagacgcagccttagagcgtcgtttccaaaaagtgctggtcgatgaaccaagtgtagaagataccattgcgattttacgtggtctgaaagaaaagtatgcgactcaccatggcgtacagattttagattcagcgattattgctgcggcgaaaatgtctcatcgttatattacagatcgtcaattaccggacaaggcaattgacctaattgatgaggccgcttctcgtattaagatggaaatcgattctaagccagaagcacttgataaacttgatcgccgtttaatccagttgaaaatgcaattggaagcggtgaaaaaagatgaagacgcaggcagtaaggccgaagttactcatcttgaaaaacagatcgctgaagtcgagaaagaatacaacgatctggaagaagtgtggaaagctgagaaaacactggtagaaggcactaaacaagctcaggttgaacttgataaagcacgtattgcttttgaaaaagctcagcgtgaaggcgatttggcagaagcagcacgtttgcaatatggtgtaattccagagttgcaaaaacaacttgaacaagatgaagttgctgaagaaaacgaagagccaaaactcattcgtacaaaagtaactgaaaatgaaattgccgaagtcgttagtgctgcaacaggtattccggttgctaaaatgatgcaaggcgagcgtgaaaaactccttcatatggaagagttcttgcatgaccgtgttgtagggcaagatgaagcagttgttgcggtatcgaatgctgttcgccgttcacgtgctggtttgtctgacccgaatcgtcctagcggatcattcttgtttttaggaccaacaggtgttggtaaaactgagttgactaaagctttagctaacttcttgtttgacagtgatgatgccatgattcgtatcgatatgagtgaattcatggagaaacattctgtcagccgtttagttggtgcgcctccgggttacgtaggttacgaagagggcggtgttttaaccgaagctgttcgccgtaaaccatatagcgtagtgttgtttgatgaggttgaaaaagcgcatccagatgtcttcaatatcttgctgcaagtgttagacgatggacgcttaaccgactcacaaggtcgtgtagtggactttaaaaacacggttattgtgatgacatcgaacttgggttcacaagatgtacgtgaacttggtgaaggtgcaactgatgatgaagtgcgtactattgtaatgaatgcggtaagtcagcatttccgtccggagtttattaaccggattgatgagctggtgattttccattcactcaaaaaagcacaaattcgtggcattgccgatattcagttggaccgcttacgctcacgacttgttgatcgtgatatgagtttaactgtagatgacagtgcatttgacttattgattgacgctggttttgatcctgtatacggagcgcgtccattgaaacgtgcaattcaacaacaggttgaaaatacactagctcaaaaaatcttgtcaggtgactttgttgcgggtgataccattttagttaaaggcgaaaatggtcacttagtgtttgataagctgaaactcagctaa

SEQ ID NO: 44066 - DNA, 753 bp, Acinetobacter baumannii
atggcggagttaccccaagactcaagaagacccggtggtattgcagttattcctttaacgtcggatattactcaggtcacttttcaacacaaaccggttttaattagccaagaaggacagcagcgttatgcagttttcggtattccgttatctactccacttggtagtgttcaactcgataccaataaagcccctattcaaatagaagttaaatcttatccatatgctgagcaacgccttaaagttaccaatcaagactatgtaaatcccaatcaaagtcaattagatcgttacgctcaagaagctaaagaacaaaatgatgtttatagttcatttacgcaaagttcgtggcaagccttaccaaaatttatacgcccaacttctggtaaatttaccaattcttttggaagaaaacgcttttttaatggtgaggaacgtgctccacattcaggtctagacattccagcaccaataggccaaaaagtagttgctccagcagacggcgtagtcgttcaaacaggtcattatttttttaatgggcaaactgtattaatcgatcacggtcaaggcttaattagtatgttttgtcatttaagcgagataaaagtagaaaaaggccaacatattcgtcaaggggaaactttaggtctagtcggtaaaacaggacgtgtcacaggcccccatttacattggggaatgagccttaacaatgcacgggtagaccctcaactttttctaaacaccactcattaa

SEQ ID NO: 44067 - DNA, 426 bp, Acinetobacter baumannii
gtgaatatccgtttagcacaatgggaagataccgagaccatatgttatttacttaaacaaatgggatattcacagcctttaaaagtagttcaggaacaatttcaaatactaagtaaagatcctaatgcgattacgttggtcgcagctgacgatttaaaagtgtatggagttttatcgctttattttattccacaaattgccttacaaggtgactttgccaaaatatgctatctgtgtgttgacgagaaaatgcgtagtaaaggagtggggcatttgcttgtacaagaagcagaacggatagcaaagcaacgtggttgtgaccgaatggaacttcattcggggatacaaagacctttggcacatcaattttacctaagagaaggctatgtcgaagcgccaaagtactttcgtaaagctttaaattaa

SEQ ID NO: 44068 - DNA, 423 bp, Acinetobacter baumannii
atgcaaacaagtgtacattggctagagaatgttgcttttgaagcgaaatcagagagcggtcatagtgtagtgatggatggctcacctgagtacggtggtgaaaaccgtggaccacgtcctatggagttgatattaatgggacttggtgggtgtgcttcgtttgatattgtgactattctaaagaaatcccgtcaagatgtgacgaatgtcgtatgtcagcttaaagctgagagagcagatgcaattccggcagttttcaccaagatccatttacactttgtagtgacaggtaaagctgtaaaagaaaaacaggtcgcaaaagcagtagagctatcagctgaaaaatattgttcagcaagtaaaatgctttcagatggtggcgtagaaattactcacgattttgaaattattgaagcagcgtaa

SEQ ID NO: 44069 - DNA, 708 bp, Acinetobacter baumannii
atgacttcaaatttttcacaactcagcacagatgctttatctccggggcaactacctgaatccgttaaagcattgttaaaacgtgctcacatcaacagatatccaaaacgaaccacaattgttgatgccggaacagagtcaaaatctttatatttaattttaaaaggctcagtttcaattattttacgtgaagacgatgaacgtgaaattgttgtggcatatttgaatcctggtgacttctttggggaaatggggcttttcgaaccgaaccctcaacgtacagctgaagttcgtacccgtgatgtctgtgaaattgcggaaatttcatatgacaacttccacgaactgagcaaacagtatccagatctcagctatgccgttttcgcgcaactcgttcgtcgtttaaaaaatacaactcgtaaaatgaccgatcttgcatttattgatgtgtcaggccgtattgcgcgttgcttaatcgacctatcttcacaaccagaagcaatgatcttgccgaatggccgtcaaattcgtattactcgacaagagattggacgcattgtcgggtgttcacgagaaatggttggccgtgtattaaagaccttagaagatcaaggtatgattcaaactgacggtaaagctattttgatttttgatacttcattagaagaaaccccagtcactgacgaagactatgatgacgaagaataa

SEQ ID NO: 44070 - DNA, 1050 bp, Acinetobacter baumannii
atgcaatttaaaccacttggtcacactggcattaaccttcctgaaatttgcttaggtaccatgacatttggtgagcaaaatactcaacaagaagctttcgaacaactcaattacgctttagaacacggtttatatttttgggatacggcagagatgtattccgtgcctcctaaaccagaaacatatggagcaaccgaaaccatcttaggcaattggtttgcacagcatggtcagcgcgataaagtattccttgcttcaaaaattgcaggtcccggctttggtggaacccatattcgagaaggccataccaagtttaatagtgaacatatttcacaagcaattgatggctctctcaaacgcttacaaactgattatattgatctttatcaattacattggcctgaacgccataccaacttctttggaacgctcgcttatggtaatcagcaagcccaaaatgattacgatactactcccttagaagaaacattactcgctctccaaaaagagattaatcgaggccgcattcgttatatcggcttatctaatgaaacaccgtggggcaccatgaagtttcttcagcttgctgaaaatttaggtgtgagtaaatttgtgagtgtgcaaaatccgtatagtctgcttaatcgcacctatgaaatcggtatgtcagaaattgccaaatatgagggtgtaggtttacttgcatactcccctcttgcttttggttatttaactggcaaatttagaaatggggctcgaccagccaatgcccgcgttacactcttccctcgctttagcagatacagcaacccgcaaagtgaatgggcaactgaacaatatgcacagcttgctgaaaagcatggtttaagcctgactcaattggctctggcttttattaagcagcaattttttgtgacgagtacgattattggtgcaaccaatttagatcagctcaaagaaaatatccaagcttttgaaatcgagctttcaccagagattttacaaggcattgagactattcatatacaacagcctaatcctgctccttaa

SEQ ID NO: 44071 - DNA, 786 bp, Acinetobacter baumannii
atgttaatgaataaaaagttcgttctaagcttgtgcgcagcaggtgcagtaacaatttctggttgtgccacaatggctgatatggcaggggcagatactgcaaccttaaatgctcaatctgcacaaagtttcaataaaatggtgcaggaagcgcgtggtaaaggtgctttagatacaagttcaagtacctataaccgtattaatgcggtttttaaccgtttaaaaccttatgcgaatcaaatgaatcagacaggccagccatttagttggcaattggctgtattgaagtcagatacgattaacgcttacgttgcacctggtggcaaggtcgtgttctacacaggtattgtaaataaactgaacttgactgatgctgaaattgcagcagttatgggccatgaaatgactcacgccttggaagagcatgcaaaaagtaaaattggcgcacaagctttaactgatttagcgttaaatattggcttaagtcagattaatggtggtaatgtgagtcaactaggcgcggctgcggctcagttaggcacgcaagtaggtgtgggtctgccatattctcgtagtttggaaagccgtgctgaccaaggtggtttaatgctaatggcgcgtgcaggttataacccgaatgcagcgattacgctttgggaaaaaatgaacaagcttgaaggcagtggatcatctttcttgtctactcacccatcaaacgctcaacgtattaatgacatgcgtaagaatttacctgcggcattagctatttataatggtcgtaagtaa

SEQ ID NO: 44072 - DNA, 318 bp, Acinetobacter baumannii
atgaagctgcaacccactatttcaaaaaccattttttattcttttttatttgctataggtggttcacccacattagcaatgctgattatttattgtcaaaattataatccggacttcttcatgacggcatttatgagtctttctgtcctgattgcttgtgtcctcatccctgttgttctcatacaaaacagttatttactctggaagaggaaaaatcctaatcttgaagagaaagttaagactttaagtcacgtttatcttggtttaaacataatatgtttaatattctggatttatttgatgactttatctaattga

SEQ ID NO: 44073 - DNA, 1320 bp, Acinetobacter baumannii
atgggcaaaaatgttgtggtacttggtacccaatggggcgacgaaggtaaaggtaaaatcgtcgacctgctcacagatcaggcggctgcggtagtacgttatcaaggcggacataacgcaggtcatactcttgtcgtaggtggtaaaaagactgtattacacctcattccatcaggcattttacgtgaaaacgtattgtgcttaattggcaatggcgtggtgctttcaccagcagcattaattgaagaaatgggaattttggaagctgagggtgttccggttaaggagcgtctacgcatttctccaaactgtccacttattttgcctaaccacattgctcttgatcaggcacgtgagaagaaacgtggtaacgctaaaatcggtactacaggtcgtggtatcggtcctgcgtacgaagataaagttgcgcgccgtgcagtgcgtgttgctgaccttgttcgtggtggtgcagcgttagaagaaaaactagccgaaatgctagagttacataacttccaattgactcagttctacggtgtagaagcggttaaatttgaagacgtattggctctttgcaaccaatggcgtgaagttcttgctccattagtgattgacgtaactaaagtattacatgactaccgcaaagaaggtaaggctgtaatgtttgaaggtgctcaaggttcacttctagacatcgaccacggtacttatccgtatgttaccagctcaaatacaactgctggtggtgtaagttctggttcaggtatgggtcctttacatcttgattatgtattaggtattacgaaagcttatacaacacgtgtaggtgctggtccgttcccaactgaattggtttacgatgctgcaagtgattctggtgacccaattggtaaacatttgggtactgtgggtcatgagttcggtgcttctactggtcgtcaacgtcgttgtggttggtttgatgctgaaatcttacgccgttctgtagatgtaaactcactttcaggtatttgcttaactaaacttgacgttttagacggtttagaagaagtgaaaatctgtgtgggttatgaaaatacagattcaggttgtgtaggttcttctgatgcggtttccttcgaatgcttgaagccaatttatgaaactatgccaggttggagcgagtcaactgttggtttaacgagcattgaccaattacctgcaaatgctttggcttatgtaaaacgtattgaacaattaatcgaatgtccgattgatatcgtttcaactggtccagaccgtgcagaaacaatcattttacgtcatccattctctgcgtaa

SEQ ID NO: 44074 - DNA, 1167 bp, Acinetobacter baumannii
atgaccatttcagagacatggttgctgcctgacggggtagcagatgtattgccggaacaggcgcaagtcattgaaaaacttcgccgtgaagctatagatttcctcgcagtacgaggttatcaactggtatatacaccatttatcgaatacatcgaatcgttgtcttcattatcagaatcaaatcaagacctggatttagtaacttttaaggtgattgaccagctttcaggccgtttactcggtatccgtgctgatatgacaccgcaagttgcacgtattgatgcacatgtaagacctgttgaaggtgttgcacgttactgttacgcagggactgtattacatacaaaaccacaaaatttcaatgcgactcgcgcacctttacaattaggcgcagagttatatgggcacgatagtattgaagctgatgtcgaaatggtcgacgtgatgcttggtttgattgaaaatgcctatactttacaaggcgcacatttagacttagggcatgtaggcctatttcgtagcttagtaaaatatgctggtctttctaaaaatgaagagcatgagttatctgatctttatcaaagaaaagcattacctgagttagctgaatttacccaaaatttaaatatgggttcagatttctatgcacttggccgttatgcaagtgatttagatgccttacaagcgcatttaagtgcagatattttaaaagatactgaatttgatgctgcattaaatgcacttaaaaccactctcgaacagattaaaaaccgttggccagcacttaatgttggaattgacgtggttgagcttcgcagttaccactaccacactggtttgatgtatgcagtttatgcaccaaatcgtgccgcacctttagcgcaaggcggccgttatgatggtattggggaacacttcggtcgtgcacgtccggctaccggttttagttgtgatttatatgctttaggtgcgaaccagtttgccgaaatcgaaactgtagtggcacctaaaggtacagaagctgatttacttaaagcaattgcgaatgcgcgttcagagggtttacgtgtagttcaattgttaggtaatgatgatttaagttctattccttatgcaacacatcaattggtattgcaaaacggacaatggaatattgaaaagatttaa

SEQ ID NO: 44075 - DNA, 1026 bp, Acinetobacter baumannii
atgcaacgtatcgccattaatgggtttggccggattggacgtaatgttttacgtgcctggtttgagagcccgaaacaatttcattttgaaatcgtggcgattaacgatatagcagatgtacatacactggtacatttattcaaatatgactcaacccatggtcgttttaatggcaaggttgatatcaccattgaaaatgaaaagatttatttaaatattcaatctaaccagagactcttaaaggttgaagttttgcagcaaaaacagccggaacttttaccgtgggcaagtttaaaaattgatgttgtacttgagtgtacaggtttattccgctcccatgctgatgctacccgccatttagaagcaggggctaaaagggtcattattggcgctgcgccttttgatcatgttgatgctgcaattgtttatggtgttaaccatgctgatgtgaaagcgactgatcagattatatcgagtgtgtcatgtacgacacaggctttagttccactggttaaaatcattgatgatgcatttggcatagaaacagcgcttatgacggaaattcatgcggtaacagcagatcagtctgtgcttgatcatgcacatcgtgatttgcgtcgtgctcgagcttctgggcaaaacattatcccgactacttctagtgcgcttggtgctttaaagcgtgtgatgccaaaaatggaagaccgtattgatggttactcaattcgggtacctaccattaatgtagcggcaattgatttaacgtttatcgcgcaatctccaattacggttcatcatattaatgaattgctaattaaagcatctcaaacagattatgcagaaattatggctgtaacagatgaaccattagtttcaagtgattttaatcattcgccttattcacttattgttgatttaactcagaccatggttgttggacatcaagccaaagtatttgcttggtatgataatgaatggggctatgcaaatcgtttattggatttatgcgattcttttaaaagttaa

SEQ ID NO: 44076 - DNA, 2637 bp, Acinetobacter baumannii
atgacatctgctgaaattcgtgaagcatttttgcgctactttgaaacgcaagggcatacacgtgttgcatcgagttctcttgttcctgccaacgacccaactttattatttacaaatgctgggatgaaccagtttaaagactgttttttaggtcttgaaaaacgtgattatgtacgtgcaacaacatcacaaaaatgtgtacgtgcaggtggtaaacataacgatttagataatgttggttatacagctcgtcaccatacattctttgaaatgttgggtaacttctcatttggtgactatttcaaacgtgatgctctcaagttcgcatgggaatttttaactagcgaacaatggcttgctttaccaaaagataaactttatgtcacggtttaccatactgatgacgaagcttatgacatctggaataaagaaatcggcctagcaccagaacgtattatccgtattggtgataacaaaggcgaaaaatacgcatcagataacttctgggcaatgggtgatacaggtccttgcggtccatgttcagaaattttcttcgaccacggtgaacacatttggggtggtttacctggttcacctgaagaagacggtgaccgtttcattgaaatctggaacaacgttttcatgcagtttaaccgtactgctgatggcgtacttcacccactccctgctccatctgtagatacaggtatgggcttagagcgtatttctgccgtattgcaacatgttaattcaaactatgacattgacctgttccaacacttattaaaagctgctgcaaacatcattggtattgaagatgaaggtcagccttctttacgtgtagttgcagaccatgcccgctcttgctgcttcttaattgctgatggtgtaaacccaagtaatgaaggacgtggttatgtattacgtcgtattatccgccgtgctgtccgtcacggtaacaagcttggcgcaacaggtacgttcttctacaaaatgttgcaaccattaattgaagtaatgggacaggcttatcctgaattagaagctcgccgtgaagtcattgaagcaacattaattcgtgaagaagaacagtttgctaaaaccttagagcaaggtttaaaacttcttgaaggtgaacttgctcagttaaaagataaaactattccgggtgcgactgtatttaaactttacgacacttatggtttcccaacagatttaactgctgatattgcacgtgaacgtggctttattattgatgaagcaggttttgaagttgaaatggctgcacagcgtcaacgtgcgcgtgatgctggtaaatttgccgttgactataacaacattgtaaaagttgaaggcgaaactcaattcgacggttataccaacacaaccggtcaaggccagattgtagcgatctataaagatggcgtacaagttgatgaagtttctgaaggcgacgaagcacttatcgttttaaaccaaactcctttctatgctgaaagcggtggtcagattggtgatactggtatcttcaaaaacgaaacaggtatttttgaagttcaggatacgaaaaagtctggtggcgcctttgttcatcaaggtattgtgactgttggtaaccttaaaaccagtcaaaatgtagaagcgattgttaaagcagacattcgtgaagctactgcgcgtaaccactcagcaactcacttgttgcatgctgcccttcgtcaaattttaggttcgcatgtacaacaaaaaggctctttggttgcaagtgatatcttacgttttgactttgcaaatgaccaacctgtgtcatttgaacaactacaacaagttgaacgtctcgtaaatgctgaaatcattgcaaatactgccgtaacaactgaactactcgacattgaaactgcgaaagcaaaaggtgcaatgatgttgttcggtgaaaaatacggtgatgaagttcgtgtgctctctatgggctctgtcattgacgagaaaaacttctcaatcgaactttgtggcggtattcacgtaaaacgtacaggtgatattggtttattcaaaatcacttctgaaggtggtgtagctgccggcgtacgtcgtattgaagcagtgaccggtactaaagcattagaagtagtacaaaaagctgatcatgatatccagcacattaatagcttattaaaagcacagaaagaccaaacggttgagcgtgtacaagctaatgtagaattggtttctgcattacaaaagcagattgaacaactcaaccaaaaattggcaaacttccaagcggctgatttgattgaccaagttcaaactattgctggtcgtcaaacgcttattactactgttcagggtgttgatgccaaagcgcttcgcaacttacatgacagtgtaaaatcaaaattagagaacgcagtgattgtgttagcaggtgtagagggtgacaaagtcagcctgcttgcatcagtcgcgtcgcaatacactgcaaatctaaaagcaggtgacatcatcaaacatctagcgaccgagttaggtggtaaaggtggtggtaaacctgacttagcacaaggtggcgcgccacttaacgagaagtttggacaagttatggcagcattacctgcttggcttgaacaaaaataa

SEQ ID NO: 44077 - DNA, 1281 bp, Acinetobacter baumannii
atggcattaatcgttcaaaaatatggcggtacttctatgggtacccccgagcgcattttaaatgttgctcgtcgtgtgaagcgttggcatgatcacggtcacaaggttgttgtggtcgtatctgcaatgagtggtgaaacaaaccgcttacttgccctcgctaaagccattaccgaaacacctgacccacgcgagttagaccaaatggtttcaaccggtgaacaggtgacgatttccatgttagctatggcacttaattcgattggtgtggaagctaaatcctataccggacgtcaagtcggtattaaaactgacagtgcatttactaaggcgcgtattgagtcgattgacacagatgtcatgaccaatgacctagatgcaggccgtgttattgtagttgcaggcttccaaggcttcgatgccaacggaaatactacaactctaggacgtggcggttcagatacttctggtgttgccattgcagctgccctaaaagcagatgaatgccaaatttatactgacgttgatggggtttatactacagaccctcgtgttgcccctaaagcgaagaaaatcgatcgcatttcttttgaagaaatgctagaaatggcatcattaggttctaaagttttacagattcgctcagtagaatttgccggaaaatatcaagttcctttacgcgtattatcaagttttgataatgatgacgacggcgcatttgacgacgaatttaaagaaaatgtaggtacactcattactactgaggcagaagacactatggaacagccaatcattgcaggtatcgcttttaaccgtgacgaagcaaaattaacaattttaggtgtacctgatgaaccgggtattgcttctaaaattttatcaccagtaagtgatgccaacattgaagtggatatgatagtccaaaatgttgaagaagatggcacaacagatttcacgtttactgtaaaccgtgttgatttagcaaaagctgaaaaaatcttaaatgaaactgccaaaaatattggtgcacgtgaagtttcaacacgcgatgacatcgttaaagtatctatcgtgggtgtaggtatgcgctcgcatgcgggtgtagcaagcaaaatgtttactgcccttgctgacgaaggtattaacatccttatgatttcaacatctgaaattaaggtttctgtcattattgatgaaaaataccttgagcttgcagttcgttgcttacataccgcttttggtttagatcgtgaacatggtgaaagcagcgcacgcgcttaa

SEQ ID NO: 44078 - DNA, 255 bp, Acinetobacter baumannii
atgctgattctgacccgccgtgtcggggaaacattaatgattggggatcaagtcagtgttactgtgcttggcgtcaaaggaaaccaagttcgaattggtgtaaatgcaccaaaagaggtttctgttcatcgcgaagaaatttatcaacgtattcaacatgaacgtgcaatgcatgaacaccttcaacatcttgatcaagattatcaagtttcatatgaagatgataattatgtacagaaaaacttcaatcgttag

SEQ ID NO: 44079 - DNA, 567 bp, Acinetobacter baumannii
atgtttgttgcaggcgtagatgaggcaggacgaggcccattagtgggttctgttgttgctgcagctgttattttagatccgaataatccaattttaggattaaacgactctaaaaaattaactgaaaagaaacgtgaaaagttgtttattgaaattcaagaaaaagctttagcatggtcaatagcagaagctacacatgcagaaattgatgagctgaatatcttgcaggcaacttttttggctatgcaacgtgcagtggaaggtctgaaaacacaacctcaaaaggtaattgtagacggcaatcaaatccccaaaggaattattattccttgtgaggcgattgtagggggagatgcaagccatgccgaaattagtgcggcgagtatcttggctaaagttacgcgtgatcgtcaaatggcagaattagatcaacaatatccattatttggttttgccaagcataaggggtatccaaccaaagcacactttgaagccattgctgctcatggcgtgattgatcaacaccgtcgtagttatgcacctgtaaaacgggcattaggactataa

SEQ ID NO: 44080 - DNA, 390 bp, Acinetobacter baumannii
atgaaaaaattgatgctcgctgtagcaccagttgttttagctttaactgcatgtgcaaccactacaggtaccggtactggcggtgcttctgcacaaacaacaactcaacagttaggcgtagctgcattaaaagttgctgttaatgcgaaatgtattacagaaattaataatgttgctgcatggaagacagcaacaaaatatatgactgctgaacagcgtgatagcatccaaacgaatgtttgcggctgtgtaagtgaaaaagcaccaaatagtgtgactgcagtagaattagctgctgctgcgcttgacgtgaatgcacgtgctacaatcgtaaaccaagtggtttctaaaactgtaaatgcttgtgtggcagaagctttacaaaaataa

SEQ ID NO: 44081 - DNA, 558 bp, Acinetobacter baumannii
atgcctgcctcaacctctcaatactacacccgtactgcacagattctgcattgggtcatggccatcatttttatcactgcttgggtgattggtttctatagtggaaattttctaagttatgacgttgatggcagctttaaaggcgatgtcattacgctacataagaatatcgccaccaccattatcttcctcgtggtcattcgtctgctttggcgttacacccatcctgccccacaattgcctgacacgatgtcaccaacaatgaaaactttagctcacatcggacatttattactgtttgtgattttagtcgctttaccagtcactggttgtttatttagctggagtgctggtcaccctgctccggttttatatttatttgaaattccacgcctggtgcaagataaacctgagttattagccattgttaagccattacatatttatatttcatggtttgcaggtttacttattgctggacatgtacttgcagctttaaaacatcactttgtagataaagacaatgttttaaacagtatgaccaaacaacctaaataa

SEQ ID NO: 44082 - DNA, 1422 bp, Acinetobacter baumannii
atgtgggaattatttgtaattctactttcgcttgggctgttgatgtatacagcttacaagggcttttctgtcattctcatggcaccaatttgtgccttacttgctgttttactcattaacccagccaatgtcttaccattttattcgggtgtatttatgcccaaaatggtgaactttattaaagattactttcttgtgtttttgctcggggcaattttcggtaaagttgttgaaatgtcaggaattgctgagtctattgcacgaaccattgtgagatggattggggcaaaaaaagcaattttaacggttgtattactaggtgcaattttaacctatagcggtgttagtttatttgttgctgtatttgcaatttatccctttgcaaaccaactatttagacaagcgaatattccaaaacgtttaattccaggaaccatcgcgcttggtgcatttacatttaccatggatgcattgcccggtacaccacaaattcaaaatgtaattccgaccactttctttggcaccaatatttatgccgcaccatttctaggaattattggtgctatttttgttctatgcatggggttggcttacttagaatggcgtcgccgagctgctgcaaaagctggcgaaggcttctcgggttttggcgtagacaatacgtcatctcaagaaattgaagccgatatgaacttgcaaaataatggaagtacggctcgtcagtttttagcgtttgtgcctctcattcttgttgccgtaatgaacaaatatttgtctaaagcaatcaaagagtggtatccaaatggttttgattttgccgcagttggattagcggattacaccgtagacgttgcaaaaactggtgcgatctgggcagttggtcttgcgctgattgtcggaattattactgcaattttatttgattaccaacgtgtcgtgacgaattttaaagaaggcattaatgccagtattggcggctcacttttagcagtgatgaataccgcatctgagtatggtttcggtgcaattattgcgtcattaccaggctttgccatgattagtcatgcaatgagcagtacttttacaaatccattagtcaatggggctgtgacaacaactgttttagcaggtattactggttcggcttctggtggtatgagtatcgctttaagtgcgatggctgaacaatataacgccgcgattttagctgcgggtattccaccagaagtcatgcaccgtgtggttgcaatggcatcaggcggtatggataccttaccgcacaatggtgctgttatcactttactcgctgttacaggtttaacccataaacaatcgtataaagatatttttgcagtcacggtaattaagacattagcggtatttgtggtgattacggtctttaccgtaacgggtattgtttaa

SEQ ID NO: 44083 - DNA, 786 bp, Acinetobacter baumannii
atgacaaaacttttagacggtaaggtcgcttttattacaggttctgcaagtggtatcggtctggagattgctaagaaatttgctcaagaaggtgccaaagttgttatttctgatatgaatgccgaaaagtgccaagaaacggcaaactcacttaaagagcaaggttttgatgcattatctgcaccatgcgatgtaactgatgaagatgcttataaacaagccattgagctcactcaaaagacctttggtacggttgatatcttaattaataatgctggttttcaacatgttgcacctattgaagagtttccaacggctgtttttcaaaagttagttcaagtcatgttaactggggcatttattggtattaaacatgttcttccaattatgaaagctcaaaaatatggccgtatcattaatatggcctctattaatggcttgattggtttcgctggaaaggctggttataatagtgctaaacatggcgtaattggcctaacaaaagttgcggcattagaatgtgcacgcgatggtattacggtaaatgcactatgtccgggttatgtagatacaccattggtccgtgggcaaattgctgatttggctaaaacccgtaatgtgagtttagacagcgcacttgaagatgtaattttggcaatggttcctcaaaagcgtttgctctctgttgaagaaattgctgactatgcgattttccttgcgagtagcaaagcaggtggggtaacaggccaggctgttgttatggatggtggttacaccgctcaataa

SEQ ID NO: 44084 - DNA, 987 bp, Acinetobacter baumannii
atgatatcactcagccaacagatggaactcaatcattattcacgcaaagctgaatttgcgcagaatctgatgtccacaatttgtggtgaacaccgtctagacacaatttacaaagataatctcgatttccactatgacggaatgcgtttgcccaataaaaaaatggcaatcggcacaatcagttatggtgcaaacgtcgctatcaacatttcaaatttaaaagcgtatagcattagtttacctatacaggggcgacaagctctcaacattcgtggtgcacattatcaatctgatgaaaacagaggcctaattgtttcaaataatgatcaacaagatctgattatcgataaagactgtagaaaatttcaggtggttattcctgagcgaagtatgcagattgtccttgcagatttactgaataaacctatagaaacgcctatcatttttaaccctgaaatgcacttagactctgagcaactgattggagcgtggtggaagaatattcagaattttttgcagctaaaatcacaatatagcaatttttatggtttacagatgttatctgaagactatgaaaattttgtaattaaagccttactattatctcaagaaaacaactactctgaagctttaaagtcactctcacatcaagatgagccagcttatattcgaaaggttcgtaattttattattgaacatgctcacgaagaaatctatgcagaagacttgcagcgtttggctggggtttcaaaatcaaaattgtatgatgaatttcaacaatactacggcaccagcccaatgtcgtatttgaaaaaatatcgtcttcaacaaatttacaaaatcttgagcactacaggagcagataaaaaggtttctatttcaaagcttgcgtatgactggggctttaaccatttaagccgtttttctcaagaatatcgtgaagaatttggagaaaacccaagtgagaccaaaggcaaaattttctga

SEQ ID NO: 44085 - DNA, 1344 bp, Acinetobacter baumannii
atgaaaacgatagatgcaaatacgattatcaaccgtgagaaactgtctccactacaatgggtggtttttatcctaggcttttttgtctttttctgtgatggtctagatacgggaattattggttttgttgctccggcattactagatgactggggaattaccaagcctcaacttgcaccagttttaagtgcagccttagttggcatgtcaattggtgcaatcatttcgggacccttagccgataaatttggccgtaaaggtattattgtttttacaagccttttattttccatatttacgattttatgcggctttgccaattcaacccaagacttaatgatttatcgctttattacaggtgttggtttaggcgcagctatgccgaatatcagtactattgtctcagaatatatgcctgtaaaacgtaaagcattccttacaggtcttgctggctgtggatttatgctaggtatttcttgtggcggtttgttgtcagcttatctattagaaagctatggctgggctaaagtgattattattggcgggagtattcccctcattttagtggttgctttattgcttaaattacctgaatcaacgcaatatttgattacacttcatcaacaagaaaaagcacagcgtatcttagaaaacattcaaggtcattctttccaagagcctgtaaaacttgttttaactcaagcagaaactgcatcggatgaaaatccggttaaagtggttttaggaaaatatctttggggttcaagcatgctttggctctgctgttttactagtcttttggtgttctatcttttaacaagctggatgccaacgattttaaaaacagcaggtttcagtacccaacagtttagtttaattgctgcgattttcccttttggtggtgtaattggcgcaaccattatgggatggtacatggataaactgaacccaactacagtcattaaatattcatatctaattgctttcgtcctattcattgttgcaggtttggtgagctcaaatattttcttattgggtcttactattttcttaattggtgctttactcgctggtgcacagtcttcattactgccacttgcagctatgttctatccagcagtatgccgcgcggttggtgtttcatggatgcatggtattggtcgtatcggtgcaattttaggcgctttctttggctcgctcattttcactttcagcctaagcttaagcggtattttctttattctagcaataccaaccttcatctcatttattgcacttagcctaaaagtaatttatgagaaatctaaacacaaacaggtgttaaagctcgaagaaagtctataa

SEQ ID NO: 44086 - DNA, 1251 bp, Acinetobacter baumannii
atggctggtcaaaccattcaaattaaaactgcatctggaaagcagttcagtgcatatctagcgacgccagaaacaggaaaaggacctggagtggtgctttgtcaggaaatctttggggtgaatgcagccatgcgagaaaaagcagaatttcttgcagaagaaggctataccgttttagttcctgatctattttggcgtgtagcacctaatattgaactgggttacacaccagaagattttcaaaaagcttttgaactttatcagcaatatgacgaaaacctcggtgttgaagatattcaagacagcttagcttttttaaagacacgaccagaatgtgacacctctacaggcctcggcgtggttggctattgtttaggtggaaagcttgcatatcttgcaggttgtcgactttctgaagtggcatgtgccgtaggttattacggtgtaggcattgaaaaagctttagatgagttagctaacgtaaaaggacgtttggttttacatattgcagagctggaccaatttactccgccagatgcgagacaagcgattgtcgatgcagctaaccaatattcaaatgtacaagcttatgtttacgaaggtgttggtcatgcctttgcacgaccaaaaagcaaccattaccacaaaccttcagcacgctttgctcacgagcgtacagtaacagctctacatgaaacgattgggccgaaatatgacctagttgctttatgggaagagcatattcgtcatgagtttgatacacgtgatgtgccagcaaccatggcgactatggttgcagaaccttatgtcaaccatattcctaccttaactggtggggtaggccacagccagcttgcccgtttttatcagtaccattttgttcaccaaaacccaaaagatatgaagatcacctcgatctctcgtaccgttggctcaacgcaagtggtagacgagttcattatgagctttacccacgatgctgaaattgactggttattaccgggtgtaaagccaactggcaaatatgtcgaaattccaatgttaggtgtaattcagttcagaggttcaaagctgtgccatgagcatatttactgggatcaagcgtctgtactcgttcaaattggtttattagatccaacgggcttaccagttgcaggtgtagagacagcgcgaaaacttcttgatgaagaccttccttcaaatacgttgatgccatcttggtcaagtagtgaaggcaagccagtcaattaa

SEQ ID NO: 44087 - DNA, 786 bp, Acinetobacter baumannii
atgaatatagatttaaaaggaaaagttgctgtggtgagtggcggcgcgacactgattggtaaagctgttgtgcaagccttggtgagtgcaggtgctcatgtcgctattttagatattgatgccaaaggtaaggcgattgccgaaagctttaaccatgacgtgatgtttattcaaaccgatttaaccagcgatgcggctattcaacaagctgtggcggatattcaccaacatttaggtgaagtgagttacttggtcaatctggcatgtacctacttagatgacggttttaaatcttcacgtcaggattggttacaagcactcgatattaatctggtctctacagttgagctgagccgtgctttatacaatgacctaaaaaagcaacaaggttcaattgttaactttacttccatttcagccaaagtggcacaaacaggacgctggttatatccggtttctaaggcggcgatacgtcaactcacacaaagcatggcaatggattttgctgccgatggtattcgcgtcaattcggtttctccgggttggacatggtctcgtgtcattgcagaagtcagcggtaataaccgtgaaaaagccgatagcgtggcagccgattatcacttactaggtcgattgggtcatcccgaagaagtcgccaatgttgttttgtttttattgtcatccgctgcgagttttgtcaccggagcagattatgcggtcgatggcggatattcagtaatgggccctgaaggatcacagcccgctattccgcgtttagccgaatag

SEQ ID NO: 44088 - DNA, 1239 bp, Acinetobacter baumannii
atgcgccgtattgcaattgttggagcaggacagtctggtttacagcttggtttaggcttattagatacaggttacgacgtaaccatgatcaccaaccgaactgccgatgaaatccgtcaaggtaaagtcatgtcaagccagtgtatgtttcataccgctttacaaactgaacgtgacttgggactaaatttctgggaagaacaatgtccagccgtagaaggcattgggctagctttagtgaaccctgaaaatggtagtaaagcatttgaatggagcgctcgtcttgagcgctacgctcaatcggtcgatcaacgcgtcaaaatgccatattggatggaagaatttgaacgccgtggcggtcgattggtaattcaagatgtaggaatagaagagttagaacaactcgcaaacgactacgagcttgtactgctcgccgctggtaaaggtgaagttgttaaacagtttgaacgtgatgatatacgaagtgtttttgataaaccgcagcgcgctttggctttgacctacgtcaaaaacatgaagccaatttcaccttattcacgtgtgacttttaacattattcctgaagtcggggaatacttttcatttccggcactaaccatcaatgggccttgcgacattatggtatttgaaggtattccaaatgggccaatggactgttggcaagatgtgaaaacaccagaacagcacctgcaatgtagtcttgacttactcaagaaatttgtgccttgggaatatgaacgctgcgcaaatgttgaattaactgatgctggcggttatttgacagggcgtttcccgccgacggtacgtaagcccgttttaaccttaccgtctggcaaaaagatttttggcatggcagatgccttagtggtcaatgatccaattaccggtcaaggctcaaacaatgcggctaagtgtagcaagatctattttgatgccattttagccaatgataatcaaagctttagcgaacaatggatggttcaaacttttgaacgctattgggcttatgcagaaaaagtcgtggcttggaccaatagcttgttattaccaccagagcctcatgtcgttgaactcctagcagctgcaagtcagaaccagagcattgcttcaattatggccaataactttgatgacccgcgcgcctttgctccgtggtggtttgatgcaaatcaggctcaagtattcttagcttcaaaaaacacagcaaaagtggcctaa

SEQ ID NO: 44089 - DNA, 531 bp, Acinetobacter baumannii
atggacacaattgacactttagctttacaagcgattaatgccgaaaacccaagagaaattcgtaatttgcttggtcagtttgcaactggcgttaccgtgattaccactcgtggtaaagatggccggaaaataggtatgacagccaattcattttcatctctgtcgttagatccgccattaattttgtggagcctttcaaaaacggcgccaagtttgcctgattttgtagaagctgaatattttgctattcacatgttggcacaagagcatcatcagctttcgggacattttgctcgaggtgcggaagataaatttgcaggcattgcccatcagcaatgcaatgcaggcgttccaattttgacggatgcactcgcaaccttggtttgccgtaatgtaaatcagtatgaaggcggagatcacctgatttttattggtcaaattgaacaataccaacagcgtcaaggtgagcctttagtattccacgcaggaaaatatcggattgccgctgagcatccagaattagcacattaa

SEQ ID NO: 44090 - DNA, 948 bp, Acinetobacter baumannii
atgaaaagtactttaattaaacatggctttttagcagggacattattaggtttgccgtgggttacacatgcctatgatttaccgaccgtaaatttaggcatgaccagctttctcgatggtggattacctgcagggcccggctggtatgctcaaacctattttcaaaattatgatagcaataaactggttgatgccaatggacaaaaactcggtttacctaaaacagatttaaattatcacgtactggttgagcagattagttatttatcgaatgtccgagtaaaagataaagccagcctaggtatgaattttttaattccttttgtcagcaaaatggacatggatgatggcttaaataatgctgctattaaggcccaaagtggctttggggacattatgatcggaccttttattcagttcgatccagtcatgggtgcgcaagggccgaagtttgtacatcgttttgagtttcaggtgaatttacctactggcgaatacgaccagcaaaaagatattaatccaggtaataacaccgtttcatttgacccgtattgggctgccacatattggtttaatccaaaatggacagtttcaacgcgtatccattacctctataactttaaaaatgatgacccaagctatgcctttgcaggtgcaaatgatatgcaagctgggcaagcaattcatgcaaacttcgcaacagactatgccattaccgaacagttccgtttaggactaaatggctattggctaaaacaaatcactgacaccgaagtcgatggtgaaaaagttaaaggtagacgtgagcaagtctgggcaattggtccgggtgcgatgtatagtttttctaaaaatgatcacttggttgcaaatgcttattttgagcaagatgctgaaaaccgaccagaaggaacacgattacaagttcgttatgttcatcatttctaa

SEQ ID NO: 44091 - DNA, 1059 bp, Acinetobacter baumannii
atgaaccaagccaactcccacgaactcaatggacgtcattttcaaaatgaatcgatctttactgatcataatttggtgttcgatcaccacgatttaagcgaaacctgccgcaatgtaggccaaatttttaaaccgcatgatcttaaaatctctcatcagaagcgagatttcagtgcaactatgcaccatgttaaaacaggcgcattgtctattagtcgcttggaatatggcgcagatgtcattattgaaccagatcatcttgataacttttacttaattcagattccaactcaaggctatgcagaaatcgagtttggttcgcaaaagtttatttcttattctcaagttgcttctcttatttcacctcagcaatctttacgtatgtgctggcatgcgaactcaccccagcttattctaaaagtgtcaaaggatgattttacttaccattgtcgacaacatattgccgattcagaaaataacttacttatttttgatccaaaattagatttttctacccaaggtggagcctattttttgcagctggttagaaccttaatggatgctttagcatgcgagcaacaccctctccatcatcctttagcctttaaacagtttgagtcaaatttatttaatgcgctcatttatggtcagcccaacaatgcattacataagcttgatcattataaagaaaaaacagtctctccttatttcgtgaagcgtacagaagcctatattaaagaacatttacatgagccgcttaatgtcgaaattttggctgaacatgcaggcgtgagcgtaagaaccctatttactggttttaaaaactatttggggaccaccccaatgtcttatttaaaagaattacgctttgaacaagctcatttagaactcatgcataatgaaaatctgtcggttactgacgttgcatttaaatggggatttacccatttaggtcgtttttcacaagaatataaacgccgttatggtgagttaccttcttctacccgccgttctggtcaaagtgaaggctcaggcttaattacttcaattttttcgtaa

SEQ ID NO: 44092 - DNA, 1029 bp, Acinetobacter baumannii
atgggacattcagttgcacttaactttgccgatggtaaaacctttttcatttcggtaaataaagatgaattgctgcttgatgcagcagttcgtcaaggaattaacctgccgttagactgccgcgaaggtgtttgtggtacctgtcagggacagtgtgaaaccggcatttatgaacaagaatatgttgatgaagatgcattaagtgaacgtgatttggccgagcgaaaaatgttagcttgccagacgcgtgtaaaatcagatgcagctttttatttcgatcatgattctgctatttgcaatgctggtgataccttaaaaattgaaaccaaagtgactgcggttgagctggtttcagaaacaacagcaattttacatcttgatgcgagcagtcatgctgaacaacttcagtttttgccgggtcaatatgctcgtttgcaaataccggatactgaagactggcgttcttattcttttgcaaatagaccaaatgcgaccaatcaattgcaatttctcattcgtctcttaccagacggtgtgatgagtaattacttacgtgaccgttgtcaggttggacaacgcctacttattgaagcaccgcttggtagtttctatttacgtgaagtagagcgaccgctggtttttgtggcaggtggaactggtttatcagctttcttgggaatgcttgataacttggttgatcagcctaactcacctgcagttcagttatactacggcgtaaatagtgaaaccgacttgtgtgaacaacagcgtttacaggcctatacagaacagctacccaactttagctatcacccgattgtgactaaggcaacggaaacttggcaaggtaaagctggttatatccatgagcacttaaataaagatcaactggccgagcaagcttttgatatgtatttatgtggtccaccgccaatgattgaagccgtgaaaaattggttagatgaacaatctttgcaaaactatcgtatttatagcgagaagtttttacagagcaataccccacgttaa

SEQ ID NO: 44093 - DNA, 492 bp, Acinetobacter baumannii
atgtcacaagaactacattttgctgtatctcagtttttgtacaaaaaggcagagctttgtgatgcttatgactgggatgcctacctagagctttacgatgaagatagtgaatatcatatcccacagtggattgatgaccataactatgttcaagatccaaatcagggcttgtcttatatttattatgcggaccgtactggactcgaagaccgtgtattccgtattcgtaccggaaaagcagcatctgcaactccgttaccacgtactttgcacagcataaacaacatccgagttaaaacactggaagatggtcttatcgaagcaaaagttgcatggcaaacgctttataatcgtcaaggtttagaaggctgtttttacggacacgctacttatcttttgcgtcaaaccgcagatggtttccgcattcgtcgtcagcacagcattttgctgaatgacaaaattgattccgttttagacttctatcacgtttaa

SEQ ID NO: 44094 - DNA, 1416 bp, Acinetobacter baumannii
atgacctcatctaatttaaaacaatggaatgattttatagatggatgtatcgacttccgtcctaacgatggcgtgttccgtattgcacgcgacatgtttaccgagccagaactatttgacttggaaatggaatttatttttgaaaaggtttggatttacgcatgtcacgaaagtgaaattccaaacaatcatgatttcctaaccgttcaaattggccgccaaccgattattgtaagccgtgatggtaaaggcgaactacatgccatggtgaatgcttgtgaacaccgcggtgcgaccttaacacgcgttgctaaaggcaatcaatctacatttacctgcccgtttcatgcttggtgttataaatcagatggccgtttggttaaagtcaaagcgcctagcgaatattgtgaagattttgataaatcaagccgtggtttaaaacaaggccgtattgccagctatcgtggatttgtatttgtaagccttgatactcaagcaacagattcactagaagactttttgggcgatgcaaaactgttccttgatttaatggttaaccagtcgccaacaggtgaactcgaagtattacaaggtaagtcatcttatacctttgcaggtaactggaagctacaaaatgaaaatggtctagatggttatcatgtcagcactgttcactataactatgtctctacagttcaacaccgtcagcaagtcaatgcatcaaaaggtgccgaactcgacacacttgactatagcaagttgggtgcaggtgactcagaaactgacgatggctggtttagttttaagaatggccacagtgttttattcagtgacatgccaaatccgacagttcgtccaggctacagcacagttatgccatatatggttgaaaaatatggcgaaaaatatgctgaatgggcaatgcatcgtttaagaaatttgaacttgtaccctagcctattttttatggatcaaattagctcacagcttcgtattgttcgccctgtggcatggaataaaactgaagtcattagccaatgtattggtgttaaaggtgaatctactgaagcacgccgtaatcgtattcgccagtttgaagatttctttaacgtatcaggccttggtacaccagacgatttagttgaattccgtgaacagcaaaaaggttttcaggcacgacttgaacgttggagcgatatttcacgtggttgtcagtcttgggaatatggcgcgaccaaaaactcacaagatttaggcattcaacccgttattactggccgtgaatttacccatgaaggactctatgtaaaccagcatggacactggcaacgtctcatgctcgacggcttaaataaaaaagcgctgaaaatgcaggatattacttttgaaaacaatgccgtaatggatgaggtgtaa

SEQ ID NO: 44095 - DNA, 351 bp, Acinetobacter baumannii
atgaaagaacaaaacttaaaattacaaattagaattcttttagagcagaatattgcatttggtccgggtaaggcagacttacttgaagcaattgaaagaacgggatcgatctcacaagctgcaaaatctatgaatatgagctaccgccgtgcatggcaattggtcgatacaatgaatcagtgctttgaaacagctttagtagaaactcaaacaggcggaacacatggtggtggggcagctgttacagctttgggccagaaagtcttacagcattatcgtcaaatggaaaacaatgcccgacaagctttagagcatgattaccaaatcatgagtagttatttaaaaggttaa

SEQ ID NO: 44096 - DNA, 786 bp, Acinetobacter baumannii
atggtaagtgatacgaagataaaaaaattggctttagcctgttcagtcctcagcatcggattggtctttaatatctcagccaaggctgaatcagttactgtttatgcagcagcaagtttaacgaatgcaattaacgatttagaaaaaatttacgaaaaacagaataaagtagaagttaaaacttcgtatgcaggatcatcaaccttagctaaacaagttgaagctggagcaccagctgatatttttatttcagcagatacccagtggatggattatctacaaaacaaaaaacgagttgcagcaaatgaccgtataaatttattaggtaaccgtttggtgctaattaccccaaaagggcaatcattaatcataaaattagataaaaccacagatccaaataaagtatttacaggcaagatttgtacaggagataccaaaagtgtgcctgtaggcaaatatgctaaacaagcttttaccaatttaggttggtggagccgtattgagccaaagttagttgaaacagaagatgttcgagcggcattaaactttgttgcgcgtggtgaatgtcaggttgggattgtctatgcaaccgatgcagcgattagcaaagacgtgaaggtagcaggcgtatttccagaaaatacacattcgccaattatttatcctttagggttgattaaaaagaatccgagctcaacaaagttctatcaatttttacaaagcaaccaagccaaagctgtctttaaaaaatatggctttagcgtgttggctccagtcaagccatga

SEQ ID NO: 44097 - DNA, 693 bp, Acinetobacter baumannii
atgatgttttctctaaccccagaagagctcagcattctgcaactttcttgtaaggtggcagcgagttgtcttgtggttagtattattcctgcaatttgtgtgggatggtttttggcacgtaaagacttttgggggaagtcattcattgaaacattggtgtttttacctttagtactaccgccagtagttcctggttatttgcttttacaagtttttgggagccgcggcattattgggcaatatttggccccactcggaattgattttgcatttaactggaaaggcgccgttcttgcttcggcagtgatgggttttccactattggtgcaatctattcgtctagcgattgaactggtagatcagcgtttagaaatggcagcaaagacattaggagcttcatctttaggggcattttttcatgtcactttgcctcttgccagcagtggcattttaattggcgctattttatgtttttgccgcagtttaggggagtttggggccaccattacttttgtgggtaatatctcaaatgaaacacggactttgcctctagccatgtatagcttgatgcaacaacccgatacagaagccgctattcaaaggcttattgttttatcgttaagtgtggcttttttagcgctatggtttgcacagtggtttcatcggtatcaaaaaaagcgtttgggacggtag

SEQ ID NO: 44098 - DNA, 621 bp, Acinetobacter baumannii
atgttaattgattgccatttcaagctacatatgggtcagtttcatattgaacctagtttccagtcagatgctgctgttattggattatttggtccctctgggtcaggtaaaacatcaattttacatgccattgcagggctgaacactccgcgtagtgggcttattaaaatccaggatcaaacgtggtttgattcaaatcaaaaaattaatgtcagcacgcaaaagcggcatgttggattggtttttcaagatgctcagctttttccgcataaaacagtcaagcaaaatttattatttggtcttaagcgtctatcccaacaagaacgtcactttgaagcagattacattattgaattattaaagttagggcatttattacaacgtatgcctatcaaactctcgggtggggaaaagcagcgcgtggcactaggtcgagcattattatattcgcctaagctgttactgcttgatgaaccattatcagcattagatgcgaaccataaagctgaaattattcctttttttcagaaagtaaaagaggaaattaaaattccgatgatttatgtaagtcatgatattcaagagattaaacaactgaccgaaacaatgtggattttataa

SEQ ID NO: 44099 - DNA, 771 bp, Acinetobacter baumannii
atgcgctctaccatcgtggtcacaggtgctgcaagagggataggagcggctatcgccaagcaactactagatcagggctatcatgttattggtattgactgtcaaaaaaatcctgaacaatgggatatcagtaaaacaatgacgtcagatcaatcttcacaatggcaaggcatctcacaagacattacccatcaacaagaaacacaaactttaatttcagagctgttagaaaaatacgaaattacggggttagtaaatgcagcaggagtattaattatgcgctccatgcttgaagcaaaaacggaagattgggaaacactttttgcggtcaatgtcatggcgcctatcgcgatcagccaacaagttgctaaacatttttgtggaaaaaagcagggtagtattgtcactattagttcaaatagtgcgcgtatgccgcgtatgcaacttggtatgtacgccaccactaaggctgcactgagtcatttttgtcgcaatctggcacttgaaatcgccccttatcaagtcaggctgaatatcgtttcacctggatctactctcactcaaatgcagcaacaactctggacagataatacacctccacctgcagtaattgatggtgatttaagccagtatcgaacaggaattccattaagaaaactcgcgcaaccagatgatattgccaataccgtgagctttttactttcggaccgagcggcccaaattacgatgcaagaaatagtggtagatggaggagctgcacttggggtttaa

SEQ ID NO: 44100 - DNA, 642 bp, Acinetobacter baumannii
atgagtattccaaagattgcaagttacagcatgccccaagcgcacgaatttactccaaacaaaacaaattggccactacataccagtcgagctgttttattggttcatgatatgcagcaatattttttagatttctatgatctaacccaagaacctattccagaactaattcaaaacaccaaggcattaattgatgctgctcgccagtctaatattcccgttgtctatacagcacaacctggtaaccaatcacctgaatatcggcagttattaaccgacttttgggggcctggtttaaaggatgagccaagcatcacacagatttttccgaaaatttcacctcaaaaaaatgatacggtacttactaagtggagatatagtgtttttaaattttctccgctcgaacaactcatgcgtgactctggtcgcgatcaactcattatctgtggggtatatgcacatattggttgtctaatgagtgctgcggaagcatttatgctaaacatacagccatttttatgtggtgatgcgctggctgactttagcagagaagagcacgatatggcattaaaatatgccagtacacgatgtgctcaagtcatgacaacacaacaagtaatccaagcatggatacaagaataa

SEQ ID NO: 44101 - DNA, 402 bp, Acinetobacter baumannii
atgacgacaatatcaaaatcattattaaatggattaccgataaaaaaatcgagggtacaagtttttgagattttaaatcagaacccacaagggttaagcgcggtaagtatctatgcgcaaattaaaaatgaacataaaattacgttaggtaccatttatcgaattttatctgagtttgaaaaccgtaaaatcatcaaaagggtgtttttaggaaaaagtaaaagtatttataagcttagaaaagacaagatgagctgtaacctcatttcgctcaaaacctctgaagccttgaactttgaaaatgagaaagttaaagaattacttcatgaggttacggatattatttttgcaaacaccggagtcgacattagtagtgttgaacttaatctttatactgaataa

SEQ ID NO: 44102 - DNA, 1782 bp, Acinetobacter baumannii
atgacgactttaaacatactatttaagacaacatctttatgtctggcaatggtcttattggtaggctgtaatgataatgatgacaatgattcaagcacaccagcaccgcgaagtaaccaaactgtaaatattttagctttcaatgactttcacggaaatttagaaccacctaaacgttacgttgaagcagcgaatccaaatgatgcatctcaaactgtacgtattcctgtcggtggtgtgagttactttgcagatgcaattaagaaacttaaagctcaaaatcccaataatgctgttgtgtcagcaggtgacttaattagtgcttccccactcacttcttcgttatttctagatgagcctactattgaagtcatgaatgatattcaaattgactttaatgcggttggaaatcatgagtttgaccgtggtacagatgaattgcgtcgtttacaaaatggcggttgtcaacaatataccagcactgccccatgccaaattaataaaaactttagcggcgcaaaattcaatttccttgcagctaacgtggcaatgaaaaatgatacaagtaaaacgatttttcctgcctataaagtcaaaacttatggcgggattcctgtagcttttattggtttaacactcaaaacgactccaagtattgtttcagcggcgggtattaaggatgttgaattccgtgatgaagcggatacggtaaatgcgttaattcctgaacttcaaaaacaaggtattgaagcgattgtcgtcgttgtccatgaaggtgcagcgccaagtacgaaactcaatcaaaaaacatgtgatggcttaagtgggccaattttaggtattttagatcggttaaatccggcagttgatattgttgtttcggggcatacacatcagtcttatatttgtgattatgcaaccaagaatccagctaaaccatttttactaacctcagctggccaatacggcacgcttattaccgatattaaggtggagttggatggtaaaactggcgatatcattaaaaaagatgctaaacaaattccggttcaaagtgaggcctatacttcgggtacaaccactgtaagtctgacagacctctatcaaaaatttagtaaaacgccaagtatcgaagcgattttagataaataccgtcaagcagtaaccacaatttctggacgtgttgttggaacttctactgccgttgtgagccgtacacaagtcgaaagtggtgaaagcccactaggtgatatgattgccgatgcacagcaagctgctgctcttcaagcaagtaatcaaggttcggattttacgttaatgaacccgggcggtgtacgtgctgacctactgattaacagcagtaaccagattacgtttggtgatatttttgcagttcaacctttcggtaactcgattgtgactttgagcttaaccggtaaacagattagagatgtgcttgaacagcaatggtctggtgcaaatgcaaattcgcctagaattttacagccgtctaaagagttgagttatcaatatgcggcaaatacatctgtttcaccacgagcaagtaacatcatggttgctggttcaccattagttgacactaaagtatatcgtgtgacggtaaatagtttcttggcagatggtggtgacaactttacggtattaaaagaaggccaaaaccgtgtcggtggtggtcaagatatcgatgcgcttgaaagctatgttgctaagaactcaccgttaattattccggctacgactcgtattaaagtcattaaataa
